United States Patent Application Publication US 2014/0259212 A1 - sequence listing, part 7

SEQ ID NO: 17843 - DNA, 2518 bp, Arabidopsis thaliana
  CDS (172)..(2400)
  misc_feature (2073)..(2073): b is g, c or t
acacaattttcacccattttcatgtctcttcctaccaaacgctctactttctccgccgcttctgcctccgacgactcttcttactcttctcctccgatgaaaaaggccaaaaacgacctccaccattcccctcaacaccctaataccgccgacaaggttgttggctttcatatggaggaagatccaactcccgccgccgctaatctctctcggaagaaagctacacttccgcaacctactaagaagtttgtaatcaagctcaataaagccaaaccaactctaccaacaaactttgaggagaatacatgggagaagttgcagtcagctatcagagctatattcctcaaaaaaaaaatttcgtttgacctcgagagcctttaccaggctgttgataacctttgcttgcataagttggatggaaagctatatgaccagattgagaaggagtgtgaagaacacatctctgcagctttgcaatctttagttgggcagaacactgatctgactgttttcttgtcacgtgttgagaaatgctggcaagacttttgtgaccagatgctcatgattcgtagtatagccttgactctggataggaagtatgtgatacagaatccaaatgtacgttcattatgggagatgggtttgcagcttttccggaagcatctttctctggcccctgaagttgagcagaggacggttaaaggtctcttaagtatgattgaaaaagaaaggttagcagaagctgttaataggactctactaagccatcttttgaagatgtttactgcactgggaatttatatggaaagctttgagaaacctttccttgaagggacctctgaattttatgccgctgaaggaatgaaatacatgcagcagtctgacgttccggagtacctgaagcatgttgagggaaggttgcatgaagagaatgagagatgcatactctacatagatgcagtaaccaggaaaccattgatcacaactgttgaaaggcaacttctcgaacgtcatatacttgttgttcttgaaaagggttttacaacattaatggatggacgtcgtacggaggaccttcagaggatgcaaaccttgttttctagggtcaatgcacttgagtctctgaggcaggcgctaagttcatatgttcggaaaactgggcagaagattgttatggatgaagagaaagacaaagatatggtacaatcactgttggacttcaaggcttctcttgacataatatgggaagagagcttttacaagaacgaatcatttggtaacacaatcaaagattcgtttgagcatctgattaatcttcgacagaaccggccagctgagcttattgccaagtttttggacgagaagctccgtgctgggaataagggtacttctgaagaagaattggagagtgttcttgaaaaagtcttggttttgttcagatttatccagggtaaagatgtgttcgaagcattttacaaaaaggatcttgcgaagagactcctgttgggaaagagtgcttcaatcgatgctgagaaatccatgatctctaagcttaagactgagtgtggtagccagtttacaaacaagctcgaagggatgttcaaggatattgaattgtcaaaggaaatcaacgagtcattcaaacaatcttcccaggccagaacaaaactgccatcgggaattgagatgagtgtccacgttttaacaacagggtactggccaacatatccgcctatggatgttaagcttcctcatgaactaaatgtctatcaggatatcttcaaagagttctatttaagcaagtacagtggtaggaggttaatgtggcaaaattcattaggccactgtgttttaaaggcagatttctccaaaggtaaaaaggagctggctgtttccctgtttcaggctgttgtgttaatgttatttaacgatgcaatgaaacttagctttgaagacattaaagattccaccagcatagaggacaaggagctgaggaggactttgcagtcgcttgcttgtgggaaagtccgtgtcctgcagaagaatcctaagggaagagatgtagaagacggbgatgaatttgaatttaatgatgagtttgcagctccgctgtatcgcattaaggtaaatgcgatccagatgaaagagacagtagaggagaacacaagtacaacggaaagagtattccaggaccgacaataccagatcgatgcagccattgttcgtattatgaagacaagaaaagtcttgagccatactcttctaatcactgagctcttccaacagctcaaattcccgataaagcctgctgatctgaagaagaggattgagagcttgatcgatcgagaatatttggagagggaaaaaagcaaccctcagatatacaattatcttgcttagaatctctttggtaaacacaccttttgaatattttcctttttgtatatttattgacaaacaaacgatgaccgaaattttcttatcagtttgaaaaaaaaaaaagaactctcgatattcc

SEQ ID NO: 17844 - protein, 742 aa, Arabidopsis thaliana
MEEDPTPAAANLSRKKATLPQPTKKFVIKLNKAKPTLPTNFEENTWEKLQSAIRAIFLKKKISFDLESLYQAVDNLCLHKLDGKLYDQIEKECEEHISAALQSLVGQNTDLTVFLSRVEKCWQDFCDQMLMIRSIALTLDRKYVIQNPNVRSLWEMGLQLFRKHLSLAPEVEQRTVKGLLSMIEKERLAEAVNRTLLSHLLKMFTALGIYMESFEKPFLEGTSEFYAAEGMKYMQQSDVPEYLKHVEGRLHEENERCILYIDAVTRKPLITTVERQLLERHILVVLEKGFTTLMDGRRTEDLQRMQTLFSRVNALESLRQALSSYVRKTGQKIVMDEEKDKDMVQSLLDFKASLDIIWEESFYKNESFGNTIKDSFEHLINLRQNRPAELIAKFLDEKLRAGNKGTSEEELESVLEKVLVLFRFIQGKDVFEAFYKKDLAKRLLLGKSASIDAEKSMISKLKTECGSQFTNKLEGMFKDIELSKEINESFKQSSQARTKLPSGIEMSVHVLTTGYWPTYPPMDVKLPHELNVYQDIFKEFYLSKYSGRRLMWQNSLGHCVLKADFSKGKKELAVSLFQAVVLMLFNDAMKLSFEDIKDSTSIEDKELRRTLQSLACGKVRVLQKNPKGRDVEDGDEFEFNDEFAAPLYRIKVNAIQMKETVEENTSTTERVFQDRQYQIDAAIVRIMKTRKVLSHTLLITELFQQLKFPIKPADLKKRIESLIDREYLEREKSNPQIYNYLA

SEQ ID NO: 17845 - DNA, 2724 bp, Pisum sativum
  CDS (229)..(2457)
attagcagctttcggtgcacgattttcttattttctcttcatttattttcatttctttttcttattttctattctttgtcttaggagctctttcatcatcatcttcatccttcttgattttccttttgcctcttccatcaccgaatcgttattagggtttccagttatccatcaagctcacgcttttccacctcttaacgattttggtgtctaagttggagcgtacccatgagtgaacgcaagactatcgacttagatcaaggatgggattttatgctgaagggaataaagaagctgaagaatattctagaagggctacctgaacctcagttcacctctgatgactatatgatgctatacacgaccatatacaatatgtgcactcagaagcctcctcatgactattcccaaccattgtatgacaagtataaggaatcatttgaagagtacatcatatcaacagtattgccttctttgagagagaagcatgatgaatttatgttgcgtgaacttgtgaggaggtgggctaaccataaaatcatggttagatggctttctcgtttctttcactatttggatcgatattttatagctcgaaggtcacttccgccgcttaatgaagttggattgacttgcttccgtgatttggtttacaaggaaataaatgggaaagtgagagatgccgtgatttctcttattgatcaagaacgggaaggagagcagattgatcgagctctattaaaaaatgtattagatatatttgttgaaattggaatggggcaaatggatcaatatgacaatgattttgaagctgccatgctcaaagacacttctgcatattattctcgaaaggcttcaaactggatcctagaagattcttgtcctgattatatgctcaaggctgaggagtgcttgaaacgggagaaagatagggttgctcattacctacactctagcagcgagtcaaagttattagagaaagttcaacatgagcttttatctgtgtatgcaaaccaacttcttgaaaaagagcattctggatgtcattcattacttacagatgacaaggttgaagacttgtcgaggatgttcagactcttctctaaaataccccgaggcttggagcctgtttcctgtatatttaagcagcatgttactgcagaaggtacagcattggtgaagttggctgaagatgcagcaagtaacaggaaggcagagaaaagagatattgttggtttacaagagcagatttttgttcgaaaagtgattgagctgcatgacaagtacctggcatatgtgagcgactgtttccaaaatcatactctattccacaaggctcttaaggaggcttttgagattttttgcaacaagggtgttgctggaagctcaagtgccgaactgcttgccactttttgtgataatattctcaagaaaggaggaagtgaaaaattgagtgatgaagcaattgaagatacttttgagaaggttgtcaagctacttgcctatattagtgataaggatttgtttgccgaattttataggaaaaagcttgctcgaaggcttctttttgataagagtgctaatgatgaccatgagaggagtattttaacaaaattgaagcaacaatgtggtggtcaatttacctcaaagatggaaggaatggttaccgatttgacgctggcaaaggagaatcaaacaagctttgaagaatatttaagcaataatcctaatatagaccctggaattgacttgacagttacagttctgaccactggttttgggcctagttataaatcttttgacctcaatctccctgcagagatggttaggtgtgtagaagtttttaaggaattttatcaaacaaaaactaagcacagaaagcttacttggatttattccttgggtacctgtaatgtaagtgggaaatttgaaccaaaaactatggagctggttgtgacgacataccaggcttctgcactgcttcttttcaattcctcagatagactgagttattctgagataatgactcagttgaacttgaccgacgatgatgttgttagactgcttcactccttatcatgtgccaaatacaagattcttaccaaggagccaagcacgaaaacaatatcacctactgatcattttgaatttaattccaaatttacagacaaaatgaggaggatcaagattcctcttcctcctgtggatgagaagaaaaaagtaattgaggatgttgacaaggacagaagatatgctattgatgcctcaattgttcgtattatgaagagtcggaaagttttgagttaccaacagttagttatggagtgcgtggagcagttaggccgcatgtttaagcccgatgtcaaggcaattaagaagcgtattgaagacttgatctctagagactacctcgaaagagacagagataatgcaaatttgttcaagtacttggcatgatgtgttcttgatgacttcacaactgaagtttttaatgcaattgctgcaaatagaaaaacaagatggcgatacttgaaactggagaaaatcagttcctcataatttccttaagggaggaatagtgcttgtaaattttgcctccatatctaggcctcaactgtttactgtaaatgtgtgctcatgttggaaatattttaatcagttctataactaagtaggcccagatcgtattttctccaaaaaaaaaaaaaaaaaaaaaaaaaaaaa

SEQ ID NO: 17846 - protein, 742 aa, Pisum sativum
MSERKTIDLDQGWDFMLKGIKKLKNILEGLPEPQFTSDDYMMLYTTIYNMCTQKPPHDYSQPLYDKYKESFEEYIISTVLPSLREKHDEFMLRELVRRWANHKIMVRWLSRFFHYLDRYFIARRSLPPLNEVGLTCFRDLVYKEINGKVRDAVISLIDQEREGEQIDRALLKNVLDIFVEIGMGQMDQYDNDFEAAMLKDTSAYYSRKASNWILEDSCPDYMLKAEECLKREKDRVAHYLHSSSESKLLEKVQHELLSVYANQLLEKEHSGCHSLLTDDKVEDLSRMFRLFSKIPRGLEPVSCIFKQHVTAEGTALVKLAEDAASNRKAEKRDIVGLQEQIFVRKVIELHDKYLAYVSDCFQNHTLFHKALKEAFEIFCNKGVAGSSSAELLATFCDNILKKGGSEKLSDEAIEDTFEKVVKLLAYISDKDLFAEFYRKKLARRLLFDKSANDDHERSILTKLKQQCGGQFTSKMEGMVTDLTLAKENQTSFEEYLSNNPNIDPGIDLTVTVLTTGFGPSYKSFDLNLPAEMVRCVEVFKEFYQTKTKHRKLTWIYSLGTCNVSGKFEPKTMELVVTTYQASALLLFNSSDRLSYSEIMTQLNLTDDDVVRLLHSLSCAKYKILTKEPSTKTISPTDHFEFNSKFTDKMRRIKIPLPPVDEKKKVIEDVDKDRRYAIDASIVRIMKSRKVLSYQQLVMECVEQLGRMFKPDVKAIKKRIEDLISRDYLERDRDNANLFKYLA

SEQ ID NO: 17847 - DNA, 2678 bp, Arabidopsis thaliana
  CDS (158)..(2536)
gggtctaaatcgcgagttttcgcgtaggtttgagcaaaaaaaaaaagagagagagtgcacagtgcgcttttggtagagagaaagggttgttattatttaggattgatgtcttcttcttcctcttcgtgattctctcacacaattttcacccattttcatgtctcttcctaccaaacgctctactttctccgccgcttctgcctccgacgactcttcttactcttctcctccgatgaaaaagaccaaaaacgacctccaccattcccctcaacaccctaataccgccgacaaggttgttggctttcatatggaggaagatccaactcccgccgccgctaatctctctcggaagaaagctacacttccgcaacctactaagaagtttgtaatcaagctcaataaagccaaaccaactctaccaacaaactttgaggagaatacatgggagaagttgcagtcagctatcagagctatattcctcaaaaaaaaaatttcgtttgacctcgagagcctttaccaggctgttgataacctttgcttgcataagttggatggaaagctttatgaccagattgagaaggagtgtgaagaacacatctctgcagctttgcaatctttagttgggcagaacactgatctgactgttttcttgtcacgtgttgagaaatgctggcaagacttttgtgaccagatgctcatgattcgtagtatagccttgactctggataggaagtatgtgatacagaatccaaatgtacgttcattatgggagatgggtttgcagcttttccggaagcatctttctctggcccctgaagttgagcagaggacggttaaaggtctcttaagtatgattgaaaaagaaaggttagcagaagctgttaataggactctactaagccatcttttgaagatgtttactgcactgggaatttatatggaaagctttgagaaacctttccttgaagggacctctgaattttatgccgctgaaggaatgaaatacatgcagcagtctgacgttccggagtacctgaagcatgttgagggaaggttgcatgaagagaatgagagatgcatactctacatagatgcagtaaccaggaaaccattgatcacaactgttgaaaggcaacttctcgaacgtcatatacttgttgttcttgaaaagggttttacaacattaatggatggacgtcgtacggaggaccttcagaggatgcaaaccttgttttctagggtcaatgcacttgagtctctgaggcaggcgctaagttcatatgttcggaaaactgggcagaagattgttatggatgaagagaaagacaaagatatggtacaatcactgttggacttcaaggcttctcttgacataatatgggaagagagcttttacaagaacgaatcatttggtaacacaatcaaagattcgtttgagcatctgattaatcttcgacagaaccggccagctgagcttattgccaagtttttggacgagaaactccgtgctgggaataagggtacttctgaagaagaattggagagtgttcttgaaaaagtcttggttttgttcagatttatccagggtaaagatgtgttcgaagcattttacaaaaaggatcttgcgaagagactcctgttgggaaagagtgcttcaatcgatgctgagaaatccatgatctctaagcttaagactgagtgtggtagccagtttacaaacaagctcgaagggatgttcaaggatattgaattgtcaaaggaaatcaacgagtcattcaaacaatcttcccaggccagaacaaaactgccatcgggaattgagatgagtgtccacgttttaacaacagggtactggccaacatatccgcctatggatgttaagcttcctcatgaactaaatgtctatcaggatatcttcaaagagttctatttaagcaagtacagtggtaggaggttaatgtggcaaaattcattaggccactgtgttttaaaggcagatttctccaaaggtaaaaaggagctggctgtttccctgtttcaggctgttgtgttaatgttatttaacgatgcaatgaaacttagctttgaagacattaaagattccaccagcatagaggacaaggagctgaggaggactttgcagtcgcttgcttgtgggaaagtccgtgtcctgcagaagaatcctaagggaagagatgtagaagacggtgatgaatttgaatttaatgatgagtttgcagctccgctgtatcgcattaaggtaaatgcgatccagatgaaagagacagtagaggagaacacaagtacaacggaaagagtattccaggaccgacaataccagatcgatgcagccattgttcgtattatgaagacaagaaaagtcttgagccatactcttctaatcactgagctcttccaacagctcaaattcccgataaagcctgctgatctgaagaagaggattgagagcttgatcgatcgagaatatttggagagggaaaaaagcaaccctcagatatacaattatcttgcttagaatctctttggtaaacacaccttttgaatattttcctttttgtatatttattgacaaacaaacgatgaccgaaattttcttatcagtttaaaaaaaaaaaagaactctcgatattccaatcatctctaaaaaaaaaaaaaaa

SEQ ID NO: 17848 - protein, 792 aa, Arabidopsis thaliana
MSLPTKRSTFSAASASDDSSYSSPPMKKTKNDLHHSPQHPNTADKVVGFHMEEDPTPAAANLSRKKATLPQPTKKFVIKLNKAKPTLPTNFEENTWEKLQSAIRAIFLKKKISFDLESLYQAVDNLCLHKLDGKLYDQIEKECEEHISAALQSLVGQNTDLTVFLSRVEKCWQDFCDQMLMIRSIALTLDRKYVIQNPNVRSLWEMGLQLFRKHLSLAPEVEQRTVKGLLSMIEKERLAEAVNRTLLSHLLKMFTALGIYMESFEKPFLEGTSEFYAAEGMKYMQQSDVPEYLKHVEGRLHEENERCILYIDAVTRKPLITTVERQLLERHILVVLEKGFTTLMDGRRTEDLQRMQTLFSRVNALESLRQALSSYVRKTGQKIVMDEEKDKDMVQSLLDFKASLDIIWEESFYKNESFGNTIKDSFEHLINLRQNRPAELIAKFLDEKLRAGNKGTSEEELESVLEKVLVLFRFIQGKDVFEAFYKKDLAKRLLLGKSASIDAEKSMISKLKTECGSQFTNKLEGMFKDIELSKEINESFKQSSQARTKLPSGIEMSVHVLTTGYWPTYPPMDVKLPHELNVYQDIFKEFYLSKYSGRRLMWQNSLGHCVLKADFSKGKKELAVSLFQAVVLMLFNDAMKLSFEDIKDSTSIEDKELRRTLQSLACGKVRVLQKNPKGRDVEDGDEFEFNDEFAAPLYRIKVNAIQMKETVEENTSTTERVFQDRQYQIDAAIVRIMKTRKVLSHTLLITELFQQLKFPIKPADLKKRIESLIDREYLEREKSNPQIYNYLA

SEQ ID NO: 17849 - DNA, 2199 bp, Oryza sativa subsp
  CDS (1)..(2199)
atggcgacccacgagcggaagacgatcgatctggagcaggggtgggagttcatgcagaagggcatcaccaagctgaagaacatcctcgaggggaagcccgaaccccagttcagctccgaggactacatgatgctctacacgacgatttacaacatgtgcacgcagaagccgccgcacgactactcgcagcagctctacgagaagtaccgcgagtccttcgaggagtacatcacgtccatggtcttaccttcattaagagagaaacatgatgagtttatgctgagagagctagtaaaacggtggtcaaaccataaagtgatggttcggtggctatcacgcttcttccattatcttgatcggtactttatttcaaggaggtccctaccacaactaagtgaagttgggcttagctgtttccgggatctggtatatcaagagatcaaaggaaaagtaaaaagtgcggtgatatccttgatagatcaagaacgtgagggtgaacaaattgatagggccctgttaaagaatgttctggatatatttgttgagattggcttgactagcatggactactacgaaaatgattttgaagatttcttgctcaaagatactgcagactattactctataaaagcccagacctggattcttgaggactcttgtccagattacatgttaaaggcagaggagtgtctgaaaagggagaaagagcgagttgctcattatttgcactccagtagtgaacagaagttgttggagaaagtgcaacatgagttgctaactcaatacgcaagtcagctcctggagaaggagcattctggatgccatgcattgcttcgtgatgacaaggttgatgatctctctagaatgtacaggctcttttccagaataactcgtggtttagaacctgtttctcaaatatttaagcagcatgttactaatgagggcactgccttagtgaagcaagccgaagatgctgctagtaataagaaggtttttgtccggaaaatcattgagcttcatgacaagtatgtagcttatgttacggattgttttcaggggcacactctcttccataaggcacttaaggaggcttttgaagttttttgcaacaaaggtgtttctggcagttcaagtgctgaattactagctaccttctgtgacaatatcttaaagaaaggcggtagtgaaaagcttagtgatgaagcaattgaagatacccttgagaaggttgtaaggttacttgcctacattagtgacaaggacttgtttgctgagttctatagaaagaagcttgcaaggagattgctttttgacaagagtgctaatgatgaacatgagagaagcatccttaccaagctaaagcaacaatgtggagggcagttcacttccaaaatggagggcatggttactgatctcactgtggcaagagatcaccaggctaaatttgaagagttcataagcacacactcagagttgaatcctggaatagccttagctgttactgtcctcacaacaggattttggccaagttacaaatcttttgatataaatctacctgcagaaatggtgaaatgtgtagaggttttcaaggagttttaccaaacaagaacaaaacacaggaaacttacctggatttattcactgggaacctgtaatattaatgctaaatttgaggccaaaactattgagctcattgttacaacttatcaggctgcattgctgctgctgtttaatggagttgatagactcagctattctgagattgtgacacagttaaatctctcagatgatgatgttgttcgattgctccattctctatcttgtgcaaaatacaagattcttagcaaagaaccaaataatagatctatttcaccaaatgatgtcttcgagttcaactcaaagtttactgacaagctgcgaagattaaagatacctcttcctccagttgatgagaagaagaaagtagttgaagatgttgataaggatcgcagatacgcaattgatgcatcaattgtgcgtattatgaagagtcgcaaagtattgggtcatcagcaacttgtgatggaatgtgtggagcagcttggacgcatgtttaagcctgacttcaaggcaataaagaagcgaattgaggatcttatcacaagggattacttggagagggataaagacaacccaaatgtgtacagatacttggcttga

SEQ ID NO: 17850 - protein, 732 aa, Oryza sativa subsp
MATHERKTIDLEQGWEFMQKGITKLKNILEGKPEPQFSSEDYMMLYTTIYNMCTQKPPHDYSQQLYEKYRESFEEYITSMVLPSLREKHDEFMLRELVKRWSNHKVMVRWLSRFFHYLDRYFISRRSLPQLSEVGLSCFRDLVYQEIKGKVKSAVISLIDQEREGEQIDRALLKNVLDIFVEIGLTSMDYYENDFEDFLLKDTADYYSIKAQTWILEDSCPDYMLKAEECLKREKERVAHYLHSSSEQKLLEKVQHELLTQYASQLLEKEHSGCHALLRDDKVDDLSRMYRLFSRITRGLEPVSQIFKQHVTNEGTALVKQAEDAASNKKVFVRKIIELHDKYVAYVTDCFQGHTLFHKALKEAFEVFCNKGVSGSSSAELLATFCDNILKKGGSEKLSDEAIEDTLEKVVRLLAYISDKDLFAEFYRKKLARRLLFDKSANDEHERSILTKLKQQCGGQFTSKMEGMVTDLTVARDHQAKFEEFISTHSELNPGIALAVTVLTTGFWPSYKSFDINLPAEMVKCVEVFKEFYQTRTKHRKLTWIYSLGTCNINAKFEAKTIELIVTTYQAALLLLFNGVDRLSYSEIVTQLNLSDDDVVRLLHSLSCAKYKILSKEPNNRSISPNDVFEFNSKFTDKLRRLKIPLPPVDEKKKVVEDVDKDRRYAIDASIVRIMKSRKVLGHQQLVMECVEQLGRMFKPDFKAIKKRIEDLITRDYLERDKDNPNVYRYLA

SEQ ID NO: 17851 - DNA, 1854 bp, Arabidopsis thaliana
  CDS (1)..(1854)
atgctcatgattcgtagtatagccttgactctggataggaagtatgtgatacagaatccaaatgtacgttcattatgggagatgggtttgcagcttttccggaagcatctttctctggcccctgaagttgagcagaggacggttaaaggtctcttaagtatgattgaaaaagaaaggttagcagaagctgttaataggactctactaagccatcttttgaagatgtttactgcactgggaatttatatggaaagctttgagaaacctttccttgaagggacctctgaattttatgccgctgaaggaatgaaatacatgcagcagtctgacgttccggagtacctgaagcatgttgagggaaggttgcatgaagagaatgagagatgcatactctacatagatgcagtaaccaggaaaccattgatcacaactgttgaaaggcaacttctcgaacgtcatatacttgttgttcttgaaaagggttttacaacattaatggatggacgtcgtacggaggaccttcagaggatgcaaaccttgttttctagggtcaatgcacttgagtctctgaggcaggcgctaagttcatatgttcggaaaactgggcagaagattgttatggatgaagagaaagacaaagatatggtacaatcactgttggacttcaaggcttctcttgacataatatgggaagagagcttttacaagaacgaatcatttggtaacacaatcaaagattcgtttgagcatctgattaatcttcgacagaaccggccagctgagcttattgccaagtttttggacgagaaactccgtgctgggaataagggtacttctgaagaagaattggagagtgttcttgaaaaagtcttggttttgttcagatttatccagggtaaagatgtgttcgaagcattttacaaaaaggatcttgcgaagagactcctgttgggaaagagtgcttcaatcgatgctgagaaatccatgatctctaagcttaagactgagtgtggtagccagtttacaaacaagctcgaagggatgttcaaggatattgaattgtcaaaggaaatcaacgagtcattcaaacaatcttcccaggccagaacaaaactgccatcgggaattgagatgagtgtccacgttttaacaacagggtactggccaacatatccgcctatggatgttaagcttcctcatgaactaaatgtctatcaggatatcttcaaagagttctatttaagcaagtacagtggtaggaggttaatgtggcaaaattcattaggccactgtgttttaaaggcagatttctccaaaggtaaaaaggagctggctgtttccctgtttcaggtcagtcaaattttttttcccccccccccccttttaagctctttcctgtcttcccgagacattaaagattccaccagcatagaggacaaggagctgaggaggactttgcagtcgcttgcttgtgggaaagtccgtgtcctgcagaagaatcctaagggaagagatgtagaagacggtgatgaatttgaatttaatgatgagtttgcagctccgctgtatcgcattaaggtaaatgcgatccagatgaaagagacagtagaggagaacacaagtacaacggaaagagtattccaggaccgacaataccagatcgatgcagccattgttcgtattatgaagacaagaaaagtcttgagccatactcttctaatcactgagctcttccaacagctcaaattcccgataaagcctgctgatctgaagaagaggattgagagcttgatcgatcgagaatatttggagagggaaaaaagcaaccctcagatatacaattatcttgcttag

SEQ ID NO: 17852 - protein, 617 aa, Arabidopsis thaliana
MLMIRSIALTLDRKYVIQNPNVRSLWEMGLQLFRKHLSLAPEVEQRTVKGLLSMIEKERLAEAVNRTLLSHLLKMFTALGIYMESFEKPFLEGTSEFYAAEGMKYMQQSDVPEYLKHVEGRLHEENERCILYIDAVTRKPLITTVERQLLERHILVVLEKGFTTLMDGRRTEDLQRMQTLFSRVNALESLRQALSSYVRKTGQKIVMDEEKDKDMVQSLLDFKASLDIIWEESFYKNESFGNTIKDSFEHLINLRQNRPAELIAKFLDEKLRAGNKGTSEEELESVLEKVLVLFRFIQGKDVFEAFYKKDLAKRLLLGKSASIDAEKSMISKLKTECGSQFTNKLEGMFKDIELSKEINESFKQSSQARTKLPSGIEMSVHVLTTGYWPTYPPMDVKLPHELNVYQDIFKEFYLSKYSGRRLMWQNSLGHCVLKADFSKGKKELAVSLFQVSQIFFPPPPLLSSFLSSRDIKDSTSIEDKELRRTLQSLACGKVRVLQKNPKGRDVEDGDEFEFNDEFAAPLYRIKVNAIQMKETVEENTSTTERVFQDRQYQIDAAIVRIMKTRKVLSHTLLITELFQQLKFPIKPADLKKRIESLIDREYLEREKSNPQIYNYLA

SEQ ID NO: 17853 - DNA, 3647 bp, Saccharomyces cerevisiae
  CDS (540)..(2987)
gaattcttttagataccaagattgacatttatatgcattgtatatttttgacttaaaaaattactccggcttggcatttattcattaacggcgggtttgattatattaggctttgtgcgatataatatgtattacccgaagggtgggctattgcactttcttttcctttccgttttaagggccctttttcatttcgatgtttgatggacacacatgaagtgaaatgtggcaaatagaacatctagaaaaactagggcattaggtaaagtaccccagcagaacttcactttacaacgcaattgattcatatcactgctcttttatattgtcctttttctcttttagagcttttcatccgcatcttctaacttctgtgcacccctttcattgttgattacattttacctcagttacacatttcttttagcaattcgacattgcttctacttaccgataaataagcgtacatttttgagtcttgaaaggattcttacatatacctaaacaaagaataacaacaaaatcgcaagcagcaaagcatgtctgagactctgcctagatctgatgatttagaggccacttggaactttatagagccaggaattaaccaaatactgggtaatgagaaaaaccaagcatccacgtctaagcgagtttacaaaattctttctccaaccatgtatatggaagtctataccgcaatttataactactgtgtgaacaaatcacgctcgtctggacattttagtactgacagtagaactggccaatcaacaattttggttggcagtgagatttacgaaaagttaaagaattatttgaagaattacattttaaattttaagcagtctaattcagagacctttttgcagttttacgtcaagcgctggaaaaggtttacaataggtgccatttttttaaaccatgcattcgattatatgaatagatattgggttcaaaaggaaagaagtgacggcaaaaggcatatttttgatgtaaacaccttgtgcttgatgacatggaaagaagtcatgtttgatccgagtaaagatgttttaataaacgaattattagaccaggtaaccttgggaagggaggggcaaataattcaaagaagtaatattagcactgccataaagtctttagttgcactaggtatcgatccacaggatttgaaaaagttgaacctaaatgtctacatccaagttttcgaaaagccatttttaaagaagactcaggagtactacacgcaatatacaaacgattatttagagaaacactcggtaactgagtatatttttgaagcacatgaaatcatcaaacgtgaggaaaaagcaatgacaatatattgggatgatcatacaaaaaaaccactatccatggcattaaacaaggtcttgatcacagaccatattgaaaagttggaaaatgagtttgttgtccttctggatgccagagatattgaaaaaattacttctttgtacgcactaatacgcagagactttacattaatcccaagaatggcttcagtgtttgaaaattatgttaaaaagacaggtgagaatgaaatttcgagtctactggcaatgcataaacacaatattatgaaaaacgaaaacgcaaaccctaaaaaactagcactaatgacagctcactccctttctcctaaagactatatcaagaaattactggaagtacacgatatattctctaagatttttaatgaaagtttccccgacgacatacctttagctaaagctctagataatgcgtgtggtgctttcatcaacatcaacgagttcgcattacctgctggatctccaaaaagtgccacctcgaagacttccgagatgctagctaagtacagtgatatactattaaagaaggccaccaaacctgaagtggcaagtgacatgtcagatgaagatattataacaatattcaaatatttgaccgacaaagatgcgttcgaaactcattatagaagacttttcgccaagcgtttaattcatggcacttcaacatcagcagaagacgaagaaaatattattcaaaggctgcaagcggcaaatagtatggaatatacaggcaagataactaaaatgtttcaagatattagactttccaagatcttggaagacgattttgctgtcgccctgaagaatgaaccagattactctaaagcaaaatatccagatctacaaccatttgtattggcagaaaatatgtggccattttcataccaagaagttgaatttaagctacccaaggaattggtaccatctcacgaaaaattgaaggagtcatacagccaaaagcataatggtagaatattgaagtggctatggccattatgtcgtggcgaattgaaggcagatattggaaaacccggcaggatgccgttcaactttacggtaacactgtttcaaatggcaattttgctactatataacgatgctgatgtattaaccttagaaaatattcaagagggcacgagcttaaccattcagcacatcgcagcggcaatggtaccattcatcaaattcaaactgattcaacaggtcccaccagggctagatgctctcgtgaaacctgaaacacaattcaagctatcacgtccttataaggcgcttaagaccaatattaatttcgctagcggagtcaaaaacgacattctgcaatcgctatccggtggaggccacgataatcacggtaataagttaggaaacaaacgcttgacggaagacgaaagaatagaaaaagaattgaatacagaaaggcagattttcttggaagcttgtattgtgagaataatgaaagcgaaaagaaatctgccacatacaacattggtcaacgaatgcattgcgcaatcacaccaaaggttcaatgcaaaggtttctatggtcaagagagccatcgatagcttaatacaaaagggatacctacagaggggagacgatggtgaatcgtatgcttaccttgcttaatcatctttgaaggcttgtgctgatcgaacgaagcaaatcctacgagtaaatacataagcgtatacatatatatatatatatatatatatatatatatgtatatatatatatgtgtgtgtgtgtaattgtgtgtattcaactgaactatgaagagtctttgacctcttgagaatctcatagtatgaagatatggcacttctctttccgttgtaacatcctttaccgggcggcttttcggcctgcttgagaagagatcaggctgaaatgatgagactgacaacaaggatcagtcagtggcagagttgaaattccgctggaaatcgtcaccagcagctaccagctccaagaaatccgcgtagaaatcacgtcgcgcaatgtgcgatagtggtggaacagcgaaaattagtcactttgcaaagatgccaagctgatcgttctcgttgtgtgtgattctacgatattgcgcatgagtggtgttgagcatgcgtttgttcgcattttcatgcagtctcttatatactaatatatatatgcaacagatttcaaaatttatctttcttcttgttgcgtttaggcctttatttgctacacatttaaaagtgcaacgacaacccaagtaattgtatactttaacaaaccatgtctgaaaataacgaattc

SEQ ID NO: 17854 - protein, 815 aa, Saccharomyces cerevisiae
MSETLPRSDDLEATWNFIEPGINQILGNEKNQASTSKRVYKILSPTMYMEVYTAIYNYCVNKSRSSGHFSTDSRTGQSTILVGSEIYEKLKNYLKNYILNFKQSNSETFLQFYVKRWKRFTIGAIFLNHAFDYMNRYWVQKERSDGKRHIFDVNTLCLMTWKEVMFDPSKDVLINELLDQVTLGREGQIIQRSNISTAIKSLVALGIDPQDLKKLNLNVYIQVFEKPFLKKTQEYYTQYTNDYLEKHSVTEYIFEAHEIIKREEKAMTIYWDDHTKKPLSMALNKVLITDHIEKLENEFVVLLDARDIEKITSLYALIRRDFTLIPRMASVFENYVKKTGENEISSLLAMHKHNIMKNENANPKKLALMTAHSLSPKDYIKKLLEVHDIFSKIFNESFPDDIPLAKALDNACGAFININEFALPAGSPKSATSKTSEMLAKYSDILLKKATKPEVASDMSDEDIITIFKYLTDKDAFETHYRRLFAKRLIHGTSTSAEDEENIIQRLQAANSMEYTGKITKMFQDIRLSKILEDDFAVALKNEPDYSKAKYPDLQPFVLAENMWPFSYQEVEFKLPKELVPSHEKLKESYSQKHNGRILKWLWPLCRGELKADIGKPGRMPFNFTVTLFQMAILLLYNDADVLTLENIQEGTSLTIQHIAAAMVPFIKFKLIQQVPPGLDALVKPETQFKLSRPYKALKTNINFASGVKNDILQSLSGGGHDNHGNKLGNKRLTEDERIEKELNTERQIFLEACIVRIMKAKRNLPHTTLVNECIAQSHQRFNAKVSMVKRAIDSLIQKGYLQRGDDGESYAYLA

SEQ ID NO: 17855 - DNA, 2248 bp, Arabidopsis thaliana
  CDS (1)..(2217)
atggagcgcaagactattgacttggagcaaggatgggactatatgcagactggaattactaagctgaaacggattctggaaggattgaatgagccagcatttgactctgagcaatatatgatgctttatacgactatctacaacatgtgcacccagaaacctcctcatgattactcacagcagctttatgacaagtatcgggaagcatttgaggaatatattaactcaacagttttgcctgcgttgagggagaagcatgatgagtttatgctgcgggagctatttaaaagatggtcaaaccataaagtaatggtcagatggctatcccgcttcttctactaccttgaccgttacttcattgctcggagatcacttccaccactgaatgaagttggcctgacatgcttccgtgacctggtttataatgagctacattctaaggtcaaacaagctgtaatagctcttgttgataaagaacgggagggcgagcagattgatagggccctgctgaaaaacgtattagatatctatgtagagattggaatggggcagatggagaggtatgaagaagattttgaaagcttcatgcttcaagatacttcttcgtattattctcgcaaggcatcaagctggattcaggaagattcttgccctgattacatgttgaagtctgaagaatgtctaaagaaggagagggagagagtggctcactacctacactcaagcagtgagccaaagctggttgagaaagtacaacatgaattgctggttgtgtttgcaagtcagcttctagaaaaagaacactcagggtgccgtgcattgctaagagatgacaaggtggatgatctctccaggatgtacaggctttaccataaaattttgcgaggcttggaacctgttgcaaacatctttaagcagcatgtcacagcagagggtaacgctcttgtccaacaggccgaagacacggctactaatcaggttgcaaatactgctagcgtccaggaacaggttcttatcagaaaagtgattgaacttcatgataaatacatggtatatgtcaccgagtgtttccagaaccacaccctcttccataaggctttgaaagaggcatttgagattttttgtaacaaaacggttgctggaagttcaagtgcagaactacttgcaacattttgcgacaatattctcaaaaaggggggaagtgaaaagctgagtgatgaagctatcgaagatacgcttgagaaggttgtcaaattgcttgcatacataagtgacaaggatcttttcgctgagttctacaggaagaagctggcccgtaggctcttatttgatcgcagtgctaatgatgatcatgagagaagtatcctgacaaagctcaagcaacaatgtggtggacagtttacttctaagatggagggcatggtgacggatttgacactggcaagagaaaaccaaaacagtttcgaggattatctaggcagtaaccctgctgcaaacccagggattgacttgaccgtcactgttcttaccactggtttctggccaagttacaaatcatttgacataaatctacccagtgaaatgatcaagtgtgttgaagtcttcaaagggttttatgaaacgaaaacgaaacacaggaagcttacgtggatctattcactgggaacttgtcacataaacgggaagtttgatcaaaaggccatcgagttaatagtgtctacttaccaggctgctgtgcttctactctttaacacaactgacaagttaagttacactgagatcttggctcaactgaacctaagccatgaagatctagttaggttgcttcattccttgtcatgtgctaagtacaagatactccttaaggagccaaacaccaagactgtctcccagaatgatgcctttgagttcaactccaaattcaccgatagaatgcgcagaatcaagatccctcttcccccagttgatgaaaggaagaaagtcgttgaagatgtcgataaagacagaagatatgcaattgatgctgccattgtcaggatcatgaagagcaggaaagtattgggacatcaacaacttgtttctgagtgtgttgagcaacttagccgaatgttcaagcctgatatcaaagcgatcaagaagcgtatggaggatttaataaccagagattatttggagagggacaaggagaatcctaacatgtttaggtacttggcttagggcaaaaaaacaacaactatggaagtggttg

SEQ ID NO: 17856 - protein, 738 aa, Arabidopsis thaliana
MERKTIDLEQGWDYMQTGITKLKRILEGLNEPAFDSEQYMMLYTTIYNMCTQKPPHDYSQQLYDKYREAFEEYINSTVLPALREKHDEFMLRELFKRWSNHKVMVRWLSRFFYYLDRYFIARRSLPPLNEVGLTCFRDLVYNELHSKVKQAVIALVDKEREGEQIDRALLKNVLDIYVEIGMGQMERYEEDFESFMLQDTSSYYSRKASSWIQEDSCPDYMLKSEECLKKERERVAHYLHSSSEPKLVEKVQHELLVVFASQLLEKEHSGCRALLRDDKVDDLSRMYRLYHKILRGLEPVANIFKQHVTAEGNALVQQAEDTATNQVANTASVQEQVLIRKVIELHDKYMVYVTECFQNHTLFHKALKEAFEIFCNKTVAGSSSAELLATFCDNILKKGGSEKLSDEAIEDTLEKVVKLLAYISDKDLFAEFYRKKLARRLLFDRSANDDHERSILTKLKQQCGGQFTSKMEGMVTDLTLARENQNSFEDYLGSNPAANPGIDLTVTVLTTGFWPSYKSFDINLPSEMIKCVEVFKGFYETKTKHRKLTWIYSLGTCHINGKFDQKAIELIVSTYQAAVLLLFNTTDKLSYTEILAQLNLSHEDLVRLLHSLSCAKYKILLKEPNTKTVSQNDAFEFNSKFTDRMRRIKIPLPPVDERKKVVEDVDKDRRYAIDAAIVRIMKSRKVLGHQQLVSECVEQLSRMFKPDIKAIKKRMEDLITRDYLERDKENPNMFRYLA

SEQ ID NO: 17857 - DNA, 2325 bp, Drosophila melanogaster
  CDS (1)..(2325)
atgaaccgctccggcaattcccagaccacacagaaactcgtcaacctggacgatatctggagcgaattggtcgagggcattatgcaggtgtttgagcacgagaagtccctcacccgcagccagtacatgcgtttctacactcacgtctatgactactgcaccagcgtgagcgcggctccaagcggacggagcagcggaaagacaggcggagcgcagctggtgggcaagaagctgtacgaccggctggaacaatttctcaagtcatacctgagcgagctgctcaccaagttcaaggccatcagcggcgaggaggtactcctgtcgcgctacaccaaacagtggaagtcgtatcagttctccagtaccgttctggacggcatctgcaactacctgaatcggaactgggtgaagcgcgagtgcgaggaggggcagaagggtatctacaagatctaccgactggccctcgtcgcctggaagggacatttgttccaagtgctaaatgagccggtcaccaaggcagtgctcaagtccattgaggaggagcgtcaaggcaagctcattaaccggtcgctggtccgcgacgttatcgagtgctacgtggagctcagctttaacgaggaggataccgatgccgagcagcagaagttatccgtctacaagcaaaactttgaaaacaagttcatcgcagacacatcagccttctacgagaaggagtcggacgcctttctgtccaccaacacggtcaccgagtatctgaagcacgtcgaaaacaggctggaggaggagacgcagcgcgtccgcggctttaattcaaagaacggtctttcctatctgcacgagaccacagcggatgtgctgaagtccacatgcgaagaggttcttatcgaaaaacatctgaaaatctttcacaccgagtttcagaatctgctcaacgcagaccgaaacgatgatctgaaacggatgtactccttggtcgccctctcgtccaaaaacctgacagatctcaagtccatccttgagaaccatatactccaccagggcacggaggccattgccaagtgttgcactaccgacgcggccaacgatcccaagacgtacgtacagaccatcctggacgtgcacaagaagtacaacgccctcgttctgacggcgttcaacaatgacaacggatttgtggccgctttggacaaggcgtgtggaaagttcataaactcgaacgtggtcacgatcgcaaacagtgctagcaagtcgcccgaattgctggccaagtactgcgatctgttattaaaaaaatcctcgaaaaatcccgaggacaaggagctcgaggacaatcttaaccaggtgatggtcgtgttcaagtatatcgaggataaggacgtcttccaaaaatattactccaagatgcttgctaagcgcttggttaaccacacatcggcttcggatgacgccgaggctatgatgatctccaaactgaagcagacatgtggttacgaatacaccgtcaagcttcagaggatgttccaggacattggcgtctcaaaggacttgaactcgtactttaagcagtacctggccgaaaagaacttgaccatggaaatagactttggcatcgaagtcctgtcctcaggctcttggcctttccagctgagcaacaacttcctgctaccatctgagctggagcggtcagtgcgacagttcaatgagttctacgccgcccgccactctggccgcaagctcaactggttgtatcagatgtgcaagggcgaactgataatgaacgtcaaccgcaataattcctccacctacaccctgcaggccagcaccttccaaatgtcagtgctgctccagtttaacgatcagctcagttttacagtccagcaactgcaggacaacacacagacgcagcaggagaacttgattcaggtattgcaaatactgctcaaggcgaaggtgctgacctccagcgacaatgagaactcgctgacgccagagtcgacggtggagctgttcctcgattacaaaaacaagaagcgccgaattaacatcaaccagcctttgaagactgaacttaaagtggagcaggagactgtacataagcacatagaggaggaccgaaaattactgatccaggcggcgatcgtccgcatcatgaagatgcgcaaacgactcaaccacaccaatctcatatcggaggtgcttaatcagctgtcaacgcgctttaagcctaaggtgcccgtgatcaagaagtgcatagacatcctgatcgagaaggagtatctagagcgaatggagggacacaaagacacatatagttatctcgcctaa

SEQ ID NO: 17858 - protein, 774 aa, Drosophila melanogaster
MNRSGNSQTTQKLVNLDDIWSELVEGIMQVFEHEKSLTRSQYMRFYTHVYDYCTSVSAAPSGRSSGKTGGAQLVGKKLYDRLEQFLKSYLSELLTKFKAISGEEVLLSRYTKQWKSYQFSSTVLDGICNYLNRNWVKRECEEGQKGIYKIYRLALVAWKGHLFQVLNEPVTKAVLKSIEEERQGKLINRSLVRDVIECYVELSFNEEDTDAEQQKLSVYKQNFENKFIADTSAFYEKESDAFLSTNTVTEYLKHVENRLEEETQRVRGFNSKNGLSYLHETTADVLKSTCEEVLIEKHLKIFHTEFQNLLNADRNDDLKRMYSLVALSSKNLTDLKSILENHILHQGTEAIAKCCTTDAANDPKTYVQTILDVHKKYNALVLTAFNNDNGFVAALDKACGKFINSNVVTIANSASKSPELLAKYCDLLLKKSSKNPEDKELEDNLNQVMVVFKYIEDKDVFQKYYSKMLAKRLVNHTSASDDAEAMMISKLKQTCGYEYTVKLQRMFQDIGVSKDLNSYFKQYLAEKNLTMEIDFGIEVLSSGSWPFQLSNNFLLPSELERSVRQFNEFYAARHSGRKLNWLYQMCKGELIMNVNRNNSSTYTLQASTFQMSVLLQFNDQLSFTVQQLQDNTQTQQENLIQVLQILLKAKVLTSSDNENSLTPESTVELFLDYKNKKRRININQPLKTELKVEQETVHKHIEEDRKLLIQAAIVRIMKMRKRLNHTNLISEVLNQLSTRFKPKVPVIKKCIDILIEKEYLERMEGHKDTYSYLA

SEQ ID NO: 17859 - DNA, 2304 bp, Schizosaccharomyces pombe
  CDS (1)..(2304)
atgactactttgaataccaacgataaagacctcccgattgttaaaaaatatgattcattgaatggaacttgggactttttaaaaacaggtgtgtcccaaatatttgaaaggctagatgaaggaatgactatcactaagtatatggagctttatacagcaatccataactactgtgctgatgcgtccaaaactataacggtggacaatttcaacgatcaaactgcaaacgttttaggcgaagccctttacaataatttggttctatatctggaagagtatttggcccgtctgcgaaaggaatgcatttcgcaaacgaatcatgaagagcaactcgctgcgtatgccaagtattggacgcgatttacaacatctgcccgttttatcaaccatctttttggatatttaaatagatattgggttaaactgaagaacagatttactgagacactcgtgtacgacatttacacactttgtcttgtgtcatggcatcatcacgttttttcccacattcgcgatagcctacttcaaaatttgttatacatgttcaccaaaaaaagattatatgaacctactgatatgaaatatgtggaagtttgtgtggattctatcacttcattgagctttgataaaaccgatatgacaaagcctaacttgagctcatacaaaacttttttcgaaacaaactttattgaaaatacaaaaaacttttatgcaaaggagtcttccgaatacttggcttcccattctattacggattacttaaaaaaggcagaaataagactagcagaggaggaagagcttgtgagattatatttgcatgaatccacattgaagccgcttttagaagcgactgaagatgtactaattgcacaacatgaagaagttttgcacaacgactttgcacgcatgctcgaccaaaactgcagtgaggatatcattcgcatgtaccgattgatgtctcgaacacctaatgggttgcagcctttacgccagacatttgaggagtttgtcaagagatcaggctttgctgcggttgccaaaattgttccccaggtcggtggagaagccgatgtggatcctaaagagtatatggaaatgttactttccacgtataaagcttccaaagaacttgttaacaccgcatttcatggggatactgattttacaaagtcattggatacagcctttagagaacttgtcaatcgaaatgttgtttgccagcgctcttcctctcgctccccagagttgcttgctaaatacgccgacagtattttgcgaaaaagcaacaagaatgttgacattgatgatgttgaagactgtttatcgtcgattatcattatttttcgttatgtcgaagacaaggatgtttttcaaaacttttatactaagcttttagccaagcgacttgtgaatggtacctctaattcccaggatgctgaatctagcatgctatctaagttaaaggaagtctgcggttttgaatatactagtaagctacagcgtatgtttcaagacatctccttgtctcaagagattaccgaagcgttttggcaactccctcagtcacgtgctggaaatatagatttctctgctcttgtacttggtacatcgttttggcctctatctcccaacaatgtgaactttcatctgccagaggaattagttcctttgtatgaaggattccaaaactattactatagctgccataacggaaggaagttaagctggttgttccatctctctaaaggagaaataaaggcacgcattaaccctcaaactaatgtcacttatgtgtttcaagtttctacatatcaaatgggtgttttgcttttgtacaaccatcgcgattcttatacatatgaggagctggcaaaaataactgggttaagtacagatttcttgacagggattctgaacatattcctaaaagcaaaggtgcttctccttggcgacaatgacaagcttggtgatcctaatagcacatataagatcaatgaaaattttaggatgaaaaagatacgggtacagttaaatctcccaattagatctgagcaaaagcaggaatctctggagactcataaaactatagaagaagatcgaaagttactgcttcaatccgctatcgtccgtatcatgaaggctcgccgaacattgaaacatgtagtgttagtgaaagagactattgatcaaattaaaagcagatttactcctaaagtgtctgatattaagcaatgtatagatatgttaatcgaaaaagagtacctggaacgccaaggccgcgatgaatacatttaccttgcttga

SEQ ID NO: 17860 - protein, 767 aa, Schizosaccharomyces pombe
MTTLNTNDKDLPIVKKYDSLNGTWDFLKTGVSQIFERLDEGMTITKYMELYTAIHNYCADASKTITVDNFNDQTANVLGEALYNNLVLYLEEYLARLRKECISQTNHEEQLAAYAKYWTRFTTSARFINHLFGYLNRYWVKLKNRFTETLVYDIYTLCLVSWHHHVFSHIRDSLLQNLLYMFTKKRLYEPTDMKYVEVCVDSITSLSFDKTDMTKPNLSSYKTFFETNFIENTKNFYAKESSEYLASHSITDYLKKAEIRLAEEEELVRLYLHESTLKPLLEATEDVLIAQHEEVLHNDFARMLDQNCSEDIIRMYRLMSRTPNGLQPLRQTFEEFVKRSGFAAVAKIVPQVGGEADVDPKEYMEMLLSTYKASKELVNTAFHGDTDFTKSLDTAFRELVNRNVVCQRSSSRSPELLAKYADSILRKSNKNVDIDDVEDCLSSIIIIFRYVEDKDVFQNFYTKLLAKRLVNGTSNSQDAESSMLSKLKEVCGFEYTSKLQRMFQDISLSQEITEAFWQLPQSRAGNIDFSALVLGTSFWPLSPNNVNFHLPEELVPLYEGFQNYYYSCHNGRKLSWLFHLSKGEIKARINPQTNVTYVFQVSTYQMGVLLLYNHRDSYTYEELAKITGLSTDFLTGILNIFLKAKVLLLGDNDKLGDPNSTYKINENFRMKKIRVQLNLPIRSEQKQESLETHKTIEEDRKLLLQSAIVRIMKARRTLKHVVLVKETIDQIKSRFTPKVSDIKQCIDMLIEKEYLERQGRDEYIYLA

SEQ ID NO: 17861 - DNA, 2358 bp, Schizosaccharomyces pombe
  CDS (1)..(2358)
atgcagcggtcagcgaagttaaaaattcgagcgccacgaaaattttctgctaaccaagtagactttgctacacattgggaagtcttgcagcgagctattggggatatatttcagaaaagcacatctcaattatcgtttgaagagttgtatagaaatgcatatatacttgttctacataagtatggagaaaagctttataatcatgtacaggatgttattagatcgaggcttaaagaagaaactgttccagctatttacaaaaactatgacgcttccttattagggaatgctctattggatattagaaaaaatgattcctattctacttcatggtcgagatcattggaagcggctcatagatttttatcgtctttagttaattcctggaaggatcacattgtttcaatgcaaatgatatctagtgtattaaaatatttggacaaggtttattcaaaatctgcagacaaagttcctgttaatgaaaacggaatatatatctttcgtgaagttgttttgttaaatagttttgaaattggagagaaatgtgtcgaaactattctaattctggtttatcttgaacgtaaagggaatacaataaatcgacccttaataaatgactgcttagatatgctaaactctttgccttcagaaaacaaaaaggaaactctttatgatgttttatttgctccaaagtttttatcttacacaagaaatttctatgaaatagaatcatcaacagtcatcggcgtatttggagttgtggagtatctgaaaaaagcagagaaaagatttgaggaagaaaaggagaggtccaagaattacctgttcacaaaaatagctagcccccttctatccgttgttgaagatgagcttttgagtaaacatttggacgatttgcttgaaaatcaatcaactggctttttctcgatgatcgactcttcaaacttcgagggtcttcaattggtttacgaaagcttttctagagtggaacttggcgtgaagtctttaaaaaaatacttggcgaaatatgtagcgcatcatggaaaattaatcaatgaaactactagccaagcgcttgaaggaaagatggctgttggtcgtctatcatctaatgctacaatggcaacattatgggttcaaaaagttttggccttatgggatagactaaatacaattataagtactactatggatgctgatcggtctatcttgaactctttatcagatgcttttgttacgttcgtagacggatatacccgagcccccgagtacatttcactattcattgatgacaatctgaaaaaagatgctagaaaagcaatagaaggctctattgaagcaacacttcaaaattctgttacgttatttcggtttatttcagaaaaagatgtttttgaaaaatattacaaaacacaccttgcaaaaaggttgttgaataatcgatcaatatcttccgatgcagagctcggaatgatcagtaggctgaaacaagaagctggtaatgtttttactcaaaagctcgaaggaatgtttaatgatatgaatctttcacaagaattgttacaggagtacaaacataattctgcgttacagtcggccaagcctgctttggacttaaacgtttcaattttggcttctacattttggcccatcgatttatcgcctcacaaaattaaatgtaactttccgaaagttctcctggctcagatagatcaatttacggatttttatttatcgaaacatacggggagaaaattattgtggtatccttctatgggaagtgctgatgtccgtgttaatttcaaagacagaaaatatgacttgaatgtatcgactattgcatctgttattctattgcttttccaagacctaaaagaaaatcagtgtttaatttttgaggagattttggaaaaaaccaatatagaagttggggatttgaagcgcaatcttcagtcccttgcttgtgcaaaatacaagattttgctaaaggatccaaaaggaagggaggtgaatgcaggtgacaagttttatttcaatgagaactttgtttcaaatctcgcccggattaaaatatcgacagttgctcagactcgtgttgaggatgatagtgagagaaaacgtacattagagaaggtagacgagtcaaggaagcatcaagcagatgcctgtattgttagagtgatgaaggatcgcaaagtgtgcgaacacaatcagctgatggcagaggttacaagacagttaaaccctcgtttccaccctagtccgatgatgattaagcgacgaattgaagctttaatagagcgggagtacctacaaagacaagccgataatggtcgcatttatgaatatttagcatag

SEQ ID NO: 17862 - protein, 785 aa, Schizosaccharomyces pombe
MQRSAKLKIRAPRKFSANQVDFATHWEVLQRAIGDIFQKSTSQLSFEELYRNAYILVLHKYGEKLYNHVQDVIRSRLKEETVPAIYKNYDASLLGNALLDIRKNDSYSTSWSRSLEAAHRFLSSLVNSWKDHIVSMQMISSVLKYLDKVYSKSADKVPVNENGIYIFREVVLLNSFEIGEKCVETILILVYLERKGNTINRPLINDCLDMLNSLPSENKKETLYDVLFAPKFLSYTRNFYEIESSTVIGVFGVVEYLKKAEKRFEEEKERSKNYLFTKIASPLLSVVEDELLSKHLDDLLENQSTGFFSMIDSSNFEGLQLVYESFSRVELGVKSLKKYLAKYVAHHGKLINETTSQALEGKMAVGRLSSNATMATLWVQKVLALWDRLNTIISTTMDADRSILNSLSDAFVTFVDGYTRAPEYISLFIDDNLKKDARKAIEGSIEATLQNSVTLFRFISEKDVFEKYYKTHLAKRLLNNRSISSDAELGMISRLKQEAGNVFTQKLEGMFNDMNLSQELLQEYKHNSALQSAKPALDLNVSILASTFWPIDLSPHKIKCNFPKVLLAQIDQFTDFYLSKHTGRKLLWYPSMGSADVRVNFKDRKYDLNVSTIASVILLLFQDLKENQCLIFEEILEKTNIEVGDLKRNLQSLACAKYKILLKDPKGREVNAGDKFYFNENFVSNLARIKISTVAQTRVEDDSERKRTLEKVDESRKHQADACIVRVMKDRKVCEHNQLMAEVTRQLNPRFHPSPMMIKRRIEALIEREYLQRQADNGRIYEYLA

SEQ ID NO: 17863 - DNA, 2235 bp, Saccharomyces cerevisiae
  CDS (1)..(2235)
atgataactaataagaaaataaagataagtgtcccagaaaaactcggtttgtcagaagaatcttttgaggaatcctgggaaacagttaaatatgccattgatcatatatacagcgatgacatggccgacctttccttcgaacaagtgtacaagaccatttatactatcgttttaaataaaaaggggccaatactttataacagattgaaagattatttaatccaaaaattagcgcttttgagggaaacgatagtcaaggacaatactcatgattatgagtttcttggaactatggcacggttatgggaggtgcaatgccattgttttaaaataacgggagacttaatgatgtatatggacaaagtttattgcaaaccaaatagatgcatggaggtatacgacatgtgcctcgatcttttccgaatcgaaatattgcaaaaatgctcatcttctctcatctcagcactgatatctgatatagaaaggattcgtaatttaggatctgtcgactccgaacatactagtttgtggaaagtactaataggaatgatggagacattacatgacaatagagatagttttttcttaaccgattttgagccggttttgattagcgcgacagaagaatactacaataaagctattgatattgaattattaacgccaattgagagcctggaaaagattaggaagttaaggcagtttgaaagtatgctagactcctcttttctaaatgtggattctcataataagttgaagactgtattagaaaatgtccttatatggggaaagttgagtgatattattgaagatctaacgcacgaagcaatggtaatttcaaatggaaagctactccaagaaatttatgacttgtcaagcgaggaaaaatatcgcgttactgtcattgaatctattaaatcttacatcaataaaaatgccataaatattccttttaatgaaggtaaccgcaaaaaagggcagaatgcgattacttggtcttcggaaattgtagagctatatcgcagtcaacactcgtttttggaaagtattgattttggttctgttcgtcttaataatttgaccggggatgtatctaatgcaatacttggcgatgttttctcaatgtatttctctaaagaaggagcattaccatctgagtatctttctacctacgtggaccattgtatgaaacgaaccaaggaaaaagatgctgaaatagtgaagatcaagcaagatttgcttgatagtaccaaattaatcggactcctaactgagaaggatatatttgaaaagatttacaaaaaacaactctccagaagattactgcagcagaggtctttagtggaaattgaaaaatggatggtgcaaatgataaagaaggttctaggaactttttttacctcaaaattggagataatgctgcgagatatatctttatcctctgaaatgtatcaagcattccaacactcaacaatcaacagcatagaatatttgagttttgcaccacaagttttgacgagaacgagctggccctttcagagtactaatccaattgatgaaggtatttcactacctcctagaatgtcacaaattttagctggctttgagggctattacagcttaaaatacaaagaaagagtgctaaagtgggctcatcatctaagtgtaattgaaattggctgccaatttaatagcggttactacgaaataagtttttctgtttacgctggagtgattttccttctatttgaagattatgaagaattaacgttgggggaaatatatgaactaactcatattcccatagatgacgttaagtctcttgtaatgtcaatgtcgacaatacccagatgtaagattttgaaaaaatcatccagttcaggaaatatgaaattttcagttaattatttcttttcttctccaaacaggaaagtgaaagtgccggttattgcatgccctctaccatctcagaaatcagataatttggcaaccgcaagttccgtggacacttatgataatgaaattgttatggagcttagtgctattattgttcgtatcatgaaaacagaaggtaagctaagccatcagcaattacttgaaagaactacgaaacggacacagtctcggctcagtcttacaccgagcattttgaaacgaagcattcagcttttaatagagaaagaatacatccagagaaacgcagatgacccctcttattaccattacctttcctaa

SEQ ID NO: 17864 - protein, 744 aa, Saccharomyces cerevisiae
MITNKKIKISVPEKLGLSEESFEESWETVKYAIDHIYSDDMADLSFEQVYKTIYTIVLNKKGPILYNRLKDYLIQKLALLRETIVKDNTHDYEFLGTMARLWEVQCHCFKITGDLMMYMDKVYCKPNRCMEVYDMCLDLFRIEILQKCSSSLISALISDIERIRNLGSVDSEHTSLWKVLIGMMETLHDNRDSFFLTDFEPVLISATEEYYNKAIDIELLTPIESLEKIRKLRQFESMLDSSFLNVDSHNKLKTVLENVLIWGKLSDIIEDLTHEAMVISNGKLLQEIYDLSSEEKYRVTVIESIKSYINKNAINIPFNEGNRKKGQNAITWSSEIVELYRSQHSFLESIDFGSVRLNNLTGDVSNAILGDVFSMYFSKEGALPSEYLSTYVDHCMKRTKEKDAEIVKIKQDLLDSTKLIGLLTEKDIFEKIYKKQLSRRLLQQRSLVEIEKWMVQMIKKVLGTFFTSKLEIMLRDISLSSEMYQAFQHSTINSIEYLSFAPQVLTRTSWPFQSTNPIDEGISLPPRMSQILAGFEGYYSLKYKERVLKWAHHLSVIEIGCQFNSGYYEISFSVYAGVIFLLFEDYEELTLGEIYELTHIPIDDVKSLVMSMSTIPRCKILKKSSSSGNMKFSVNYFFSSPNRKVKVPVIACPLPSQKSDNLATASSVDTYDNEIVMELSAIIVRIMKTEGKLSHQQLLERTTKRTQSRLSLTPSILKRSIQLLIEKEYIQRNADDPSYYHYLS

SEQ ID NO: 17865 - DNA, 2205 bp, Schizosaccharomyces pombe
  CDS (1)..(2205)
atgcctccagaagcaaaacgtatcgtggttaaaggctttgacccacgaaagtcgaggcaaagacaagagacctactatgtgacgatgatagatcgtttgaacatggctttgcaagtagtgatggccggtttaggcttaaaaacaggttaccaagagttatattcgggagtcgaaaatttaacaagagcggatcaagcatctcggtgctttaacatcctacaacatcatatgtcttcaggaatccagcttttaaaggattctgcggagtcttttatacagcttgaagggactgaaacagacactaatgcatgcaccgtagtagtagggtgttggaacaaatggttggaaagagtcgagattgttcaaaacatattctattacatggacaaaacatttctttctcaccatccagattacccgacaatcgaagagctgtctctgtcactttttcgtgaaaagttgatggcagtcaaaaacatacaaattccctttttgaactctcttctccaaagctttgaaaatttacatagctctaaaagcactgatcacgcctatttacaggatgcgatgttaatgctacatcgcacggaaatgtatagctctgtgtttgttcccatgtacttagttatgctaagccgtttttatgatacggagtctagccaaaaaattcaagagctgcctttggaagagtacttggaatatgcgatgagttcgcttgagcgggaggatgcctacgttgaaaagtttgatattgtgcgcgataaaaagtccattcgagagactgttcaaaggtgtctaattacttcacatcttgacacactcacaaagggtataagtcagttcattgaaaaaagggatgcccattcttgtaaactactgtatgcattactgcaattcaatcatgaaaccgaatatttaattcagccctggtcggattgcttagtggacgttggtttcaagctcgttaacgatgaatcaaaggatgatactttggttcaagagctgttatcgttccacaaattcttacaagtcgtggtggatgaaagtttccttcatgatgaaaccctttcgtatgccatgcgaaaagccttcgagacgttcattaatggggcaaagggatctcaaagagaagctccagctaggcttattgcaaaatacattgattatttgctacgagttggcgaacaggcttcagggggtaagcctctgaaagaagtattttcggaaattttggatcttttccgctacatcgctagtaaagatatctttgaggcgtattacaagctggacattgcaaaacggcttctccttaataaatctgcaagtgcgcaaaatgaattaatgcttctggatatgcttaagaaaacctgcggtagtcagtttactcactctttggagggtatgtttcgagacgttaacatttcaaaagaatttacttcttcttttcgtcactcaaaggctgctcataaccttcatagagatttgtatgttaacgtcttgtcccaagcttactggccctcttatccagaatcacatatccggcttccagatgatatgcaacaggatttggattgttttgaaaaattttacctttcaaagcaggttgggaaaaaaatcagttggtacgcttcgctaggacattgcatcgtaaaagcccgatttccactgggcaataaggaactaagtatatcgcttttccaagcctgtgtcttacttcaattcaacaattgtttgggtggagaagggatttcgtatcaagatttgaaaaaatctacagagctctctgatatcgatttgactcgtacattacagtccttgagttgtgctcgcattcggccattagtgatggttcccaaaagcaaaaaacccagtccagacaccatgttttatgttaatgaaaagtttacagataagttatatcgtgtaaaaattaaccaaatttatttaaaggaagagcggcaagaaaattctgatgttcaagaacaagtagtgagagatcgacagtttgagttgcaagccagtatcgttcgagtaatgaaacaaaaggaaaaaatgaagcatgacgatttagttcaatacgttataaacaatgttaaggatcggggaatacccttggtgtctgatgtgaaaactgccattgaaaaactactagagaaagagtatctagaacgcgaggataatgatatttatacatatgtcacctaa

SEQ ID NO: 17866 - protein, 734 aa, Schizosaccharomyces pombe
MPPEAKRIVVKGFDPRKSRQRQETYYVTMIDRLNMALQVVMAGLGLKTGYQELYSGVENLTRADQASRCFNILQHHMSSGIQLLKDSAESFIQLEGTETDTNACTVVVGCWNKWLERVEIVQNIFYYMDKTFLSHHPDYPTIEELSLSLFREKLMAVKNIQIPFLNSLLQSFENLHSSKSTDHAYLQDAMLMLHRTEMYSSVFVPMYLVMLSRFYDTESSQKIQELPLEEYLEYAMSSLEREDAYVEKFDIVRDKKSIRETVQRCLITSHLDTLTKGISQFIEKRDAHSCKLLYALLQFNHETEYLIQPWSDCLVDVGFKLVNDESKDDTLVQELLSFHKFLQVVVDESFLHDETLSYAMRKAFETFINGAKGSQREAPARLIAKYIDYLLRVGEQASGGKPLKEVFSEILDLFRYIASKDIFEAYYKLDIAKRLLLNKSASAQNELMLLDMLKKTCGSQFTHSLEGMFRDVNISKEFTSSFRHSKAAHNLHRDLYVNVLSQAYWPSYPESHIRLPDDMQQDLDCFEKFYLSKQVGKKISWYASLGHCIVKARFPLGNKELSISLFQACVLLQFNNCLGGEGISYQDLKKSTELSDIDLTRTLQSLSCARIRPLVMVPKSKKPSPDTMFYVNEKFTDKLYRVKINQIYLKEERQENSDVQEQVVRDRQFELQASIVRVMKQKEKMKHDDLVQYVINNVKDRGIPLVSDVKTAIEKLLEKEYLEREDNDIYTYVT

SEQ ID NO: 17867 - DNA, 2199 bp, Glycine max
  CDS (1)..(2199)
atgagtaaccagaaaaagaggaatttccagatagaggcgtttaagcaccgcgtggtgatggatcccaagtacgccgacaagacatggaagattctcgaacatgcgattcacgagatttacaaccacaacgctagcggtctcagttttgaagagctttacagaaatgcatacaacatggtgcttcacaaatttggggagaagctctactcagggctggttgcgaccatgactgggcatctcaaagctatagctcaatctgttgaagctgctcaaggaggttcttttctggaagagctgaacaggaaatggaatgatcataataaggcgttacaaatgatcagagacatactgatgtacatggataggacctacattccaagcacccagaagactcctgttcatgaacttgggctgaacctgtggaaagaaaatgtcatttattccagccagatcaggactcggctattgaatacacttctggaattagtacatagtgaacgcactggtgaagttattgatagaggcattatgagaaatataacaaaaatgcttatggatttaggcccttctgtttatgggcaagattttgagactcattttcttcaagtttcagctgagttttaccaggcagaatcccagaaattcatcgagtgttgcgattgtggtgattatctgaaaaaagctgagaggcgtttgaatgaggaaatggaaagagtgagccattacttggattccaggacagaaaagaagattactaatgtggtggagaaggagatgattgaaaatcatatgctaagattaattcatatggagaattctggcttagtgcacatgctttgtgatgataaatatgaagatatgagtagaatgtataacttgtttcgtcgtgttactgatggtctttcaaaaattcgagaagtgatgacttcacatatgcgagagtctggtaaacaacttgttgctgatcctgaaagattgaaggatccagtcgaatatgtgcagaggctcttagatgagaaagataaatatgacaagatcataaacttggcattcatcaatgacaagtctttccagaatgctttgaattcctcatttgaatatttcatcaatctgaatcctcgttctccagagttcatttcactatttgtagatgataaactccggaaaggtctaaaaggggttagtgaggatgatgtagaggttactcttgacaaggtgatgatgctgttccgatacctgcaagaaaaagatgtttttgagaagtactacaaacagcatttggcaaagcggcttttgtctggaaaaacagtttctgatgatgcagagagaagtctcatagttaagctcaagacagaatgtggttaccaatttacatctaaattggagggaatgtttacagacatgaaaacctctcaggacacaatgcagggcttttatggctgccaccctgaactaagtgacggtcctacgcttactgtccaagttcttacaacagggtcttggccaactcagtctagtgttacatgcaacttgccagcagaaatgtctgcgctgtgcgagaagtttcggtcattttaccttggcacccatactggcaggagattgtcctggcaaactaatatgggcacggcagacttgaaagcaacctttgggaaggggcagaagcacgagttaaatgtctctacttaccaaatgtgtgttgtcatgctgtttaataatgctgatagactgagctacaaggagattgagcaagcaactgagattcctgcttcggatcttaaaagatgcttgcaatcattggctttagttaagggaagaaatgtccttagaaaggaacctatgggtaaagatattggtgacgatgatgcattctatgttaatgacaagttcagcagcaaactttacaaggttaaaataggaactgtagttgcacaaaaggaatctgaacctgagaagctggaaacccgacagagagtggaggaagacaggaagccccagattgaagcagcaattgtgaggatcatgaaatccaggaagcaacttgatcataacaatcttatagcggaggtcacgaagcagttgcaatcgcgtttcctggcaaatccaacggaggtaaagaaacggattgagtctctcattgagcgggactttttggagagggatgatagtgacagaagattgtaccgatatcttgcttag

SEQ ID NO: 17868 - protein, 732 aa, Glycine max
MSNQKKRNFQIEAFKHRVVMDPKYADKTWKILEHAIHEIYNHNASGLSFEELYRNAYNMVLHKFGEKLYSGLVATMTGHLKAIAQSVEAAQGGSFLEELNRKWNDHNKALQMIRDILMYMDRTYIPSTQKTPVHELGLNLWKENVIYSSQIRTRLLNTLLELVHSERTGEVIDRGIMRNITKMLMDLGPSVYGQDFETHFLQVSAEFYQAESQKFIECCDCGDYLKKAERRLNEEMERVSHYLDSRTEKKITNVVEKEMIENHMLRLIHMENSGLVHMLCDDKYEDMSRMYNLFRRVTDGLSKIREVMTSHMRESGKQLVADPERLKDPVEYVQRLLDEKDKYDKIINLAFINDKSFQNALNSSFEYFINLNPRSPEFISLFVDDKLRKGLKGVSEDDVEVTLDKVMMLFRYLQEKDVFEKYYKQHLAKRLLSGKTVSDDAERSLIVKLKTECGYQFTSKLEGMFTDMKTSQDTMQGFYGCHPELSDGPTLTVQVLTTGSWPTQSSVTCNLPAEMSALCEKFRSFYLGTHTGRRLSWQTNMGTADLKATFGKGQKHELNVSTYQMCVVMLFNNADRLSYKEIEQATEIPASDLKRCLQSLALVKGRNVLRKEPMGKDIGDDDAFYVNDKFSSKLYKVKIGTVVAQKESEPEKLETRQRVEEDRKPQIEAAIVRIMKSRKQLDHNNLIAEVTKQLQSRFLANPTEVKKRIESLIERDFLERDDSDRRLYRYLA

SEQ ID NO: 17869 - DNA, 2211 bp, Zea mays
  CDS (1)..(2211)
atgagcagcggcggcccgccgaggaagcgcaacttcaagatcgaggcgttcaagaaccgtgtggacctcgaccccaagtacgcggagcggacatggaaggtcctcgagcacgccatccacgagatctacaaccgtaacgccagtggtctctccttcgaggagctttacaggagtgcctacaacatggtgcttcacaagtacggagagaagctgtatgatggccttcagagcacaatgacttggcgcttgaaggaaatatcaaaatcaatagaggctgcacagggtggcttatttttggaggagctgaatgcaaagtggatggatcacaacaaggcactacagatgatacgagatattcttatggacatggacaggacatatgtccctacatctcataggacacctgttcatgagcttggtctgaatttgtggagggatcacataattcactcccccatgatccatagtcggctggttaacacccttttggatcttataaaaagggaaagaatgggtgaagtgattaacagaggcctgatgaggagcataacaaagatgctgatggacctgggtcctgctgtgtatcaagacgattttgagaaaccatttctggatgtttcagcccgcttctacagtgtggagtctcaagagttcattgtgtgctgtgactgtgggaactaccttaagaaggccgagagacgtctaaatgaggaaatggagcgtgtctcacactacttggatgctggcagtgaggcaaagataactagtgtagtggagaaagaaatgatagccaatcacatgcacagattggttcacatggaaaattcagggcttgttaacatgctagtagatgaccaatacaaagatttgggtcggatgtattccttgttccgaagggttcctgatgggttatcaacgattagagatgtcatgacttcttacttgagggaaacagggaagcagttagtgatagatccagaaagtttgaaagatccagtggaatttgttcaacgcttgttaaatgagaaggacaaacatgataagatcatcagtgttgccttcggcaatgacaaaaccttccagaatgctctgaattcgtctttcgagtatttcctcaacttaaacagccgatcacctgaattcatatcattatatgttgatgacaaactccgcaaaggacttaaaggagcaacggaagaagatgtggaagttatattggacaaagtcgtgatgctgttccgatacctccaggagaaggatgtgtttgaaaagtactataagcagcatttggcgaaaaggctcctgtctagcaaaactgtttctgatgatgctgagagaagtatgatagttaaactcaagacagaatgtggataccagttcacttccaagctagagggcatgttcactgatatgaaaacctcccaggacaccatgcaagacttctatgccaagaagtctgaggaacttggggatggccctacgcttgatgtccacattttgacaactggttcttggcctacgcagcccagtcctccttgcaaccttccaactgaaatacttacagtatgtgagaaattccgggcatattatcttggaactcacaatggcaggagattgacatggcaaacaaacatgggtacagctgatataaaagccacatttggaaaaggccagaagcatgaactaaatgtatccacttatcagatgtgtgttctcatgctgtttaacaatgctgatggattgacctacaaagacattgaacgggatactgagatacctgcctcagacctaaagagatgtctgcagtcacttgcttgtgtcaaggggaaaaatgttctccgtaaggagcctatgagcaaggacatatctgaggatgacacattctacttcaatgataagttcacaagcaagcttgttaaagtgaagattgggacagtggtggcacagaaggaatctgaaccagagaaacaggagactcgccaacgggttgaggaggacaggaaacctcagatcgaagcagccattgtcaggatcatgaaatcacggagggtgttggatcataacagcattgtagctgaggtcaccaagcaattgcaagcccgtttcttgccaaatcctgttgtcataaagaaacgcattgaatctctgattgaacgagagttcttggaaagagacaaagtagatagaaaattatatcgttatcttgcatag

SEQ ID NO: 17870 - protein, 736 aa, Zea mays
MSSGGPPRKRNFKIEAFKNRVDLDPKYAERTWKVLEHAIHEIYNRNASGLSFEELYRSAYNMVLHKYGEKLYDGLQSTMTWRLKEISKSIEAAQGGLFLEELNAKWMDHNKALQMIRDILMDMDRTYVPTSHRTPVHELGLNLWRDHIIHSPMIHSRLVNTLLDLIKRERMGEVINRGLMRSITKMLMDLGPAVYQDDFEKPFLDVSARFYSVESQEFIVCCDCGNYLKKAERRLNEEMERVSHYLDAGSEAKITSVVEKEMIANHMHRLVHMENSGLVNMLVDDQYKDLGRMYSLFRRVPDGLSTIRDVMTSYLRETGKQLVIDPESLKDPVEFVQRLLNEKDKHDKIISVAFGNDKTFQNALNSSFEYFLNLNSRSPEFISLYVDDKLRKGLKGATEEDVEVILDKVVMLFRYLQEKDVFEKYYKQHLAKRLLSSKTVSDDAERSMIVKLKTECGYQFTSKLEGMFTDMKTSQDTMQDFYAKKSEELGDGPTLDVHILTTGSWPTQPSPPCNLPTEILTVCEKFRAYYLGTHNGRRLTWQTNMGTADIKATFGKGQKHELNVSTYQMCVLMLFNNADGLTYKDIERDTEIPASDLKRCLQSLACVKGKNVLRKEPMSKDISEDDTFYFNDKFTSKLVKVKIGTVVAQKESEPEKQETRQRVEEDRKPQIEAAIVRIMKSRRVLDHNSIVAEVTKQLQARFLPNPVVIKKRIESLIEREFLERDKVDRKLYRYLA

SEQ ID NO: 17871 - DNA, 2370 bp, Glycine max
  CDS (1)..(2370)
atgtctctccccaccaaacggtcgagcaccgctggttcctccctgtcgccgccacctcctatgaaaaaggccaagtccctcctcctccgctcctcctccgacgaccacgacgccgttttggacccttcctccatgcctctcgacgacgatctccccaatgcccgcgccgccaatctcgcccgcaagaaagccaccccgccccaacccgccaagaagctcctcatcaagctccacaaagctaaaccaacattgcccacaaatttcgaggaggatacatgggcaaaactaaagtctgccattggtgctatatttttgaagcaacctaactcttgtgacttggagaagctttatcaggctgtgaatgatctctgcctttataaaatgggtggaaatctttatcaacgaattgaaaaggagtgtgaagcacatatatctgcagcactgcagtctttggttggccaaagcccagatttggttgtttttctgtctctagttgagagatgttggcaggatctttgtgaccaaatgttgatgattcgtggtatagccttgtatctagataggacatatgtgaagcaaacagcaaatgtccgatcattatgggacatgggcttacaacttttccgcaaacatctttcattgtctcctgaagtagaacacaaaactgttacaggtcttctacgaatgattgaaagtgaaagaaaaggtgaagcagtggatagaactcttctaaaccaccttttgaagatgtttactgctctgggaatttatgcagaaagctttgagaagccattccttgaatgcacatctgaattttatgctgctgaaggtgtgaaatacatgcagcaatcagatgttccagattacttgaagcatgtggagatacgattgcaagaagaacatgaaagatgtttgatctacttggatgcaagtactaggaagccattgatagcaacagcagaaaaacaacttcttgaacgtcatatacctgccattcttgataagggctttgcaatgcttatggatgggaatcgtattgaagaccttcagagaatgtactcactcttttcaagggtcaatgccctcgagtcactgaggcaggccattagttcatatatcaggagaactggtcagggcattgttttggacgaggagaaagataaggatatggtttcatcccttttggaatttaaggcttctcttgacacaacatgggaagaaagcttttccaagaatgaagcattctgtaacaccatcaaagattcgtttgagcatctcatcaatcttcgtcagaaccgacctgctgaattgattgccaagtttttggatgagaaacttcgtgcaggtaacaagggcacttcagaagaagagttggagggtacacttgataaagtccttgttttattcaggttcattcagggcaaggatgtgtttgaggcattttataagaaagatcttgcaaaaagactgttgttgggaaagagtgcttctattgatgcagagaaatctatgatctccaagttgaagaccgagtgtggcagccagttcacaaacaaactagaagggatgtttaaggacattgaattatcaaaagaaataaacgagtccttcaaacagtcatcccaggctaggacaaaactcccatccgggattgaaatgagtgttcatgttttgacaactgggtactggccgacgtatccacccatggatgttagacttcctcatgaattgaatgtttaccaggatattttcaaagagttctatctaagtaaatatagtggaaggcgtctgatgtggcaaaattcattaggtcactgtgtcttaaaggcagagtttcctaaagggaaaaaagagttggctgtctccctatttcagactgttgttctgatgttattcaatgatgctgagaaactaagctttcaagatatcaaggactctactggtatagaggacaaggaactgagaaggactctgcaatcacttgcatgtggaaaagttcgtgtcctacaaaagttgccaaagggtagagatgtggaggatgatgactcatttgtttttaatgaagggtttacagctcctctttatcgtataaaggtgaatgcaattcagttgaaggagacagtagaggagaacacaagcaccactgaaagagttttccaagaccgtcaatatcaggttgatgctgctattgtgaggataatgaagactaggaaagtgcttagtcacacgcttcttattactgaactcttccaacagctcaaatttccaataaaaccagctgacttgaagaaaaggatcgaaagcctgattgatagggagtatctggagagagacaagaacaaccctcaaatatacaattaccttgcataa

SEQ ID NO: 17872 - protein, 789 aa, Glycine max
MSLPTKRSSTAGSSLSPPPPMKKAKSLLLRSSSDDHDAVLDPSSMPLDDDLPNARAANLARKKATPPQPAKKLLIKLHKAKPTLPTNFEEDTWAKLKSAIGAIFLKQPNSCDLEKLYQAVNDLCLYKMGGNLYQRIEKECEAHISAALQSLVGQSPDLVVFLSLVERCWQDLCDQMLMIRGIALYLDRTYVKQTANVRSLWDMGLQLFRKHLSLSPEVEHKTVTGLLRMIESERKGEAVDRTLLNHLLKMFTALGIYAESFEKPFLECTSEFYAAEGVKYMQQSDVPDYLKHVEIRLQEEHERCLIYLDASTRKPLIATAEKQLLERHIPAILDKGFAMLMDGNRIEDLQRMYSLFSRVNALESLRQAISSYIRRTGQGIVLDEEKDKDMVSSLLEFKASLDTTWEESFSKNEAFCNTIKDSFEHLINLRQNRPAELIAKFLDEKLRAGNKGTSEEELEGTLDKVLVLFRFIQGKDVFEAFYKKDLAKRLLLGKSASIDAEKSMISKLKTECGSQFTNKLEGMFKDIELSKEINESFKQSSQARTKLPSGIEMSVHVLTTGYWPTYPPMDVRLPHELNVYQDIFKEFYLSKYSGRRLMWQNSLGHCVLKAEFPKGKKELAVSLFQTVVLMLFNDAEKLSFQDIKDSTGIEDKELRRTLQSLACGKVRVLQKLPKGRDVEDDDSFVFNEGFTAPLYRIKVNAIQLKETVEENTSTTERVFQDRQYQVDAAIVRIMKTRKVLSHTLLITELFQQLKFPIKPADLKKRIESLIDREYLERDKNNPQIYNYLA

SEQ ID NO: 17873 - DNA, 2235 bp, Glycine max
  CDS (1)..(2235)
atgtccatgagtgagcgcaagactattgacctagatcaaggatgggattttatgcagaagggcattttgaagctgaagaacattctagaagggcttcccgagcctcagttcagctcggaggactatatgatgctatacacgaccatatacaatatgtgcactcagaagccgcctcatgactattcccaacaactgtatgacaagtacagggaatcgtttgaagaatacatcgtatcaacggtattaccttctttgagagagaagcatgatgaatttatgttaagagaacttgtgaaaaggtgggcaaaccataaaattatggttaggtggctttctcgtttctttcactacttggaccgctactttattgcccggaggtcacttccgccacttaatgaagttgggttgacttgcttccgtgatttgatttacaaggaactaaatgggaaagttagagatgcagttatttcactaattgatcaagaacgggagggagaacagattgatcgagctctattaaagaatgtattagacatatttgttgaaattggaatggggcaaatggatcactatgagaatgattttgaagctgccatgctcaaagacacttcttcttattattctcgaaaggcttcaaattggatcctagaagattcttgtcctgattatatgctcaaggctgaggagtgcttaaaacgggagaaagatagggttgctcattacttgcactctagtagcgagccaaagttattagagaaagttcaacatgagttgttatctgtgtatgcaaaccaactccttgagaaagagcactctggatgtcatgctttacttagagatgacaaggttgaagacttgtcaagaatgttcaggctattctctaaaatacctcgaggcttagatcctgtttccagtatatttaagcagcatgttaccactgaaggtatggctttggtgaagcatgctgaagatgcagctagcaacaaaaaggcagagaaaaaggatatcgtaggtctgcaggagcaggtttttgttcgcaaggtgattgagctgcatgacaagtacctggcatatgtgaatgattgtttccagaatcatactcttttccacaaggctcttaaagaggcttttgaggtcttttgcaacaaaggtgttgctggaagttcaagcgcagaactgcttgcctccttctgtgataacattcttaagaaaggaggaagtgaaaaattaagtgatgaagcaattgaagaaactcttgaaaaggtggtcaagctgcttgcctatattagtgacaaagacttgtttgctgaattctataggaagaagcttgctcgaaggctcctttttgacaagagtgccaatgatgatcatgagagaagtattttgacaaaattgaagcaacaatgtggtggacagtttacctcaaagatggaaggaatggttacagatttgacactggcaaaggagaatcaaactagctttgaggagtatttaagcaataatcccaatgcagaccctggcatagacttgacagttacagttctgactactggcttctggcctagttacaaatcttttgatctcaatcttcctgcagaaatgataaggtgtgttgaagttttcaaagaattttatcaaactaaaacgaagcacagaaaacttacatggatttattccttgggtacgtgtaatataagtgggaaatttgacccaaaaaccgtggagctgattgttacaacctaccaggcttcagcattactgctttttaattcgtctgatagactgagttactcagagataatgactcagttaaacttatctgacgatgatgttattagactgctccattccttatcatgtgccaagtacaagattctcaacaaggagccaaatacaaaaacaatattgtccactgattattttgaatttaattctaaatttactgacaaaatgaggagaatcaagattcctcttcctcctgtggatgagaagaaaaaggttattgaggatgttgacaaggacagaagatatgctattgatgcctcaattgtgcgtattatgaagagtagaaaagttttgggctaccaacaattagtcatggagtgtgttgagcagttaggtcgcatgtttaagcctgacgtcaaggctattaaaaagcggattgaagatttgatttctcgtgactacttggaaagagacaaagataatgctaatatgttcaagtacttggcttga

SEQ ID NO: 17874 - protein, 744 aa, Glycine max
MSMSERKTIDLDQGWDFMQKGILKLKNILEGLPEPQFSSEDYMMLYTTIYNMCTQKPPHDYSQQLYDKYRESFEEYIVSTVLPSLREKHDEFMLRELVKRWANHKIMVRWLSRFFHYLDRYFIARRSLPPLNEVGLTCFRDLIYKELNGKVRDAVISLIDQEREGEQIDRALLKNVLDIFVEIGMGQMDHYENDFEAAMLKDTSSYYSRKASNWILEDSCPDYMLKAEECLKREKDRVAHYLHSSSEPKLLEKVQHELLSVYANQLLEKEHSGCHALLRDDKVEDLSRMFRLFSKIPRGLDPVSSIFKQHVTTEGMALVKHAEDAASNKKAEKKDIVGLQEQVFVRKVIELHDKYLAYVNDCFQNHTLFHKALKEAFEVFCNKGVAGSSSAELLASFCDNILKKGGSEKLSDEAIEETLEKVVKLLAYISDKDLFAEFYRKKLARRLLFDKSANDDHERSILTKLKQQCGGQFTSKMEGMVTDLTLAKENQTSFEEYLSNNPNADPGIDLTVTVLTTGFWPSYKSFDLNLPAEMIRCVEVFKEFYQTKTKHRKLTWIYSLGTCNISGKFDPKTVELIVTTYQASALLLFNSSDRLSYSEIMTQLNLSDDDVIRLLHSLSCAKYKILNKEPNTKTILSTDYFEFNSKFTDKMRRIKIPLPPVDEKKKVIEDVDKDRRYAIDASIVRIMKSRKVLGYQQLVMECVEQLGRMFKPDVKAIKKRIEDLISRDYLERDKDNANMFKYLA

SEQ ID NO: 17875 - DNA, 2235 bp, Glycine max
  CDS (1)..(2235)
atgtccatgagtgagcgcaagactattgacctagatcaaggatgggattttatgcagaagggcattttgaagctgaagaacattctagaagggcttcccgagcctcagttcagctcggaggactatatgatgctatacacgaccatatacaatatgtgcactcagaagccgcctcatgactattcccaacaactgtatgacaagtacagggaatcatttgaagaatacatcgtatcaacggtattaccttctttgagagagaagcatgatgaatttatgttaagagaacttgtgaaaaggtgggcaaaccataaaattatggttaggtggctttctcgtttctttcactacttggaccgctactttattgcccggaggtcacttccgccacttaatgaagttgggttgacttgcttccgtgatttggtttacaaggaattaaacgggaaagtgagagatgcagtgatttcccttattgatcaagaacgtgaaggagagcagattgaccgagctttattgaagaatgtattagatatatttgttgaaattggaatggggcaaatggatcactatgagaatgattttgaagctgcgatgctcaaagacacttctgcttattattctcgaaaggcttcaaactggatcctagaagattcttgtcctgactatatgctcaaggctgaggaatgcttaaaacgggagaaagatagggttgcccattatttgcactctagcagtgagccaaagttattagagaaagttcaacacgaactgttatctgtatatgcgaaccaactccttgaaaaggagcattctggatgtcatgcattactaagagatgacaaggttgaagacttgtcaaggatgttcaggctcttttctaaaatacccagaggtttagatcctgtttccagtatatttaaacagcatgtgactgctgaaggcatggcattagtgaagttggctgaagatgcagtgagtaccaagaaggcggagaaaaaggatattgttggtttacaggagcaggtttttgttcggaaggtgattgagctgcatgacaagtacctggcatatgtgaatgattgtttccaaaatcatacactttttcacaaggctcttaaggaggcttttgagatcttttgcaacaagggtgtcgctggaagctcaagtgcagaactgcttgccactttttgtgacaatattcttaagaaaggaggaagtgaaaaattgagtgatgaagcaattgaagaaactcttgaaaaggttgtcaagttgcttgcctatattagtgacaaagatttgtttgctgaattttataggaagaagcttgctcgaaggctcctttttgacaagagtgccaatgatgatcatgagagaagtattttgacaaaactgaagcaacaatgtggtggtcaatttacctcaaagatggaaggaatggttacagatttgacattggcaaaggagaaccaaacaagctttgaggagtatttaaccaataatcctaatgcagaccctggaatagacttgacggttacagttttgactactggcttctggcctagttacaaatcttttgatctcaatcttccagcagaaatggttagatgtgttgaagttttcaaggaattttatcaaacaaaaactaagcacaggaaacttacttggatttattccttgggaacctgcaacattagtgggaaattcgatccaaaaactgttgagctgattgtaacaacttatcaggcttcggcattgcttctatttaattcctcagatagactgagttattcggagataatgactcagttaaacttatctgatgacgatgttattagactgctccactccttgtcatgtgccaagtacaagattcttaacaaggaaccaaacacaaaaacaatatcttctaccgactattttgaatttaattcaaaatttacggacaaaatgaggagaatcaagattcctcttcctcctgttgatgagaagaaaaaagtaattgaggatgttgacaaagacagaagatatgctattgatgcctcaattgtgcgtattatgaagagtcggaaggtgttaagttaccaacagttggtaatggagtgtgttgagcagctaggtcgcatgtttaagccggatgtcaaggcaattaagaagcggattgaagatttgatctctcgagactacttagagagagacaaagacaatgcaaatttgttccggtacttggcttga

SEQ ID NO: 17876 - protein, 744 aa, Glycine max
MSMSERKTIDLDQGWDFMQKGILKLKNILEGLPEPQFSSEDYMMLYTTIYNMCTQKPPHDYSQQLYDKYRESFEEYIVSTVLPSLREKHDEFMLRELVKRWANHKIMVRWLSRFFHYLDRYFIARRSLPPLNEVGLTCFRDLVYKELNGKVRDAVISLIDQEREGEQIDRALLKNVLDIFVEIGMGQMDHYENDFEAAMLKDTSAYYSRKASNWILEDSCPDYMLKAEECLKREKDRVAHYLHSSSEPKLLEKVQHELLSVYANQLLEKEHSGCHALLRDDKVEDLSRMFRLFSKIPRGLDPVSSIFKQHVTAEGMALVKLAEDAVSTKKAEKKDIVGLQEQVFVRKVIELHDKYLAYVNDCFQNHTLFHKALKEAFEIFCNKGVAGSSSAELLATFCDNILKKGGSEKLSDEAIEETLEKVVKLLAYISDKDLFAEFYRKKLARRLLFDKSANDDHERSILTKLKQQCGGQFTSKMEGMVTDLTLAKENQTSFEEYLTNNPNADPGIDLTVTVLTTGFWPSYKSFDLNLPAEMVRCVEVFKEFYQTKTKHRKLTWIYSLGTCNISGKFDPKTVELIVTTYQASALLLFNSSDRLSYSEIMTQLNLSDDDVIRLLHSLSCAKYKILNKEPNTKTISSTDYFEFNSKFTDKMRRIKIPLPPVDEKKKVIEDVDKDRRYAIDASIVRIMKSRKVLSYQQLVMECVEQLGRMFKPDVKAIKKRIEDLISRDYLERDKDNANLFRYLA

SEQ ID NO: 17877 - DNA, 2235 bp, Glycine max
  CDS (1)..(2235)
atgtccatgagtgagcgcaagactattgacctagatcaaggatgggattttatgcagaagggcattttgaagctgaagaacattctagaagggcttcccgagcctcagttcagctcggaggactatatgatgctatacacgaccatatacaatatgtgcactcagaagccgcctcatgactattcccaacaactgtacgacaagtacaaggaatcgtttgaagaatacatcgtatcaacggtattaccttctttgagagagaaacacgatgaatttatgttaagagaacttgtgaaaagatgggcaaaccataaaattatggttaggtggctttctcggttctttcactacttggaccgatactttattgcccggaggtcacttccgccacttaatgaagttgggttgacttgcttccgcgatttgatttacaaggaactaaatgggaaagttagagatgcagttatttcactaattgatcaagaacgggagggagaacagattgatcgagctctattaaagaatgtattagacatatttgttgaaattggaatggggcaaatggatcactatgagaatgattttgaagctgccatgctcaaagacacttcttcttattattctcgaaaggcttcaaattggatcctagaagattcttgtcctgattatatgctcaaggctgaggagtgcttaaaacgggagaaagatagggttgctcattacttgcactctagtagcgagccaaagttattagagaaagttcaacatgagttgttatctgtgtatgcaaaccaactccttgagaaagagcactctggatgtcatgctttacttagagatgacaaggttgaagacttgtcaagaatgttcaggctattctctaaaatacctcgaggcttagatcctgtttccaatatatttaagcagcatgttaccactgaaggtatggctttggtgaagcatgctgaagatgcagctagcaacaaaaaggcagagaaaaaggatatcgtaggtctgcaggagcaggtttttgttcggaaggtgattgagctgcatgacaagtacctggcatatgtgaatgattgtttccagaatcatactcttttccacaaggctcttaaagaggcttttgaggtcttttgcaacaaaggtgttgctggaagttcaagcgcagaactgcttgcctccttctgtgataacattcttaagaaaggaggaagtgaaaaattaagtgatgaagcaattgaagaaactcttgaaaaggtggtcaagctgcttgcctatattagtgacaaagacttgtttgctgaattctataggaagaagcttgctcgaaggcttctctttgacaagagtgccaatgatgatcatgagcgaagtattttgacaaaattgaagcaacaatgtggtggacagtttacctcaaagatggaaggaatggttacagatttgacactggcaaaggagaatcaaactagctttgaggagtatttaagcaataatcccaatgcagaccctggcatagacttgacagttacagttctgactactggcttctggcctagttacaaatcttttgatctcaatcttcctgcagaaatgataaggtgtgttgaagttttcaaagaattttatcaaactaaaacgaagcacagaaaacttacatggatttattccttgggtacgtgtaatataagtgggaaatttgacccaaaaaccgtggagctgattgttacaacctaccaggcttcagcattactgctttttaattcgtctgatagactgagttactcagagataatgactcagttaaacttatctgacgatgatgttattagactgctccattccttatcatgtgccaagtacaagattctcaacaaggagccaaatacaaaaacaatatcgtccactgattattttgaatttaattataaatttactgacaaaatgaggagaatcaagattcctcttcctcccgtggatgagaagaaaaaagtaattgaggatgttgacaaggacagaagatatgctattgatgcctcaattgtgcgtattatgaagagtagaaaagttttgggctaccaacaattagtcgttgagtgtgttgagcagttaggtcgcatgtttaagcctgacgtcaaggctattaaaaagcggattgaagatttgatttctcgtgactacttggaaagagacaaagataatgctaatatgttcaagtacttggcttga

SEQ ID NO: 17878 - protein, 744 aa, Glycine max
MSMSERKTIDLDQGWDFMQKGILKLKNILEGLPEPQFSSEDYMMLYTTIYNMCTQKPPHDYSQQLYDKYKESFEEYIVSTVLPSLREKHDEFMLRELVKRWANHKIMVRWLSRFFHYLDRYFIARRSLPPLNEVGLTCFRDLIYKELNGKVRDAVISLIDQEREGEQIDRALLKNVLDIFVEIGMGQMDHYENDFEAAMLKDTSSYYSRKASNWILEDSCPDYMLKAEECLKREKDRVAHYLHSSSEPKLLEKVQHELLSVYANQLLEKEHSGCHALLRDDKVEDLSRMFRLFSKIPRGLDPVSNIFKQHVTTEGMALVKHAEDAASNKKAEKKDIVGLQEQVFVRKVIELHDKYLAYVNDCFQNHTLFHKALKEAFEVFCNKGVAGSSSAELLASFCDNILKKGGSEKLSDEAIEETLEKVVKLLAYISDKDLFAEFYRKKLARRLLFDKSANDDHERSILTKLKQQCGGQFTSKMEGMVTDLTLAKENQTSFEEYLSNNPNADPGIDLTVTVLTTGFWPSYKSFDLNLPAEMIRCVEVFKEFYQTKTKHRKLTWIYSLGTCNISGKFDPKTVELIVTTYQASALLLFNSSDRLSYSEIMTQLNLSDDDVIRLLHSLSCAKYKILNKEPNTKTISSTDYFEFNYKFTDKMRRIKIPLPPVDEKKKVIEDVDKDRRYAIDASIVRIMKSRKVLGYQQLVVECVEQLGRMFKPDVKAIKKRIEDLISRDYLERDKDNANMFKYLA

SEQ ID NO: 17879 - DNA, 2502 bp, Zea mays
  CDS (1)..(2502)
atgtctcagccccacgccgccgctcccgcctcgaagcgccccttctcgtccaccaccacatccccgtctccgacgtcctcccctgcgacgccgcttatgaagaaggccaagcacccggccgccaccgcctcctccgttgggacggtcgagaagaacggtatccatcttgataccaccgccgccgccgccgccatgggcgggggccgaacgaacggcgaggaggatgcggaaatggtgcccgtggaccaagatgagctccccgcgcccagcgcgccggcctccgcgggcgttgccgccaacctcttccgaaagaaggccacgcttccgcagccgtcgacctccgcccgcaagcccctccgcatcagaataggtcaaccaaaactgccaaaaaacttcgaagaggatacatggacgattttgaaggatgctatcacagctatttttctcaagcagaaactttcttgtgatgttgagaaactctatcaggctgctggtgatctttgtctacacaagctaggggcaaacctatacgaacgaatcaagaaagaatgtgaaatacacatagctgaaaagatatcagcattagtgggccaaagcccagatttggttgtatttttgtctctggtccaaagaacatggccagctttttgtgctcagatgttgtttgttggcggttttgctttacttcttgatgtaaaatatgtcaagaatgtagcaaatatttgttcagtgtgggatatggggctgcagctgtttcgcaagcatctatcactatccccagagattgaacacaaaactgtaactggccttctcagattgattgagagtgagaggcttggtgaagcaatagataggacattacttagtcatcttttgaagatgcttaccgctcttggaatgtattctgagagttttgaaaagccctttcttgagtgcacttctgaattttatgctacggaaggtgttaaatatatgcaacaatctgatattccagactacctgaagcatgtagagtcgaggttgcaagaagaacatgaaaggtgcattctgtatttggaagctaacacgaggaagccactgatcgcaactactgaaacgcaattgctagaacgtcatacatctgcaattattgagaaggggttcgctatgctcatggatgcaaatcgtataaatgacctcttgaggatgtacaaccttttccagagggttaatgctgttgagctgctaaaactagcgcttagttcatatatccgggctacaggccagggcattattatggatgaagaaaaggacagagagttggttccatttcttcttgattttaaggcatccctcgacaaaatattggaagaaagttttgccaagaacgaggctttctccaataccataaaagattcatttgagcaccttatcaatctacgacagaaccgacctgcggaattgattgcaaagtttcttgatgagaaacttcgagctggcaataaagggacatcggaagaagagctggagggtatacttgataaagttctggtcctgtttcggtttatacaaggtaaagatgtatttgaggcattctacaagaaggatctagctaagaggttgctgcttgggaagagtgcatcaatagatgctgaaaaatcgatgatcacaaaactcaaaactgagtgtggaagtcagtttaccaacaagctggagggaatgttcaaggacattgaattatccaaagaaataaatgattcattcagacaatcatctcaagctaggacaaagcttccctctggcattgaaatgagtgtccatgtgcttacaacaggctattggcctacatatccgccaatggacgtgaaactcccacacgaactgaatgtgtatcaggatatatttaaagagttctatttaagcaagtacagtggaaggcgtttaatgtggcagaattctttgggacactgtgtcttgaaagcagactttcccaaaggcaaaaaggaacttgcagtgtcattgttccagagtgtggttttgatgttgttcaatgacgcacaaaagttaagcttcattgacatcaaagattccactggtatcgaggataaagaattgagacgaacactgcaatctcttgcatgtggtaaagttcgggttctccaaaagataccaaaagggagagatgtagaagataaggatgaatttgtattcaatgaagattttagtgctcccctctaccgcataaaggtaaatgcaattcaaatgaaagagacggtagaagaaaacacgagcaccactgagagagtgttccaggatcggcagtatcaggttgacgcggccatagttcgaataatgaagacgcggaaggtcctcagccacacccttctaataaccgagctttaccagcagctcaagttccctgttaagccagctgatatcaagaaaagaatagagagcttgatcgaccgggagtacctggagcgcgacaggagtaacccccagatctacaactatctggcttga

SEQ ID NO: 17880 - protein, 833 aa, Zea mays
MSQPHAAAPASKRPFSSTTTSPSPTSSPATPLMKKAKHPAATASSVGTVEKNGIHLDTTAAAAAMGGGRTNGEEDAEMVPVDQDELPAPSAPASAGVAANLFRKKATLPQPSTSARKPLRIRIGQPKLPKNFEEDTWTILKDAITAIFLKQKLSCDVEKLYQAAGDLCLHKLGANLYERIKKECEIHIAEKISALVGQSPDLVVFLSLVQRTWPAFCAQMLFVGGFALLLDVKYVKNVANICSVWDMGLQLFRKHLSLSPEIEHKTVTGLLRLIESERLGEAIDRTLLSHLLKMLTALGMYSESFEKPFLECTSEFYATEGVKYMQQSDIPDYLKHVESRLQEEHERCILYLEANTRKPLIATTETQLLERHTSAIIEKGFAMLMDANRINDLLRMYNLFQRVNAVELLKLALSSYIRATGQGIIMDEEKDRELVPFLLDFKASLDKILEESFAKNEAFSNTIKDSFEHLINLRQNRPAELIAKFLDEKLRAGNKGTSEEELEGILDKVLVLFRFIQGKDVFEAFYKKDLAKRLLLGKSASIDAEKSMITKLKTECGSQFTNKLEGMFKDIELSKEINDSFRQSSQARTKLPSGIEMSVHVLTTGYWPTYPPMDVKLPHELNVYQDIFKEFYLSKYSGRRLMWQNSLGHCVLKADFPKGKKELAVSLFQSVVLMLFNDAQKLSFIDIKDSTGIEDKELRRTLQSLACGKVRVLQKIPKGRDVEDKDEFVFNEDFSAPLYRIKVNAIQMKETVEENTSTTERVFQDRQYQVDAAIVRIMKTRKVLSHTLLITELYQQLKFPVKPADIKKRIESLIDREYLERDRSNPQIYNYLA

SEQ ID NO: 17881 - DNA, 2235 bp, Zea mays
  CDS (1)..(2235)
atggcggggcaggagcgtaggacaatcgatctggaggagggatgggcgttcatgcagaagggcatcaccaagctgaagaacatcctcgagggcaagcccgagccgcagttcagttccgaggactacatgatgctctacacgacgatatacaacatgtgcacgcagaagccgccgcacgactactcacagcagctctacgacaagtatcgggagtcgttcgaggagtacatcgcctccatggtactaccttcattaagggagaaacatgacgagtttatgctgagggagctagtgcaaaggtggtcaaaccataaagtcatggttcgctggctgtcacgcttcttttattaccttgaccgatacttcatatcaaggaggtcacttacaccacttaaagaagtgggccttacttgcttccgagagttgatctatcaagagattaaaggacaagttaaagatgcagtgatagctctgatagacaaagaacgtgagggtgaacagattgaccgggctctgttgaagaatgttttggatatttttgttgaaattgggctgggtcaaatggagtgttatgagaatgactttgaagatttcttgctcaaggatactacagagtactactctgtcaaagctcaaagctggattcttgaggactcatgcccagattacatgattaaggctgaggagtgtttgaagcgggagaaggagcgggttggtcactatttgcatattagcagtgaacaaaagttgttggagaaagtgcaaaatgaattgcttgctcagtatgcaaccccgctgttggagaaggagcattctggatgttctgctttgcttcgtgatgataaggttgaggacctttctaggatgtacaggctcttctccaaaatcagccgcggtctggagcctatttctaacatgtttaaaacgcatgttacaaatgagggcacagccttggtcaagcaagcagaagattctgctagcaataagaagccagaaaagaaggatatagttggcatgcaggagcaggtctttgtgtggaaaatcatcgagctgcatgacaaatatgtagcttatgtgacagaatgtttccagggacatacactcttccataaggcacttaaagaagcctttgaggtcttctgtaacaaaggtgtctctggcagttcgagtgccgagttgttggctaccttctgcgacaatattctgaagaaaggttgcagtgaaaagctcagtgatgaagccatcgaagatgcccttgagaaggtggtgagaatgcttgcatacatcagtgataaagacctgtttgccgagttctataggaagaagcttgcaagaagattactttttgacaaaagtgctaatgatgagcatgagagaagtattctgacaaagctcaaacaacagtgtgggggacagtttacttcaaaaatggagggcatggttactgaccttactgtcgctagagatcatcaaactaagtttgaggagtttgtagctggacatccagagttgaatcctgggatagacttagctgttactgttttgacaacgggattctggccaagctacaaaacttttgacataaaccttcctgccgagatggtgaaatgtgtagaggttttcaaggagttctatcaaacaagaacaaagcacaggaagctgacatggatttattccttgggaacctgcaacatcaatgctaagtttgatgctaaacctattgaacttattgttacaacatatcaggctgcattgctactactgtttaatggatctgacaggcttagttattctgagattgtaacacaattaaacctgtcagatgatgatgtagtgcgtttgctccattctctttcttgtgcaaaatacaagatccttaacaaggaaccagcaaatagatccatctcgcccaatgatgtttttgagttcaattcaaaatttactgacagaatgagaagaattaagattccactgcctcccgttgatgagaagaaaaaggttgttgaagatgttgacaaagacaggaggtatgcaattgatgcatcaattgtgcgcattatgaagagccgcaaagttatgggtcatcaacagctggttgctgaatgtgttgagcagctgagccgcatgttcaagcctgacttcaaagccataaagaagaggattgaggatctcattacaagggactacttggagcgcgacaaggacaacgctaatacgtacaaataccttgcctga

SEQ ID NO: 17882 - protein, 744 aa, Zea mays
MAGQERRTIDLEEGWAFMQKGITKLKNILEGKPEPQFSSEDYMMLYTTIYNMCTQKPPHDYSQQLYDKYRESFEEYIASMVLPSLREKHDEFMLRELVQRWSNHKVMVRWLSRFFYYLDRYFISRRSLTPLKEVGLTCFRELIYQEIKGQVKDAVIALIDKEREGEQIDRALLKNVLDIFVEIGLGQMECYENDFEDFLLKDTTEYYSVKAQSWILEDSCPDYMIKAEECLKREKERVGHYLHISSEQKLLEKVQNELLAQYATPLLEKEHSGCSALLRDDKVEDLSRMYRLFSKISRGLEPISNMFKTHVTNEGTALVKQAEDSASNKKPEKKDIVGMQEQVFVWKIIELHDKYVAYVTECFQGHTLFHKALKEAFEVFCNKGVSGSSSAELLATFCDNILKKGCSEKLSDEAIEDALEKVVRMLAYISDKDLFAEFYRKKLARRLLFDKSANDEHERSILTKLKQQCGGQFTSKMEGMVTDLTVARDHQTKFEEFVAGHPELNPGIDLAVTVLTTGFWPSYKTFDINLPAEMVKCVEVFKEFYQTRTKHRKLTWIYSLGTCNINAKFDAKPIELIVTTYQAALLLLFNGSDRLSYSEIVTQLNLSDDDVVRLLHSLSCAKYKILNKEPANRSISPNDVFEFNSKFTDRMRRIKIPLPPVDEKKKVVEDVDKDRRYAIDASIVRIMKSRKVMGHQQLVAECVEQLSRMFKPDFKAIKKRIEDLITRDYLERDKDNANTYKYLA

SEQ ID NO: 17883 - DNA, 2220 bp, Zea mays
  CDS (1)..(2220)
atgttgaacggcggcggcggcggccagaagaagcggaacacgaagatcgagccctaccggcaccgcgtcgagaccgaccccaagttcttcgacaagtcgtggcggaagctccatgacgccatccgcgagatctacaaccacaacgccagcggtctctccttcgaggagctctacaggactgcttataacatggtattgaacaagtttgctcctcagctctatgagaaactcacagaaaacatgaaagggcatcttgaagagatgcgcacatgtatagaggctgctcaaggtggtttgttcctggaagagttgcagcgaaaatggaatgaccataacaaggcattgacaatgattagagatatcctgatgtatatggacaggacatatattcccactaataaaaagacacctgtcttcgaacatggattagagctttggagggatactatagttcggtctcctatgattcaggggaggttgtttgacacgcttctcgagctcatacatagagaaaggactggcgacgtgataaatagaggcttgatgaggactacaactaaaatgttgatggatctagggttgtctgtttaccaggatgattttgaaaggccatttcttgaggtctctgctagtttctatagtggtgagtcacaacaatttattgaatgctgtacttgtggtgagtatctgaagcaggctgagaggcgcctccatgaagaatcagagcgtgtgtcacagtacttggatgctaaaaccaatgagaaaattactgctgttgtggtgaaagagatgctagcaaatcacatgcagaggttgattcttatggagaactcagggcttgtgaatatgcttgtcgaagacaggtatgaagacctgacaaggatgtacactttgtttaatcatgttcctgatgggctcacaacaattagatctgtgatgacgtctcatattaaggatactggcaaaagtttggtaacagatccagagagactaaaggacccagttgattttgttcagcggcttcttaacatgaaggacaagtatgacaatatcatcaatgtgtcattcagcaacgacaagagtttcctgaatgctctcaattcctcatttgagaacgttataaacttaaacaacagatcacctgagttcatatcactgtttgttgatgacaaactgcggaagggggtgaaagaggccaatgaggaggatcttgaaactgtcctggacaaagtgatgacgctgtttaggtatttgcaagaaaaagatctatttgagaaatattacaagcaacacttggcaaagcgtcttctttctgggaaggctgcttctgatgattctgagagaagcatgcttgtgaagctgaagacagaatgtggctaccagtttacttcaaagttggagggcatgttcactgatttgaagacctctcaggatactacacaagggttttatgcatctacttcctcggagctgccggcagatgcccccacaatgtctgtccagatactcacaactgggtcatggccaacgcaaacctgcaatacctgcaatctcccccctgaaattgtttctgtctcagagaagtttcggtcttattaccttggcacacataatggcaggaggctaacatggcaaacaaacatggggacggctgacatcaaagtaacatttggaaatggaagcaagcatgaactgaacgtatcaacataccagatgtgtgttctcatgctgtttaactcagcagatgtcttgacttaccgtgaaattgagcagtctacagcaataccagccgctgacctgaagcgatgcctccagtcactagctcttgtgaagggtaagcaagtcctgcggaaagagccgatgagcagggacattgccgatgatgacagcttctgcgtgaacgacaagttcaccagcaagctcttcaaggtgaagatcggcaccgtggtggcgcagaaggagaccgaccccgagaagctagagacgcggcagcgggtggaggaggacaggaagccgcagatcgaggcggccattgtgcggatcatgaagtcgaggagggtcctcgaccacaacagcatcatgacggaggtgacaaagcagctgcagccgcgtttcatgccgaatcccgtggtgatcaagaagcggatcgagtcgctcatcgaacgcgacttcctggagcgggacaagacagacaggaagatgtatcgctatctggcctaa

SEQ ID NO: 17884 - protein, 739 aa, Zea mays
MLNGGGGGQKKRNTKIEPYRHRVETDPKFFDKSWRKLHDAIREIYNHNASGLSFEELYRTAYNMVLNKFAPQLYEKLTENMKGHLEEMRTCIEAAQGGLFLEELQRKWNDHNKALTMIRDILMYMDRTYIPTNKKTPVFEHGLELWRDTIVRSPMIQGRLFDTLLELIHRERTGDVINRGLMRTTTKMLMDLGLSVYQDDFERPFLEVSASFYSGESQQFIECCTCGEYLKQAERRLHEESERVSQYLDAKTNEKITAVVVKEMLANHMQRLILMENSGLVNMLVEDRYEDLTRMYTLFNHVPDGLTTIRSVMTSHIKDTGKSLVTDPERLKDPVDFVQRLLNMKDKYDNIINVSFSNDKSFLNALNSSFENVINLNNRSPEFISLFVDDKLRKGVKEANEEDLETVLDKVMTLFRYLQEKDLFEKYYKQHLAKRLLSGKAASDDSERSMLVKLKTECGYQFTSKLEGMFTDLKTSQDTTQGFYASTSSELPADAPTMSVQILTTGSWPTQTCNTCNLPPEIVSVSEKFRSYYLGTHNGRRLTWQTNMGTADIKVTFGNGSKHELNVSTYQMCVLMLFNSADVLTYREIEQSTAIPAADLKRCLQSLALVKGKQVLRKEPMSRDIADDDSFCVNDKFTSKLFKVKIGTVVAQKETDPEKLETRQRVEEDRKPQIEAAIVRIMKSRRVLDHNSIMTEVTKQLQPRFMPNPVVIKKRIESLIERDFLERDKTDRKMYRYLA

SEQ ID NO: 17885 - DNA, 2220 bp, Zea mays
  CDS (1)..(2220)
atgttgaacggcggcggcggcggccagaagaagcggaacacgaagatcgagccctaccggcaccgcgtcgagaccgaccccaagttcttcgacaagtcgtggcggaagctccatgacgccatccgcgagatctacaaccacaacgccagcggtctctccttcgaggagctctacaggactgcttataacatggtattgaacaagtttgctcctcagctctatgagaaactcacagaaaacatgaaagggcatcttgaagagatgcgcacatgtatagaggctgctcaaggtggtttgttcctggaagagttgcagcgaaaatggaatgaccataacaaggcattgacaatgattagagatatcctgatgtatatggacaggacatatattcccactaataaaaagacacctgtcttcgaacatggattagagctttggagggatactatagttcggtctcctatgattcaggggaggttgtttgacacgcttctcgagctcatacatagagaaaggactggcgacgtgataaatagaggcttgatgaggactacaactaaaatgttgatggatctagggttgtctgtttaccaggatgattttgaaaggccatttcttgaggtctctgctagtttctatagtggtgagtcacaacaatttattgaatgctgtacttgtggtgagtatctgaagcaggctgagaggcgcctccatgaagaatcagagcgtgtgtcacagtacttggatgctaaaaccaatgagaaaattactgctgtcgtggtaaaagagatgctagcaaatcacatgcagaggttgattcttatggagaactcagggcttgtgaatatgcttgtcgaagacaggtatgaagacctgacaaggatgtacactttgtttaatcatgttcctgatgggctcacaacaattagatctgtgatgacgtctcatattaaggatactggcaaaagtttggtaacagatccagagagactaaaggacccagttgattttgttcagcggcttcttaacatgaaggacaagtatgacaatatcatcaatgtgtcattcagcaacgacaagagtttcctgaatgctctcaattcctcatttgagaacgttataaacttaaacaacagatcacctgagttcatatcactgtttgttgatgacaaactgcggaagggggtgaaagaggccaatgaggaggatcttgaaactgtcctggacaaagtgatgacgctgtttaggtatttgcaagaaaaagatctatttgagaaatattacaagcaacacttggcaaagcgtcttctttgtgggaaggctgctcctgaggattctgagcgaagcatgcttgtgaagctgaagacggaatgtggctaccagtttacttcaaagttggagggcatgttcactgatttgaatacctctcaggatactacacaagggttttatgcatctacttcttcggggctgctggcagatgcccccacaatgtctgtccagatactcaccactgggtcatggccaacgcaaacctgcaatacctgtaatcttccccctgaaattgtttctgtctcagagaagtttcggtcttattaccttggcacacataatggcaggaggctaacatggcaaacaaacatggggactgctgacatcaaagtaacatttggaaatggcagcaagcatgaactgaacgtctcaacataccagatgtgtgttctcatgctgtttaattcatcagatgtcttgacttaccgtgaaattgagcagtctacagcaataccagccgctgacctgaagcgatgcctccagtcgctagctcttgtgaagggtaagcaagtcctgcggaaagagccgatgagcagggacattgccgatgatgacagcttctgcgtgaacgacaagttcaccagcaagctcttcaaggtgaagatcggcaccgtggtggcgcagaaggagaccgaccccgagaagctagagacgcggcagcgggtggaggaggacaggaagccgcagatcgaggcggccattgtgcggatcatgaagtcgaggagggtcctcgaccacaacagcataatgacggaggtgacaaagcagttgcagccccgtttcatgccaaaccccgtggtgatcaagaagcggatcgagtcgctcatcgagcgcgagttcctggagcgggacaaggtggacaggaagatgtaccgctatcttgcctaa

SEQ ID NO: 17886 - protein, 739 aa, Zea mays
MLNGGGGGQKKRNTKIEPYRHRVETDPKFFDKSWRKLHDAIREIYNHNASGLSFEELYRTAYNMVLNKFAPQLYEKLTENMKGHLEEMRTCIEAAQGGLFLEELQRKWNDHNKALTMIRDILMYMDRTYIPTNKKTPVFEHGLELWRDTIVRSPMIQGRLFDTLLELIHRERTGDVINRGLMRTTTKMLMDLGLSVYQDDFERPFLEVSASFYSGESQQFIECCTCGEYLKQAERRLHEESERVSQYLDAKTNEKITAVVVKEMLANHMQRLILMENSGLVNMLVEDRYEDLTRMYTLFNHVPDGLTTIRSVMTSHIKDTGKSLVTDPERLKDPVDFVQRLLNMKDKYDNIINVSFSNDKSFLNALNSSFENVINLNNRSPEFISLFVDDKLRKGVKEANEEDLETVLDKVMTLFRYLQEKDLFEKYYKQHLAKRLLCGKAAPEDSERSMLVKLKTECGYQFTSKLEGMFTDLNTSQDTTQGFYASTSSGLLADAPTMSVQILTTGSWPTQTCNTCNLPPEIVSVSEKFRSYYLGTHNGRRLTWQTNMGTADIKVTFGNGSKHELNVSTYQMCVLMLFNSSDVLTYREIEQSTAIPAADLKRCLQSLALVKGKQVLRKEPMSRDIADDDSFCVNDKFTSKLFKVKIGTVVAQKETDPEKLETRQRVEEDRKPQIEAAIVRIMKSRRVLDHNSIMTEVTKQLQPRFMPNPVVIKKRIESLIEREFLERDKVDRKMYRYLA

SEQ ID NO: 17887 - DNA, 2235 bp, Zea mays
  CDS (1)..(2235)
atggcagggcaggagcgtaggacaatcgatctggaggagggatgggcgtttatgcagaagggtatcaccaagctgaagaacatcctcgagggcaagcccgagcctcagttcagctccgaggactacatgatgctctacacgacgatatacaacatgtgcacgcagaagccgccgcacgactactcgcagcagctctacgacaagtatcgggagtcgttcgaggagtatatcacctccatggtactaccttcgctaagggagaaacatgatgagtttatgctgagggagctagtgcaaaggtggtcaaaccataaagtcatggttcgttggctctcgcgtttctttcattaccttgaccggtacttcatatcaaggaggtcacttaccccacttaaagaagttggtcttacttgcttccgagagttgatatatcaagagattaaagggcaagttaaagatgcggtgatagctctgatagacaaagaacgcgagggtgaacagattgaccggggtctgttgaagaatgtattggatatttttgttgaaattgggctgggtcaaatggagtgttatgagaatgactttgaagatttcttgctcaaggatactacagagtactactctgtcaaagctcaaagctggattcttgaggactcatgcccagattacatgattaaggctgaggagtgtttaaagcgggagaaggagcgagttggtcactatttgcatattagcagcgaacagaagttattggagaaagtgcaaaatgaattgcttgctcagtatgcaaccccgctgttagagaaggagcattctggatgttctgctttgcttcgcgatgacaaggttgaggacctttctaggatgtacagactcttctccaaaatctcccgtggtctggagcctatttcaaacatgttcaaaacgcatgtcacaagtgagggtacagccttggtcaagcaagcagaagattctgctagtaataagaagccagagaagaaggatatggttggcatgcaggaacaggtctttgtgtggaaaatcatcgagctgcatgacaaatatgtagcttatgtgacagaatgtttccagggacatacactcttccataaggcacttaaagaagcctttgaggtcttctgtaacaaaggtgtctctggcagttcgaatgctgagttgttggctaccttctgcgacaatattctgaagaaaggctgcagtgaaaagctcagtgatgaagccattgaagatgcccttgagaaggttgtgagattgctggcatacatcagtgataaagacctgtttgccgagttctataggaagaaacttgccagaagattacttttcgacaaaagtgctaatgatgagcatgagagaagtattctgacaaagctcaagcaacagtgcggggggcagtttacttccaaaatggagggcatggttacggaccttactgtcgctagagatcaccaaactaagtttgaagagtttgtagctgggcatccagagttgaatcctggcatagatttggctgttactgttttgacaacgggattctggccaagctacaaaacttttgacataaaccttcctgcggagatggtgaaatgtgtagaggttttcaaggaattctatcaaacaagaacgaagcacaggaagctgacatggatttattccttgggaacctgcaacatcaatgctaagtttgatgctaaacctattgagctcattgttacgacatatcaggctgcattactactactgttcaatggatccgaaaggcttagttattctgaaattgcaacacaattaaacctgtcagatgatgatgtagtgcgtttgctccattcactttcttgtgcaaaatacaagatccttaacaaggaaccagcaaatagatccatctcgcccaatgatgtttttgagttcaattcaaaatttactgacagaatgagaagaattaagattccactgcctcccgttgatgagaagaaaaaggttgttgaagatgttgacaaagacaggaggtatgcaattgatgcatcaattgtgcgcattatgaagagccgcaaagttatgggtcatcaacagctggttgctgaatgtgttgagcagcttagccgcatgtttaagccggacttcaaagccataaagaagaggattgaggatctcatcacaagggactatttggagcgcgacaaggacaacgccaatacgtacaaataccttgcctga

SEQ ID NO: 17888 - protein, 744 aa, Zea mays
MAGQERRTIDLEEGWAFMQKGITKLKNILEGKPEPQFSSEDYMMLYTTIYNMCTQKPPHDYSQQLYDKYRESFEEYITSMVLPSLREKHDEFMLRELVQRWSNHKVMVRWLSRFFHYLDRYFISRRSLTPLKEVGLTCFRELIYQEIKGQVKDAVIALIDKEREGEQIDRGLLKNVLDIFVEIGLGQMECYENDFEDFLLKDTTEYYSVKAQSWILEDSCPDYMIKAEECLKREKERVGHYLHISSEQKLLEKVQNELLAQYATPLLEKEHSGCSALLRDDKVEDLSRMYRLFSKISRGLEPISNMFKTHVTSEGTALVKQAEDSASNKKPEKKDMVGMQEQVFVWKIIELHDKYVAYVTECFQGHTLFHKALKEAFEVFCNKGVSGSSNAELLATFCDNILKKGCSEKLSDEAIEDALEKVVRLLAYISDKDLFAEFYRKKLARRLLFDKSANDEHERSILTKLKQQCGGQFTSKMEGMVTDLTVARDHQTKFEEFVAGHPELNPGIDLAVTVLTTGFWPSYKTFDINLPAEMVKCVEVFKEFYQTRTKHRKLTWIYSLGTCNINAKFDAKPIELIVTTYQAALLLLFNGSERLSYSEIATQLNLSDDDVVRLLHSLSCAKYKILNKEPANRSISPNDVFEFNSKFTDRMRRIKIPLPPVDEKKKVVEDVDKDRRYAIDASIVRIMKSRKVMGHQQLVAECVEQLSRMFKPDFKAIKKRIEDLITRDYLERDKDNANTYKYLA

SEQ ID NO: 17889 - DNA, 2235 bp, Zea mays
  CDS (1)..(2235)
atggcagggcaggagcgtaggacaatcgatctggaggagggatgggcgtttatgcagaagggtatcaccaagctgaagaacatcctcgagggcaagcccgagcctcagttcagctccgaggactacatgatgctctacacgacgatatacaacatgtgcacgcagaagccgccgcacgactactcgcagcagctctacgacaagtatcgggagtcgttcgaggagtatatcacctccatggtactaccttcgctaagggagaaacatgatgagtttatgctgagggagctagtgcaaaggtggtcaaaccataaagtcatggttcgttggctctcgcgtttctttcattaccttgaccggtacttcatatcaaggaggtcacttaccccacttaaagaagttggtcttacttgcttccgagagttgatatatcaagagattaaagggcaagttaaagatgcggtgatagctctgatagacaaagaacgcgagggtgaacagattgaccggggtctgttgaagaatgtattggatatttttgttgaaattgggctgggtcaaatggagtgttatgagaatgactttgaagatttcttgctcaaggatactacagagtactactctgtcaaggctcaaagctggattcttgaggactcatgcccagattacatgattaaggctgaggagtgtttgaagcgggagaaggagcgggttggtcactatttgcatattagcagtgaacaaaagttgttggagaaagtgcaaaatgaattgcttgctcagtatgcaaccccgctgttggagaaggagcattctggatgttctgctttgcttcgtgatgataaggttgaggacctttctaggatgtacaggctcttctccaaaatcagccgcggtctggagcctatttctaacatgtttaaaacgcatgttacaaatgagggcacagccttggtcaagcaagcagaagattctgctagcaataagaagccagaaaagaaggatatagttggcatgcaggagcaggtctttgtgtggaaaatcatcgagctgcatgacaaatatgtagcttatgtgacagaatgtttccagggacatacactcttccataaggcacttaaagaagcctttgaggtcttctgtaacaaaggtgtctctggcagttcgagtgccgagttgttggctaccttctgcgacaatattctgaagaaaggttgcagtgaaaagctcagtgatgaagccatcgaagatgcccttgagaaggtggtgagaatgcttgcatacatcagtgataaagacctgtttgccgagttctataggaagaagcttgcaagaagattactttttgacaaaagtgctaatgatgagcatgagagaagtattctgacaaagctcaaacaacagtgtgggggacagtttacttcaaaaatggagggcatggttactgaccttactgtcgctagagatcatcaaactaagtttgaggagtttgtagctggacatccagagttgaatcctgggatagacttagctgttactgttttgacaacgggattctggccaagctacaaaacttttgacataaaccttcctgccgagatggtgaaatgtgtagaggttttcaaggagttctatcaaacaagaacaaagcacaggaagctgacatggatttattccttgggaacctgcaacatcaatgctaagtttgatgctaaacctattgaacttattgttacaacatatcaggctgcattgctactactgtttaatggatctgacaggcttagttattctgagattgtaacacaattaaacctgtcagatgatgatgtagtgcgtttgctccattctctttcttgtgcgaagtacaagatccttaacaaggaaccggctagtagatccatctctcccaatgatgtttttgagttcaattcaaagtttactgacagaatgagaagaatcaaggttccactccctcctgttgatgagaagaaaaaggttgttgaagatgttgacaaagacaggaggtatgcaattgatgcatcaattgtgcgcattatgaagagccgcaaagttatgggtcatcaacagctggttgctgaatgtgttgagcagctgagccgcatgttcaagcctgacttcaaagccataaagaagaggattgaggatctcattacaagggactacttggagcgcgacaaggacaacgctaatacgtacaaataccttgcctga

SEQ ID NO: 17890 - protein, 744 aa, Zea mays
MAGQERRTIDLEEGWAFMQKGITKLKNILEGKPEPQFSSEDYMMLYTTIYNMCTQKPPHDYSQQLYDKYRESFEEYITSMVLPSLREKHDEFMLRELVQRWSNHKVMVRWLSRFFHYLDRYFISRRSLTPLKEVGLTCFRELIYQEIKGQVKDAVIALIDKEREGEQIDRGLLKNVLDIFVEIGLGQMECYENDFEDFLLKDTTEYYSVKAQSWILEDSCPDYMIKAEECLKREKERVGHYLHISSEQKLLEKVQNELLAQYATPLLEKEHSGCSALLRDDKVEDLSRMYRLFSKISRGLEPISNMFKTHVTNEGTALVKQAEDSASNKKPEKKDIVGMQEQVFVWKIIELHDKYVAYVTECFQGHTLFHKALKEAFEVFCNKGVSGSSSAELLATFCDNILKKGCSEKLSDEAIEDALEKVVRMLAYISDKDLFAEFYRKKLARRLLFDKSANDEHERSILTKLKQQCGGQFTSKMEGMVTDLTVARDHQTKFEEFVAGHPELNPGIDLAVTVLTTGFWPSYKTFDINLPAEMVKCVEVFKEFYQTRTKHRKLTWIYSLGTCNINAKFDAKPIELIVTTYQAALLLLFNGSDRLSYSEIVTQLNLSDDDVVRLLHSLSCAKYKILNKEPASRSISPNDVFEFNSKFTDRMRRIKVPLPPVDEKKKVVEDVDKDRRYAIDASIVRIMKSRKVMGHQQLVAECVEQLSRMFKPDFKAIKKRIEDLITRDYLERDKDNANTYKYLA

SEQ ID NO: 17891 - DNA, 2235 bp, Zea mays
  CDS (1)..(2235)
atggcggggcaggagcgtaggacaatcgatctggaggagggatgggcgttcatgcagaagggcatcaccaagctgaagaacatcctcgagggcaagcccgagccgcagttcagttccgaggactacatgatgctctacacgacgatatacaacatgtgcacgcagaagccgccgcaggactactcacagcagctctacgacaagtatcgggagtcgttcgaggagtacatcgcctccatggtactaccttcattaagggagaaacatgacgagtttatgctgagggagctagtgcaaaggtggtcaaaccataaagtcatggttcgctggctgtcacgcttcttttattaccttgaccgatacttcatatcaaggaggtcacttacaccacttaaagaagtgggccttacttgcttccgagagttgatctatcaagagattaaaggacaagttaaagatgcagtgatagctctgatagacaaagaacgtgagggtgaacagattgaccgggctctgttgaagaatgttttggatatttttgttgaaattgggttgggtcaaatggagtgttatgagaatgactttgaagatttcttgctcaaggatactacagagtactactctgtcaaagctcaaagctggattcttgaggactcatgcccagattacatgattaaggctgaggagtgtttaaagcgggagaaggagcgagttggtcactatttgcatattagcagcgaacagaagttattggagaaagtgcaaaatgaattgcttgctcagtatgcaaccccgctgttagagaaggagcattctggatgttctgctttgcttcgcgatgacaaggttgaggatctttctaggatgtacagactcttctccaaaatctcccgtggtctggagcctatttcaaacatgttcaaaacgcatgtcacaagtgagggtacagccttggtcaagcaagcagaagattctgctagtaataagaagccagagaagaaggatatggttggcatgcaggaacaggtctttgtgtggaaaatcatcgagctgcatgacaaatatgtagcttatgtgacagaatgtttccagggacatacactcttccataaggcacttaaagaagcctttgaggtcttctgtaacaaaggtgtctctggcagttcgaatgctgagttgttggctaccttctgcgacaatattctgaagaaaggctgcagtgaaaagctcagtgatgaagccattgaagatgcccttgagaaggttgtgagattgctggcatacatcagtgataaagacctgtttgccgagttctataggaagaaacttgccagaagattacttttcgacaaaagtgctaatgatgagcatgagagaagtattctgacaaagctcaagcaacagtgcggggggcagtttacttccaaaatggagggcatggttacggaccttactgtcgctagagatcaccaaactaagtttgaagagtttgtagctgggcatccagagttgaatcctggcatagatttggctgttactgttttgacaacgggattctggccaagctacaaaacttttgacataaaccttcctgcggagatggtgaaatgtgtagaggttttcaaggaattctatcaaacaagaacgaagcacaggaagctgacatggatttattccttgggaacctgcaacatcaatgctaagtttgatgctaaacctattgagctcattgttacgacatatcaggctgcattactactactgttcaatggatccgaaaggcttagttattctgaaattgcaacacaattaaacctgtcagatgatgatgtagtgcgtttgctccattcactttcttgtgcaaaatacaagatccttaacaaggaaccagcaaatagatccatctcgcccaatgatgtttttgagttcaattcaaaatttactgacagaatgagaagaattaagattccactgcctcccgttgatgagaagaaaaaggttgttgaagatgttgacaaagacaggaggtatgcaattgatgcatcaattgtgcgcattatgaagagccgcaaagttatgggtcatcaacagctggttgctgaatgtgttgagcagcttagccgcatgtttaagccggacttcaaagccataaagaagaggattgaggatctcatcacaagggactatttggagcgcgacaaggacaacgccaatacgtacaaataccttgcctga

SEQ ID NO: 17892 - protein, 744 aa, Zea mays
MAGQERRTIDLEEGWAFMQKGITKLKNILEGKPEPQFSSEDYMMLYTTIYNMCTQKPPQDYSQQLYDKYRESFEEYIASMVLPSLREKHDEFMLRELVQRWSNHKVMVRWLSRFFYYLDRYFISRRSLTPLKEVGLTCFRELIYQEIKGQVKDAVIALIDKEREGEQIDRALLKNVLDIFVEIGLGQMECYENDFEDFLLKDTTEYYSVKAQSWILEDSCPDYMIKAEECLKREKERVGHYLHISSEQKLLEKVQNELLAQYATPLLEKEHSGCSALLRDDKVEDLSRMYRLFSKISRGLEPISNMFKTHVTSEGTALVKQAEDSASNKKPEKKDMVGMQEQVFVWKIIELHDKYVAYVTECFQGHTLFHKALKEAFEVFCNKGVSGSSNAELLATFCDNILKKGCSEKLSDEAIEDALEKVVRLLAYISDKDLFAEFYRKKLARRLLFDKSANDEHERSILTKLKQQCGGQFTSKMEGMVTDLTVARDHQTKFEEFVAGHPELNPGIDLAVTVLTTGFWPSYKTFDINLPAEMVKCVEVFKEFYQTRTKHRKLTWIYSLGTCNINAKFDAKPIELIVTTYQAALLLLFNGSERLSYSEIATQLNLSDDDVVRLLHSLSCAKYKILNKEPANRSISPNDVFEFNSKFTDRMRRIKIPLPPVDEKKKVVEDVDKDRRYAIDASIVRIMKSRKVMGHQQLVAECVEQLSRMFKPDFKAIKKRIEDLITRDYLERDKDNANTYKYLA

SEQ ID NO: 17893 - DNA, 20 bp, Artificial sequence
  primer
atgagtaatcagaagaagag

SEQ ID NO: 17894 - DNA, 21 bp, Artificial sequence
  primer
ttaggctagatagcggtaaag

SEQ ID NO: 17895 - protein, 1005 aa, Artificial sequence
  consensus sequence
  Variant (3)..(15): Xaa in position 3 to 15 is any amino acid
  Variant (16)..(57): Xaa in position 16 to 57 is any or no amino acid
  Variant (59)..(63): Xaa in position 59 to 63 is any amino acid
  Variant (64)..(64): Xaa in position 64 is any or no amino acid
  Variant (66)..(67): Xaa in position 66 to 67 is any amino acid
  Variant (68)..(80): Xaa in position 68 to 80 is any or no amino acid
  Variant (82)..(86): Xaa in position 82 to 86 is any amino acid
  Variant (87)..(119): Xaa in position 87 to 119 is any or no amino acid
  Variant (121)..(141): Xaa in position 121 to 141 is any amino acid
  Variant (142)..(161): Xaa in position 142 to 161 is any or no amino acid
  Variant (163)..(163): Xaa in position 163 is any amino acid
  Variant (165)..(187): Xaa in position 165 to 187 is any amino acid
  Variant (188)..(205): Xaa in position 188 to 205 is any or no amino acid
  Variant (208)..(210): Xaa in position 208 to 210 is any amino acid
  Variant (212)..(217): Xaa in position 212 to 217 is any amino acid
  Variant (219)..(232): Xaa in position 219 to 232 is any amino acid
  Variant (233)..(237): Xaa in position 233 to 237 is any or no amino acid
  Variant (239)..(241): Xaa in position 239 to 241 is any amino acid
  Variant (242)..(248): Xaa in position 242 to 248 is any or no amino acid
  Variant (250)..(251): Xaa in position 250 to 251 is any amino acid
  Variant (253)..(253): Xaa in position 253 is any amino acid
  Variant (254)..(263): Xaa in position 254 to 263 is any or no amino acid
  Variant (266)..(298): Xaa in position 266 to 298 is any amino acid
  Variant (299)..(326): Xaa in position 299 to 326 is any or no amino acid
  Variant (328)..(330): Xaa in position 328 to 330 is any amino acid
  Variant (332)..(332): Xaa in position 332 is any amino acid
  Variant (334)..(354): Xaa in position 334 to 354 is any amino acid
  Variant (355)..(383): Xaa in position 355 to 383 is any or no amino acid
  Variant (385)..(397): Xaa in position 385 to 397 is any amino acid
  Variant (398)..(423): Xaa in position 398 to 423 is any or no amino acid
  Variant (425)..(431): Xaa in position 425 to 431 is any amino acid
  Variant (432)..(441): Xaa in position 432 to 441 is any or no amino acid
  Variant (443)..(443): Xaa in position 443 is any amino acid
  Variant (444)..(453): Xaa in position 444 to 453 is any or no amino acid
  Variant (455)..(466): Xaa in position 455 to 466 is any amino acid
  Variant (468)..(473): Xaa in position 468 to 473 is any amino acid
  Variant (474)..(491): Xaa in position 474 to 491 is any or no amino acid
  Variant (493)..(498): Xaa in position 493 to 498 is any amino acid
  Variant (500)..(501): Xaa in position 500 to 501 is any amino acid
  Variant (503)..(515): Xaa in position 503 to 515 is any amino acid
  Variant (516)..(541): Xaa in position 516 to 541 is any or no amino acid
  Variant (543)..(547): Xaa in position 543 to 547 is any amino acid
  Variant (548)..(554): Xaa in position 548 to 554 is any or no amino acid
  Variant (557)..(557): Xaa in position 557 is any amino acid
  Variant (559)..(561): Xaa in position 559 to 561 is any amino acid
  Variant (563)..(565): Xaa in position 563 to 565 is any amino acid
  Variant (568)..(568): Xaa in position 568 is any amino acid
  Variant (571)..(579): Xaa in position 571 to 579 is any amino acid
  Variant (580)..(591): Xaa in position 580 to 591 is any or no amino acid
  Variant (593)..(597): Xaa in position 593 to 597 is any amino acid
  Variant (601)..(603): Xaa in position 601 to 603 is any amino acid
  Variant (604)..(604): Xaa in position 604 is any or no amino acid
  Variant (606)..(608): Xaa in position 606 to 608 is any amino acid
  Variant (610)..(610): Xaa in position 610 is any amino acid
  Variant (612)..(614): Xaa in position 612 to 614 is any amino acid
  Variant (616)..(617): Xaa in position 616 to 617 is any amino acid
  Variant (619)..(628): Xaa in position 619 to 628 is any amino acid
  Variant (630)..(636): Xaa in position 630 to 636 is any amino acid
  Variant (637)..(657): Xaa in position 637 to 657 is any or no amino acid
  Variant (659)..(662): Xaa in position 659 to 662 is any amino acid
  Variant (665)..(673): Xaa in position 665 to 673 is any amino acid
  Variant (674)..(687): Xaa in position 674 to 687 is any or no amino acid
  Variant (689)..(697): Xaa in position 689 to 697 is any amino acid
  Variant (699)..(701): Xaa in position 699 to 701 is any amino acid
  Variant (703)..(708): Xaa in position 703 to 708 is any amino acid
  Variant (709)..(710): Xaa in position 709 to 710 is any or no amino acid
  Variant (712)..(712): Xaa in position 712 is any amino acid
  Variant (714)..(714): Xaa in position 714 is any amino acid
  Variant (716)..(740): Xaa in position 716 to 740 is any amino acid
  Variant (741)..(775): Xaa in position 741 to 775 is any or no amino acid
  Variant (777)..(779): Xaa in position 777 to 779 is any amino acid
  Variant (781)..(781): Xaa in position 781 is any amino acid
  Variant (785)..(788): Xaa in position 785 to 788 is any amino acid
  Variant (789)..(803): Xaa in position 789 to 803 is any or no amino acid
  Variant (805)..(808): Xaa in position 805 to 808 is any amino acid
  Variant (810)..(823): Xaa in position 810 to 823 is any amino acid
  Variant (825)..(826): Xaa in position 825 to 826 is any amino acid
  Variant (828)..(830): Xaa in position 828 to 830 is any amino acid
  Variant (832)..(839): Xaa in position 832 to 839 is any amino acid
  Variant (840)..(856): Xaa in position 840 to 856 is any or no amino acid
  Variant (858)..(859): Xaa in position 858 to 859 is any amino acid
  Variant (861)..(862): Xaa in position 861 to 862 is any amino acid
  Variant (864)..(889): Xaa in position 864 to 889 is any amino acid
  Variant (890)..(915): Xaa in position 890 to 915 is any or no amino acid
  Variant (918)..(922): Xaa in position 918 to 922 is any amino acid
  Variant (924)..(924): Xaa in position 924 is any amino acid
  Variant (931)..(931): Xaa in position 931 is any amino acid
  Variant (934)..(936): Xaa in position 934 to 936 is any amino acid
  Variant (938)..(939): Xaa in position 938 to 939 is any amino acid
  Variant (941)..(942): Xaa in position 941 to 942 is any amino acid
  Variant (944)..(946): Xaa in position 944 to 946 is any amino acid
  Variant (949)..(951): Xaa in position 949 to 951 is any amino acid
  Variant (953)..(957): Xaa in position 953 to 957 is any amino acid
  Variant (958)..(958): Xaa in position 958 is any or no amino acid
  Variant (962)..(962): Xaa in position 962 is any amino acid
  Variant (965)..(965): Xaa in position 965 is any amino acid
  Variant (968)..(970): Xaa in position 968 to 970 is any amino acid
  Variant (975)..(981): Xaa in position 975 to 981 is any amino acid
  Variant (982)..(1002): Xaa in position 982 to 1002 is any or no amino acid
  Variant (1004)..(1004): Xaa in position 1004 is any amino acid
LYXXXXXXXXXXXXXXXXXXXXXXXXXXXXXXXXXXXXXXXXXXXXXXXXXXXXXXXLXXXXXXWXXXXXXXXXXXXXXXYXXXXXXXXXXXXXXXXXXXXXXXXXXXXXXXXXXXXXXLXXXXXXXXXXXXXXXXXXXXXXXXXXXXXXXXXXXXXXXXXRXGXXXXXXXXXXXXXXXXXXXXXXXXXXXXXXXXXXXXXXXXXFEXXXLXXXXXXYXXXXXXXXXXXXXXXXXXXYXXXXXXXXXXEXXRXXXXXXXXXXXYLXXXXXXXXXXXXXXXXXXXXXXXXXXXXXXXXXXXXXXXXXXXXXXXXXXXXXXXXXXXXXLXXXYXLXXXXXXXXXXXXXXXXXXXXXXXXXXXXXXXXXXXXXXXXXXXXXXXXXXGXXXXXXXXXXXXXXXXXXXXXXXXXXXXXXXXXXXXXXXVXXXXXXXXXXXXXXXXXFXXXXXXXXXXXFXXXXXXXXXXXXNXXXXXXXXXXXXXXXXXXXXXXXXEXXXXXXDXXLXXXXXXXXXXXXXXXXXXXXXXXXXXXXXXXXXXXXXXXLXXXXXXXXXXXXKDXFXXXYXXXLAXRLXXXXXXXXXXXXXXXXXXXXXEXXXXXKLKXXXXGXXXTXKXXXMXXDXXXXXXXXXXFXXXXXXXXXXXXXXXXXXXXXXXXXXXXLXXXXWPXXXXXXXXXXXXXXXXXXXXXXXPXXXXXXXXXFXXXYXXXXXXXXRXLXWXXXXXXXXXXXXXXXXXXXXXXXXXXXXXXXXXXXXXXXXXXXXXXXXXXXXXXXXXXXXQXXXLXLFNXXXXXXXXXXXXXXXXXXXLXXXXIXXXXXXXXXXXXXXLXXLXXXKXXXXXXXXXXXXXXXXXXXXXXXXXFXXNXXFXXXXXXXXXXXXXXXXXXXXXXXXXXXXXXXXXXXXXXXXXXXXXXXXXXXXDRXXXXXAXIVRIMKXRKXXXHXXLXXEXXXQLXXXFXXXXXXIKKXIEXLIXXXYLERXXXXXXXXXXXXXXXXXXXXXXXXXXXXYXA

SEQ ID NO: 17896 - protein, 28 aa, Artificial sequence
  protein pattern
  Variant (2)..(6): Xaa in position 2 to 6 is any amino acid
  Variant (7)..(7): Xaa in position 7 is any or no amino acid
  Variant (9)..(9): Xaa in position 9 is any amino acid
  Variant (10)..(10): Xaa in position 10 is any or no amino acid
  Variant (16)..(16): Xaa in position 16 is any amino acid
  Variant (18)..(18): Xaa in position 18 is Lys or Arg
  Variant (19)..(19): Xaa in position 19 is any amino acid
  Variant (20)..(20): Xaa in position 20 is Ile, Leu or Met
  Variant (21)..(21): Xaa in position 21 is any amino acid
  Variant (22)..(22): Xaa in position 22 is His or Tyr
  Variant (23)..(24): Xaa in position 23 to 24 is any amino acid
  Variant (25)..(25): Xaa in position 25 is Ile or Leu
  Variant (26)..(26): Xaa in position 26 is Ile, Leu, Met or Val
  Variant (27)..(27): Xaa in position 27 is any amino acid
RXXXXXXAXXVRIMKXRXXXXXXXXXXE

SEQ ID NO: 17897 - protein, 21 aa, Artificial sequence
  protein pattern
  Variant (2)..(2): Xaa in position 2 is any or no amino acid
  Variant (4)..(5): Xaa in position 4 to 5 is any amino acid
  Variant (6)..(6): Xaa in position 6 is any or no amino acid
  Variant (8)..(8): Xaa in position 8 is any amino acid
  Variant (9)..(9): Xaa in position 9 is Glu, Gly or Gln
  Variant (10)..(10): Xaa in position 10 is Phe or Tyr
  Variant (12)..(13): Xaa in position 12 to 13 is any amino acid
  Variant (14)..(14): Xaa in position 14 is Leu or Met
  Variant (15)..(16): Xaa in position 15 to 16 is any amino acid
  Variant (18)..(18): Xaa in position 18 is Phe, Ile, Leu or Val
  Variant (19)..(19): Xaa in position 19 is any amino acid
  Variant (21)..(21): Xaa in position 21 is Ile, Leu, Met or Val
KXKXXXGXXXTXXXXXMXXDX

SEQ ID NO: 17898 - protein, 33 aa, Artificial sequence
  protein pattern
  Variant (2)..(3): Xaa in position 2 to 3 is any or no amino acid
  Variant (5)..(5): Xaa in position 5 is any amino acid
  Variant (7)..(7): Xaa in position 7 is Ala, Glu, Gly, Gln or Ser
  Variant (8)..(9): Xaa in position 8 to 9 is any amino acid
  Variant (11)..(13): Xaa in position 11 to 13 is any amino acid
  Variant (15)..(15): Xaa in position 15 is Ala, Gly or Ser
  Variant (16)..(16): Xaa in position 16 is Lys or Arg
  Variant (19)..(27): Xaa in position 19 to 27 is any amino acid
  Variant (28)..(28): Xaa in position 28 is any or no amino acid
  Variant (30)..(31): Xaa in position 30 to 31 is any amino acid
  Variant (32)..(32): Xaa in position 32 is Phe, Ile, Leu or Met
  Variant (33)..(33): Xaa in position 33 is Ile, Leu or Val
KXXDXFXXXYXXXLXXRLXXXXXXXXXXEXXXX

SEQ ID NO: 17899 - protein, 25 aa, Artificial sequence
  protein pattern
  Variant (2)..(3): Xaa in position 2 to 3 is any amino acid
  Variant (4)..(4): Xaa in position 4 is Phe or Tyr
  Variant (6)..(7): Xaa in position 6 to 7 is any amino acid
  Variant (8)..(11): Xaa in position 8 to 11 is any or no amino acid
  Variant (13)..(13): Xaa in position 13 is Lys or Arg
  Variant (14)..(14): Xaa in position 14 is Ile or Leu
  Variant (15)..(15): Xaa in position 15 is any amino acid
  Variant (17)..(20): Xaa in position 17 to 20 is any amino acid
  Variant (21)..(21): Xaa in position 21 is Ala, Cys, Gly or Ser
  Variant (22)..(24): Xaa in position 22 to 24 is any amino acid
  Variant (25)..(25): Xaa in position 25 is Ile, Leu, Met or Val
FXXXYXXXXXXRXXXWXXXXXXXXX

SEQ ID NO: 17900 - protein, 21 aa, Artificial sequence
  protein pattern
  Variant (2)..(3): Xaa in position 2 to 3 is any amino acid
  Variant (4)..(6): Xaa in position 4 to 6 is any or no amino acid
  Variant (8)..(8): Xaa in position 8 is any amino acid
  Variant (9)..(9): Xaa in position 9 is any or no amino acid
  Variant (11)..(11): Xaa in position 11 is Asp, Glu or Lys
  Variant (12)..(12): Xaa in position 12 is any amino acid
  Variant (14)..(14): Xaa in position 14 is Ile or Leu
  Variant (15)..(15): Xaa in position 15 is Ala, Asp, Glu, Ser or Thr
  Variant (16)..(16): Xaa in position 16 is Lys or Arg
  Variant (17)..(17): Xaa in position 17 is Asp, Glu or Gln
  Variant (18)..(18): Xaa in position 18 is Phe or Tyr
  Variant (19)..(19): Xaa in position 19 is Ile, Leu or Met
  Variant (20)..(20): Xaa in position 20 is any amino acid
PXXXXXKXXIXXLXXXXXXXR

SEQ ID NO: 17901 - DNA, 2496 bp, Arabidopsis thaliana
  CDS (1)..(2496)
atgagcagcagcaaggtcggcggcggagcaaggaaaggaattcaggatattccgtcagggtctagaaaaatagtacaaagcttgacggaaattgtaaactctcctgaggctgagatctatgctatgcttaaagagtgcaatatggatcctaacgaaaccgttagtcgcctcctctctcaagatccatttcacgaggtaaagagcaagaaagaaaagaagaaagagactagggatatatcagattctcggccgcgtggtgctaataacacctacaaccgtggtgctagaggtggttctgctcgttacgccggacgaagtggatctacccatttcagctctactgattctggaaacttccagggaaaatctacaaataagaaagaaagtggaacgcagggttatacaagttcttggtcttctgcttctggagtggcgaacacctatcaaacaccacacagtgaacccattgctatggaaaacaaattgcctcctgttaccttgggagatggaatatcatcatcaaagtcagcttctggacatcaaactgcatggtttggagctccaggccagaggtctatggctgaagttgtgaagatgggtagaccacagaacaagacaacaaagcaaaatgtcaatgtgggttctgagataaatcatgaacacgaagttaatgcaaatcagcaggcccctgttaaagatgaatggccgtcgattgagaagccgctggctcctagtacatcttctttatcagtagcaccagcagaatcagaagtacgcaatggtctagctgatttccaatccgatagaggagatcaatatctgaaggaccggttagaaaatattcatatagcagaaagtggcccgtctgaaagtcgtggggtcgatcatgtgcaagccgactctgttcaagaagatgaatctgtagtttcgtcagaaattgatgataatccatatcagacacagagccatccagtagagcaccacaaagatgaagatgatgtttcatctggttcagccagttttcaacaactagatagtcatgatcaagaagtctcacatgaagaggatagacctgctgttgtaattccaaaccatttgctaattcacacagaagaatgcgcgcaattaagttttggaagctttggaggttttggatcaaggcctttgagcaacagcgtagaagcgacttctgatgtagctccacaaatcgaacattcagatgcaagaaatactgagttctatggagatgaacatctgggaagtacaaccaatggaaatatggtccacacacctgctactggaaattatgatgattctttagaaacgaggcgagaggtgttgaagcaagaaaactctgagggcgctcaggagcaccagtacacatttacccagtctgagcaagggtatgcgtatgaaaatgctaagcagcagcagatgaattctgcatatgatgcctcacacacaaattcacagaatcagatgcataatcttgattcattatcaaatgtgatgcaggggtattcacactcagttcccaacactttattggcacaaacagcacaaaatgcgagggaacttgacttccagtattcacctttctcagctcaacagtctatgcaatcaagaactagcaacaatgcctcatcacttggtggccaaagcatttcaatgccagaggcgctccgaggcagtggaattccggcaacacagccaacccagcaaacactacctggtgctaatatcgctactggacctgctcttcctcagcagcttccaatgcattactctcaacccacattacctctaacacactatgcaaacatgatcggttatcctctaatgcctcagaattatccatacatgccatctgctttccagcaaacatttgctggtaatagtgcataccaccagcaactagctgcattgcttccgcagtacaaaaccaatgtctctcccggtaatttgcctcagtctgcaacagcgcctgcctctgcttatggatttggaaactcgaccaatgtcggatctgccggaaacttccctcttaaccaacagtctgctactaccggtacaacgcttggttatgaagatgttcttagttctcaatacaaagagaatcatctgttggcacttcagcagcagcagcaacaacagcaacatcaacaacagaacgaaaactcggcgatgtggcatcagggtcatggttccagaaccatgtcaggtgtcccgactaacacgtattacaacctccaagcacaacaacaactgcaactacaacaccagcaacaacaacagcaggctcagcaagcagcgggagggtatcgccaagctcagcaacaacagcattatggatctcatggatacccaaattattatcagtctcagaccgaaatgtcactcgagcgccagcagcaaaaccctagggatggtgctgggtctcaggctggtcaaccgtcgaatcaatctcagcagcagctctggcaaaactcttactaa

SEQ ID NO: 17902 - protein, 831 aa, Arabidopsis thaliana
MSSSKVGGGARKGIQDIPSGSRKIVQSLTEIVNSPEAEIYAMLKECNMDPNETVSRLLSQDPFHEVKSKKEKKKETRDISDSRPRGANNTYNRGARGGSARYAGRSGSTHFSSTDSGNFQGKSTNKKESGTQGYTSSWSSASGVANTYQTPHSEPIAMENKLPPVTLGDGISSSKSASGHQTAWFGAPGQRSMAEVVKMGRPQNKTTKQNVNVGSEINHEHEVNANQQAPVKDEWPSIEKPLAPSTSSLSVAPAESEVRNGLADFQSDRGDQYLKDRLENIHIAESGPSESRGVDHVQADSVQEDESVVSSEIDDNPYQTQSHPVEHHKDEDDVSSGSASFQQLDSHDQEVSHEEDRPAVVIPNHLLIHTEECAQLSFGSFGGFGSRPLSNSVEATSDVAPQIEHSDARNTEFYGDEHLGSTTNGNMVHTPATGNYDDSLETRREVLKQENSEGAQEHQYTFTQSEQGYAYENAKQQQMNSAYDASHTNSQNQMHNLDSLSNVMQGYSHSVPNTLLAQTAQNARELDFQYSPFSAQQSMQSRTSNNASSLGGQSISMPEALRGSGIPATQPTQQTLPGANIATGPALPQQLPMHYSQPTLPLTHYANMIGYPLMPQNYPYMPSAFQQTFAGNSAYHQQLAALLPQYKTNVSPGNLPQSATAPASAYGFGNSTNVGSAGNFPLNQQSATTGTTLGYEDVLSSQYKENHLLALQQQQQQQQHQQQNENSAMWHQGHGSRTMSGVPTNTYYNLQAQQQLQLQHQQQQQQAQQAAGGYRQAQQQQHYGSHGYPNYYQSQTEMSLERQQQNPRDGAGSQAGQPSNQSQQQLWQNSY

SEQ ID NO: 17903 - DNA, 2556 bp, Oryza sativa (japonica cultivar-group)
  CDS (1)..(2556)
atgagcggcggcggcggaggaggaggaggagggggagggggagggaggggggcggcggcggggccagtgccggggtccgcgaggaagctggtgcaggggctgaaggagatcgtgaaccggcccgacgcggagatctacgcggcgctgcgggactgcggcatggaccccgacgaggcggtcagccgcctcctctcccaagatacgtttcaagaggtaaagagcaagcgcgacaagaaaaaggaggttaataaggaggcgcttgagccaaaatctagaggagcagttaactccaatagtcgagccactagagctggtgcagaccgtagtggacgaagcagttcagttcagtctggatcaagtggtgctgataacatgtcctcaaggtcatcaatattgggacctggcgtgctagcaactaattctacacagaagcaaactgttccaagttctactgtaaacaaggatgttcttcacgatggatcttttggagcaatgcaaccatcgtcgggatttcagaacagttggtgtggggtgccaggtcagatgtcaatggctgatattgtgaaaatgggcagacctcaagtgaggtcttctagcaagcctgtggcttcaacagacaacgcctattctggccaaacctcatctttctcaagtgtggtaaaccagaacccaaacaaatctgcaagcactgccccaccaacaacatttgagcaaagatttcctgttcttcaagatcctattcctcaagttaagaattccagtcatgcttctgctgataaccatgagacacaagagagtgattggtttcaacaggatgggacactaccagggagtcaattaacagtccctgagacatcccgtgacatatctttacctgtggcatctttggaatcatcaacgttggttgctgacgatgcgaactcgtataataattctcatgtaggagagagcagctcagctataccttctgatagacacctggaaattattgatggcaacaaccattttaataatggtttattgcacaactcaagtgcataccagtctcgagggaatcactatgatgataacgatgatgatgatgatgaagctgaagtttctaatgttgatgtggaatctgcttcggcaaacattcagcacctaagcctacagactgaagatctagttgcaagtaaatctaccgaagataatccagcggttataatccctgatcatctacaacttgcaaatgcagactgtgggcatctgagctttggtagttttggatctggtgccttctctgggttgcttccatcaaaggtccacaaaaatggagtggaggaagtgcctgttccagatgaatctccatcagttgatcaagaagatgtcaggaatcaagacaacaatgttgctctaaattcttcaacaaatggggacgttgaagccagaattggcactagcatggagaatactgatgaaccttcagtttcacagcctgatattctgacgcagggtgctgtagatgtgtcaagtctacaatacaatctgccatcagtttcagatcatgtatattcaaacacaacacaaccaagtacgatggagagctcacagggagacatacaagtgcaacatcttcctcagttttcaagtttactgcaagcaaatactctacacaacaacttgctgggatcaaatcttcccaaccttcgggactttgacttttcaccattgctatcaacacaattagctacaaaatataacccaccagtaccgactaccagcttaccagcaatctccatgcaggagacattgaagccagggggattctcgaatgcacaacctacacaaaatcttcccagcgcgagcattccgtctgggcctcctctcccacaacaattatctgtacatccgtaccctcagccaactctgccccttggacctttttccaatctggttggctatccatatttgcctcaaaactactatctaccatcagcagcctttcagcaatctttctcaagtaatggacctttccatcaatctgctgctaccactggggtgcctggtgtcagtatgaaatattcgatgccacaatacaagggcagccttcctgctacaagcccaccacagccttcatcagtggtctccggatttggaggttttggtagctcaaataatattcctggaaatttcggcttaaatcagaatgtcccctctgcacccacaactatggggtttgaagaagctttaagcacacagttcaaagataacagtcaatacattgccttgcagcagaacgacaactctgcaatgtggcttcatggagctgctggttcaagggccgtttcagcggtaccacctggcaacttctatggtttccagggccagaatcagccaggtggcttccgccaggggcagcagccctctcaatacggtggccttgggtacccaagcttctaccagtcacaggctggtttaccgcaggagcacccgcagaaccttactgagggaaccttgaacagctctcagaccactccatctcagccatcgcaccagatctggcaacacatctactga

SEQ ID NO: 17904 - protein, 851 aa, Oryza sativa (japonica cultivar-group)
MSGGGGGGGGGGGGGRGAAAGPVPGSARKLVQGLKEIVNRPDAEIYAALRDCGMDPDEAVSRLLSQDTFQEVKSKRDKKKEVNKEALEPKSRGAVNSNSRATRAGADRSGRSSSVQSGSSGADNMSSRSSILGPGVLATNSTQKQTVPSSTVNKDVLHDGSFGAMQPSSGFQNSWCGVPGQMSMADIVKMGRPQVRSSSKPVASTDNAYSGQTSSFSSVVNQNPNKSASTAPPTTFEQRFPVLQDPIPQVKNSSHASADNHETQESDWFQQDGTLPGSQLTVPETSRDISLPVASLESSTLVADDANSYNNSHVGESSSAIPSDRHLEIIDGNNHFNNGLLHNSSAYQSRGNHYDDNDDDDDEAEVSNVDVESASANIQHLSLQTEDLVASKSTEDNPAVIIPDHLQLANADCGHLSFGSFGSGAFSGLLPSKVHKNGVEEVPVPDESPSVDQEDVRNQDNNVALNSSTNGDVEARIGTSMENTDEPSVSQPDILTQGAVDVSSLQYNLPSVSDHVYSNTTQPSTMESSQGDIQVQHLPQFSSLLQANTLHNNLLGSNLPNLRDFDFSPLLSTQLATKYNPPVPTTSLPAISMQETLKPGGFSNAQPTQNLPSASIPSGPPLPQQLSVHPYPQPTLPLGPFSNLVGYPYLPQNYYLPSAAFQQSFSSNGPFHQSAATTGVPGVSMKYSMPQYKGSLPATSPPQPSSVVSGFGGFGSSNNIPGNFGLNQNVPSAPTTMGFEEALSTQFKDNSQYIALQQNDNSAMWLHGAAGSRAVSAVPPGNFYGFQGQNQPGGFRQGQQPSQYGGLGYPSFYQSQAGLPQEHPQNLTEGTLNSSQTTPSQPSHQIWQHIY

SEQ ID NO: 17905 - DNA, 2559 bp, Oryza sativa (japonica cultivar-group)
  CDS (1)..(2559)
atgaccggcggcggcgcggggggaggaggaggaggagggaaggggggcgcggcggcgggccccgtcccggcggcgtcgaggaagctggtgcagagcctgaaggagatcgtgaaccgcccggaggcggagatctacgcggcgctgcgcgattgcggcatggaccccgacgaggcggtcagccgcctcctctcccaagatacttttcaagaggtaaagagcaagcgcgataagaaaaaagaggttaaagagattcctgagccaagatctcgagcggcaagtaatgctgccagtcgaggtgtaagaggcggtgcagatcgaggcgggcgaaacagttcttttcactctagctccattgacaatgtggcttcaaggtcaatctcagggcctggtatgacatcaaccaattccactcagaagcaaacaattccaagttccttggtaaacaaaagtgtggttgctgatggaccgtcggtacctgcacaatcatcatctgggtttcagcacggttggtctgggacaccaggtcagttgtcaatggccgatattgtgaaaatgggcaggcctcaggtaaagcagtcctctagcaagcctgcggttactgcagacaaaggatatactggacaatacccatctttgcccagtactgtaaaccagaatttgaaacaatctgctagcacagtttcaccaacaaatcctgaccaggggttacattctgctcaagattctattcatcccaaggatcacaaccactcagcagctgtcaacaagcaggcatatgataatgattggcttccacaggacgagccaccaccaggaaatcaatcagccttgcctgagacatccggtgaccaatcattatatgagtcatcgctacagtcatctacactggttgctggtgtgattaacccccatgaaaattctcatttggatgagaacagatcagctgcattttcttccgagagacacttggaacatcatggaggcgattctgaatatgatgatggactgttgcaagaatcgagtacctatctgcctcagaagaattctcatgcagaagatgaagttgagggctccaattctgatgtagcgttagccactgaaaacttccagggtctaagcctacataatgaagagttagttccaacaaaattagctgaagataaccctgcagttataattcctgatcacctgcaagttaccggctcagactgtgtcactttgagctttggcagttttgaatctggagcattttctgggcttctccctgttccatcaaggagcgctgatgataacaatgtggagttgcctgttatagaggaatctgtacctctagatcaaattgattcaagagatcaagactattatgatagtgccgcagttaattcgtcaggaaatgagaaccttgatactatcataggaactaacatggagaacattgatgtaccttctgtttcacagcctgatgtcctgagacaggaagtgcttgatcattccggtcttcaatataacctaccatctgattcaagtgctgcatatgcaaacactacacagccaagtacaatggagtcctcacaaggaaacaaccaggcgcacactctttcccatctttcaaacttactgcaagcaaattcattacacaacagcctattggggtcaaacattgcacctcttcgggacttggacttcagtttatcacctttgctagcagcacaatcaatgacaaaatataactcagctgcaccaactactactggaccagcaatctccatgcaagagactctgaagccaggagttttctccaacgctcaatctacccaaaatcttccaagtactagtatagcaacggggcctcctctccctcagcaattagtccacccttactctcagcctactgtaccactggcgccttttgcgaatatgattggttatccgtatttggcacagaactaccctgctgcttacctaccatcagctgccttccagcaagcatactcgagtaatggaccattccatcagtctgctgctgctgctgtaccaggagctatgaagtacaatatgaatgtgccgcaattcaagaacaacctatcggctacaagcttacaacagcaaccttcttcagtgatctctggttatggaggatttggaagctctagtaatcttcctggaaatttcactcttaatcagaatgctgcctctgcatcaacaaatcttgggtttgacgaagcattgagcacgccatacaaagatcccagccaatatatggccctccagcagggtgacaattctgcaatgtggcttcatggtgctggttcaagagcaacgtcggcgcttccaccgagtcacttctatggcttccagggacagagtcagcagggtggctttcgtcaggcgcagcaaccgcagcagcactcgcaattcggtggccatgggtatccagctttctaccattctcaaagccaagagcaccaccagaacccggccgagggaggcctgaacggtttccagaatgcccaatcacagccgtctcaccaggggtggcagcagcacaccggctactga

SEQ ID NO: 17906 - protein, 852 aa, Oryza sativa (japonica cultivar-group)
MTGGGAGGGGGGGKGGAAAGPVPAASRKLVQSLKEIVNRPEAEIYAALRDCGMDPDEAVSRLLSQDTFQEVKSKRDKKKEVKEIPEPRSRAASNAASRGVRGGADRGGRNSSFHSSSIDNVASRSISGPGMTSTNSTQKQTIPSSLVNKSVVADGPSVPAQSSSGFQHGWSGTPGQLSMADIVKMGRPQVKQSSSKPAVTADKGYTGQYPSLPSTVNQNLKQSASTVSPTNPDQGLHSAQDSIHPKDHNHSAAVNKQAYDNDWLPQDEPPPGNQSALPETSGDQSLYESSLQSSTLVAGVINPHENSHLDENRSAAFSSERHLEHHGGDSEYDDGLLQESSTYLPQKNSHAEDEVEGSNSDVALATENFQGLSLHNEELVPTKLAEDNPAVIIPDHLQVTGSDCVTLSFGSFESGAFSGLLPVPSRSADDNNVELPVIEESVPLDQIDSRDQDYYDSAAVNSSGNENLDTIIGTNMENIDVPSVSQPDVLRQEVLDHSGLQYNLPSDSSAAYANTTQPSTMESSQGNNQAHTLSHLSNLLQANSLHNSLLGSNIAPLRDLDFSLSPLLAAQSMTKYNSAAPTTTGPAISMQETLKPGVFSNAQSTQNLPSTSIATGPPLPQQLVHPYSQPTVPLAPFANMIGYPYLAQNYPAAYLPSAAFQQAYSSNGPFHQSAAAAVPGAMKYNMNVPQFKNNLSATSLQQQPSSVISGYGGFGSSSNLPGNFTLNQNAASASTNLGFDEALSTPYKDPSQYMALQQGDNSAMWLHGAGSRATSALPPSHFYGFQGQSQQGGFRQAQQPQQHSQFGGHGYPAFYHSQSQEHHQNPAEGGLNGFQNAQSQPSHQGWQQHTGY

SEQ ID NO: 17907 - DNA, 2559 bp, Oryza sativa (japonica cultivar-group)
  CDS (1)..(2559)
atgagaggcgggggcggccggggcgggggcgggggcggcggtgggagggtgcccttctacgccgcggcggcggcggcggagccggcgtcgaggaagctggtgcaggggcttaaggggatcctgaccgaccgctccgaggccgagatctacgccacgctcctggattgcggcatggaccccgacgtcgccgtcgagcgcctcatctcgcaagatccttttcatgaagtgagaagaaagcgtgacaagaaaaaggagatcaaagcacctcaggaaaccaggcctcggccattttataaacctgcatttcgaggatctaagactggaggagattcaactggcagtggtaaaggccctaccaagaaagaaacggagttacattctcttcctaaatcatcagtctctgattctgtgaaggaaagcaatccaactgagaagatttcagcagccgaccatgctactatcaatgacagtcttattttatcaagtggccaagctgatgcaaagtccactcctctccagcccccttctcaagtgaagcatggttggggtgggatgccagggcgcccttccatggctgatattgtcaagatgggcaaaccccaagctaaacctgtgagatctgttgcatgtaataccgggatgccaaccattggtggttcagtcatttccaatgcaacaaatcatacttcaaaagattcacaagacctagttttgccttcacaagtgaactctgttgcaactgatagaataccaaatggtaccaatgaggtctcccctgcatctaatgactcctctattgatgtattacctcccagagaggggttggaggtgccagaatctgtcgccacagttaaacctggatcgtcaactgcagatgtttacaaagatgaagttgaagaagacatggattctgataaaaataaggatatgagtgcaagcaatgcagacgatcgaacatcttcaggaccatatcctgcatctagcaaagaagtacactcagaacatactcaaattgccacccatcacaatgacttgatagtggaaacagaggactctcagtctgatggcaatgcatttgagaataaccgtgttgcagattcagagggaaatatgtctgctactgacaaacagtttgaacagttgattctacatgaggaaaaaaaatcaaaatcatctgaagataacccggctgtaataattcctgatcatcttcaggtttcaaatgctgattgtgcacacttgacatttggtagttttgtgtctggaacacttgatgcgccagtctccttgaaaactgccaatggtgatgaggaggttgcagcagtttctgataaccattcgattgatcagtcagatgtcagaatccatgagtacgaaaataaggatacagtagcacctgcagctgacgaacatgttgcctcttcaacaaaaagtgacacggagaatgttgatgttgcacctgtacaacagcctgaattgagaacagccgatttaatagatgttccaaacaacaccatgtacaataatttatcaacctccgattatgcaactccaagtgcagtgcaaccagattcttccgcacacatttatctgcaagaacatcgacaattgcaaaacatttcccctctctctagctttatgcaaggaaatatcccgaatggactattgccaccagcacttccacctttgcgtgactttgatcctgctttctcattattacttactaacccaccattggctacgatggttcatggcacaacatcatcgtccatgggcaatgcaactactgtttctacacaaccacaagagattgtgaatccaggtgcttcatccaaccctcaattgaatcaatctcagccaagcaccagcaccagcattgcttctggtcctccactccctcagcatctcacgcttcacccttatgctcaagcaactcttcctcttgggtatgcaagcatgattggctacccatctctagccccaagttatacatatctcccgcctcctgcctttcagcaaccatacatgaacagtggcctattccaccaagcagcagctgcagttcccaattccagtgtaaaatatcctttgccacagtacaaaggcaatgtttcccttgcgagcttaccccagcaagcctcactgctctcaagctatgttgggggctttggagctgcaagcagcatgccaggaaattttgccctgaaccaaagcacaccatcagcaaccgctgctcctgggtttgatggaacagtgcccgcgcaatacaaagaagggaatcaatttgtatctcttcagcagagcgagaacgctgcgatgtggatgcatggtgccagttcgcgaacaatgccacctcttgcagcaaatgccttgtattatcaagggcagcagggtcaccagggcggccttcggcaggggcagctgccttcacagtttggtgctccacttgcaccgacacagcccggcctgggccatgagcaccggaaccctagtgacggcaacttaagctctgctgccgctgccgctcaggctaaccaaatgtggccaaatagttactga

SEQ ID NO: 17908 - protein, 852 aa, Oryza sativa (japonica cultivar-group)
MRGGGGRGGGGGGGGRVPFYAAAAAAEPASRKLVQGLKGILTDRSEAEIYATLLDCGMDPDVAVERLISQDPFHEVRRKRDKKKEIKAPQETRPRPFYKPAFRGSKTGGDSTGSGKGPTKKETELHSLPKSSVSDSVKESNPTEKISAADHATINDSLILSSGQADAKSTPLQPPSQVKHGWGGMPGRPSMADIVKMGKPQAKPVRSVACNTGMPTIGGSVISNATNHTSKDSQDLVLPSQVNSVATDRIPNGTNEVSPASNDSSIDVLPPREGLEVPESVATVKPGSSTADVYKDEVEEDMDSDKNKDMSASNADDRTSSGPYPASSKEVHSEHTQIATHHNDLIVETEDSQSDGNAFENNRVADSEGNMSATDKQFEQLILHEEKKSKSSEDNPAVIIPDHLQVSNADCAHLTFGSFVSGTLDAPVSLKTANGDEEVAAVSDNHSIDQSDVRIHEYENKDTVAPAADEHVASSTKSDTENVDVAPVQQPELRTADLIDVPNNTMYNNLSTSDYATPSAVQPDSSAHIYLQEHRQLQNISPLSSFMQGNIPNGLLPPALPPLRDFDPAFSLLLTNPPLATMVHGTTSSSMGNATTVSTQPQEIVNPGASSNPQLNQSQPSTSTSIASGPPLPQHLTLHPYAQATLPLGYASMIGYPSLAPSYTYLPPPAFQQPYMNSGLFHQAAAAVPNSSVKYPLPQYKGNVSLASLPQQASLLSSYVGGFGAASSMPGNFALNQSTPSATAAPGFDGTVPAQYKEGNQFVSLQQSENAAMWMHGASSRTMPPLAANALYYQGQQGHQGGLRQGQLPSQFGAPLAPTQPGLGHEHRNPSDGNLSSAAAAAQANQMWPNSY

SEQ ID NO: 17909 - DNA, 2496 bp, Arabidopsis thaliana
  CDS (1)..(2496)
atgagcagcagcaaggtcggcggcggagcaaggaaaggaattcaggatattccgtcagggtctagaaaaatagtacaaagcttgacggaaattgtaaactctcctgaggctgagatctatgctatgcttaaagagtgcaatatggatcctaacgaaaccgttagtcgcctcctctctcaagatccatttcacgaggtaaagagcaagaaagaaaagaagaaagagactagggatatatcagattctcggccgcgtggtgctaataacacctacaaccgtggtgctagaggtggttctgctcgctacgccggacgaagtggatctacccatttcagctctactgattctggaaacttccagggaaaatctacaaataagaaagaaagtggaacgcagggttatacaagttcttggtcttctgcttctggagtggcgaacacctatcaaacaccacacagtgaacccgttgctacggaaaacaaattgcctcctgttaccttgggagatggaatatcatcatcacagtcagcttctggacatcaaactgcatggtttggagctccaggccagaggtctatggctgaagttgtgaagatgggtagaccacagaacaagacaacaaagcaaaatgtcaatatgggttctgagataaatcatgaacacaaagttagtgcaaatcatcaggcccctgttaaagatgaatggccgtcgattgagaagccgctggctcctagtacatcttctttatcagtagcaccagcagaatcagaagtacgcaatggtccagctgatttccaatccgatagaggagatcaatatctgaaggaccggttagaaaatattcatatagcagaaagtggcccttctgaaagtcgtaaggttgatcatgtgcaagccgactctgttcaagaagatgaatctgtagtttcgtcagaaattgatgataatccatatcagacacagagccatccagtagagcaccacaaagatgaagatgatgtttcatctggttcagccagttttcaacaactagatagtcatgatcaagaagtctcacatgaaaaggatagacctgctgttgtaattccaaaccatttgctaattcacacagaagaatgcgcgcaattaagttttggaagctttggaggttttggatcaaggcctttgagcaacagcgtagaagcgacttctgatgtagctccacaaatcgaacattcagatgcaagaaatactgagttctatggagatgaacatctgggaagtacaaccaatggaaatatggtccacacacctgctactggaaattatgatgattctttagaaacgaggcgagaggtgttgaagcaagaaaactctgagggcgctcaggagcaccagtacacatttacccagtctgagcaagggtatgcgtatgaaaatgctaagcagcagcagatgaattctgcatatgatgcctcacacacaaattcacagaatcagatgcataatcttgattcattatcaaatgtgatgcaggggtattcacactcagttcccaacactttattggcacaaacagcacaaaatgcgagggaacttgacttccagtattcacctttctcagctcaacagtctatgcaatcaagaactagcaacaatgcctcatcacttggtggccaaagcatttcaatgccagaggcgctccgaggcagtggaattccggcaacacagccaacccagcaaacactacctggtgctaatatcgctactggacctgctcttcctcagcagcttccaatgcattactctcaacccacattacctctaacacactatgcaaacatgatcggttatcctctaatgcctcagaattatccatacatgccatctgctttccagcaaacatttgctggtaatagtgcataccaccagcaactagctgcattgcttccgcagtacaaaaccaatgtctctcccggtaatttgcctcagtctgcaacagcgcctgcctctgcttatggatttggaaactcgaccaatgtcggatctgccggaaacttccctcttaaccaacagtctgctactaccggtacaacgcttggttatgacgatgttcttagttctcaatacaaagagaatcatctgttggcacttcagcagcagcagcaacaacagcaacatcaacaacagaacgaaaactcggcgatgtggcatcagggtcatggttccagaaccatgtcaggtgtcccgactaacacgtattacaacctccaagcacaacaacaactgcaactacaacaccagcaacaacaacagcaggctcagcaagcagcgggagggtatcgccaagctcagcaacaacagcattatggatctcatggatacccaaattattatcagtctcagaccgaaatgtcactcgagcgccagcagcaaaaccctagggatggtgctgggtctcaggctggtcaaccgtcgaatcaatctcagcagcagctctggcaaaactcttactaa

SEQ ID NO: 17910 - protein, 831 aa, Arabidopsis thaliana
MSSSKVGGGARKGIQDIPSGSRKIVQSLTEIVNSPEAEIYAMLKECNMDPNETVSRLLSQDPFHEVKSKKEKKKETRDISDSRPRGANNTYNRGARGGSARYAGRSGSTHFSSTDSGNFQGKSTNKKESGTQGYTSSWSSASGVANTYQTPHSEPVATENKLPPVTLGDGISSSQSASGHQTAWFGAPGQRSMAEVVKMGRPQNKTTKQNVNMGSEINHEHKVSANHQAPVKDEWPSIEKPLAPSTSSLSVAPAESEVRNGPADFQSDRGDQYLKDRLENIHIAESGPSESRKVDHVQADSVQEDESVVSSEIDDNPYQTQSHPVEHHKDEDDVSSGSASFQQLDSHDQEVSHEKDRPAVVIPNHLLIHTEECAQLSFGSFGGFGSRPLSNSVEATSDVAPQIEHSDARNTEFYGDEHLGSTTNGNMVHTPATGNYDDSLETRREVLKQENSEGAQEHQYTFTQSEQGYAYENAKQQQMNSAYDASHTNSQNQMHNLDSLSNVMQGYSHSVPNTLLAQTAQNARELDFQYSPFSAQQSMQSRTSNNASSLGGQSISMPEALRGSGIPATQPTQQTLPGANIATGPALPQQLPMHYSQPTLPLTHYANMIGYPLMPQNYPYMPSAFQQTFAGNSAYHQQLAALLPQYKTNVSPGNLPQSATAPASAYGFGNSTNVGSAGNFPLNQQSATTGTTLGYDDVLSSQYKENHLLALQQQQQQQQHQQQNENSAMWHQGHGSRTMSGVPTNTYYNLQAQQQLQLQHQQQQQQAQQAAGGYRQAQQQQHYGSHGYPNYYQSQTEMSLERQQQNPRDGAGSQAGQPSNQSQQQLWQNSY

SEQ ID NO: 17911 - DNA, 2289 bp, Arabidopsis thaliana
  CDS (1)..(2289)
atgggtggtggtggcggcagcgttagtaacgcgaatggaggtgttccggcgtcttcgaggaaggttattcaggatttgaaggagattgtggagtgttctgagttagagatttatgcgatgcttgttgagtgcgatatgaatcctgatgaagctgttaatcgtcttctctctcaagatacttttcatgaggcgaagagtaaacgagagaaaaagaaagagactaaagaccatgcagactcctggacgcgtaatgtcccgaatcgtggagctagaagcggtaatgacagttacaatacctctcgaggtggcagaaacaagtataaatctaatggtaagacaggaaaaattcaaggtgtacctgtgaatagaagagaaaacggagcacgtaatcatttggctggatcttctgcatcatctggtttgcttggacgcctacctggtttgcttagacgccaaccaccatcaaacagtgatcttccaagctctaaagtcaagaaagcaccaacgacccccagtgatgcagttactttgtcttcgttgccttttcctgcgtatcaatcagcttgggctagcgctaaccctgggcaaagaactatggctgaaattgtgaaaatgggtagacctaacctgcagaagaatgtcgctttgcctcgttcatcagaggctcaagagagcagcagtaaagcccctttgaaggatgaatgcccttcaattgagaagcaagacgtttcttatctatcatcctctgtcttgaaaccatctgctgaatctaagatttcttccgaccaatttagtgagtctcaacatttggatgagactcttttggatgacatccaccgcgaaacaaaaacttatccaactgggtctcctcctgatgtggatcacaatccgctagcttcagtatcaagcagaaatttggttgacgatgaatctagagattccttagtatgtgacgatgaaaataacaaagctgaaagacattcttatgaggaaaatcaagatgaagatgtttctacttctgttgctactggttttcagcaactaactatttacaatgaagaagagcaggaagcattaccaaaggaagaaaaacatgcggtgataatccccaatcacctgcaagtccatacctcggaatgcttgcacttaatgttcggttgtttttcttctgggataggatctggtcaacctagtgccttgaatgataacttggaagaaccactagtagcagaggatgattcatcattcagacatcccgacactaacttctatggagaagaagaagcagaacagccgagaaatgctgttacaaatgaacaagtgtcttatcaaatcgattcaagtacccaaaattataattctgccacagattctaagacagacgcagtgcaacatgaaccgcctcaagaagtcatcaatacaagttttcgtcttccgaagcagcaaggatatacaagttcgttacccaacactctactcccatcaggcattcaagatggaagagaatctaatcttcactactcgcctttcacaacactatacaacactgaaatttccatggccgaggcactaagagctgcgagtatttcacctcaaaacgcaatacccagtgcaggacagcaagcagcaactcttgcacaacatcttgccttaaatccctactctcatcagcctgagatgcctttaggacattatggcaatttgataagctacccattcatggcacagtgttacaaccctttcatgctttcagcttttcaacaagtgtttcctactggtaatcatcagtctttagttgatatgcttatgcaatacaagactcaaacaaccgctcctcctgttcctcctccctctgcctatgggttcggtggaggcgctgtctcaagtaataacttccctttgaatcccacaagtgctgcaaactcctacgaagatgtcttgagctcacagtttaatgagagcaaccacttggcatcatctcttcagcagcagaacgaaaaaacaacagcatggcatcaaggacaacaagccaactcgcgagtggttccaggaagcggatattacagctaccctggtcatcagaatcagcagcctcccggtttccgtcaagcccaacaactgcaacatcagcagcagtcgtctcaacaacaacaacaacaacaacattatggaggacatgggtatgtgagtccttaccattcacaagctgtaatgtcactagaacatcttcatcaccaataccaacaacagcaaaacgctagagacgcgtcgaaactgtcccaacaatag

SEQ ID NO: 17912 - protein, 762 aa, Arabidopsis thaliana
MGGGGGSVSNANGGVPASSRKVIQDLKEIVECSELEIYAMLVECDMNPDEAVNRLLSQDTFHEAKSKREKKKETKDHADSWTRNVPNRGARSGNDSYNTSRGGRNKYKSNGKTGKIQGVPVNRRENGARNHLAGSSASSGLLGRLPGLLRRQPPSNSDLPSSKVKKAPTTPSDAVTLSSLPFPAYQSAWASANPGQRTMAEIVKMGRPNLQKNVALPRSSEAQESSSKAPLKDECPSIEKQDVSYLSSSVLKPSAESKISSDQFSESQHLDETLLDDIHRETKTYPTGSPPDVDHNPLASVSSRNLVDDESRDSLVCDDENNKAERHSYEENQDEDVSTSVATGFQQLTIYNEEEQEALPKEEKHAVIIPNHLQVHTSECLHLMFGCFSSGIGSGQPSALNDNLEEPLVAEDDSSFRHPDTNFYGEEEAEQPRNAVTNEQVSYQIDSSTQNYNSATDSKTDAVQHEPPQEVINTSFRLPKQQGYTSSLPNTLLPSGIQDGRESNLHYSPFTTLYNTEISMAEALRAASISPQNAIPSAGQQAATLAQHLALNPYSHQPEMPLGHYGNLISYPFMAQCYNPFMLSAFQQVFPTGNHQSLVDMLMQYKTQTTAPPVPPPSAYGFGGGAVSSNNFPLNPTSAANSYEDVLSSQFNESNHLASSLQQQNEKTTAWHQGQQANSRVVPGSGYYSYPGHQNQQPPGFRQAQQLQHQQQSSQQQQQQQHYGGHGYVSPYHSQAVMSLEHLHHQYQQQQNARDASKLSQQ

SEQ ID NO: 17913 - DNA, 2571 bp, Oryza sativa subsp
  CDS (1)..(2571)
  misc_feature (87)..(87): n is a, g, c or t
atgggaaaaggtcttttcgatctgctcggacagtgtttcgatttattcagtttggatagggcatctgatttttccctgttgggctgnctctttctttacattaaacctgtgtctgaacatatatcttctgcacacctttcctacagttccattccaaatacgtttcaagaggtaaagagcaagcgcgacaagaaaaaggaggtcaggactagtttttacttccagtttgacaagtttaatgtagtttcagttggcctggttaataaggaggcgcttgagccaaaatctagaggagcagttaactccaatagtcgagccactagagctggtgcagaccgtagtggacgaagcagttcagttcagtctggatcaagtggtgctgataacatgtcctcacggtcatcaatattgggacctggcgtgctagcaactaattctacacagaagcaaactgttccaagttcttctgtaaacaaggatgttcttcacgatggatcttttggagcaatgcaaccatcgtcgggatttcagaacagttggtgtggggtgccaggtcagatgtcaatggctgatattgtgaaaatgggcagacctcaagtgaggtcttctagcaagcctgtggcttcaacagacaaagcctattctggccaaacctcatctttctcaagtgtggtaaaccagaacccaaacaaatctgcaagcactgccccaccaacaacatttgagcaaagatttcctgttcttcaagatcctattcctcaagttaagaattccagtcatgcttctgctgataaccatgaaacacaagagagtgattggtttcaacaggatgggacactaccagggagtcaattaacagtccctgagacatctcgtgacatatctttacctgtggcatctttggaatcatcaacgttggttgctgacgatgcgaactcgtataataattctcatgtaggagagagcagctcagctataccttctgatagacacctggaaattattgatggcaacaaccattttaataatggtttattgcacaactcaagtgcataccagtctcgagggaatcactatgatgataacgatgatgatgatgatgaagctgaagtttctaatgttgatgtggaatctgcttcggcaaacattcagcacctaagcctacagactgaagatctagttgcaagtaaatctaccgaagataatccagcggttataatccctgatcatctacaacttgcaaatgcagactgtgggcatctgagctttggtagttttggatctggtgccttctctgggttgcttccatcaaaggtccacaaaaatggagtggaggaagtgcctgttccagatgaatctccatcagttgatcaagaagatgtcaggaatcaagacaacaatgttgctctaaattcttcaacaaatggggacgttgaagccagaattggcactaacatggagaatactgatgaaccttcagtttcacagcctgatattctgacgcagggtgctgtagatgtgtcaagtctacaatacaatctgccatcagtttcagatcatgtatattcaaacacaacacaaccaagtacgatggagagctcacagggagacatacaagtgcaacatcttcctcagttttcaagtttactgcaagcaaatactctacacaacaacttgctgggatcaaatcttcccaaccttcgggactttgacttttcaccattgctatcaacacaattagctacaaaatataacccaccagtaccgactaccagcttaccagcaatctccatgcaggagacattgaagccagggggattctcgaatgcacaacctacacaaaatcttcccagcgtgagcattccatctgggcctcctctcccacaacaattatctgtacatccgtaccctcagccaactctgccccttggacctttttccaatctggttggctatccatatttgcctcaaaactactatctaccatcagcagcctttcagcaatctttctcaagtaatggacctttccatcaatctgctgctaccactggggtgcctggtgtcagtatgaaatattcgatgccacaatacaagagcagccttcctgctacaagcccaccacagccttcatcagtggtctccggatttggaggttttggtagctcaaataatattcctggaaatttcggcttaaatcagaatgtcccctctgcacccacaactatggggtttgaagaagctttaagcacacagttcaaagataacagtcaatacattgccttacagcagaacgacagctctgcaatgtggcttcatggagctgctggttcaagggccgtttcagcggtaccacctggcaacttctatggtttccagggccagaatcagccaggtggcttccgccaggggcagcagccctctcaatacggtggccttgggtactcaagcttctaccagtcacaggctggtttaccgcaggagcacccgcagaaccttactgagggaaccttgaacagctctcagaccactccatctcagccatcgcaccagatctggcaacacatctactga

SEQ ID NO: 17914 - protein, 856 aa, Oryza sativa subsp
  misc_feature (29)..(29): The Xaa at location 29 stands for Stop, Cys, or Trp.
MGKGLFDLLGQCFDLFSLDRASDFSLLGXLFLYIKPVSEHISSAHLSYSSIPNTFQEVKSKRDKKKEVRTSFYFQFDKFNVVSVGLVNKEALEPKSRGAVNSNSRATRAGADRSGRSSSVQSGSSGADNMSSRSSILGPGVLATNSTQKQTVPSSSVNKDVLHDGSFGAMQPSSGFQNSWCGVPGQMSMADIVKMGRPQVRSSSKPVASTDKAYSGQTSSFSSVVNQNPNKSASTAPPTTFEQRFPVLQDPIPQVKNSSHASADNHETQESDWFQQDGTLPGSQLTVPETSRDISLPVASLESSTLVADDANSYNNSHVGESSSAIPSDRHLEIIDGNNHFNNGLLHNSSAYQSRGNHYDDNDDDDDEAEVSNVDVESASANIQHLSLQTEDLVASKSTEDNPAVIIPDHLQLANADCGHLSFGSFGSGAFSGLLPSKVHKNGVEEVPVPDESPSVDQEDVRNQDNNVALNSSTNGDVEARIGTNMENTDEPSVSQPDILTQGAVDVSSLQYNLPSVSDHVYSNTTQPSTMESSQGDIQVQHLPQFSSLLQANTLHNNLLGSNLPNLRDFDFSPLLSTQLATKYNPPVPTTSLPAISMQETLKPGGFSNAQPTQNLPSVSIPSGPPLPQQLSVHPYPQPTLPLGPFSNLVGYPYLPQNYYLPSAAFQQSFSSNGPFHQSAATTGVPGVSMKYSMPQYKSSLPATSPPQPSSVVSGFGGFGSSNNIPGNFGLNQNVPSAPTTMGFEEALSTQFKDNSQYIALQQNDSSAMWLHGAAGSRAVSAVPPGNFYGFQGQNQPGGFRQGQQPSQYGGLGYSSFYQSQAGLPQEHPQNLTEGTLNSSQTTPSQPSHQIWQHIY

SEQ ID NO: 17915 - DNA, 2322 bp, Oryza sativa subsp
  CDS (1)..(2322)
atgaccggcggcggcgcggggggaggaggaggaggagggaaggggggcgcggcggcgggccccgtcccggcggcgtcgaggaagctggtgcagagcctgaaggagatcgtgaaccgcccggaggcggagatctacgcggcgctgcgcgattgcggcatggaccccgacgaggcgatacttttcaagagacaatgtggcttcaaggtcaatctcagggcctggtatgacatcaaccaattccactcagaagcaaacaattccaagcacggttggtctgggacaccaggtcagttgtcaatggccgatattgtgaaaatgggcaggcctcaggtaaagcagtcctctagcaagcctgcggttactgcagacaaaggatatactggacaatacccatctttgcccagtactgtaaaccagaatttgaaacaatctgctagcacagtttcaccaacaaatcctgaccaggggttacattctgctcaagattctattcatcccaaggatcacaaccactcagcagctgtcaacaagcaggcatatgataatgattggcttccacaggacgagccaccaccaggaaatcaatcagccttgcctgagacatccggtgaccaatcattatatgagtcatcgctacagtcatctacactggttgctggtgtgattaacccccatgaaaattctcatttggatgagaacagatcagctgcattttcttccgagagacacttggaacatcatggaggcgattctgaatatgatgatggactgttgcaagaatcgagtacctatctgcctcagaagaattctcatgcagaagatgaagttgagggctccaattctgatgtagcgttagccactgaaaacttccagggtctaagcctacataatgaagagttagttgcaacaaaattagctgaagataaccctgcagttataattcctgatcacctgcaagttaccggctcagactgtgtcactttgagctttggcagttttgaatctggagcattttctgggcttctccctgttccatcaaggagcgctgatgataacaatgtggagttgcctgttatagaggaatctgtacctctagatcaaattgattcaagagatcaagactattatgatagtgccgcagttaattcgtcaggaaatgagaaccttgatactatcataggaacaaacatggagaacattgatgtaccttctgtttcacagcctgatgtcctgagacaggaagtgcttgatcattccggtcttcaatataacctaccatctgattcaagtgctgcatatgcaaacactacacagccaagtacaatggagtcctcacaaggaaacaaccaggcgcacactctttcccatctttcaaacttactgcaagcaaattcattacacaacagcctattggggtcaaacattgcacctctccgggacttggacttcagtttatcacctttgctagcagcacaatcaatgacaaaatataactcagctgcaccaactactactggaccagcaatctccatgcaagagactctgaagccaggagttttctccaacgctcaatctacccaaaatcttccaagtactagtatagcaacggggcctcctctccctcagcaattagtccacccttactctcagcctactgtaccactggcgccttttgcgaatatgattggttatccgtatttggcacagaactaccctgctgcttacctaccatcagctgccttccagcaagcatactcgagtaatggaccattccatcagtctgctgctgctgctgtaccaggagctatgaagtacaatatgaatgtgccgcaattcaagaacaacctatcggctacaagcttacaacagcaaccttcttcagtgatctctggttatggaggatttggaagctctagtaatcttcctggaaatttcactcttaatcagaatgctgcctctgcatcaacaaatcttgggtttgacgaagcattgagcacgccatacaaagatcccagccaatatatggccctccagcagggtgacaattctgcaatgtggcttcatggtgctggttcaagagcaacgtcggcgcttccaccgagtcacttctatggcttccagggacagagtcagcagggtggctttcgtcaggcgcagcaaccgcagcagcactcgcaattcggtggccatgggtatccagctttctaccattctcaaagccaagagcaccaccagaacccggccgagggaggcctgaacggtttccagaatgcccaatcacagccgtctcaccaggggtggcagcagcacaccggctactga

SEQ ID NO: 17916 - protein, 773 aa, Oryza sativa subsp
MTGGGAGGGGGGGKGGAAAGPVPAASRKLVQSLKEIVNRPEAEIYAALRDCGMDPDEAILFKRQCGFKVNLRAWYDINQFHSEANNSKHGWSGTPGQLSMADIVKMGRPQVKQSSSKPAVTADKGYTGQYPSLPSTVNQNLKQSASTVSPTNPDQGLHSAQDSIHPKDHNHSAAVNKQAYDNDWLPQDEPPPGNQSALPETSGDQSLYESSLQSSTLVAGVINPHENSHLDENRSAAFSSERHLEHHGGDSEYDDGLLQESSTYLPQKNSHAEDEVEGSNSDVALATENFQGLSLHNEELVATKLAEDNPAVIIPDHLQVTGSDCVTLSFGSFESGAFSGLLPVPSRSADDNNVELPVIEESVPLDQIDSRDQDYYDSAAVNSSGNENLDTIIGTNMENIDVPSVSQPDVLRQEVLDHSGLQYNLPSDSSAAYANTTQPSTMESSQGNNQAHTLSHLSNLLQANSLHNSLLGSNIAPLRDLDFSLSPLLAAQSMTKYNSAAPTTTGPAISMQETLKPGVFSNAQSTQNLPSTSIATGPPLPQQLVHPYSQPTVPLAPFANMIGYPYLAQNYPAAYLPSAAFQQAYSSNGPFHQSAAAAVPGAMKYNMNVPQFKNNLSATSLQQQPSSVISGYGGFGSSSNLPGNFTLNQNAASASTNLGFDEALSTPYKDPSQYMALQQGDNSAMWLHGAGSRATSALPPSHFYGFQGQSQQGGFRQAQQPQQHSQFGGHGYPAFYHSQSQEHHQNPAEGGLNGFQNAQSQPSHQGWQQHTGY

SEQ ID NO: 17917 - DNA, 2391 bp, Oryza sativa subsp
  CDS (1)..(2391)
atggaccccgacgtcgccgtcgagcgcctcatctcgcaagatccttttcatgaagtgagaagaaagcgtgacaagaaaaaggagatcaaagcacctcaggaaaccaggcctcggccattttataaacctgcatttcgaggatctaagactggaggagattcaactgtcagtggtaaaggccctaccaagaaagaaacggagttacattctcttcctaaatcatcagtctctgattctgtgaaggaaagcaatccaactgagaagatttcagcagccgaccatgctactatcaatgacaatcttattttatcaagtggccaagctcatgcaaagtccactcctctccagcccccttctcaagtgaagcatggttggggtgggatgccagggcgcccttccatggctgatattgtcaagatgggcaaaccccaagctaaacctgtgagatctgttgcatgtaataccgggataccaaccattggtggttcagtcatttccaatgcaacaaatcatacttcaaaagattcacaagacttagttttgccttcacaagtgaactctgttgcaactgatagaataccaaatggtaccaatgaggtctcccctgcatctaatgactcctctattgatgtattacctcccagagaggggttggaggtgccagaatctgtcgccacagttaaacctggatcgtcaactgcagatgtttacaaagatgaagttgaagaagacatggattctgataaaaataaggagatgagtgcaagcaatgcagacagtcaaacatcttcaggaccatatcctgcatctagtaaagaagtacactcagaacatactcaaattgccacccatcacaatgacttgatagtggaaacagaggactctcagtctgatggcaatgcatttgagaataatcgtgattcagagggaaatatgtctgctactgacaaacagtttgaacagttgattctacatgaggaaaaaaaatcaaaatcatctgaagataacccagctgtaataattcctgatcatcttcaggtttcaaatgctgattgtgcacacttgacatttggtagttttgtgtctggaacacttgatgcgccagtctccttgaaaactgccaatggtgatgaggaggttgcagcagtttctgataaccattcgattgatcagtcagatgtcagaatccatgagtacgaaaataaggatacagtagcacctgcagctgacgaacatgttgcctcttcaacaaaaagtgacacggagaatgttgatgttgcacctgtacaacagcctgaattgagaacagccgatttaatagatgttccaaacaacaccatgtacaataatttatcaacctccgattatgcaactccaagtgcagtgcaaccagattcttccgcacacatttatctgcaagaacatcgacaattgcaaaacatttcccctctctctagctttatgcaaggaaatatcccgaatggactattgccaccagcacttccacctttgcgtgactttgatcctgctttctcattattacttactaacccaccattggctacgatggttcatggcacaacatcatcgtccatgggcaatgcaactactgtttctacacaaccacaagagattgtgaatccaggtgcttcatccaaccctcaattgaatcaatctcagccaagcaccagcaccagcattgcttctggtcctccactccctcagcatctcacgcttcacccttatgctcaagcaactcttcctcttgggtatgcaagcatgattggctacccatctctagccccaagttatacatatctcccgcctcctgcctttcagcaaccatacatgaacagtggcctattccaccaagcagcagctgcagttcccaattccagtgtaaaatatcctttgccacagtacaaaggcaatgtttcccttgcgagcttaccccagcaagcctcactgctctcaagctatgttgggggctttggagctgcaagcagcatgccaggaaattttgccctgaaccaaagcacaccatcagcaaccgctgctcctgggtttgatggaacagtgcccgcgcaatacaaagaagggaatcaatttgtatctcttcagcagagcgagaacgctgcgatgtggatgcatggtgccagttcgcgaacaatgccacctcttgcagcaaatgccttgtatggctatcaagggcagcagggtcaccagggcggccttcggcaggggcagctgccttcacagtttggtgctccacttgcaccgacacagcccggcctgggccatgagcaccggaaccctagtgacggcaacttaagctctgctgccgctgccgctgccgctcaggctaaccaaatgtggccaaatagttactga

SEQ ID NO: 17918 - protein, 796 aa, Oryza sativa subsp
MDPDVAVERLISQDPFHEVRRKRDKKKEIKAPQETRPRPFYKPAFRGSKTGGDSTVSGKGPTKKETELHSLPKSSVSDSVKESNPTEKISAADHATINDNLILSSGQAHAKSTPLQPPSQVKHGWGGMPGRPSMADIVKMGKPQAKPVRSVACNTGIPTIGGSVISNATNHTSKDSQDLVLPSQVNSVATDRIPNGTNEVSPASNDSSIDVLPPREGLEVPESVATVKPGSSTADVYKDEVEEDMDSDKNKEMSASNADSQTSSGPYPASSKEVHSEHTQIATHHNDLIVETEDSQSDGNAFENNRDSEGNMSATDKQFEQLILHEEKKSKSSEDNPAVIIPDHLQVSNADCAHLTFGSFVSGTLDAPVSLKTANGDEEVAAVSDNHSIDQSDVRIHEYENKDTVAPAADEHVASSTKSDTENVDVAPVQQPELRTADLIDVPNNTMYNNLSTSDYATPSAVQPDSSAHIYLQEHRQLQNISPLSSFMQGNIPNGLLPPALPPLRDFDPAFSLLLTNPPLATMVHGTTSSSMGNATTVSTQPQEIVNPGASSNPQLNQSQPSTSTSIASGPPLPQHLTLHPYAQATLPLGYASMIGYPSLAPSYTYLPPPAFQQPYMNSGLFHQAAAAVPNSSVKYPLPQYKGNVSLASLPQQASLLSSYVGGFGAASSMPGNFALNQSTPSATAAPGFDGTVPAQYKEGNQFVSLQQSENAAMWMHGASSRTMPPLAANALYGYQGQQGHQGGLRQGQLPSQFGAPLAPTQPGLGHEHRNPSDGNLSSAAAAAAAQANQMWPNSY

SEQ ID NO: 17919 - DNA, 2613 bp, Oryza sativa subsp
  CDS (1)..(2613)
atgagcggcggcggcggaggaggaggaggagggggagggggagggaggggggcggcggcggggccagtgccggggtccgcgaggaagctggtgcaggggctgaaggagatcgtgaaccggcccgacgcggagatctacgcggcgctgcgggactgcggcatggaccccgacgaggcggtcagccgcctcctctcccaagatacgtttcaagaggtaaagagcaagcgcgacaagaaaaaggaggtcaggactagtttttacttccagtttgacaagtttaatgtagtttcagttggcctggttaataaggaggcgcttgagccaaaatctagaggagcagttaactccaatagtcgagccactagagctggtgcagaccgtagtggacgaagcagttcagttcagtctggatcaagtggtgctgataacatgtcctcaaggtcatcaatattgggacctggcgtgctagcaactaattctacacagaagcaaactgttccaagttctactgtaaacaaggatgttcttcacgatggatcttttggagcaatgcaaccatcgtcgggatttcagaacagttggtgtggggtgccaggtcagatgtcaatggctgatattgtgaaaatgggcagacctcaagtgaggtcttctagcaagcctgtggcttcaacagacaacgcctattctggccaaacctcatctttctcaagtgtggtaaaccagaacccaaacaaatctgcaagcactgccccaccaacaacatttgagcaaagatttcctgttcttcaagatcctattcctcaagttaagaattccagtcatgcttctgctgataaccatgagacacaagagagtgattggtttcaacaggatgggacactaccagggagtcaattaacagtccctgagacatcccgtgacatatctttacctgtggcatctttggaatcatcaacgttggttgctgacgatgcgaactcgtataataattctcatgtaggagagagcagctcagctataccttctgatagacacctggaaattattgatggcaacaaccattttaataatggtttattgcacaactcaagtgcataccagtctcgagggaatcactatgatgataacgatgatgatgatgatgaagctgaagtttctaatgttgatgtggaatctgcttcggcaaacattcagcacctaagcctacagactgaagatctagttgcaagtaaatctaccgaagataatccagcggttataatccctgatcatctacaacttgcaaatgcagactgtgggcatctgagctttggtagttttggatctggtgccttctctgggttgcttccatcaaaggtccacaaaaatggagtggaggaagtgcctgttccagatgaatctccatcagttgatcaagaagatgtcaggaatcaagacaacaatgttgctctaaattcttcaacaaatggggacgttgaagccagaattggcactagcatggagaatactgatgaaccttcagtttcacagcctgatattctgacgcagggtgctgtagatgtgtcaagtctacaatacaatctgccatcagtttcagatcatgtatattcaaacacaacacaaccaagtacgatggagagctcacagggagacatacaagtgcaacatcttcctcagttttcaagtttactgcaagcaaatactctacacaacaacttgctgggatcaaatcttcccaaccttcgggactttgacttttcaccattgctatcaacacaattagctacaaaatataacccaccagtaccgactaccagcttaccagcaatctccatgcaggagacattgaagccagggggattctcgaatgcacaacctacacaaaatcttcccagcgcgagcattccgtctgggcctcctctcccacaacaattatctgtacatccgtaccctcagccaactctgccccttggacctttttccaatctggttggctatccatatttgcctcaaaactactatctaccatcagcagcctttcagcaatctttctcaagtaatggacctttccatcaatctgctgctaccactggggtgcctggtgtcagtatgaaatattcgatgccacaatacaagggcagccttcctgctacaagcccaccacagccttcatcagtggtctccggatttggaggttttggtagctcaaataatattcctggaaatttcggcttaaatcagaatgtcccctctgcacccacaactatggggtttgaagaagctttaagcacacagttcaaagataacagtcaatacattgccttgcagcagaacgacaactctgcaatgtggcttcatggagctgctggttcaagggccgtttcagcggtaccacctggcaacttctatggtttccagggccagaatcagccaggtggcttccgccaggggcagcagccctctcaatacggtggccttgggtacccaagcttctaccagtcacaggctggtttaccgcaggagcacccgcagaaccttactgagggaaccttgaacagctctcagaccactccatctcagccatcgcaccagatctggcaacacatctactga

SEQ ID NO: 17920 - protein, 870 aa, Oryza sativa subsp
MSGGGGGGGGGGGGGRGAAAGPVPGSARKLVQGLKEIVNRPDAEIYAALRDCGMDPDEAVSRLLSQDTFQEVKSKRDKKKEVRTSFYFQFDKFNVVSVGLVNKEALEPKSRGAVNSNSRATRAGADRSGRSSSVQSGSSGADNMSSRSSILGPGVLATNSTQKQTVPSSTVNKDVLHDGSFGAMQPSSGFQNSWCGVPGQMSMADIVKMGRPQVRSSSKPVASTDNAYSGQTSSFSSVVNQNPNKSASTAPPTTFEQRFPVLQDPIPQVKNSSHASADNHETQESDWFQQDGTLPGSQLTVPETSRDISLPVASLESSTLVADDANSYNNSHVGESSSAIPSDRHLEIIDGNNHFNNGLLHNSSAYQSRGNHYDDNDDDDDEAEVSNVDVESASANIQHLSLQTEDLVASKSTEDNPAVIIPDHLQLANADCGHLSFGSFGSGAFSGLLPSKVHKNGVEEVPVPDESPSVDQEDVRNQDNNVALNSSTNGDVEARIGTSMENTDEPSVSQPDILTQGAVDVSSLQYNLPSVSDHVYSNTTQPSTMESSQGDIQVQHLPQFSSLLQANTLHNNLLGSNLPNLRDFDFSPLLSTQLATKYNPPVPTTSLPAISMQETLKPGGFSNAQPTQNLPSASIPSGPPLPQQLSVHPYPQPTLPLGPFSNLVGYPYLPQNYYLPSAAFQQSFSSNGPFHQSAATTGVPGVSMKYSMPQYKGSLPATSPPQPSSVVSGFGGFGSSNNIPGNFGLNQNVPSAPTTMGFEEALSTQFKDNSQYIALQQNDNSAMWLHGAAGSRAVSAVPPGNFYGFQGQNQPGGFRQGQQPSQYGGLGYPSFYQSQAGLPQEHPQNLTEGTLNSSQTTPSQPSHQIWQHIY

SEQ ID NO: 17921 - DNA, 2322 bp, Oryza sativa subsp
  CDS (1)..(2322)
atgaccggcggcggcgcggggggaggaggaggaggagggaaggggggcgcggcggcgggccccgtcccggcggcgtcgaggaagctggtgcagagcctgaaggagatcgtgaaccgcccggaggcggagatctacgcggcgctgcgcgattgcggcatggaccccgacgaggcgatacttttcaagagacaatgtggcttcaaggtcaatctcagggcctggtatgacatcaaccaattccactcagaagcaaacaattccaagcacggttggtctgggacaccaggtcagttgtcaatggccgatattgtgaaaatgggcaggcctcaggtaaagcagtcctctagcaagcctgcggttactgcagacaaaggatatactggacaatacccatctttgcccagtactgtaaaccagaatttgaaacaatctgctagcacagtttcaccaacaaatcctgaccaggggttacattctgctcaagattctattcatcccaaggatcacaaccactcagcagctgtcaacaagcaggcatatgataatgattggcttccacaggacgagccaccaccaggaaatcaatcagccttgcctgagacatccggtgaccaatcattatatgagtcatcgctacagtcatctacactggttgctggtgtgattaacccccatgaaaattctcatttggatgagaacagatcagctgcattttcttccgagagacacttggaacatcatggaggcgattctgaatatgatgatggactgttgcaagaatcgagtacctatctgcctcagaagaattctcatgcagaagatgaagttgagggctccaattctgatgtagcgttagccactgaaaacttccagggtctaagcctacataatgaagagttagttccaacaaaattagctgaagataaccctgcagttataattcctgatcacctgcaagttaccggctcagactgtgtcactttgagctttggcagttttgaatctggagcattttctgggcttctccctgttccatcaaggagcgctgatgataacaatgtggagttgcctgttatagaggaatctgtacctctagatcaaattgattcaagagatcaagactattatgatagtgccgcagttaattcgtcaggaaatgagaaccttgatactatcataggaactaacatggagaacattgatgtaccttctgtttcacagcctgatgtcctgagacaggaagtgcttgatcattccggtcttcaatataacctaccatctgattcaagtgctgcatatgcaaacactacacagccaagtacaatggagtcctcacaaggaaacaaccaggcgcacactctttcccatctttcaaacttactgcaagcaaattcattacacaacagcctattggggtcaaacattgcacctcttcgggacttggacttcagtttatcacctttgctagcagcacaatcaatgacaaaatataactcagctgcaccaactactactggaccagcaatctccatgcaagagactctgaagccaggagttttctccaacgctcaatctacccaaaatcttccaagtactagtatagcaacggggcctcctctccctcagcaattagtccacccttactctcagcctactgtaccactggcgccttttgcgaatatgattggttatccgtatttggcacagaactaccctgctgcttacctaccatcagctgccttccagcaagcatactcgagtaatggaccattccatcagtctgctgctgctgctgtaccaggagctatgaagtacaatatgaatgtgccgcaattcaagaacaacctatcggctacaagcttacaacagcaaccttcttcagtgatctctggttatggaggatttggaagctctagtaatcttcctggaaatttcactcttaatcagaatgctgcctctgcatcaacaaatcttgggtttgacgaagcattgagcacgccatacaaagatcccagccaatatatggccctccagcagggtgacaattctgcaatgtggcttcatggtgctggttcaagagcaacgtcggcgcttccaccgagtcacttctatggcttccagggacagagtcagcagggtggctttcgtcaggcgcagcaaccgcagcagcactcgcaattcggtggccatgggtatccagctttctaccattctcaaagccaagagcaccaccagaacccggccgagggaggcctgaacggtttccagaatgcccaatcacagccgtctcaccaggggtggcagcagcacaccggctactga

SEQ ID NO: 17922 - protein, 773 aa, Oryza sativa subsp
MTGGGAGGGGGGGKGGAAAGPVPAASRKLVQSLKEIVNRPEAEIYAALRDCGMDPDEAILFKRQCGFKVNLRAWYDINQFHSEANNSKHGWSGTPGQLSMADIVKMGRPQVKQSSSKPAVTADKGYTGQYPSLPSTVNQNLKQSASTVSPTNPDQGLHSAQDSIHPKDHNHSAAVNKQAYDNDWLPQDEPPPGNQSALPETSGDQSLYESSLQSSTLVAGVINPHENSHLDENRSAAFSSERHLEHHGGDSEYDDGLLQESSTYLPQKNSHAEDEVEGSNSDVALATENFQGLSLHNEELVPTKLAEDNPAVIIPDHLQVTGSDCVTLSFGSFESGAFSGLLPVPSRSADDNNVELPVIEESVPLDQIDSRDQDYYDSAAVNSSGNENLDTIIGTNMENIDVPSVSQPDVLRQEVLDHSGLQYNLPSDSSAAYANTTQPSTMESSQGNNQAHTLSHLSNLLQANSLHNSLLGSNIAPLRDLDFSLSPLLAAQSMTKYNSAAPTTTGPAISMQETLKPGVFSNAQSTQNLPSTSIATGPPLPQQLVHPYSQPTVPLAPFANMIGYPYLAQNYPAAYLPSAAFQQAYSSNGPFHQSAAAAVPGAMKYNMNVPQFKNNLSATSLQQQPSSVISGYGGFGSSSNLPGNFTLNQNAASASTNLGFDEALSTPYKDPSQYMALQQGDNSAMWLHGAGSRATSALPPSHFYGFQGQSQQGGFRQAQQPQQHSQFGGHGYPAFYHSQSQEHHQNPAEGGLNGFQNAQSQPSHQGWQQHTGY

SEQ ID NO: 17923 - DNA, 2382 bp, Oryza sativa subsp
  CDS (1)..(2382)
atggaccccgacgtcgccgtcgagcgcctcatctcgcaggatccttttcatgaagtgagaagaaagcgtgacaagaaaaaggagatcaaagcacctcaggaaaccaggcctcggccattttataaacctgcatttcgaggatctaagactggaggagattcaactggcagtggtaaaggccctaccaagaaagaaacggagttacattctcttcctaaatcatcagtctctgattctgtgaaggaaagcaatccaactgagaagatttcagcagccgaccatgctactatcaatgacagtcttattttatcaagtggccaagctgatgcaaagtccactcctctccagcccccttctcaagtgaagcatggttggggtgggatgccagggcgcccttccatggctgatattgtcaagatgggcaaaccccaagctaaacctgtgagatctgttgcatgtaataccgggatgccaaccattggtggttcagtcatttccaatgcaacaaatcatacttcaaaagattcacaagacctagttttgccttcacaagtgaactctgttgcaactgatagaataccaaatggtaccaatgaggtctcccctgcatctaatgactcctctattgatgtattacctcccagagaggggttggaggtgccagaatctgtcgccacagttaaacctggatcgtcaactgcagatgtttacaaagatgaagttgaagaagacatggattctgataaaaataaggatatgagtgcaagcaatgcagacgatcgaacatcttcaggaccatatcctgcatctagcaaagaagtacactcagaacatactcaaattgccacccatcacaatgacttgatagtggaaacagaggactctcagtctgatggcaatgcatttgagaataaccgtgattcagagggaaatatgtctgctactgacaaacagtttgaacagttgattctacatgaggaaaaaaaatcaaaatcatctgaagataacccggctgtaataattcctgatcatcttcaggtttcaaatgctgattgtgcacacttgacatttggtagttttgtgtctggaacacttgatgcgccagtctccttgaaaactgccaatggtgatgaggaggttgcagcagtttctgataaccattcgattgatcagtcagatgtcagaatccatgagtacgaaaataaggatacagtagcacctgcagctgacgaacatgttgcctcttcaacaaaaagtgacacggagaatgttgatgttgcacctgtacaacagcctgaattgagaacagccgatttaatagatgttccaaacaacaccatgtacaataatttatcaacctccgattatgcaactccaagtgcagtgcaaccagattcttccgcacacatttatctgcaagaacatcgacaattgcaaaacatttcccctctctctagctttatgcaaggaaatatcccgaatggactattgccaccagcacttccacctttgcgtgactttgatcctgctttctcattattacttactaacccaccattggctacgatggttcatggcacaacatcatcgtccatgggcaatgcaactactgtttctacacaaccacaagagattgtgaatccaggtgcttcatccaaccctcaattgaatcaatctcagccaagcaccagcaccagcattgcttctggtcctccactccctcagcatctcacgcttcacccttatgctcaagcaactcttcctcttgggtatgcaagcatgattggctacccatctctagccccaagttatacatatctcccgcctcctgcctttcagcaaccatacatgaacagtggcctattccaccaagcagcagctgcagttcccaattccagtgtaaaatatcctttgccacagtacaaaggcaatgtttcccttgcgagcttaccccagcaagcctcactgctctcaagctatgttgggggctttggagctgcaagcagcatgccaggaaattttgccctgaaccaaagcacaccatcagcaaccgctgctcctgggtttgatggaacagtgcccgcgcaatacaaagaagggaatcaatttgtatctcttcagcagagcgagaacgctgcgatgtggatgcatggtgccagttcgcgaacaatgccacctcttgcagcaaatgccttgtattatcaagggcagcagggtcaccagggcggccttcggcaggggcagctgccttcacagtttggtgctccacttgcaccgacacagcccggcctgggccatgagcaccggaaccctagtgacggcaacttaagctctgctgccgctgccgctcaggctaaccaaatgtggccaaatagttactga

SEQ ID NO: 17924 - protein, 793 aa, Oryza sativa subsp
MDPDVAVERLISQDPFHEVRRKRDKKKEIKAPQETRPRPFYKPAFRGSKTGGDSTGSGKGPTKKETELHSLPKSSVSDSVKESNPTEKISAADHATINDSLILSSGQADAKSTPLQPPSQVKHGWGGMPGRPSMADIVKMGKPQAKPVRSVACNTGMPTIGGSVISNATNHTSKDSQDLVLPSQVNSVATDRIPNGTNEVSPASNDSSIDVLPPREGLEVPESVATVKPGSSTADVYKDEVEEDMDSDKNKDMSASNADDRTSSGPYPASSKEVHSEHTQIATHHNDLIVETEDSQSDGNAFENNRDSEGNMSATDKQFEQLILHEEKKSKSSEDNPAVIIPDHLQVSNADCAHLTFGSFVSGTLDAPVSLKTANGDEEVAAVSDNHSIDQSDVRIHEYENKDTVAPAADEHVASSTKSDTENVDVAPVQQPELRTADLIDVPNNTMYNNLSTSDYATPSAVQPDSSAHIYLQEHRQLQNISPLSSFMQGNIPNGLLPPALPPLRDFDPAFSLLLTNPPLATMVHGTTSSSMGNATTVSTQPQEIVNPGASSNPQLNQSQPSTSTSIASGPPLPQHLTLHPYAQATLPLGYASMIGYPSLAPSYTYLPPPAFQQPYMNSGLFHQAAAAVPNSSVKYPLPQYKGNVSLASLPQQASLLSSYVGGFGAASSMPGNFALNQSTPSATAAPGFDGTVPAQYKEGNQFVSLQQSENAAMWMHGASSRTMPPLAANALYYQGQQGHQGGLRQGQLPSQFGAPLAPTQPGLGHEHRNPSDGNLSSAAAAAQANQMWPNSY

SEQ ID NO: 17925 - DNA, 2598 bp, Medicago truncatula
  CDS (1)..(2598)
atgagcggcaaagtagggggacagaaaggtacatcatcatcgttgtcgggtattccggcggcgagtcggaaaatggtacaaagcttgaaagagatagtttcgaatatacctgataacgagatctatgccactctcaaagactgtaacatggaccctaacgaagctgttagtcgtcttctttctcaagatccttttcatgaggttaagagcaaacgagaaaagaaaaaagagggtaaggatacaacagagccaaggtcgcgtgggagtaattataatataccgagtcgaggcggtggtggtggtaggactggtagtgaccgatatgctggccgtggtggtggtggcggcggtgcaagttcaaaccaattcagtaataatgattatggtgtcccgcagagtaaacctgtatttaagaaggaaaatggaacgcctgcttatggaagctcctccacatcttatgcatctagtgtgatggacaataatgtaaacaggcagccaccatcttggagtgattctgttggtgtccatgacggattgtcttcatcatcacatcatggtggattgcaatctgcatggtcggcgagcccaggtcaagtgtcaatggctgacattgtcaagatgggtaggccacaggccaaggcatccgtgcctaaatcttctgtccacagtgggaatcatcagaatgctgtttcaactccagcagcctcgcatcacaacttgaatgttactgaagcgactaatgaatggccttctattgaacccaatgttcaacagagtgatgaatggccttctattgaccccaatgttcaacagagtgatgaatggccttctgttgagcacccaccaatagttgctgttgatgcccatccaaattctgagtattatacaaatacatctaactttggtgaagctaatagacaactgcagaaccacggaaatgaatttgtagctgaagacagtcctgttgaggatgagaatcctgatgatgttggatctgcttctatacccgctaaaattatatcggatgataatccaggaactgcttctggatatgatgataatttgtacaaggacataaattcttaccagtctcatcgacatccttttgatgataacgaagctgaaaatggtgtttcatcagtggctacaaacttagagcagctaaatttacacacagatgagcaagggatagaaccagaagaggacaattctgatgtacttattccaaatcacctacaactccatactccagagtgttttagtctgagctttggaagttttggaccaaaacaaaatgccaccgtttctggagctgggacacattcatctaggcccttacaaagtaacttggaggagacttccggagctactgatgtttcagcaattgggtcctcagatgtcaaaaatcccgactattatggggatgagcatattgctactacctcagatggtaataatatatcccacataactggtgtggatgctaggacttatgaacattcttccatttcacaaccagaggctttaaagtctgaaccctctgaaactgctcaggaaaatcaatattcatttccttcatcttcgcatgagtttacatatgaaaatgcccaacaaccagaagttgcatatcctcattcacaaacaagctcacagatccagaacctatctcccttctccagtgtaatggcatatacaaattctttgcccaatgctctgttggcttcaacggttcaaacaccaagggaggatatcccatactcacccttccctgttacacaagcaatgcctgcaaaatatagcaacatggcttcttcaattggtggttccactataaacatgtcagaggctttaagggcaaacaacatttcgacgcctcaagctcaacctaatcaacaatctttgcctggtgctggtgttgccactggaccttcacttcctcaacaccttgctgtgcatccgtactcacagctgggaccttttgctaatatgataagttatccgttcatgcctcagagctatacctacatgccatcggcatttcagcaggcttttgctggaaatagcacctaccaccaatctctggcagcggtgcttccacaatataaaaatagcatttctgtcagcagcttgcctcagtctgctgctataccatctggatatggttttggaagttccaccagcattcctggtggaaactatcctttgaatccatcagctgcccctactagtacaaccattggatatgatgacgtgataaactcccagtataaggataacaatcatatgatttcacttcagcagaatgagaacaatcctatgtgggttcaagggcctggttctagaacaatgtcagttcctcccagcacgtattacagcttccagggacagaatcaacaacaaccaggtgcatttcgacaaagccagcagccatcgcagcagcattttgcaccgcacgggtaccctaataatttctaccattctcagagtggaatttctctagaacatcagcagcagaaccctagggatgcttcccttgctggctcccaaagccaaccacctaagcagtcccaacaacaattgtggcaaaacagctactaa

SEQ ID NO: 17926 - protein, 865 aa, Medicago truncatula
MSGKVGGQKGTSSSLSGIPAASRKMVQSLKEIVSNIPDNEIYATLKDCNMDPNEAVSRLLSQDPFHEVKSKREKKKEGKDTTEPRSRGSNYNIPSRGGGGGRTGSDRYAGRGGGGGGASSNQFSNNDYGVPQSKPVFKKENGTPAYGSSSTSYASSVMDNNVNRQPPSWSDSVGVHDGLSSSSHHGGLQSAWSASPGQVSMADIVKMGRPQAKASVPKSSVHSGNHQNAVSTPAASHHNLNVTEATNEWPSIEPNVQQSDEWPSIDPNVQQSDEWPSVEHPPIVAVDAHPNSEYYTNTSNFGEANRQLQNHGNEFVAEDSPVEDENPDDVGSASIPAKIISDDNPGTASGYDDNLYKDINSYQSHRHPFDDNEAENGVSSVATNLEQLNLHTDEQGIEPEEDNSDVLIPNHLQLHTPECFSLSFGSFGPKQNATVSGAGTHSSRPLQSNLEETSGATDVSAIGSSDVKNPDYYGDEHIATTSDGNNISHITGVDARTYEHSSISQPEALKSEPSETAQENQYSFPSSSHEFTYENAQQPEVAYPHSQTSSQIQNLSPFSSVMAYTNSLPNALLASTVQTPREDIPYSPFPVTQAMPAKYSNMASSIGGSTINMSEALRANNISTPQAQPNQQSLPGAGVATGPSLPQHLAVHPYSQLGPFANMISYPFMPQSYTYMPSAFQQAFAGNSTYHQSLAAVLPQYKNSISVSSLPQSAAIPSGYGFGSSTSIPGGNYPLNPSAAPTSTTIGYDDVINSQYKDNNHMISLQQNENNPMWVQGPGSRTMSVPPSTYYSFQGQNQQQPGAFRQSQQPSQQHFAPHGYPNNFYHSQSGISLEHQQQNPRDASLAGSQSQPPKQSQQQLWQNSY

SEQ ID NO: 17927 - DNA, 2583 bp, Oryza sativa subsp
  CDS (1)..(2583)
atgagaggcgggggcggccggggcgggggcgggggcggcggtgggagggtgcccttctacgccgcggcggcggcggcggagcctcgggcgggggatgcggccgcgatcccgccggcgtcgaggaagctggtgcaggggcttaaggggatcctgaccgaccgctccgaggccgagatctacgccacgctcctggattgcggcatggaccccgacgtcgccgtcgagcgcctcatctcgcaagatccttttcatgaagtgagaagaaagcgtgacaagaaaaaggagatcaaagcacctcaggaaaccaggcctcggccattttataaacctgcatttcgaggatctaagactggaggagattcaactggcagtggtaaaggccctaccaagaaagaaacggagttacattctcttcctaaatcatcagtctctgattctgtgaaggaaagcaatccaactgagaagatttcagcagccgaccatgctactatcaatgacagtcttattttatcaagtggccaagctgatgcaaagtccactcctctccagcccccttctcaagtgaagcatggttggggtgggatgccagggcgcccttccatggctgatattgtcaagatgggcaaaccccaagctaaacctgtgagatctgttgcatgtaataccgggatgccaaccattggtggttcagtcatttccaatgcaacaaatcatacttcaaaagattcacaagacctagttttgccttcacaagtgaactctgttgcaactgatagaataccaaatggtaccaatgaggtctcccctgcatctaatgactcctctattgatgtattacctcccagagaggggttggaggtgccagaatctgtcgccacagttaaacctggatcgtcaactgcagatgtttacaaagatgaagttgaagaagacatggattctgataaaaataaggatatgagtgcaagcaatgcagacgatcgaacatcttcaggaccatatcctgcatctagcaaagaagtacactcagaacatactcaaattgccacccatcacaatgacttgatagtggaaacagaggactctcagtctgatggcaatgcatttgagaataaccgtgattcagagggaaatatgtctgctactgacaaacagtttgaacagttgattctacatgaggaaaaaaaatcaaaatcatctgaagataacccggctgtaataattcctgatcatcttcaggtttcaaatgctgattgtgcacacttgacatttggtagttttgtgtctggaacacttgatgcgccagtctccttgaaaactgccaatggtgatgaggaggttgcagcagtttctgataaccattcgattgatcagtcagatgtcagaatccatgagtacgaaaataaggatacagtagcacctgcagctgacgaacatgttgcctcttcaacaaaaagtgacacggagaatgttgatgttgcacctgtacaacagcctgaattgagaacagccgatttaatagatgttccaaacaacaccatgtacaataatttatcaacctccgattatgcaactccaagtgcagtgcaaccagattcttccgcacacatttatctgcaagaacatcgacaattgcaaaacatttcccctctctctagctttatgcaaggaaatatcccgaatggactattgccaccagcacttccacctttgcgtgactttgatcctgctttctcattattacttactaacccaccattggctacgatggttcatggcacaacatcatcgtccatgggcaatgcaactactgtttctacacaaccacaagagattgtgaatccaggtgcttcatccaaccctcaattgaatcaatctcagccaagcaccagcaccagcattgcttctggtcctccactccctcagcatctcacgcttcacccttatgctcaagcaactcttcctcttgggtatgcaagcatgattggctacccatctctagccccaagttatacatatctcccgcctcctgcctttcagcaaccatacatgaacagtggcctattccaccaagcagcagctgcagttcccaattccagtgtaaaatatcctttgccacagtacaaaggcaatgtttcccttgcgagcttaccccagcaagcctcactgctctcaagctatgttgggggctttggagctgcaagcagcatgccaggaaattttgccctgaaccaaagcacaccatcagcaaccgctgctcctgggtttgatggaacagtgcccgcgcaatacaaagaagggaatcaatttgtatctcttcagcagagcgagaacgctgcgatgtggatgcatggtgccagttcgcgaacaatgccacctcttgcagcaaatgccttgtattatcaagggcagcagggtcaccagggcggccttcggcaggggcagctgccttcacagtttggtgctccacttgcaccgacacagcccggcctgggccatgagcaccggaaccctagtgacggcaacttaagctctgctgccgctgccgctcaggctaaccaaatgtggccaaatagttactga

SEQ ID NO: 17928 - protein, 860 aa, Oryza sativa subsp
MRGGGGRGGGGGGGGRVPFYAAAAAAEPRAGDAAAIPPASRKLVQGLKGILTDRSEAEIYATLLDCGMDPDVAVERLISQDPFHEVRRKRDKKKEIKAPQETRPRPFYKPAFRGSKTGGDSTGSGKGPTKKETELHSLPKSSVSDSVKESNPTEKISAADHATINDSLILSSGQADAKSTPLQPPSQVKHGWGGMPGRPSMADIVKMGKPQAKPVRSVACNTGMPTIGGSVISNATNHTSKDSQDLVLPSQVNSVATDRIPNGTNEVSPASNDSSIDVLPPREGLEVPESVATVKPGSSTADVYKDEVEEDMDSDKNKDMSASNADDRTSSGPYPASSKEVHSEHTQIATHHNDLIVETEDSQSDGNAFENNRDSEGNMSATDKQFEQLILHEEKKSKSSEDNPAVIIPDHLQVSNADCAHLTFGSFVSGTLDAPVSLKTANGDEEVAAVSDNHSIDQSDVRIHEYENKDTVAPAADEHVASSTKSDTENVDVAPVQQPELRTADLIDVPNNTMYNNLSTSDYATPSAVQPDSSAHIYLQEHRQLQNISPLSSFMQGNIPNGLLPPALPPLRDFDPAFSLLLTNPPLATMVHGTTSSSMGNATTVSTQPQEIVNPGASSNPQLNQSQPSTSTSIASGPPLPQHLTLHPYAQATLPLGYASMIGYPSLAPSYTYLPPPAFQQPYMNSGLFHQAAAAVPNSSVKYPLPQYKGNVSLASLPQQASLLSSYVGGFGAASSMPGNFALNQSTPSATAAPGFDGTVPAQYKEGNQFVSLQQSENAAMWMHGASSRTMPPLAANALYYQGQQGHQGGLRQGQLPSQFGAPLAPTQPGLGHEHRNPSDGNLSSAAAAAQANQMWPNSY

SEQ ID NO: 17929 - DNA, 2936 bp, Arabidopsis thaliana
  CDS (150)..(2648)
acagagagagatatatcttcccttgagcttccttggtgttcttcgtattgtcgtcgcgactgagagaaggccacaaaagcttcgtttatttccttcagatccgatatagtgagagagagagagagagaggcagcttacggcggataaatatgagcagcagcaaggtcggcggcggagcaaggaaaggaattcaggatattccgtcagggtctagaaaaatagtacaaagcttgacggaaattgtaaactctcctgaggctgagatctatgctatgcttaaagagtgcaatatggatcctaacgaaaccgttagtcgcctcctctctcaagatccatttcacgaggtaaagagcaagaaagaaaagaagaaagagactagggatatatcagattctcggccgcgtggtgctaataacacctacaaccgtggtgctagaggtggttctgctcgttacgccggacgaagtggatctacccatttcagctctactgattctggaaacttccagggaaaatctacaaataagaaagaaagtggaacgcagggttatacaagttcttggtcttctgcttctggagtggcgaacacctatcaaacaccacacagtgaacccattgctatggaaaacaaattgcctcctgttaccttgggagatggaatatcatcatcaaagtcagcttctggacatcaaactgcatggtttggagctccaggccagaggtctatggctgaagttgtgaagatgggtagaccacagaacaagacaacaaagcaaaatgtcaatgtgggttctgagataaatcatgaacacgaagttaatgcaaatcagcaggcccctgttaaagatgaatggccgtcgattgagaagccgctggctcctagtacatcttctttatcagtagcaccagcagaatcagaagtacgcaatggtctagctgatttccaatccgatagaggagatcaatatctgaaggaccggttagaaaatattcatatagcagaaagtggcccgtctgaaagtcgtggggtcgatcatgtgcaagccgactctgttcaagaagatgaatctgtagtttcgtcagaaattgatgataatccatatcagacacagagccatccagtagagcaccacaaagatgaagatgatgtttcatctggttcagccagttttcaacaactagatagtcatgatcaagaagtctcacatgaagaggatagacctgctgttgtaattccaaaccatttgctaattcacacagaagaatgcgcgcaattaagttttggaagctttggaggttttggatcaaggcctttgagcaacagcgtagaagcgacttctgatgtagctccacaaatcgaacattcagatgcaagaaatactgagttctatggagatgaacatctgggaagtacaaccaatggaaatatggtccacacacctgctactggaaattatgatgattctttagaaacgaggcgagaggtgttgaagcaagaaaactctgagggcgctcaggagcaccagtacacatttacccagtctgagcaagggtatgcgtatgaaaatgctaagcagcagcagatgaattctgcatatgatgcctcacacacaaattcacagaatcagatgcataatcttgattcattatcaaatgtgatgcaggggtattcacactcagttcccaacactttattggcacaaacagcacaaaatgcgagggaacttgacttccagtattcacctttctcagctcaacagtctatgcaatcaagaactagcaacaatgcctcatcacttggtggccaaagcatttcaatgccagaggcgctccgaggcagtggaattccggcaacacggccaacccagcaaacactacctggtgctaatatcgctactggacctgctcttcctcagcagcttccaatgcattactctcaacccacattacctctaacacactatgcaaacatgatcggttatcctctaatgcctcagaattatccatacatgccatctgctttccagcaaacatttgctggtaatagtgcataccaccagcaactagctgcattgcttccgcagtacaaaaccaatgtctctcccggtaatttgcctcagtctgcaacagcgcctgcctctgcttatggatttggaaactcgaccaatgtcggatctgccggaaacttccctcttaaccaacagtctgctactaccggtacaacgcttggttatgaagatgttcttagttctcaatacaaagagaatcatctgttggcacttcagcagcagcagcaacaacagcaacatcaacaacagaacgaaaactcggcgatgtggcatcagggtcatggttccagaaccatgtcaggtgtcccgactaacacgtattacaacctccaagcacaacaacaactgcaactacaacaccagcaacaacaacagcaggctcagcaagcagcgggagggtatcgccaagctcagcaacaacagcattatggatctcatggatacccaaattattatcagtctcagaccgaaatgtcactcgagcgccagcagcaaaaccctaggatggtgctgggtctcaggctggtcaaccgtcgaatcaatctcagcagcagctctggcaaaactcttactaaataaagaaagagagtgggttttttcagcttctttctctcgcttatagaggtttgtgtggcgagtctgaagaggaaatatggtcgtgttctaaaatgtaacttatcatcatcttttgtctcctctgttaacttagggaacatgcaactctgatttcatcaatgcaacttcagaaatgaaacttttttttttaactcttgcctcttcttacttctcttgtctaagggctcaacgtgatttttgaagcatgttcttctcttgtttatacatctgtggaaagaaaaaattatttat

SEQ ID NO: 17930 - protein, 832 aa, Arabidopsis thaliana
MSSSKVGGGARKGIQDIPSGSRKIVQSLTEIVNSPEAEIYAMLKECNMDPNETVSRLLSQDPFHEVKSKKEKKKETRDISDSRPRGANNTYNRGARGGSARYAGRSGSTHFSSTDSGNFQGKSTNKKESGTQGYTSSWSSASGVANTYQTPHSEPIAMENKLPPVTLGDGISSSKSASGHQTAWFGAPGQRSMAEVVKMGRPQNKTTKQNVNVGSEINHEHEVNANQQAPVKDEWPSIEKPLAPSTSSLSVAPAESEVRNGLADFQSDRGDQYLKDRLENIHIAESGPSESRGVDHVQADSVQEDESVVSSEIDDNPYQTQSHPVEHHKDEDDVSSGSASFQQLDSHDQEVSHEEDRPAVVIPNHLLIHTEECAQLSFGSFGGFGSRPLSNSVEATSDVAPQIEHSDARNTEFYGDEHLGSTTNGNMVHTPATGNYDDSLETRREVLKQENSEGAQEHQYTFTQSEQGYAYENAKQQQMNSAYDASHTNSQNQMHNLDSLSNVMQGYSHSVPNTLLAQTAQNARELDFQYSPFSAQQSMQSRTSNNASSLGGQSISMPEALRGSGIPATRPTQQTLPGANIATGPALPQQLPMHYSQPTLPLTHYANMIGYPLMPQNYPYMPSAFQQTFAGNSAYHQQLAALLPQYKTNVSPGNLPQSATAPASAYGFGNSTNVGSAGNFPLNQQSATTGTTLGYEDVLSSQYKENHLLALQQQQQQQQHQQQNENSAMWHQGHGSRTMSGVPTNTYYNLQAQQQLQLQHQQQQQQAQQAAGGYRQAQQQQHYGSHGYPNYYQSQTEMSLERQQQNPRMVLGLRLVNRRINLSSSSGKTLTK

SEQ ID NO: 17931 - DNA, 2577 bp, Arabidopsis thaliana
  CDS (1)..(2577)
atgagcagcagcaaggtcggcggcggagcaaggaaaggaattcaggatattccgtcagggtctagaaaaatagtacaaagcttgacggaaattgtaaactctcctgaggctgagatctatgctatgcttaaagagtgcaatatggatcctaacgaaaccgttagtcgcctcctctctcaagctgtcgcctttaatatggttccccttgtaattgtccaactttctagctggttcggttttatagagaagaaagatgttgttaatgatccatttcacgaggtaaagagcaagaaagaaaagaagaaagagactagggatatatcagattctcggccgcgtggtgctaataacacctacaaccgtggtgctagaggtggttctgctcgctacgccggacgaagtggatctacccatttcagctctactgattctggaaacttccagggaaaatctacaaataagaaagaaagtggaacgcagggttatacaagttcttggtcttctgcttctggagtggcgaacacctatcaaacaccacacagtgaacccgttgctacggaaaacaaattgcctcctgttaccttgggagatggaatatcatcatcacagtcagcttctggacatcaaactgcatggtttggagctccaggccagaggtctatggctgaagttgtgaagatgggtagaccacagaacaagacaacaaagcaaaatgtcaatatgggttctgagataaatcatgaacacaaagttagtgcaaatcatcaggcccctgttaaagatgaatggccgtcgattgagaagccgctggctcctagtacatcttctttatcagtagcaccagcagaatcagaagtacgcaatggtccagctgatttccaatccgatagaggagatcaatatctgaaggaccggttagaaaatattcatatagcagaaagtggcccttctgaaagtcgtaaggttgatcatgtgcaagccgactctgttcaagaagatgaatctgtagtttcgtcagaaattgatgataatccatatcagacacagagccatccagtagagcaccacaaagatgaagatgatgtttcatctggttcagccagttttcaacaactagatagtcatgatcaagaagtctcacatgaaaaggatagacctgctgttgtaattccaaaccatttgctaattcacacagaagaatgcgcgcaattaagttttggaagctttggaggttttggatcaaggcctttgagcaacagcgtagaagcgacttctgatgtagctccacaaatcgaacattcagatgcaagaaatactgagttctatggagatgaacatctgggaagtacaaccaatggaaatatggtccacacacctgctactggaaattatgatgattctttagaaacgaggcgagaggtgttgaagcaagaaaactctgagggcgctcaggagcaccagtacacatttacccagtctgagcaagggtatgcgtatgaaaatgctaagcagcagcagatgaattctgcatatgatgcctcacacacaaattcacagaatcagatgcataatcttgattcattatcaaatgtgatggggtattcacactcagttcccaacactttattggcacaaacagcacaaaatgcgagggaacttgacttccagtattcacctttctcagctcaacagtctatgcaatcaagaactagcaacaatgcctcatcacttggtggccaaagcatttcaatgccagaggcgctccgaggcagtggaattccggcaacacagccaacccagcaaacactacctggtgctaatatcgctactggacctgctcttcctcagcagcttccaatgcattactctcaacccacattacctctaacacactatgcaaacatgatcggttatcctctaatgcctcagaattatccatacatgccatctgctttccagcaaacatttgctggtaatagtgcataccaccagcaactagctgcattgcttccgcagtacaaaaccaatgtctctcccggtaatttgcctcagtctgcaacagcgcctgcctctgcttatggatttggaaactcgaccaatgtcggatctgccggaaacttccctcttaaccaacagtctgctactaccggtacaacgcttggttatgacgatgttcttagttctcaatacaaagagaatcatctgttggcacttcagcagcagcagcaacaacagcaacatcaacaacagaacgaaaactcggcgatgtggcatcagggtcatggttccagaaccatgtcaggtgtcccgactaacacgtattacaacctccaagcacaacaacaactgcaactacaacaccagcaacaacaacagcaggctcagcaagcagcgggagggtatcgccaagctcagcaacaacagcattatggatctcatggatacccaaattattatcagtctcagaccgaaatgtcactcgagcgccagcagcaaaaccctagggatggtgctgggtctcaggctggtcaaccgtcgaatcaatctcagcagcagctctggcaaaactcttactaa

SEQ ID NO: 17932 - protein, 858 aa, Arabidopsis thaliana
MSSSKVGGGARKGIQDIPSGSRKIVQSLTEIVNSPEAEIYAMLKECNMDPNETVSRLLSQAVAFNMVPLVIVQLSSWFGFIEKKDVVNDPFHEVKSKKEKKKETRDISDSRPRGANNTYNRGARGGSARYAGRSGSTHFSSTDSGNFQGKSTNKKESGTQGYTSSWSSASGVANTYQTPHSEPVATENKLPPVTLGDGISSSQSASGHQTAWFGAPGQRSMAEVVKMGRPQNKTTKQNVNMGSEINHEHKVSANHQAPVKDEWPSIEKPLAPSTSSLSVAPAESEVRNGPADFQSDRGDQYLKDRLENIHIAESGPSESRKVDHVQADSVQEDESVVSSEIDDNPYQTQSHPVEHHKDEDDVSSGSASFQQLDSHDQEVSHEKDRPAVVIPNHLLIHTEECAQLSFGSFGGFGSRPLSNSVEATSDVAPQIEHSDARNTEFYGDEHLGSTTNGNMVHTPATGNYDDSLETRREVLKQENSEGAQEHQYTFTQSEQGYAYENAKQQQMNSAYDASHTNSQNQMHNLDSLSNVMGYSHSVPNTLLAQTAQNARELDFQYSPFSAQQSMQSRTSNNASSLGGQSISMPEALRGSGIPATQPTQQTLPGANIATGPALPQQLPMHYSQPTLPLTHYANMIGYPLMPQNYPYMPSAFQQTFAGNSAYHQQLAALLPQYKTNVSPGNLPQSATAPASAYGFGNSTNVGSAGNFPLNQQSATTGTTLGYDDVLSSQYKENHLLALQQQQQQQQHQQQNENSAMWHQGHGSRTMSGVPTNTYYNLQAQQQLQLQHQQQQQQAQQAAGGYRQAQQQQHYGSHGYPNYYQSQTEMSLERQQQNPRDGAGSQAGQPSNQSQQQLWQNSY

SEQ ID NO: 17933 - DNA, 2577 bp, Arabidopsis thaliana
  CDS (1)..(2577)
atgagcagcagcaaggtcggcggcggagcaaggaaaggaattcaggatattccgtcagggtctagaaaaatagtacaaagcttgacggaaattgtaaactctcctgaggctgagatctatgctatgcttaaagagtgcaatatggatcctaacgaaaccgttagtcgcctcctctctcaagctgtcgcctttaatatggttccccttgtaattgtccaactttctagctggttcggttttatagagaagaaagatgttgttaatgatccatttcacgaggtaaagagcaagaaagaaaagaagaaagagactagggatatatcagattctcggccgcgtggtgctaataacacctacaaccgtggtgctagaggtggttctgctcgttacgccggacgaagtggatctacccatttcagctctactgattctggaaacttccagggaaaatctacaaataagaaagaaagtggaacgcagggttatacaagttcttggtcttctgcttctggagtggcgaacacctatcaaacaccacacagtgaacccattgctatggaaaacaaattgcctcctgttaccttgggagatggaatatcatcatcaaagtcagcttctggacatcaaactgcatggtttggagctccaggccagaggtctatggctgaagttgtgaagatgggtagaccacagaacaagacaacaaagcaaaatgtcaatgtgggttctgagataaatcatgaacacgaagttaatgcaaatcagcaggcccctgttaaagatgaatggccgtcgattgagaagccgctggctcctagtacatcttctttatcagtagcaccagcagaatcagaagtacgcaatggtctagctgatttccaatccgatagaggagatcaatatctgaaggaccggttagaaaatattcatatagcagaaagtggcccgtctgaaagtcgtggggtcgatcatgtgcaagccgactctgttcaagaagatgaatctgtagtttcgtcagaaattgatgataatccatatcagacacagagccatccagtagagcaccacaaagatgaagatgatgtttcatctggttcagccagttttcaacaactagatagtcatgatcaagaagtctcacatgaagaggatagacctgctgttgtaattccaaaccatttgctaattcacacagaagaatgcgcgcaattaagttttggaagctttggaggttttggatcaaggcctttgagcaacagcgtagaagcgacttctgatgtagctccacaaatcgaacattcagatgcaagaaatactgagttctatggagatgaacatctgggaagtacaaccaatggaaatatggtccacacacctgctactggaaattatgatgattctttagaaacgaggcgagaggtgttgaagcaagaaaactctgagggcgctcaggagcaccagtacacatttacccagtctgagcaagggtatgcgtatgaaaatgctaagcagcagcagatgaattctgcatatgatgcctcacacacaaattcacagaatcagatgcataatcttgattcattatcaaatgtgatggggtattcacactcagttcccaacactttattggcacaaacagcacaaaatgcgagggaacttgacttccagtattcacctttctcagctcaacagtctatgcaatcaagaactagcaacaatgcctcatcacttggtggccaaagcatttcaatgccagaggcgctccgaggcagtggaattccggcaacacagccaacccagcaaacactacctggtgctaatatcgctactggacctgctcttcctcagcagcttccaatgcattactctcaacccacattacctctaacacactatgcaaacatgatcggttatcctctaatgcctcagaattatccatacatgccatctgctttccagcaaacatttgctggtaatagtgcataccaccagcaactagctgcattgcttccgcagtacaaaaccaatgtctctcccggtaatttgcctcagtctgcaacagcgcctgcctctgcttatggatttggaaactcgaccaatgtcggatctgccggaaacttccctcttaaccaacagtctgctactaccggtacaacgcttggttatgaagatgttcttagttctcaatacaaagagaatcatctgttggcacttcagcagcagcagcaacaacagcaacatcaacaacagaacgaaaactcggcgatgtggcatcagggtcatggttccagaaccatgtcaggtgtcccgactaacacgtattacaacctccaagcacaacaacaactgcaactacaacaccagcaacaacaacagcaggctcagcaagcagcgggagggtatcgccaagctcagcaacaacagcattatggatctcatggatacccaaattattatcagtctcagaccgaaatgtcactcgagcgccagcagcaaaaccctagggatggtgctgggtctcaggctggtcaaccgtcgaatcaatctcagcagcagctctggcaaaactcttactaa

SEQ ID NO: 17934 - protein, 858 aa, Arabidopsis thaliana
MSSSKVGGGARKGIQDIPSGSRKIVQSLTEIVNSPEAEIYAMLKECNMDPNETVSRLLSQAVAFNMVPLVIVQLSSWFGFIEKKDVVNDPFHEVKSKKEKKKETRDISDSRPRGANNTYNRGARGGSARYAGRSGSTHFSSTDSGNFQGKSTNKKESGTQGYTSSWSSASGVANTYQTPHSEPIAMENKLPPVTLGDGISSSKSASGHQTAWFGAPGQRSMAEVVKMGRPQNKTTKQNVNVGSEINHEHEVNANQQAPVKDEWPSIEKPLAPSTSSLSVAPAESEVRNGLADFQSDRGDQYLKDRLENIHIAESGPSESRGVDHVQADSVQEDESVVSSEIDDNPYQTQSHPVEHHKDEDDVSSGSASFQQLDSHDQEVSHEEDRPAVVIPNHLLIHTEECAQLSFGSFGGFGSRPLSNSVEATSDVAPQIEHSDARNTEFYGDEHLGSTTNGNMVHTPATGNYDDSLETRREVLKQENSEGAQEHQYTFTQSEQGYAYENAKQQQMNSAYDASHTNSQNQMHNLDSLSNVMGYSHSVPNTLLAQTAQNARELDFQYSPFSAQQSMQSRTSNNASSLGGQSISMPEALRGSGIPATQPTQQTLPGANIATGPALPQQLPMHYSQPTLPLTHYANMIGYPLMPQNYPYMPSAFQQTFAGNSAYHQQLAALLPQYKTNVSPGNLPQSATAPASAYGFGNSTNVGSAGNFPLNQQSATTGTTLGYEDVLSSQYKENHLLALQQQQQQQQHQQQNENSAMWHQGHGSRTMSGVPTNTYYNLQAQQQLQLQHQQQQQQAQQAAGGYRQAQQQQHYGSHGYPNYYQSQTEMSLERQQQNPRDGAGSQAGQPSNQSQQQLWQNSY

SEQ ID NO: 17935 - DNA, 2652 bp, Oryza sativa
  CDS (1)..(2652)
atgagcggcggcggcggaggaggaggaggagggggagggggagggaggggggcggcggcggggccagtgccggggtccgcgaggaagctggtgcaggggctgaaggagatcgtgaaccggcccgacgcggagatctacgcggcgctgcgggactgcggcatggaccccgacgaggcggtcagccgcctcctctcccaagatacgtttcaagaggtaaagagcaagcgcgacaagaaaaaggaggttaataaggaggcgcttgagccaaaatctagaggagcagttaactccaatagtcgagccactagagctggtgcagaccgtagtggacgaagcagttcagttcagtctggatcaagtggtgctgataacatgtcctcaaggtcatcaatattgggacctggcgtgctagcaactaattctacacagaagcaaactgttccaagttctactgtaaacaaggatgttcttcacgatggatcttttggagcaatgcaaccatcgtcgggatttcagaacagttggtgtggggtgccaggtcagatgtcaatggctgatattgtgaaaatgggcagacctcaagtgaggtcttctagcaagcctgtggcttcaacagacaacgcctattctggccaaacctcatctttctcaagtgtggtaaaccagaacccaaacaaatctgcaagcactgccccaccaacaacatttgagcaaagatttcctgttcttcaagatcctattcctcaagttaagaattccagtcatgcttctgctgataaccatgagacacaagagagtgattggtttcaacaggatgggacactaccagggagtcaattaacagtccctgagacatcccgtgacatatctttacctgtggcatctttggaatcatcaacgttggttgctgacgatgcgaactcgtataataattctcatgtaggagagagcagctcagctataccttctgatagacacctggaaattattgatggcaacaaccattttaataatggtttattgcacaactcaagtgcataccagtctcgagggaatcactatgatgataacgatgatgatgatgatgaagctgaagtttctaatgttgatgtggaatctgcttcggcaaacattcagcacctaagcctacagactgaagatctagttgcaagtaaatctaccgaagataatccagcggttataatccctgatcatctacaacttgcaaatgcagactgtgggcatctgagctttggtagttttggatctggtgccttctctgggttgcttccatcaaaggtccacaaaaatggagtggaggaagtgcctgttccagatgaatctccatcagttgatcaagaagatgtcaggaatcaagacaacaatgttgctctaaattcttcaacaaatggggacgttgaagccagaattggcactagcatggagaatactgatgaaccttcagtttcacagcctgatattctgacgcagggtgctgtagatgtgtcaagtctacaatacaatctgccatcagtttcagatcatgtatattcaaacacaacacaaccaagtacgatggagagctcacagggagacatacaagtgcaacatcttcctcagttttcaagtttactgcaagcaaatactctacacaacaacttgctgggatcaaatcttcccaaccttcgggactttgacttttcaccattgctatcaacacaattagctacaaaatataacccaccagtaccgactaccagcttaccagcaatctccatgcaggagacattgaagccagggggattctcgaatgcacaacctacacaaaatcttcccagcgcgagcattccgtctgggcctcctctcccacaacaattatctgtacatccgtaccctcagccaactctgccccttggacctttttccaatctggttggctatccatatttgcctcaaaactactatctaccatcagcagcctttcagcaatctttctcaagtaatggacctttccatcaatctgctgctaccactggggtgcctggtgtcagtatgaaatattcgatgccacaatacaagggcagccttcctgctacaagcccaccacagccttcatcagtggtctccggatttggaggttttggtagctcaaataatattcctggaaatttcggcttaaatcagaatgtcccctctgcacccacaactatggggtttgaagaagctttaagcacacagttcaaagataacagtcaatacattgccttgcagcaggtaagtttcacatgctttgcctatgttctggcgccatttgtgtttttgtcctgtctgaggatattatactacaaatacacttgcacttgcactttaactgtccatttggatttccatttcatttttttggtgacttcattcgtgatgcctttcagaacgacaactctgcaatgtggcttcatggagctgctggttcaagggccgtttcagcggtaccacctggcaacttctatggtttccagggccagaatcagccaggtggcttccgccaggggcagcagccctctcaatacggtggccttgggtacccaagcttctaccagtcacaggctggtttaccgcaggagcacccgcagaaccttactgagggaaccttga

SEQ ID NO: 17936 - protein, 883 aa, Oryza sativa
MSGGGGGGGGGGGGGRGAAAGPVPGSARKLVQGLKEIVNRPDAEIYAALRDCGMDPDEAVSRLLSQDTFQEVKSKRDKKKEVNKEALEPKSRGAVNSNSRATRAGADRSGRSSSVQSGSSGADNMSSRSSILGPGVLATNSTQKQTVPSSTVNKDVLHDGSFGAMQPSSGFQNSWCGVPGQMSMADIVKMGRPQVRSSSKPVASTDNAYSGQTSSFSSVVNQNPNKSASTAPPTTFEQRFPVLQDPIPQVKNSSHASADNHETQESDWFQQDGTLPGSQLTVPETSRDISLPVASLESSTLVADDANSYNNSHVGESSSAIPSDRHLEIIDGNNHFNNGLLHNSSAYQSRGNHYDDNDDDDDEAEVSNVDVESASANIQHLSLQTEDLVASKSTEDNPAVIIPDHLQLANADCGHLSFGSFGSGAFSGLLPSKVHKNGVEEVPVPDESPSVDQEDVRNQDNNVALNSSTNGDVEARIGTSMENTDEPSVSQPDILTQGAVDVSSLQYNLPSVSDHVYSNTTQPSTMESSQGDIQVQHLPQFSSLLQANTLHNNLLGSNLPNLRDFDFSPLLSTQLATKYNPPVPTTSLPAISMQETLKPGGFSNAQPTQNLPSASIPSGPPLPQQLSVHPYPQPTLPLGPFSNLVGYPYLPQNYYLPSAAFQQSFSSNGPFHQSAATTGVPGVSMKYSMPQYKGSLPATSPPQPSSVVSGFGGFGSSNNIPGNFGLNQNVPSAPTTMGFEEALSTQFKDNSQYIALQQVSFTCFAYVLAPFVFLSCLRILYYKYTCTCTLTVHLDFHFIFLVTSFVMPFRTTTLQCGFMELLVQGPFQRYHLATSMVSRARISQVASARGSSPLNTVALGTQASTSHRLVYRRSTRRTLLREP

SEQ ID NO: 17937 - DNA, 2388 bp, Oryza sativa
  CDS (1)..(2388)
atggaccccgacgtcgccgtcgagcgcctcatctcgcaagatccttttcatgaagtgagaagaaagcgtgacaagaaaaaggagatcaaagcacctcaggaaaccaggcctcggccattttataaacctgcatttcgaggatctaagactggaggagattcaactggcagtggtaaaggccctaccaagaaagaaacggagttacattctcttcctaaatcatcagtctctgattctgtgaaggaaagcaatccaactgagaagatttcagcagccgaccatgctactatcaatgacagtcttattttatcaagtggccaagctgatgcaaagtccactcctctccagcccccttctcaagtgaagcatggttggggtgggatgccagggcgcccttccatggctgatattgtcaagatgggcaaaccccaagctaaacctgtgagatctgttgcatgtaataccgggatgccaaccattggtggttcagtcatttccaatgcaacaaatcatacttcaaaagattcacaagacctagttttgccttcacaagtgaactctgttgcaactgatagaataccaaatggtaccaatgaggtctcccctgcatctaatgactcctctattgatgtattacctcccagagaggggttggaggtgccagaatctgtcgccacagttaaacctggatcgtcaactgcagatgtttacaaagatgaagttgaagaagacatggattctgataaaaataaggatatgagtgcaagcaatgcagacgatcgaacatcttcaggaccatatcctgcatctagcaaagaagtacactcagaacatactcaaattgccacccatcacaatgacttgatagtggaaacagaggactctcagtctgatggcaatgcatttgagaataaccgtgttgcagattcagagggaaatatgtctgctactgacaaacagtttgaacagttgattctacatgaggaaaaaaaatcaaaatcatctgaagataacccggctgtaataattcctgatcatcttcaggtttcaaatgctgattgtgcacacttgacatttggtagttttgtgtctggaacacttgatgcgccagtctccttgaaaactgccaatggtgatgaggaggttgcagcagtttctgataaccattcgattgatcagtcagatgtcagaatccatgagtacgaaaataaggatacagtagcacctgcagctgacgaacatgttgcctcttcaacaaaaagtgacacggagaatgttgatgttgcacctgtacaacagcctgaattgagaacagccgatttaatagatgttccaaacaacaccatgtacaataatttatcaacctccgattatgcaactccaagtgcagtgcaaccagattcttccgcacacatttatctgcaagaacatcgacaattgcaaaacatttcccctctctctagctttatgcaaggaaatatcccgaatggactattgccaccagcacttccacctttgcgtgactttgatcctgctttctcattattacttactaacccaccattggctacgatggttcatggcacaacatcatcgtccatgggcaatgcaactactgtttctacacaaccacaagagattgtgaatccaggtgcttcatccaaccctcaattgaatcaatctcagccaagcaccagcaccagcattgcttctggtcctccactccctcagcatctcacgcttcacccttatgctcaagcaactcttcctcttgggtatgcaagcatgattggctacccatctctagccccaagttatacatatctcccgcctcctgcctttcagcaaccatacatgaacagtggcctattccaccaagcagcagctgcagttcccaattccagtgtaaaatatcctttgccacagtacaaaggcaatgtttcccttgcgagcttaccccagcaagcctcactgctctcaagctatgttgggggctttggagctgcaagcagcatgccaggaaattttgccctgaaccaaagcacaccatcagcaaccgctgctcctgggtttgatggaacagtgcccgcgcaatacaaagaagggaatcaatttgtatctcttcagcagagcgagaacgctgcgatgtggatgcatggtgccagttcgcgaacaatgccacctcttgcagcaaatgccttgtattatcaagggcagcagggtcaccagggcggccttcggcaggggcagctgccttcacagtttggtgctccacttgcaccgacacagcccggcctgggccatgagcaccggaaccctagtgacggcaacttaagctctgctgccgctgccgctcaggctaaccaaatgtggccaaatagttactga

SEQ ID NO: 17938 - protein, 795 aa, Oryza sativa
MDPDVAVERLISQDPFHEVRRKRDKKKEIKAPQETRPRPFYKPAFRGSKTGGDSTGSGKGPTKKETELHSLPKSSVSDSVKESNPTEKISAADHATINDSLILSSGQADAKSTPLQPPSQVKHGWGGMPGRPSMADIVKMGKPQAKPVRSVACNTGMPTIGGSVISNATNHTSKDSQDLVLPSQVNSVATDRIPNGTNEVSPASNDSSIDVLPPREGLEVPESVATVKPGSSTADVYKDEVEEDMDSDKNKDMSASNADDRTSSGPYPASSKEVHSEHTQIATHHNDLIVETEDSQSDGNAFENNRVADSEGNMSATDKQFEQLILHEEKKSKSSEDNPAVIIPDHLQVSNADCAHLTFGSFVSGTLDAPVSLKTANGDEEVAAVSDNHSIDQSDVRIHEYENKDTVAPAADEHVASSTKSDTENVDVAPVQQPELRTADLIDVPNNTMYNNLSTSDYATPSAVQPDSSAHIYLQEHRQLQNISPLSSFMQGNIPNGLLPPALPPLRDFDPAFSLLLTNPPLATMVHGTTSSSMGNATTVSTQPQEIVNPGASSNPQLNQSQPSTSTSIASGPPLPQHLTLHPYAQATLPLGYASMIGYPSLAPSYTYLPPPAFQQPYMNSGLFHQAAAAVPNSSVKYPLPQYKGNVSLASLPQQASLLSSYVGGFGAASSMPGNFALNQSTPSATAAPGFDGTVPAQYKEGNQFVSLQQSENAAMWMHGASSRTMPPLAANALYYQGQQGHQGGLRQGQLPSQFGAPLAPTQPGLGHEHRNPSDGNLSSAAAAAQANQMWPNSY

SEQ ID NO: 17939 - DNA, 2511 bp, Glycine max
  CDS (1)..(2511)
atgagcggcaaaggcggtggaagccagaaggcagggattcctccggcgagtcggaagatggttcagagcctgagggagatagtgagcaacatccccgaacacgagatctacgccactcttaaagactgtaacatggaccctaacgaagccgttagtcgcctcctctcccaagatccttttcacgaggtgaaaagcaaacgtgagaagaaaaaagagggtaaggacacaacggataccaggtctcgtggaataagcaatgcatctagtcgtggtggcggcggtgctagggttggctctgaccgttatgttgggcgtggagattctggtctcctgcagggaaaacctgtattcaaaaaggaaaacggaacacctgcttatggaggttatactgctcctgcatctagctcattggacaataatgtgaacaggcaactaccatcctacagtgattctgtccgtgtctgtgatggactatcttcatcacaacatggtggattgcaatctccatgggcggcgaacccaggtcaagtatcaatggctgacattgtcaggatgggtaggccacaggccaaggcatccatgcctaactcttctctccacagtggtagccatcagaatgattttgcactcccatcagcttcacaaaacaatttgcattcagtgcaagttcatgcttccaagttgtcagagacaaataatgaccatggctttgctattgactccaatgttgaacagactgatgaatggccatcgattgagcatcaaccagctgtttctgtatccttggttgtagatggtcatccaacgtctgagtaccatacaaactcgtctaactctggtgaagctaatcagcagctgaagacccatgtaaatgaatttgtagctgaagatgatcctgttgagaatcccgacattgttggatctgctaaaagtatatctgaagagaatcccgaaagtacatctgtttttgatggtagcttgtacaaggacataaattcttaccaacctcatcggcatccttttgaaaataatgaagctgaagatggtgtttcatcagtagccacaaacttagagcagctaaatttacactcaaatgatcaggggacagaaccagaggaggaaaattcttctgtagtaattccaaatcatttacaactccattccgccgaatgcttaaatctgagctttggaagttttggatctgcaaatgatgcttccctttctggatctggtccgtatgcatctaggcccttgaaaagtaacttggaggatacatctggagctaacgatgtttcaacaattgggtcctcagatgttagaaatcctgactattatgccgatgagcatcttactactacctcggatgggaatttagctcacataactggtgtggatgctgggacttatgagcattcctccatttcacaatcagaggctttaaaatctgaaccccctgaaactgctcaagaaaatcaatattcatttccttcttcttcacacgagtttacctacgaaaatgcccaacaaccagatgttacataccctcattcgcagacaagctcacagatacagaacctgtctcccttctctagtgtaatggcttatacgaattctttgcccagtgcactgttggcttcaacagttcaaacagcaagggaggatatcccatactcacccttccctgcaacacaatcaatgccttcaaaatatagcaacattgcttcttcaattggtggtccctctataaccatgtcagaggctctaagggcaaataacatttcaacacctcaacctaatccacaagctctgcctggtgccaatgttgccactggacctgcacttcctcaacaccttgctgtgcatccctattcacagcctactcttcctctgggacattttgctaatatgattggctatcaattcttgcctcagagctatacctacatgccatcagcatttcagcaggcttttcctggaaatagcacataccaccaatctctggcagccatgcttccacaatataaaaatagcatttctgtcagtagcttacctcagtctgctgctgttgcatctggatatggttttggaagttccacgagcattcccggaggaaattacccattgaatccacctgctgcgcctactagtacaaccattggatatgatgatgttataaactctcagtacaaggacaacaatcatatgatttcactacagcagaatgagaattctcccatgtgggttcatggacctagctctcgaacaatgtctgccgttcctgccaacacgtattacagcttccagggacagaatcaacaaccaggtgggtttcggcaaaaccagcagccctcacaacaacattttggatcccttggataccctaacttctaccattctcagactgggatttctctggaacatcagcagcagaatccaagggaagcatcccttgctggctctcaaacccaaccacctaagcagtccccacaaatatggcaaaacagctactaa

SEQ ID NO: 17940 - protein, 836 aa, Glycine max
MSGKGGGSQKAGIPPASRKMVQSLREIVSNIPEHEIYATLKDCNMDPNEAVSRLLSQDPFHEVKSKREKKKEGKDTTDTRSRGISNASSRGGGGARVGSDRYVGRGDSGLLQGKPVFKKENGTPAYGGYTAPASSSLDNNVNRQLPSYSDSVRVCDGLSSSQHGGLQSPWAANPGQVSMADIVRMGRPQAKASMPNSSLHSGSHQNDFALPSASQNNLHSVQVHASKLSETNNDHGFAIDSNVEQTDEWPSIEHQPAVSVSLVVDGHPTSEYHTNSSNSGEANQQLKTHVNEFVAEDDPVENPDIVGSAKSISEENPESTSVFDGSLYKDINSYQPHRHPFENNEAEDGVSSVATNLEQLNLHSNDQGTEPEEENSSVVIPNHLQLHSAECLNLSFGSFGSANDASLSGSGPYASRPLKSNLEDTSGANDVSTIGSSDVRNPDYYADEHLTTTSDGNLAHITGVDAGTYEHSSISQSEALKSEPPETAQENQYSFPSSSHEFTYENAQQPDVTYPHSQTSSQIQNLSPFSSVMAYTNSLPSALLASTVQTAREDIPYSPFPATQSMPSKYSNIASSIGGPSITMSEALRANNISTPQPNPQALPGANVATGPALPQHLAVHPYSQPTLPLGHFANMIGYQFLPQSYTYMPSAFQQAFPGNSTYHQSLAAMLPQYKNSISVSSLPQSAAVASGYGFGSSTSIPGGNYPLNPPAAPTSTTIGYDDVINSQYKDNNHMISLQQNENSPMWVHGPSSRTMSAVPANTYYSFQGQNQQPGGFRQNQQPSQQHFGSLGYPNFYHSQTGISLEHQQQNPREASLAGSQTQPPKQSPQIWQNSY

SEQ ID NO: 17941 - DNA, 2505 bp, Glycine max
  CDS (1)..(2505)
atgagcggcaaaggcggtggaagccagaaggcagggattcctccggcgagtcggaagatggttcagagcctgagggagatagtgagcaacatccccgaacacgagatctacgccactcttaaagactgtaacatggaccctaacgaagccgttagtcgcctcctctcccaagatccttttcacgaggtgaaaagcaaacgtgagaagaaaaaagagggtaaggacacaacggataccaggtctcgtggaataagcaatgcatctagtcgtggtggcggcggtgctagggttggctctgaccgttatgttgggcgtggagattctggtctcctgcagggaaaacctgtattcaaaaaggaaaacggaacacctgcttatggaggttatactgctcctgcatctagctcattggacaataatgtgaacaggcaactaccatcctacagtgattctgtccgtgtctgtgatggactatcttcatcacaacatggtggattgcaatctccatgggcggcgaacccaggtcaagtatcaatggctgacattgtcaggatgggtaggccacaggccaaggcatccatgcctaactcttctctccacagtggtagccatcagaatgattttgcactcccatcagcttcacaaaacaatttgcattcagtgcaagttcatgcttccaaggtgtcagaaacaaataatgaccatggctttgctattaactccaatgttgaacagaatgatgaatggccatcgattgagcatcaaccagctgtttctgtatccttggttgtagatggtcatccaacgtctgagtaccatacaaactcatctaactctggtgaagctaatcagcagctgaagacccatgtaaatgaatttgtagctgaagatgatcctgttgagaatcccgacaatgttggatctgcttctatatctgaagagaatcccgaaagtacatctgtttttgatggtagcacgtacaaggacataaattcttaccaatctcatcggcatccttttgaaaataatgaagctgaagatggtgtttcatcagtagccacaaacttagagcagctaaatttacactcaaatgatcaggggacagaaccagaggaggaaaattcttctgtagtaattccaaatcatttacaactccattccgccgaatgcttaaatctgagctttggaagttttggatctgcaaatgatgcttccctttctggatctggtccgtatgcatctaggcccttgaaaagtaacttggaggatacatctggagctaacgatgtttcaacaattgggtcctcagatgttagaaatcctgactattatgccgatgagcatcttactactacctcggatgggaatttagctcacataactggtgtggatgctgggacttatgagcattcctccatttcacaatcagaggctttaaaatctgaaccccctgaaactgctcaagaaaatcaatattcatttccttcttcacacgagtttacttacgaaaatgcccaacagccagatgttacataccctcattcacagacaagctcacagatacagaacctgtctcccttctctagtgtaatggcttatacaaattctttgcccagtgcactgttggcttcaactgttcaaacagcaagggaggatatcccatactcacccttccctgcaacacaatcaatgcctgcaaaatatagcaatattgcttcttcaattggtggtcccactataaacatgtcagaggctctaagggcaaataacatttcaacacctcaacctaatccacaagccctgcctggtgccaatgttgccactggacctgcacttcctcaacaccttgctgtgcatccctattcccagcctactcttcctctgggacattttgctaatatgattagctatcaattcttgcctcagagctatacctacatgccatcagcatttcagcaggcttttcctggaaatagcacataccaccaatctctggcagccatgcttccacaatataaaaatagcatttctgtcagtagcttacctcagtctgctgctgttgcatctggatatggttttggaagttccacgagcattcccggaggaaattacccattgaatccacctgctgcgcctactagtacaaccattggatatgatgatgttataaactctcagtacaaggacaacaatcatatgatttcactacagcagaatgagaattctcccatgtgggttcatggacctagctctcgaacaatgtctgccgttcctgccaacacgtattacagcttccagggacagaatcaacaaccaggtgggtttcggcaaaaccagcagccctcacaacaacattttggatcccttggataccctaacttctaccattctcagactgggatttctctggaacatcagcagcagaatccaagggaagcatcccttgctggctctcaaacccaaccacctaagcagtccccacaaatatggcaaaacagctactaa

SEQ ID NO: 17942 - protein, 834 aa, Glycine max
MSGKGGGSQKAGIPPASRKMVQSLREIVSNIPEHEIYATLKDCNMDPNEAVSRLLSQDPFHEVKSKREKKKEGKDTTDTRSRGISNASSRGGGGARVGSDRYVGRGDSGLLQGKPVFKKENGTPAYGGYTAPASSSLDNNVNRQLPSYSDSVRVCDGLSSSQHGGLQSPWAANPGQVSMADIVRMGRPQAKASMPNSSLHSGSHQNDFALPSASQNNLHSVQVHASKVSETNNDHGFAINSNVEQNDEWPSIEHQPAVSVSLVVDGHPTSEYHTNSSNSGEANQQLKTHVNEFVAEDDPVENPDNVGSASISEENPESTSVFDGSTYKDINSYQSHRHPFENNEAEDGVSSVATNLEQLNLHSNDQGTEPEEENSSVVIPNHLQLHSAECLNLSFGSFGSANDASLSGSGPYASRPLKSNLEDTSGANDVSTIGSSDVRNPDYYADEHLTTTSDGNLAHITGVDAGTYEHSSISQSEALKSEPPETAQENQYSFPSSHEFTYENAQQPDVTYPHSQTSSQIQNLSPFSSVMAYTNSLPSALLASTVQTAREDIPYSPFPATQSMPAKYSNIASSIGGPTINMSEALRANNISTPQPNPQALPGANVATGPALPQHLAVHPYSQPTLPLGHFANMISYQFLPQSYTYMPSAFQQAFPGNSTYHQSLAAMLPQYKNSISVSSLPQSAAVASGYGFGSSTSIPGGNYPLNPPAAPTSTTIGYDDVINSQYKDNNHMISLQQNENSPMWVHGPSSRTMSAVPANTYYSFQGQNQQPGGFRQNQQPSQQHFGSLGYPNFYHSQTGISLEHQQQNPREASLAGSQTQPPKQSPQIWQNSY

SEQ ID NO: 17943 - DNA, 2505 bp, Glycine max
  CDS (1)..(2505)
atgagcggcaaaggcggtggaagccagaaggcagggattcctccggcgagtcggaagatggttcagagcctgagggagatagtgagcaacatccccgaacacgagatctacgccactcttaaagactgtaacatggaccctaacgaagccgttagtcgcctcctctcccaagatccttttcacgaggtgaaaagcaaacgtgagaagaaaaaagagggtaaggacacaacggataccaggtctcgtggaataagcaatgcatctagtcgtggtggcggcggtgctagggttggctctgaccgttatgttgggcgtggagattctggtctcctgcagggaaaacctgtattcaaaaaggaaaacggaacacctgcttatggaggttatactgctcctgcatctagctcattggacaataatgtgaacaggcaactaccatcctacagtgattctgtccgtgtctgtgatggactatcttcatcacaacatggtggattgcaatctccatgggcggcgaacccaggtcaagtatcaatggctgacattgtcaggatgggtaggccacaggccaaggcatccatgcctaactcttctctccacagtggtagccatcagaatgattttgcactcccatcagcttcacataacaatttgcattcattgcaagttcatgcttccaaggtgtcagaaacaaataatgaccgtggctttgctattaactccaatgttgaacagaatgatgaatggccatcgattgagcatcaaccagctgtttctgtatccttggttgtagatggtcatccaacgtctgagtaccatacaaactcatctaactctggtgaagctaatcagcagctgaagacccatgtaaatgaatttgtagctgaagatgatcctgttgagaatcccgacaatgttggatctgcttctatatctgaagagaatcccgaaagtacatctgtttttgatggtagcacgtacaaggacataaattcttaccaatctcatcggcatccttttgaaaataatgaagctgaagatggtgtttcatcagtagccacaaacttagagcagctaaatttacactcaaatgatcaggggacagaaccagaggaggaaaattcttctgtagtaattccaaatcatttacaactccattccgccgaatgcttaaatctgagctttggaagttttggatctgcaaatgatgcttccctttctggatctggtccgtatgcatctaggcccttgaaaagtaacttggaggatacatctggagctaacgatgtttcaacaattgggtcctcagatgttagaaatcctgactattatgccgatgagcatcttactactacctcggatgggaatttagctcacataactggtgtggatgctgggacttatgagcattcctccatttcacaatcagaggctttaaaatctgaaccccctgaaactgctcaagaaaatcaatattcatttccttcttcacacgagtttacttacgaaaatgcccaacagccagatgttacataccctcattcacagacaagctcacagatacagaacctgtctcccttctctagtgtaatggcttatacaaattctttgcccagtgcactgttggcttcaactgttcaaacagcaagggaggatatcccatactcacccttccctgcaacacaatcaatgccttcaaaatatagcaatattgcttcttcaattggtggtcccactataaacatgtcagaggctctaagggcaaataacatttcaacacctcaacctaatccacaagctctgcctggtgccaatgttgccactggacctgcacttcctcaacaccttgctgtgcatccctattcacagcctactcttcctctgggacattttgctaatatgattggctatcaattcttgcctcagagctatacctacatgccatcagcatttcagcaggcttttcctggaaatagcacataccaccaatctctggcagccatgcttccacaatataaaaatagcatttctgtcagtagcttacctcagtctgctgctgttgcatctggatatggttttggaagttccacgagcattcccggaggaaattacccattgaatccacctgctgcgcctactagtacaaccattggatatgatgatgttataaactctcagtacaaggacaacaatcatatgatttcactacagcagaatgagaattctcccatgtgggttcatggacctagctctcgaacaatgtctgccgttcctgccaacacgtattacagcttccagggacagaatcaacaaccaggtgggtttcggcaaaaccagcagccctcacaacaacattttggatcccttggataccctaacttctaccattctcagactgggatttctctggaacatcagcagcagaatccaagggaagcatcccttgctggctctcaaacccaaccacctaagcagtccccacaaatatggcaaaacagctactaa

SEQ ID NO: 17944 - protein, 834 aa, Glycine max
MSGKGGGSQKAGIPPASRKMVQSLREIVSNIPEHEIYATLKDCNMDPNEAVSRLLSQDPFHEVKSKREKKKEGKDTTDTRSRGISNASSRGGGGARVGSDRYVGRGDSGLLQGKPVFKKENGTPAYGGYTAPASSSLDNNVNRQLPSYSDSVRVCDGLSSSQHGGLQSPWAANPGQVSMADIVRMGRPQAKASMPNSSLHSGSHQNDFALPSASHNNLHSLQVHASKVSETNNDRGFAINSNVEQNDEWPSIEHQPAVSVSLVVDGHPTSEYHTNSSNSGEANQQLKTHVNEFVAEDDPVENPDNVGSASISEENPESTSVFDGSTYKDINSYQSHRHPFENNEAEDGVSSVATNLEQLNLHSNDQGTEPEEENSSVVIPNHLQLHSAECLNLSFGSFGSANDASLSGSGPYASRPLKSNLEDTSGANDVSTIGSSDVRNPDYYADEHLTTTSDGNLAHITGVDAGTYEHSSISQSEALKSEPPETAQENQYSFPSSHEFTYENAQQPDVTYPHSQTSSQIQNLSPFSSVMAYTNSLPSALLASTVQTAREDIPYSPFPATQSMPSKYSNIASSIGGPTINMSEALRANNISTPQPNPQALPGANVATGPALPQHLAVHPYSQPTLPLGHFANMIGYQFLPQSYTYMPSAFQQAFPGNSTYHQSLAAMLPQYKNSISVSSLPQSAAVASGYGFGSSTSIPGGNYPLNPPAAPTSTTIGYDDVINSQYKDNNHMISLQQNENSPMWVHGPSSRTMSAVPANTYYSFQGQNQQPGGFRQNQQPSQQHFGSLGYPNFYHSQTGISLEHQQQNPREASLAGSQTQPPKQSPQIWQNSY

SEQ ID NO: 17945 - DNA, 2484 bp, Zea mays
  CDS (1)..(2484)
atgaggggcggtggccgtggcggcggcgggagacagccttcctacgcggcgccggatggggcggatgcggcggcgatcccggtcgcctcaaggaagatggtgcagagcctcaaggggatcctggccgaccgctcggagggcgagatctacgccacgctctgcgactgcggaatggtccccgacatagccgtcgagaggctcatctcccaggatacttttcatgaagtcagaagaaagcgggataggaaaaaggagactaaagttaatcacgaaacaaggcctcgacctttccagaaatatacataccgaggatataaggctgtttcagatcgaagtgggcgagaccctacaggcggtttcaaaggccctgtaaaaaaggaaccagagttgcaagctccactaaactcatcagccttggatgtcaagacaagtgacactacagaaatattttctgctactatcaatgttgcccagactgatgctaagaacaccacttctcagcctttatctaaagtgcagcatggttggggtggtattccaggtcgcccttccatggctgaaatagtgaagatgggcaggcctcaagctaaagttgggagcagatctgttgcaagtagcactgcgttgccaaccgttggtgattcagtcatttccaatacaccaaatcttgtgcccgaggaatataacagaactgtttttgcatcagaagcaggccatgtcgcagcagataaattgccaaacggtgctgttgaggtgcactctctacctaaagatgcttccgcatttgatatgttaccttcagctgagggaacagatgttgaagccccttccatgagtgctaatgcacaaggttcatcaacgccagatgccaatgaagatgacattgaaaaatatgcaaatttggaagagggcaatacagaaagcttgatatctcctggacaagtttctgcttctggtaaagatatacaatcagaatatactgaagttgtcagccatgtggatgaaggctcgatagagaaaacaaatgactttcagctcaatggccttccatttgagcacaaccaaaatctgaatggagacgtgtctacagcgacaacacaatttgatcatttgactctgcatgagggaccaaaattgtccgatgataatccggctgtaataattcctgatcatcttcaggtttcgaatgctgattgtgcgcatttgacgtttggtagttttgtgtctggaacacttgattcatccttgacaacaaaacctcttgaaagtcatggggatgctgcgacagttcctgatgatgattcaattgaccaatcagatggcaggatccatgacgatgaaggcaaggtgacattagctactgatgttaatgaatatgttacttctgcggcaaacagcaacgaggagaatcttgatattacatcagtacagcaatctgaagtcactagagctgatttcttggatgtcacaagcaatactgaatacaacctaacatcaactccagattatgcaacttcaagtgcaccgttgcaggattctgcttcacagagtttacaggaaaaccgacaattccagaacatctctcctttctcaagcttcatgcaaatgcaaaatggtctcctgccaccagcaattccaccattgcgtgaatttgatccagcattttcactattgctcacccatcctcctatgatgcatggtacaatgtcatcatccatgagcaatacaactgtttctacgcagccccaagagaatgccaatccagttggtttacccaaccctcaattgactcaatctcagcaaagcaccagcattgcttcagggcctccactccctcagcatcttcttcatccctatgctcaaccaacccttcctcttggatacgcaagcatgattggctatccatctcttccaccaagctatgcatatctcccgcctgccgcttttcagcaaccatacatgaacagtggcttgttccaccaggcagcagcggcagttcccacctcaagtgtgaaataccctctaccgcagtacaaaagcaacattgcccttgctagcttaccacagccaggctctttgctctcaagctacgttgggggctttggaactgcaagcaacatgcctggaaatttccctctgaatcaaagcacagcagcagcaacaacaactcttgggtttgatgggacggtcccttcacatttcaaagatggaaatcaatttatttctcttcagcagaatgagaaccctgcaatgtggatgcatggtgctagttcacgagggatgcccccacttgcagccagtaccatgtatggctatcaagggcagagtcatcaggccggccttcggcagggccaactaccttcacaatttggctctgcgcttgggcagtcacagccaggcctgggccctgaacaccgaaaccctagcgatagtaacctaagtggcgctgctcaggctaaccaaatgtggccaaatacctactga

SEQ ID NO: 17946 - protein, 827 aa, Zea mays
MRGGGRGGGGRQPSYAAPDGADAAAIPVASRKMVQSLKGILADRSEGEIYATLCDCGMVPDIAVERLISQDTFHEVRRKRDRKKETKVNHETRPRPFQKYTYRGYKAVSDRSGRDPTGGFKGPVKKEPELQAPLNSSALDVKTSDTTEIFSATINVAQTDAKNTTSQPLSKVQHGWGGIPGRPSMAEIVKMGRPQAKVGSRSVASSTALPTVGDSVISNTPNLVPEEYNRTVFASEAGHVAADKLPNGAVEVHSLPKDASAFDMLPSAEGTDVEAPSMSANAQGSSTPDANEDDIEKYANLEEGNTESLISPGQVSASGKDIQSEYTEVVSHVDEGSIEKTNDFQLNGLPFEHNQNLNGDVSTATTQFDHLTLHEGPKLSDDNPAVIIPDHLQVSNADCAHLTFGSFVSGTLDSSLTTKPLESHGDAATVPDDDSIDQSDGRIHDDEGKVTLATDVNEYVTSAANSNEENLDITSVQQSEVTRADFLDVTSNTEYNLTSTPDYATSSAPLQDSASQSLQENRQFQNISPFSSFMQMQNGLLPPAIPPLREFDPAFSLLLTHPPMMHGTMSSSMSNTTVSTQPQENANPVGLPNPQLTQSQQSTSIASGPPLPQHLLHPYAQPTLPLGYASMIGYPSLPPSYAYLPPAAFQQPYMNSGLFHQAAAAVPTSSVKYPLPQYKSNIALASLPQPGSLLSSYVGGFGTASNMPGNFPLNQSTAAATTTLGFDGTVPSHFKDGNQFISLQQNENPAMWMHGASSRGMPPLAASTMYGYQGQSHQAGLRQGQLPSQFGSALGQSQPGLGPEHRNPSDSNLSGAAQANQMWPNTY

SEQ ID NO: 17947 - DNA, 2571 bp, Zea mays
  CDS (1)..(2571)
atgagcggcggcggtgccggagggaagggggcggcggcgcccgtcccggccgggtcgaggaaactggtgcagggtctcaaggagatcgtgaaccgacccgaggcggagatctacgccgcactgcgcgagtgcggcatggaccccgacgagacggtcagccgcctcctctcccaagatactttccaagaggtaaagagcaagcgcgacaagaagaaagagattaaagaagttcctgagacaagatatcgatcggcaaatagttctactaatcgaagccttagaagtggtgcagatcgtggtggacgtagcaattctgtgcactccagctctactgataacatgacctcaaggccaccagtctcagggtcttgtacggcatcagttaattccaatcaaatgcagacaattgcaagttcctctgcaaacaaacatatggttactgatggactagctgtatcattgcaatcatcgtctgggtttcagcatggtggttggtctgggacacctggtcagttgtcgatggttgacattgtgaaaatgggtcgccctcagggaaaggcttctagcaaacctgtggtcacagctgacagaggttatgctggacagtacccatctttgccaagcacaaaccagaacctcaaacaatctggaagcatggtttccccagcagagcttgacaaggggttacaacctgcccacaatttggttcaggttaagaatcatggtcattttactgctgatagcaagctcccatatggtactgattggtctccacaagacgacccaacatctgagaaccaatcttcccagcctgagacgtctggtgatccatctttgtatgaatcatcatttcagtcatctacattggttactgatgtagttaattcacatgaaaattcacacttggagttggatgaaaacagcacctttgcaatgagatcaacacttgcctctgagagacacttggaacctagtgacagtattcctgaatacaatgatggaatattgaacaactcaagttcatatcagcctcataattactcttacacagaacaagatgttgaggattccagtgctgatgtatcagcagcagcagaaaatttccagagtttaagcctacataatgatgagttagctgcaaaaaagactgctgaagataaccctgcagtgataattcctgatcatttgcaagttaccaatacagaatgtgttagtttgagctttggcagttttggatctggtgcattttctgggctactcccacaaaagaccactgatagcaatgtggaattccttgttcgagaggattctgcaacagtagatccaatagatgccaggaatcaagattactatgaaagtggtgcagtaacttcaccagcagaagaaaatcttgaggccatgctaggaactaacatggagaatgtcgatgcaccttctgtttcacaggctaatgagctcagccaggacgtacttgatccttctgtacttaaatatgacgtgccatcagtttcaagtcatgcttattcgaacatgaacactccacaacctagcaaaatagaggacccacaaggaaacaaccaagcacatacactttcccatttgtcaaacatgatgcaagcaaatcctttgagcactagcagcctattggcgtcaaatcaaaatcatccatctcttcatggcatagagtttgatttgccttatcttgaagcaaaatataacgcaggctcgactacaaatcctagaccagccatatccatgcaggaggccctgaaagcaggggttttctccaacgctcggtctacgcagtctcttccaagtactagcattccgacggggcatcctctccctcagcaattagcacatcacccttactctcagccgactttagcacccatcacacattttccaaatatcgttggctatccgccgtatttgccacaaaactatgctgcttacctatcttcgggcaccttccagcaagcatacccgagcaatggagcattccatcagtctgctgccgctttgctcggatctggtatgaagtactcggcccccgagtataagaacaacctgtctgccacaggcttacaacagcaacatcagccacaaccgcaaccaccttcatcagtcatctctggttatggaggctttggaagctcaagcaatatacaaggaaattttacccttaatcagagtaccggcactggatcaactcttgtgtttgatgatgcattgggcagacagtacaaagacaccagtcaacacatagctctccagcagcccgacaactctggaatgtggcttcatggctctggttcaagagcggcgacgcttccgcctaaccacttttatggttaccagggacagagtcagctgggtggctttggtcaggcgcagcagcaacagccttcccaattcggaggccacgggtacccgactttctaccagtctcagggtgggctgacacaggagcaccacccccagaaccttgctgagggcagcctgaatggcttccaggtcgcaccgtctcagccgtctcatccgagctggcagcatcagcacacctactga

SEQ ID NO: 17948 - protein, 856 aa, Zea mays
MSGGGAGGKGAAAPVPAGSRKLVQGLKEIVNRPEAEIYAALRECGMDPDETVSRLLSQDTFQEVKSKRDKKKEIKEVPETRYRSANSSTNRSLRSGADRGGRSNSVHSSSTDNMTSRPPVSGSCTASVNSNQMQTIASSSANKHMVTDGLAVSLQSSSGFQHGGWSGTPGQLSMVDIVKMGRPQGKASSKPVVTADRGYAGQYPSLPSTNQNLKQSGSMVSPAELDKGLQPAHNLVQVKNHGHFTADSKLPYGTDWSPQDDPTSENQSSQPETSGDPSLYESSFQSSTLVTDVVNSHENSHLELDENSTFAMRSTLASERHLEPSDSIPEYNDGILNNSSSYQPHNYSYTEQDVEDSSADVSAAAENFQSLSLHNDELAAKKTAEDNPAVIIPDHLQVTNTECVSLSFGSFGSGAFSGLLPQKTTDSNVEFLVREDSATVDPIDARNQDYYESGAVTSPAEENLEAMLGTNMENVDAPSVSQANELSQDVLDPSVLKYDVPSVSSHAYSNMNTPQPSKIEDPQGNNQAHTLSHLSNMMQANPLSTSSLLASNQNHPSLHGIEFDLPYLEAKYNAGSTTNPRPAISMQEALKAGVFSNARSTQSLPSTSIPTGHPLPQQLAHHPYSQPTLAPITHFPNIVGYPPYLPQNYAAYLSSGTFQQAYPSNGAFHQSAAALLGSGMKYSAPEYKNNLSATGLQQQHQPQPQPPSSVISGYGGFGSSSNIQGNFTLNQSTGTGSTLVFDDALGRQYKDTSQHIALQQPDNSGMWLHGSGSRAATLPPNHFYGYQGQSQLGGFGQAQQQQPSQFGGHGYPTFYQSQGGLTQEHHPQNLAEGSLNGFQVAPSQPSHPSWQHQHTY

SEQ ID NO: 17949 - DNA, 2529 bp, Zea mays
  CDS (1)..(2529)
atgagcagcggcggcggtggagggggagccaggggaccgtcggggcccgtgccggcgtccgcgaggaagctcgtgcaggggctcaaggagatcgtgaaccgccccgacgcggagatctacgcagcgctgcgggagtgcaacatggacccggacgaggcggtcagccgcctcctctcccaagatacttttcaagaggtaaagagcaagcgtgataggaaaaaagaggttaaagaaactccagagccaagatctcgaggagcaagtaactccagtcgatccagtagaggtggtgtggaccgtgctggacgaggcaattcagttcagtctggatcgagtggcactgattatatggcttcaaggtcatcaatattgggacctgctgtggcagctaccaatgccatgcagaagccaacagttcctagtttgtccacaaacaaagatgtggttcctaatggatcagttggagcacaacaatcatcatctggttttcagcacaattggtttggggtgccaggtcagatgtcaatggctgatatagtgaaaatgggaagacctcaagtgaggtcttctggcaagcctatggctgcaggagacacatcatatgctggtcaaaccccatctttatctagctctataaaccagaactcaaaacaatcggcaagcacagccctaccaactacttttgaccagggctttcctgctctcccagaccctattccacacacagtgaattctagtcatggttcagctgggaacaaccatacacatgagaatgattggtttcctcaggacgacctgccatctggagttcagcccacatgcattgaggcgtctggtgaccagtcgctatttgtggcatcactggaccaatctatgttggttgccgatgcttcttactcacaagaaatttctcatgcagaagagaacaactccactgcagttgaagcaacactgtcttccgaaagacacttggaaattgtggaggatgacaatcatttcaacgacgggttattgcagaactcaagcgcttaccaggctcaagtgcattcctatgttgataatgaagttgggatttccaatgttgatgcagaatcagcttcgatgaacttccagcatttaagcctgcagaatgaagatatagctgcaaccaagtctgctgaggataaccctgcggttatactccctgatcatctacaagctgcaaatgcagattgtgctcatttgagctttggtagttttgaatctggtgccttctctggcttgctttcatcaaaggtcccaaaaggcagtttggaggacgacgaggtgctcattccagatgaatcccgatcagttaatcgaatagatgttaggaatcaagattactatgatgacgatgctctaaattcttcagaaaatgtggatgttgagacaagaattggtaatatggataacattgatggaccttcagtttcagaatctgatgcactgaggcagggtgccatagatgtgcctggtcttcaatatgacctgccatcagtttcaagtcatgcatattcaaacacaacacagccaagtacaatggaagaaccacaaggaaacacacaagcacaacccctttcccatttttctggcttactgcaagcaaatactctacccaataacttgttggggtcaaatcttacccctcttcgggagtttgacttctcccagttccttcagacacagtcagctacaaaatataacccatctgttgcacctaataatctgccaccaatctccatgcaagagacttcaaaacagggaggcttccccaatactcagtctacgcaacatgttcccagtacaagcatttcgtcgggtcttcctctcccacaacaattgcctgtatactctcagccaactctgccccttgggccttttaccagcctggttggctatccatatttgcctcagaactattacctaccttcagcgccattccagcaagcgtactcaagtaatgggcctttccatcaatctgctgctcctgccgtgcctggagctggtatgaagtatccgatgccacaatacaagagcagccctcctgcttcgaccctaccacaaccatcatcactctctggttacggagggttcggaagtgcaaataatatccctggaaatttcagccaaaatcagggtgctcccgctgcacctacaactttgggatttgatgaagctttaggcacacaattcaaacaccccaatcattatgcagcactacagcagagtgataattcaacgatgtggcttcatggaggcgctggttcaagaacaatttctgcagttccgcctggtaacttctatggtttccagggccagagtcagcatggtggcttccgccaggcacatcagccatctcagtacggtggtcttgggtatccaagcttctaccagtcgcagaccagtctgccacaggagcacccccagaaccccactgagggaagcttgaacaatccccagggggtaccatcccagccttcacaccagctctggcagcacatctactaa

SEQ ID NO: 17950 - protein, 842 aa, Zea mays
MSSGGGGGGARGPSGPVPASARKLVQGLKEIVNRPDAEIYAALRECNMDPDEAVSRLLSQDTFQEVKSKRDRKKEVKETPEPRSRGASNSSRSSRGGVDRAGRGNSVQSGSSGTDYMASRSSILGPAVAATNAMQKPTVPSLSTNKDVVPNGSVGAQQSSSGFQHNWFGVPGQMSMADIVKMGRPQVRSSGKPMAAGDTSYAGQTPSLSSSINQNSKQSASTALPTTFDQGFPALPDPIPHTVNSSHGSAGNNHTHENDWFPQDDLPSGVQPTCIEASGDQSLFVASLDQSMLVADASYSQEISHAEENNSTAVEATLSSERHLEIVEDDNHFNDGLLQNSSAYQAQVHSYVDNEVGISNVDAESASMNFQHLSLQNEDIAATKSAEDNPAVILPDHLQAANADCAHLSFGSFESGAFSGLLSSKVPKGSLEDDEVLIPDESRSVNRIDVRNQDYYDDDALNSSENVDVETRIGNMDNIDGPSVSESDALRQGAIDVPGLQYDLPSVSSHAYSNTTQPSTMEEPQGNTQAQPLSHFSGLLQANTLPNNLLGSNLTPLREFDFSQFLQTQSATKYNPSVAPNNLPPISMQETSKQGGFPNTQSTQHVPSTSISSGLPLPQQLPVYSQPTLPLGPFTSLVGYPYLPQNYYLPSAPFQQAYSSNGPFHQSAAPAVPGAGMKYPMPQYKSSPPASTLPQPSSLSGYGGFGSANNIPGNFSQNQGAPAAPTTLGFDEALGTQFKHPNHYAALQQSDNSTMWLHGGAGSRTISAVPPGNFYGFQGQSQHGGFRQAHQPSQYGGLGYPSFYQSQTSLPQEHPQNPTEGSLNNPQGVPSQPSHQLWQHIY

SEQ ID NO: 17951 - DNA, 2571 bp, Zea mays
  CDS (1)..(2571)
atgagcggcggcggtgccggagggaagggggcggcggcgcccgtcccggccgggtcgaggaaactggtgcagcgtctcaaggagatcgtgaaccgacccgaggcggagatctacgccgcactgcgcgagtgcggcatggaccccgacgaggcggtcagccgcctcctctcccaagatactttccaagaggtaaagagcaagcgcgacaagaagaaagagattaaagaagttcctgagacaagatatcgatcggcaaatagttctactaatcgaagccttagaagtggtgcagatcgtggtggacgtagcaattctgtgcactccagctctactgataacatgacctcaaggccaccagtctcagggtcttgtacggcatcagttaattccaatcaaatgcagacaattgcaagttcctctgcaaacaaacatatggttactgatggactagctgtatcattgcaatcatcgtctgggtttcagcatggtggttggtctgggacacctggtcagttgtcgatggttgacattgtgaaaatgggtcgccctcagggaaaggcttctagcaaacctgtggtcacagctgacagaggttatgctggacagtacccatctttgccaagcacaaaccagaacctcaaacaatctggaagcatggtttccccagcagagcttgacaaggggttacaacctgcccacaatttggttcaggttaagaatcatggtcattttactgctgatagcaagctcccatatggtactgattggtctccacaagacgacccaacatctgagaaccaatcttcccagcctgagacgtctggtgatccatctttgtatgaatcatcatttcagtcatctacattggttactgatgtagttaattcacatgaaaattcacacttggagttggatgaaaacagcacctttgcaatgagatcaacacctgcctctgagagacacttggaacctagtgacagtattcctgaatacaatgatggaatattaaacaactcaagttcatatcagcctcataattactcttacacagaacaagatgttgaggattccagtgctgatgtatcagcagcagcagaaaatttccagagtttaagcctacataatgatgagttagctgcaaaaaagactgctgaagataaccctgcagtgataattcctgatcatttgcaagttaccaatacagaatgtgttagtttgagctttggcagttttggatctggtgcattttctgggctactcccacaaaagaccactgatagcaatgtggaattccttgttcgagaggattctgcaacagtagatccaatagatgccaggaatcaagattactatgaaagtggtgcagtaacttcaccagcagaagaaaatcttgaggccatgctaggaactaacatggagaatgtcgatgcaccttctgtttcacaggctaatgagctcagtcaggacgtacttgatccttctgtacttaaatatgacgtgccatcagtttcaagtcatgcttattcgaacatgaacactccacaacctagcaaaatagaggacccacaaggaaacaaccaagcacatacactttcccatttgtcaaacatgatgcaagcaaatcctttgagcactagcagcctattggcgtcaaatcaaaatcatccatctcttcatggcatagagtttgatttgccttatcttgaagcaaaatataacacaggctcgactacaaatcctagaccagccatatccatgcaggaggccctgaaagcaggggttttctccaacgctcggtctacgcagtctcttccaagtactagcattccgacggggcatcctctccctcagcaattagcacatcacccttactctcagccgactttaccacccatcacacatttcccaaatatcgttggctatccgccgtatttgccacaaaactatgctgcttacctatcttcgggcaccttccagcaagcatacccgagcaatggagcattccatcagtctgctgccactttgctcggatctggtatgaagtactcggcccccgagtataagaacaacctgtctgccacaggcttacaacagcaacatcagccacaaccgcaaccaccttcatcagtcatctctggttatggaggccttggaagctcaagcaatatacaaggaaattttacccttaatcagagtaccggcactggatcaactcttgtgtttgatgatgcattgggcagacagtacaaagacaccagtcaacacatagctctccagcagcccgacaactctggaatgtggcttcatggctctggttcaagagcggcgacgcttccgcctaaccacttttatggttaccagggacagagtcagctgggtggctttggtcaggcgcagcagcaacagccttcccaattcggaggccacgggtacccgactttctaccagtctcagggtgggctgacacaggagcaccacccccagaaccttgctgagggcagcctgaatggcttccaggtcgcaccgtctcagccgtctcatccgagctggcagcatcagcacacctactga

SEQ ID NO: 17952 - protein, 856 aa, Zea mays
MSGGGAGGKGAAAPVPAGSRKLVQRLKEIVNRPEAEIYAALRECGMDPDEAVSRLLSQDTFQEVKSKRDKKKEIKEVPETRYRSANSSTNRSLRSGADRGGRSNSVHSSSTDNMTSRPPVSGSCTASVNSNQMQTIASSSANKHMVTDGLAVSLQSSSGFQHGGWSGTPGQLSMVDIVKMGRPQGKASSKPVVTADRGYAGQYPSLPSTNQNLKQSGSMVSPAELDKGLQPAHNLVQVKNHGHFTADSKLPYGTDWSPQDDPTSENQSSQPETSGDPSLYESSFQSSTLVTDVVNSHENSHLELDENSTFAMRSTPASERHLEPSDSIPEYNDGILNNSSSYQPHNYSYTEQDVEDSSADVSAAAENFQSLSLHNDELAAKKTAEDNPAVIIPDHLQVTNTECVSLSFGSFGSGAFSGLLPQKTTDSNVEFLVREDSATVDPIDARNQDYYESGAVTSPAEENLEAMLGTNMENVDAPSVSQANELSQDVLDPSVLKYDVPSVSSHAYSNMNTPQPSKIEDPQGNNQAHTLSHLSNMMQANPLSTSSLLASNQNHPSLHGIEFDLPYLEAKYNTGSTTNPRPAISMQEALKAGVFSNARSTQSLPSTSIPTGHPLPQQLAHHPYSQPTLPPITHFPNIVGYPPYLPQNYAAYLSSGTFQQAYPSNGAFHQSAATLLGSGMKYSAPEYKNNLSATGLQQQHQPQPQPPSSVISGYGGLGSSSNIQGNFTLNQSTGTGSTLVFDDALGRQYKDTSQHIALQQPDNSGMWLHGSGSRAATLPPNHFYGYQGQSQLGGFGQAQQQQPSQFGGHGYPTFYQSQGGLTQEHHPQNLAEGSLNGFQVAPSQPSHPSWQHQHTY

SEQ ID NO: 17953 - DNA, 20 bp, Artificial sequence
  primer
atgagcagcagcaaggtcgg

SEQ ID NO: 17954 - DNA, 21 bp, Artificial sequence
  primer
ttagtaagagttttgccagag

SEQ ID NO: 17955 - protein, 999 aa, Artificial sequence
  consensus sequence
  Variant (2)..(7): Xaa in position 2 to 7 is any amino acid
  Variant (8)..(25): Xaa in position 8 to 25 is any or no amino acid
  Variant (27)..(28): Xaa in position 27 to 28 is any amino acid
  Variant (29)..(29): Xaa in position 29 is any or no amino acid
  Variant (32)..(32): Xaa in position 32 is any amino acid
  Variant (35)..(35): Xaa in position 35 is any amino acid
  Variant (37)..(38): Xaa in position 37 to 38 is any amino acid
  Variant (40)..(45): Xaa in position 40 to 45 is any amino acid
  Variant (46)..(46): Xaa in position 46 is any or no amino acid
  Variant (51)..(51): Xaa in position 51 is any amino acid
  Variant (53)..(54): Xaa in position 53 to 54 is any amino acid
  Variant (56)..(56): Xaa in position 56 is any amino acid
  Variant (60)..(60): Xaa in position 60 is any amino acid
  Variant (61)..(62): Xaa in position 61 to 62 is any or no amino acid
  Variant (64)..(64): Xaa in position 64 is any amino acid
  Variant (67)..(67): Xaa in position 67 is any amino acid
  Variant (70)..(97): Xaa in position 70 to 97 is any amino acid
  Variant (99)..(99): Xaa in position 99 is any amino acid
  Variant (101)..(101): Xaa in position 101 is any amino acid
  Variant (104)..(104): Xaa in position 104 is any amino acid
  Variant (105)..(105): Xaa in position 105 is any or no amino acid
  Variant (107)..(108): Xaa in position 107 to 108 is any amino acid
  Variant (113)..(121): Xaa in position 113 to 121 is any amino acid
  Variant (122)..(141): Xaa in position 122 to 141 is any or no amino acid
  Variant (143)..(166): Xaa in position 143 to 166 is any amino acid
  Variant (167)..(252): Xaa in position 167 to 252 is any or no amino acid
  Variant (255)..(256): Xaa in position 255 to 256 is any amino acid
  Variant (260)..(260): Xaa in position 260 is any amino acid
  Variant (269)..(381): Xaa in position 269 to 381 is any amino acid
  Variant (382)..(426): Xaa in position 382 to 426 is any or no amino acid
  Variant (428)..(448): Xaa in position 428 to 448 is any amino acid
  Variant (449)..(457): Xaa in position 449 to 457 is any or no amino acid
  Variant (459)..(470): Xaa in position 459 to 470 is any amino acid
  Variant (471)..(473): Xaa in position 471 to 473 is any or no amino acid
  Variant (476)..(476): Xaa in position 476 is any amino acid
  Variant (480)..(480): Xaa in position 480 is any amino acid
  Variant (483)..(483): Xaa in position 483 is any amino acid
  Variant (487)..(491): Xaa in position 487 to 491 is any amino acid
  Variant (493)..(494): Xaa in position 493 to 494 is any amino acid
  Variant (496)..(496): Xaa in position 496 is any amino acid
  Variant (501)..(525): Xaa in position 501 to 525 is any amino acid
  Variant (526)..(538): Xaa in position 526 to 538 is any or no amino acid
  Variant (540)..(540): Xaa in position 540 is any amino acid
  Variant (542)..(546): Xaa in position 542 to 546 is any amino acid
  Variant (547)..(569): Xaa in position 547 to 569 is any or no amino acid
  Variant (571)..(571): Xaa in position 571 is any amino acid
  Variant (573)..(587): Xaa in position 573 to 587 is any amino acid
  Variant (588)..(594): Xaa in position 588 to 594 is any or no amino acid
  Variant (596)..(621): Xaa in position 596 to 621 is any amino acid
  Variant (622)..(627): Xaa in position 622 to 627 is any or no amino acid
  Variant (629)..(635): Xaa in position 629 to 635 is any amino acid
  Variant (637)..(645): Xaa in position 637 to 645 is any amino acid
  Variant (646)..(649): Xaa in position 646 to 649 is any or no amino acid
  Variant (651)..(657): Xaa in position 651 to 657 is any amino acid
  Variant (658)..(659): Xaa in position 658 to 659 is any or no amino acid
  Variant (661)..(661): Xaa in position 661 is any amino acid
  Variant (662)..(662): Xaa in position 662 is any or no amino acid
  Variant (664)..(666): Xaa in position 664 to 666 is any amino acid
  Variant (668)..(680): Xaa in position 668 to 680 is any amino acid
  Variant (681)..(698): Xaa in position 681 to 698 is any or no amino acid
  Variant (700)..(716): Xaa in position 700 to 716 is any amino acid
  Variant (717)..(722): Xaa in position 717 to 722 is any or no amino acid
  Variant (724)..(725): Xaa in position 724 to 725 is any amino acid
  Variant (728)..(728): Xaa in position 728 is any amino acid
  Variant (732)..(732): Xaa in position 732 is any amino acid
  Variant (734)..(734): Xaa in position 734 is any amino acid
  Variant (735)..(735): Xaa in position 735 is any or no amino acid
  Variant (737)..(737): Xaa in position 737 is any amino acid
  Variant (739)..(739): Xaa in position 739 is any amino acid
  Variant (741)..(748): Xaa in position 741 to 748 is any amino acid
  Variant (749)..(753): Xaa in position 749 to 753 is any or no amino acid
  Variant (757)..(761): Xaa in position 757 to 761 is any amino acid
  Variant (762)..(762): Xaa in position 762 is any or no amino acid
  Variant (764)..(768): Xaa in position 764 to 768 is any amino acid
  Variant (769)..(771): Xaa in position 769 to 771 is any or no amino acid
  Variant (776)..(781): Xaa in position 776 to 781 is any amino acid
  Variant (782)..(783): Xaa in position 782 to 783 is any or no amino acid
  Variant (786)..(787): Xaa in position 786 to 787 is any amino acid
  Variant (789)..(791): Xaa in position 789 to 791 is any amino acid
  Variant (792)..(801): Xaa in position 792 to 801 is any or no amino acid
  Variant (806)..(812): Xaa in position 806 to 812 is any amino acid
  Variant (816)..(819): Xaa in position 816 to 819 is any amino acid
  Variant (820)..(832): Xaa in position 820 to 832 is any or no amino acid
  Variant (836)..(841): Xaa in position 836 to 841 is any amino acid
  Variant (842)..(843): Xaa in position 842 to 843 is any or no amino acid
  Variant (847)..(847): Xaa in position 847 is any amino acid
  Variant (851)..(855): Xaa in position 851 to 855 is any amino acid
  Variant (856)..(859): Xaa in position 856 to 859 is any or no amino acid
  Variant (861)..(867): Xaa in position 861 to 867 is any amino acid
  Variant (869)..(869): Xaa in position 869 is any amino acid
  Variant (871)..(876): Xaa in position 871 to 876 is any amino acid
  Variant (877)..(877): Xaa in position 877 is any or no amino acid
  Variant (881)..(887): Xaa in position 881 to 887 is any amino acid
  Variant (888)..(901): Xaa in position 888 to 901 is any or no amino acid
  Variant (903)..(905): Xaa in position 903 to 905 is any amino acid
  Variant (906)..(906): Xaa in position 906 is any or no amino acid
  Variant (909)..(917): Xaa in position 909 to 917 is any amino acid
  Variant (918)..(918): Xaa in position 918 is any or no amino acid
  Variant (920)..(920): Xaa in position 920 is any amino acid
  Variant (921)..(936): Xaa in position 921 to 936 is any or no amino acid
  Variant (938)..(938): Xaa in position 938 is any amino acid
  Variant (940)..(942): Xaa in position 940 to 942 is any amino acid
  Variant (943)..(943): Xaa in position 943 is any or no amino acid
  Variant (945)..(949): Xaa in position 945 to 949 is any amino acid
  Variant (951)..(961): Xaa in position 951 to 961 is any amino acid
  Variant (962)..(967): Xaa in position 962 to 967 is any or no amino acid
  Variant (970)..(971): Xaa in position 970 to 971 is any amino acid
  Variant (972)..(974): Xaa in position 972 to 974 is any or no amino acid
  Variant (976)..(977): Xaa in position 976 to 977 is any amino acid
  Variant (978)..(979): Xaa in position 978 to 979 is any or no amino acid
  Variant (981)..(993): Xaa in position 981 to 993 is any amino acid
  Variant (994)..(998): Xaa in position 994 to 998 is any or no amino acid
GXXXXXXXXXXXXXXXXXXXXXXXXPXXXRKXVQXLXXIXXXXXXXEIYAXLXXCXMDPXXXVXRLXSQXXXXXXXXXXXXXXXXXXXXXXXXXXXXDXFXEVXXKXXKKKEXXXXXXXXXXXXXXXXXXXXXXXXXXXXXRXXXXXXXXXXXXXXXXXXXXXXXXXXXXXXXXXXXXXXXXXXXXXXXXXXXXXXXXXXXXXXXXXXXXXXXXXXXXXXXXXXXXXXXXXXXXXXXXXXXXXXXXXXXXXXPGXXSMAXIVKMGRPQXXXXXXXXXXXXXXXXXXXXXXXXXXXXXXXXXXXXXXXXXXXXXXXXXXXXXXXXXXXXXXXXXXXXXXXXXXXXXXXXXXXXXXXXXXXXXXXXXXXXXXXXXXXXXXXXXXXXXXXXXXXXXXXXXXXXXXXXXXXXXXXXXXXXXXXXXXXXXXQXXXXXXXXXXXXXXXXXXXXXXXXXXXXXXQXXXXXXXXXXXXXXXEDXPAVXIPXHLQXXXXXCXXLXFGSFXXXXXXXXXXXXXXXXXXXXXXXXXXXXXXXXXXXXXXDXRXXXXXXXXXXXXXXXXXXXXXXXXXXXXNXDXXXXXXXXXXXXXXXXXXXXXXYXXXXXXXXXXXXXXXXXXXXXXXXXXXXXXXXQXXXXXXXSXXXXXXXXXXXXXLXXXXXXXXXRXXDXXXSXXXXXXXXXXXXXXXXXXXXXXXXXXXXXXXEXXXXXXXXXXXXXXXXXXXXXXXIXXGPXLPQXLXXHXYXQXXXXXXXXXXXXXGYPXXXXXXYXXXXXXXXAFQQXXXXXXXXHQXXAXXXXXXXXXXXXXPQYKXXXXXXXLPQXXXXXXXXXXXXXXXXXGFGXXXXXXXXGNFXLNQXXXXXXXXXGXXXXXXXQXKXXXXXXXLQQXXXXXXXXXXXXXXXXXXXXXHXXXXSRXXXXXXXXXXYXXXXXXXXXXXXXXXXXQXQXXXXGXXXXXQXXXXXXXXXXXXXXXXXSQXXXXXEXXXXNXXXXXXXXXXXXXXXXXXQ

SEQ ID NO: 17956 - protein, 30 aa, Artificial sequence
  protein pattern
  Variant (2)..(2): Xaa in position 2 is Asp or Glu
  Variant (3)..(3): Xaa in position 3 is Asn or Arg
  Variant (4)..(4): Xaa in position 4 is Pro or Ser
  Variant (5)..(5): Xaa in position 5 is Ala or Ser
  Variant (7)..(7): Xaa in position 7 is any or no amino acid
  Variant (9)..(9): Xaa in position 9 is any or no amino acid
  Variant (11)..(11): Xaa in position 11 is Asp or Asn
  Variant (14)..(14): Xaa in position 14 is any amino acid
  Variant (15)..(15): Xaa in position 15 is Ala, Ile, Leu or Val
  Variant (16)..(16): Xaa in position 16 is any amino acid
  Variant (17)..(17): Xaa in position 17 is Gly, Asn, Ser or Thr
  Variant (18)..(18): Xaa in position 18 is Ala, Glu, Ser or Thr
  Variant (19)..(19): Xaa in position 19 is Asp or Glu
  Variant (21)..(21): Xaa in position 21 is Ala, Gly, Leu or Val
  Variant (22)..(22): Xaa in position 22 is any amino acid
  Variant (24)..(24): Xaa in position 24 is Ser or Thr
  Variant (29)..(29): Xaa in position 29 is any amino acid
  Variant (30)..(30): Xaa in position 30 is Gly or Ser
EXXXXVXIXPXHLXXXXXXCXXLXFGSFXX

SEQ ID NO: 17957 - protein, 21 aa, Artificial sequence
  protein pattern
  Variant (2)..(2): Xaa in position 2 is any amino acid
  Variant (4)..(4): Xaa in position 4 is any amino acid
  Variant (7)..(7): Xaa in position 7 is Gln or Arg
  Variant (8)..(8): Xaa in position 8 is any amino acid
  Variant (11)..(11): Xaa in position 11 is Ala or Val
  Variant (12)..(12): Xaa in position 12 is Asp or Glu
  Variant (13)..(13): Xaa in position 13 is Ile or Val
  Variant (18)..(18): Xaa in position 18 is Lys or Arg
  Variant (21)..(21): Xaa in position 21 is Ala, Gly, Asn or Val
WXGXPGXXSMXXXVKMGXPQX

SEQ ID NO: 17958 - protein, 21 aa, Artificial sequence
  protein pattern
  Variant (3)..(3): Xaa in position 3 is Ile or Leu
  Variant (7)..(7): Xaa in position 7 is Pro or Thr
  Variant (9)..(9): Xaa in position 9 is any amino acid
  Variant (11)..(11): Xaa in position 11 is Ala or Val
  Variant (12)..(12): Xaa in position 12 is Lys or Arg
  Variant (13)..(13): Xaa in position 13 is Arg or Ser
  Variant (15)..(16): Xaa in position 15 to 16 is any amino acid
  Variant (17)..(17): Xaa in position 17 is any or no amino acid
  Variant (20)..(20): Xaa in position 20 is any or no amino acid
RLXSQDXFXEXXXKXXXKKXE

SEQ ID NO: 17959 - protein, 19 aa, Artificial sequence
  protein pattern
  Variant (2)..(2): Xaa in position 2 is any amino acid
  Variant (3)..(5): Xaa in position 3 to 5 is any or no amino acid
  Variant (7)..(7): Xaa in position 7 is any amino acid
  Variant (9)..(9): Xaa in position 9 is any amino acid
  Variant (10)..(10): Xaa in position 10 is Asp, Glu or Ser
  Variant (11)..(11): Xaa in position 11 is Cys or Ser
  Variant (12)..(12): Xaa in position 12 is Asp, Gly, Asn or Thr
  Variant (13)..(13): Xaa in position 13 is Leu or Met
  Variant (14)..(14): Xaa in position 14 is Asp, Asn or Val
  Variant (15)..(15): Xaa in position 15 is Ala or Pro
  Variant (16)..(16): Xaa in position 16 is Asp or Asn
  Variant (17)..(17): Xaa in position 17 is any amino acid
  Variant (18)..(18): Xaa in position 18 is Ala or Thr
  Variant (19)..(19): Xaa in position 19 is Asn or Val
IXXXXAXLXXXXXXXXXXX

SEQ ID NO: 17960 - protein, 19 aa, Artificial sequence
  protein pattern
  Variant (3)..(3): Xaa in position 3 is Gly, Asn, Pro or Ser
  Variant (4)..(4): Xaa in position 4 is Asp or Glu
  Variant (6)..(6): Xaa in position 6 is Ala or Ser
  Variant (7)..(7): Xaa in position 7 is Ala, Gly, Pro or Thr
  Variant (10)..(10): Xaa in position 10 is any or no amino acid
  Variant (12)..(12): Xaa in position 12 is any or no amino acid
  Variant (14)..(15): Xaa in position 14 to 15 is any amino acid
  Variant (16)..(16): Xaa in position 16 is any or no amino acid
  Variant (19)..(19): Xaa in position 19 is Ala or Thr
QQXXNXXMWXHXGXXXSRX

SEQ ID NO: 17961 - protein, 19 aa, Artificial sequence
  protein pattern
  Variant (2)..(7): Xaa in position 2 to 7 is any amino acid
  Variant (9)..(9): Xaa in position 9 is Ala, Pro or Ser
  Variant (10)..(10): Xaa in position 10 is Ser or Thr
  Variant (12)..(12): Xaa in position 12 is any or no amino acid
  Variant (14)..(14): Xaa in position 14 is any or no amino acid
  Variant (18)..(18): Xaa in position 18 is any amino acid
QXXXXXXIXXGXPXLPQXL

SEQ ID NO: 17962 - protein, 23 aa, Artificial sequence
  protein pattern
  Variant (2)..(2): Xaa in position 2 is any amino acid
  Variant (3)..(3): Xaa in position 3 is any or no amino acid
  Variant (5)..(5): Xaa in position 5 is any or no amino acid
  Variant (7)..(7): Xaa in position 7 is any or no amino acid
  Variant (11)..(11): Xaa in position 11 is Ala, Pro, Ser or Thr
  Variant (12)..(12): Xaa in position 12 is Phe or Tyr
  Variant (13)..(13): Xaa in position 13 is any amino acid
  Variant (14)..(14): Xaa in position 14 is Gly, Asn or Ser
  Variant (15)..(15): Xaa in position 15 is Asn or Ser
  Variant (16)..(16): Xaa in position 16 is Gly or Ser
  Variant (17)..(17): Xaa in position 17 is any amino acid
  Variant (18)..(18): Xaa in position 18 is Phe or Tyr
  Variant (21)..(21): Xaa in position 21 is Ala, Gln or Ser
  Variant (22)..(22): Xaa in position 22 is Ala or Leu
YXXPXAXFQQXXXXXXXXHQXXA

SEQ ID NO: 17963 - protein, 17 aa, Artificial sequence
  protein pattern
  Variant (2)..(2): Xaa in position 2 is any amino acid
  Variant (3)..(3): Xaa in position 3 is any or no amino acid
  Variant (5)..(5): Xaa in position 5 is any or no amino acid
  Variant (8)..(8): Xaa in position 8 is Ile, Leu or Met
  Variant (11)..(11): Xaa in position 11 is any amino acid
  Variant (13)..(13): Xaa in position 13 is any amino acid
  Variant (14)..(14): Xaa in position 14 is Glu or Gly
  Variant (16)..(16): Xaa in position 16 is Leu or Val
  Variant (17)..(17): Xaa in position 17 is Ala, Asn, Ser or Thr
PXXSXRKXVQXLXXIXX

SEQ ID NO: 17964 - protein, 14 aa, Artificial sequence
  protein pattern
  Variant (3)..(3): Xaa in position 3 is Phe or Tyr
  Variant (5)..(5): Xaa in position 5 is Gly, Asn, Ser or Thr
  Variant (6)..(6): Xaa in position 6 is Asn or Ser
  Variant (7)..(7): Xaa in position 7 is Ile, Leu or Val
  Variant (8)..(8): Xaa in position 8 is Pro or Ser
  Variant (9)..(9): Xaa in position 9 is Ala, Leu, Pro or Val
  Variant (10)..(10): Xaa in position 10 is Ala, Gly, Ser or Thr
  Variant (11)..(11): Xaa in position 11 is Asn or Ser
  Variant (12)..(12): Xaa in position 12 is Leu or Pro
  Variant (13)..(13): Xaa in position 13 is Pro or Gln
PQXKXXXXXXXXXQ

SEQ ID NO: 17965 - protein, 15 aa, Artificial sequence
  protein pattern
  Variant (2)..(2): Xaa in position 2 is Ala, Gly, Asn, Gln or Ser
  Variant (3)..(4): Xaa in position 3 to 4 is any amino acid
  Variant (6)..(6): Xaa in position 6 is any amino acid
  Variant (7)..(7): Xaa in position 7 is any or no amino acid
  Variant (10)..(10): Xaa in position 10 is Ala, Gly, Asn or Ser
  Variant (12)..(14): Xaa in position 12 to 14 is any or no amino acid
QXXXGXXRQXQXXXQ

SEQ ID NO: 17966 - protein, 14 aa, Artificial sequence
  protein pattern
  Variant (2)..(2): Xaa in position 2 is any amino acid
  Variant (3)..(3): Xaa in position 3 is Ala, Leu or Val
  Variant (4)..(4): Xaa in position 4 is any amino acid
  Variant (5)..(5): Xaa in position 5 is Ala, Gly or Pro
  Variant (6)..(6): Xaa in position 6 is Gly, Asn, Ser or Val
  Variant (7)..(7): Xaa in position 7 is Ala, Gly, Asn or Val
  Variant (8)..(8): Xaa in position 8 is any amino acid
  Variant (9)..(9): Xaa in position 9 is Pro or Ser
  Variant (10)..(10): Xaa in position 10 is Ala, Asn or Thr
  Variant (11)..(11): Xaa in position 11 is Ala, Pro or Thr
  Variant (13)..(13): Xaa in position 13 is any amino acid
  Variant (14)..(14): Xaa in position 14 is Asn, Gln or Thr
EXXXXXXXXXXQXX

SEQ ID NO: 17967 - protein, 11 aa, Artificial sequence
  protein pattern
  Variant (3)..(3): Xaa in position 3 is Ala, Gly or Pro
  Variant (4)..(4): Xaa in position 4 is Pro, Gln or Ser
  Variant (5)..(5): Xaa in position 5 is Ala, Asn or Thr
  Variant (6)..(6): Xaa in position 6 is Ala, Ile, Leu or Val
  Variant (7)..(7): Xaa in position 7 is any amino acid
  Variant (8)..(8): Xaa in position 8 is Asn, Pro or Thr
  Variant (9)..(9): Xaa in position 9 is Ala or Leu
  Variant (11)..(11): Xaa in position 11 is Asp or Glu
LLXXXXXXXRX

SEQ ID NO: 17968 - DNA, 1320 bp, Arabidopsis thaliana
  CDS (1)..(1320)
atggctttgcaaaacattggtgcctccaaccgcgatgatgccttttataggtataagatgccgaggatgatgaccaagattgaaggtagaggtaacggtatcaagactaatgtggttaacatggttgagattgctaaggccttggggagacctgctgcttatactactaagtattttggttgtgagcttggtgcacagtctaagtttgatgagaagaatgggacctcgcttgtgaatggggctcatgacacttccaaacttgcaggattattggagaactttattaagaagtatgttcagtgttatggatgtgggaatcctgaaactgagatacttatcactaagacgcagatgcttcagctgaaatgtgcggcttgtgggtttctctcggatgttgatatgagggacaagctaacgtcgtttattttgaagaatcctccagagcagaagaagtcgtctaaggacaagaagtcgatgaggagagctgagaaggaaagactcagagaaggtgaagcagctgatgaagagatgaggaagctcaagaaggaggctgctagtaagaagaaagcagcgaccacgggtacttcgaaagacaaagtgtcgaagaagaaagatcattctccacctcgaagcctgtctgatgaaaatgaccaagcagacagtgaagaagatgatgacgatgtccagtggcaaacagatacttccagggaggctgctgagaaacgtatgaaagaacagctcagcgcggtaacagctgaaatggtgatgctgtctacagttgaagaaaaaaagccagtagctgaggtgaagaaggcaccagaacaagtgcatgagaatggcaatagcaagatccctgaaaatgctcatgaaaagcttgtgaatgagataaaggagcttctgagcagtggttcatctcctacccaactcaaaacagccctagcttcaaactcagcaaacccccaggagaaaatggacgccttattctctgccctctttggaggcacaggcaagggattcgcaaaagaggtgatcaagaagaagaaatatctcttggccttgatgatgatgcaagaagaagcaggagctcctgcgcagatgggtttgcttaatggaattgaatccttttgcatgaaggcaagcgcagaggctgccaaagaagttgctcttgttatcaaaggtctttacgatgaagacattttggatgaggatgtgattgttgaatggtacaataaaggtgtcaaaagctccccggttttgaagaacgtgactccgttcatcgagtggctccagaatgctgagtctgagtccgaggaagagtga

SEQ ID NO: 17969 - protein, 439 aa, Arabidopsis thaliana
MALQNIGASNRDDAFYRYKMPRMMTKIEGRGNGIKTNVVNMVEIAKALGRPAAYTTKYFGCELGAQSKFDEKNGTSLVNGAHDTSKLAGLLENFIKKYVQCYGCGNPETEILITKTQMLQLKCAACGFLSDVDMRDKLTSFILKNPPEQKKSSKDKKSMRRAEKERLREGEAADEEMRKLKKEAASKKKAATTGTSKDKVSKKKDHSPPRSLSDENDQADSEEDDDDVQWQTDTSREAAEKRMKEQLSAVTAEMVMLSTVEEKKPVAEVKKAPEQVHENGNSKIPENAHEKLVNEIKELLSSGSSPTQLKTALASNSANPQEKMDALFSALFGGTGKGFAKEVIKKKKYLLALMMMQEEAGAPAQMGLLNGIESFCMKASAEAAKEVALVIKGLYDEDILDEDVIVEWYNKGVKSSPVLKNVTPFIEWLQNAESESEEE

SEQ ID NO: 17970 - DNA, 2027 bp, Arabidopsis thaliana
  CDS (447)..(1766)
agtttctcagcctcctcctccttctcttccttcttatatataaatatatccacaaaatcatctcttttgcttcgctgtttctctcattattccatctctcttatcgccgctacaaacgtttcttcttcaacctcgttcagagattatcctcccttcttttctcatcttacaaggaagttgggcagttaaagctgctgggatcaccagttttgtcaaaagtggagtgtgaagaatcttttatgtctgaacaggcttctctctttcaatcatctatccggcttttaggagagtactgtcctatatctaggaaaaagtccactcataaagttggtggtttgcgttttgaggaggacatcacgagctgtattggatttcagtttatgcaactgagtgattatcactgcctcttctgacatcccttgtttgtttacgtttgttgaatcaagatggctttgcaaaacattggtgcctccaaccgcgatgatgccttttataggtataagatgccgaggatgataaccaagattgaaggtagaggtaacggtatcaagactaatgtggttaacatggttgagattgctaaggccttggggagacctgctgcttatactactaagtattttggttgtgagcttggtgcacagtctaagtttgatgagaagaatgggacctcgcttgtgaatggggctcatgacacttccaaacttgcaggattattggagaactttattaagaagtatgttcagtgttatggatgtgggaatcctgaaactgagatacttatcactaagacgcagatgcttcagctgaaatgtgcggcttgtgggtttctctcggatgttgatatgagggacaagctaacgtcgtttattttgaagaatcctccagagcagaagaagtcgtctaaggacaagaagtcgatgaggagagctgagaaggaaagactcagagaaggtgaagcagctgatgaagagatgaggaagctcaagaaggaggctgctagtaagaagaaagcagcgaccacgggtacttcgaaagacaaagtgtcgaagaagaaagatcattctccacctcgaagcctgtctgatgaaaatgaccaagcagacagtgaagaagatgatgacgatgtccagtggcaaacagatacttccagggaggctgctgagaaacgtatgaaagaacagctcagcgcggtaacagctgaaatggtgatgctgtctacagttgaagaaaaaaagccagtagctgaggtgaagaaggcaccagaacaagtgcatgagaatggcaatagcaagatccctgaaaatgctcatgaaaagcttgtgaatgagataaaggagcttctgagcagtggttcatctcctacccaactcaaaacagccctagcttcaaactcagcaaacccccaggagaaaatggacgccttattctctgccctctttggaggcacaggcaagggattcgcaaaagaggtgatcaagaagaagaaatatctcttggccttgatgatgatgcaagaagaagcaggagctcctgcgcagatgggtttgcttaatggaattgaatccttttgcatgaaggcaagcgcagaggctgccaaagaagttgctcttgttatcaaaggtctttacgatgaagacattttggatgaggatgtgattgttgaatggtacaataaaggtgtcaaaagctccccggttttgaagaacgtgactccgttcatcgagtggctccagaatgctgagtctgagtccgaggaagagtgatgctgtgtttctttttctttgtgtggttcaaaatttggtctgcgtcttgtgtgtgtctttctgtctggttcagtgtgcgtcttgaataaggtaagaggacactggcaaaggttacttctacttgttaagtaacactagtcactggtctctctgttgatggtttgtttatgttttgtccctttgtatttgtcatgacttagacaacttatgttgtataagttgtatgctttggttttatggttactacttttcttagaactc

SEQ ID NO: 17971 - protein, 439 aa, Arabidopsis thaliana
MALQNIGASNRDDAFYRYKMPRMITKIEGRGNGIKTNVVNMVEIAKALGRPAAYTTKYFGCELGAQSKFDEKNGTSLVNGAHDTSKLAGLLENFIKKYVQCYGCGNPETEILITKTQMLQLKCAACGFLSDVDMRDKLTSFILKNPPEQKKSSKDKKSMRRAEKERLREGEAADEEMRKLKKEAASKKKAATTGTSKDKVSKKKDHSPPRSLSDENDQADSEEDDDDVQWQTDTSREAAEKRMKEQLSAVTAEMVMLSTVEEKKPVAEVKKAPEQVHENGNSKIPENAHEKLVNEIKELLSSGSSPTQLKTALASNSANPQEKMDALFSALFGGTGKGFAKEVIKKKKYLLALMMMQEEAGAPAQMGLLNGIESFCMKASAEAAKEVALVIKGLYDEDILDEDVIVEWYNKGVKSSPVLKNVTPFIEWLQNAESESEEE

SEQ ID NO: 17972 - DNA, 1999 bp, Zea mays subsp. mays
  CDS (395)..(1750)
gcaccgcatcgcctcgccgctgttccccgcaacctatcgacccaatctcgtccgacccggcgcgtcgtcccctccagatctccgtcgccctctccaggtagcagaaactgttctgctgcagtctgacaaagtggagggcttaggagcttctgcttcttttatgtctgaacaatctttgctttatttgggattgttgggagagtactctcgtgcaactaggaaaaggcacaaggttccgtcccactgcatgcgtcaagagactgtctggttttcttgttctgatttgtcatttgctggtgctcaaagccggcttggtttcctcgaaggatcagcatctactcttgattgtggactttgtcgcatctgatatcaacttcataaatctttatccaagatggcgctgcaaaacattggtgcttcaaacagggatgatgccttctacaggtacaagatgcccagaatgattaccaagatagaaggccgtggtaatggtatcaagacaaatgttgtgaacatggttgacatagcaaaagcacttgccaggccagcttcctacacaaccaagtactttggatgtgagcttggtgcacagtccaaatttgatgagaagacagggatttccttggttaacggggctcatgatactgcaaagctggctggtctccttgaggtattcatcaagaagtatgtccaatgttatgggtgtggaaatcctgagacagagattctcatctcaaagacccagatgatatcactgaaatgtgcagcctgtgggttcgtctcagatgttgatatgagggacaagctcacaaccttcattctgaaaaacccaccagaacagaagaagggcggaaaagacaagaaggccatgaggagagctgagaaggaacggctgaaggaaggtgaggctgctgatgaggagcagaagaaactgaagaaggatgcaaagaagaagggttccaaggattccactgctaagggtttgaagaagaaggctactactgctactggctctgatgaggatcactcatcctctccaactcgcagccatgatggtgacaaagcagctgcagatgatgatgacgatgatgtccagtggcagactgacacttcaattgaggctgcgaagcagcgcatgcaagagcagctgagtgcagcaactgctgaaatggtgatgctgtcgactgaggagactgagaagaagatgaaacaggcaacccacaaagatggaagcactaatggttcagcaaaagaaatccctaatgacaagcctgccgtcactaagcctagtccctatgaagaactgattggagacatcaaggctagcctaggaagtgctccgacccctacccagctcaaggctgtgctggcctcatcaacccttcctccccaggacgtgatgaatgctctcctggaggctctctttggtggtgtgggtaagggattcaccaaagaggttgtgaagaacaagaagtaccttgcagttgctgtgccagatgagggtgcccagacccttctggttcaggccattgaggcttttggtgggaagtgcaaccctgaggcgctgaaggaggttcccgttgtcctcaaagccctctacgatggagatatcctggacgaggaaaccattgtggactggtacaatgatgctgtcgcagctgggaaggactcccaggttgtcaagaatgccaagccgttcgtcgagtggctccagagtgccgagtctgatgaagagggtgacgacgagtgaagaggccacgctgctctactgctaatggccgaacttgataatattatttcaataagtttgttttgcttgcctggtgtcggtgtttaaaactgttaattgtcgtgtggcgcagcatactcttctgttgctgcatgtgtcgtcgtcagtttggttgtctgttggatgtcacagtttattatggattgctactatacaagtatttgtttcggatgtgttgtataacctttcgggatgtaacattttatgatt

SEQ ID NO: 17973 - protein, 451 aa, Zea mays subsp. mays
MALQNIGASNRDDAFYRYKMPRMITKIEGRGNGIKTNVVNMVDIAKALARPASYTTKYFGCELGAQSKFDEKTGISLVNGAHDTAKLAGLLEVFIKKYVQCYGCGNPETEILISKTQMISLKCAACGFVSDVDMRDKLTTFILKNPPEQKKGGKDKKAMRRAEKERLKEGEAADEEQKKLKKDAKKKGSKDSTAKGLKKKATTATGSDEDHSSSPTRSHDGDKAAADDDDDDVQWQTDTSIEAAKQRMQEQLSAATAEMVMLSTEETEKKMKQATHKDGSTNGSAKEIPNDKPAVTKPSPYEELIGDIKASLGSAPTPTQLKAVLASSTLPPQDVMNALLEALFGGVGKGFTKEVVKNKKYLAVAVPDEGAQTLLVQAIEAFGGKCNPEALKEVPVVLKALYDGDILDEETIVDWYNDAVAAGKDSQVVKNAKPFVEWLQSAESDEEGDDE

SEQ ID NO: 17974 - DNA, 2042 bp, Glycine max
  CDS (455)..(1774)
tacggctgcgagaagacgacagaagggtatggctgcgagaagacgacagaaggggacagcgccgcctcatctcttctgctctctcattacgctctttcctccgatctcaggtgttgtttaagcttcctgtgttggcttggtatccttgcaagttcttctgtagcagattccaaggtgaaggtgtcacgttaaagtttctttcatgtttgaacaggctactatccatttgggagcaactgagctgcttggattgtatttttcttcttctagaaaaaattacagaccctcaccacccagacttagttgtatgaacggttggccaccttccattatccttgaaggagattgttcaaggatacaggttaccttagaggctgaaatcacagctgcgtataatttgaattccagcatttgctgcctctgaatatctctggaactttgtaagtcaacaaacatggctttacagaacattggtgctgcaaacagtgatgatgccttctacaggtataagatgcctaggatgattaccaaaattgagggcagaggtaatggcatcaaaactaatgttgtcaatatggttgacattgcaaaggcactggcaaggcctgcgtcttacacgaccaagtattttggttgtgagcttggggcccagtcaaaatttgatgagaagaccggcacttctcacgtcaatggagcacacgatactgctaagcttgctggccttcttgagaacttcattaagaaatatgtccagtgttatggttgtggaaatcctgaaactgagatcataattactaagaatcaaatgatccagctgaaatgcgcagcttgtggttttgtgtctgatgttgatatgagagacaagctgactaccttcatcattaagaaccctccagaagttaagaaaggatccaaagacaagaaggccatgaggagagctgagaaggagagactgaaggaaggtgaattagctgatgaggaacagaagaaagtgaagaaagaggttaagaagaaaggctcttcatcttctaaggatggcactaaatccacctcttcaaagaagaaagcaagtggctctgatgaagaccgcacttcacctactcacagtcaaattgatgagaaagaggaggctctagatgaggatgatgacgatgatgtgcaatggcagacagatacgtcacttgatgctgctcgtcaacgtatccaagaacaattaagtgctgtgacagctgatatggttatgctttctacagatgaaccagagaagaaaaaagaagcaagtaatggaaatgatggttctcagaatggtaactcaatgcactgcaggaccttggttggtgaagtgaaagcaaatttgaagaaaggtgttggagcaaatgaattgctgtcgcaacttgcagcacatcctgtacctgctcaagaaaagatgagtgctctggttgaagctttgttcgagggaactgagaaaggttttgctaaagaagctgataaaaagaagaactacttttctgttgctgttgcggatgagggatcccagccgttgttgcttcatgctattgaagagttttcttgcaagtctacttcaaatgctttgaaggaggttgccctggttctaaaggcactctacgatgctgatgtgttagaggaagaacacatagtgcagtggtatcaaaagggactgaagggtgataacaagaactctaggatttggaagaatgctcaacctttcattgattggcttcagaatgcagaatcagaaaccgaggaagaataatttgtcctacattctccgttacttatgtttgcttgcttgtgttatgtcctttatttccaattaagggtcttgttggccccatgtgttgttcaactactatacttgctaaaaacttggtgtgaggggtgcatggttgctggactagtatagcatgtacgcgtcagtgagttttgtgttgtgttgttctaatgtattttggtttttggttggtgatgattatgttttctgttttaataaaacgtgtcttgataatataatgctgtttttc

SEQ ID NO: 17975 - protein, 439 aa, Glycine max
MALQNIGAANSDDAFYRYKMPRMITKIEGRGNGIKTNVVNMVDIAKALARPASYTTKYFGCELGAQSKFDEKTGTSHVNGAHDTAKLAGLLENFIKKYVQCYGCGNPETEIIITKNQMIQLKCAACGFVSDVDMRDKLTTFIIKNPPEVKKGSKDKKAMRRAEKERLKEGELADEEQKKVKKEVKKKGSSSSKDGTKSTSSKKKASGSDEDRTSPTHSQIDEKEEALDEDDDDDVQWQTDTSLDAARQRIQEQLSAVTADMVMLSTDEPEKKKEASNGNDGSQNGNSMHCRTLVGEVKANLKKGVGANELLSQLAAHPVPAQEKMSALVEALFEGTEKGFAKEADKKKNYFSVAVADEGSQPLLLHAIEEFSCKSTSNALKEVALVLKALYDADVLEEEHIVQWYQKGLKGDNKNSRIWKNAQPFIDWLQNAESETEEE

SEQ ID NO: 17976 - DNA, 2168 bp, Glycine max
  CDS (437)..(1762)
cggtccggattcccgggtcgacccacgcgtccggcacagcacagcgcagcgccgcctcaacatctcaactttcccttcgatctcattctcaggtgttgttgaagcttcctgtgttggcttggtatccctgcaagttctgctgtagcagattccaaggtgaaggtgtcacgttaaagtttctttcatgtttgaacaggctactatccatttgggagcaactgagctgcttggagagtatttttcttcctctaggaaaaattacagaccctcaccacagagacttagttgtatgaacggttggccaccttccattatccttgaaggagattgttcaaggatacagactacctttgaggttgaaattgcggctgcatataatttgaattccagcattttctgcctctgaatatctctggaactttgtaagtcaacaaacatggctttacagaacattggtgctgcaaacagtgatgatgccttctacaggtataagatgcctaagatgattaccaaaattgagggcagaggtaatggcatcaaaactaatgttgtcaatatggttgacattgcaaaggcattggcaaggcctgcgtcttacacgaccaagtattttggttgtgaacttggggcccagtcgaaatttgatgagaagaccggaacttctcacgtcaatggagcacatgatactactaagcttgctggccttcttgagaacttcattaagaaatatgtccagtgttatggttgtggaaatcctgaaactgagatcataatcactaagaaccaaatgatccagctgaaatgcgctgcttgtggttttatgtctgatgttgatatgagagacaagctgactaccttcatcattaagaaccctccagaagttaagaaaggatccaaagacaagaaggccatgaggagagctgagaaggagagacagaaggaaggtgaattagctgatgaggaacagaagaaagtgaagaaagaggttaagaagaaaggctcttcatcttctaaggatggcactgctaaatcaacctcttctaagaaaaaagcaagtggctctgatgaagaccgcacttcacctactcacagtcaaattgacgagaaagaggaggctccagatgaagatgatgacgacgacgtgcaatggctgacagatacatcacttgatgctgctcgtcaacgtatccaagaacagttaagtgctgtgacagctgatatggttatgctttctacagatgaaccagagaagaagaaaaaaacagtaagtaacggaaatggtggttctcacaatggtaactcaatgcactacgggaccctggttggtgaagtgaaagcaaatttgaagaaaggtgttggggcaaatgaattgctgtcccatcttgcagcacttcctgcacctgctcaagaaaagatgagtgcactggttgaagctctatttgatggaattgataaaggttttgctaaagaagctgataagaagaagaactactttgctgctgctgttgccgaggagggatcccagctgttattgcttcatgctattgaagaattttcttgcaagtctacttccaatgctttaaaggaggttgccctggttctaaaggcattctacgatgctgatgtgttggaggaagagcacatagtgcagtggtatcaaaagggactgaagggcgataacaagaactctaagatttggaagaatgctcaacctttcattgattggcttcagagtgcagaatcagaaaccgaggaagaataattttcccatattctccgtttcttatgtttgcttgcttttgtcatgtcctttatttccaataaaagggtcttgttggccccatgcgttgtggaactactatacttgtctgaagggtgtatgcttgctggactagtatagcatgtatgcgtcagtgagttttgtgatgtgtggttctaatgtattttggttattggttgtttatgattatgttttatattttaataaaacgtgtcttgataatattatgctgttttctattcatgatttttcaaacatgtggttgatacgaacatcctctagctgcgtagggaattactataagacagattacaatgtcttttttcttatacccctattagttttgctggattgtttgggaaggttttgattggggaggcttccgaca

SEQ ID NO: 17977 - protein, 441 aa, Glycine max
MALQNIGAANSDDAFYRYKMPKMITKIEGRGNGIKTNVVNMVDIAKALARPASYTTKYFGCELGAQSKFDEKTGTSHVNGAHDTTKLAGLLENFIKKYVQCYGCGNPETEIIITKNQMIQLKCAACGFMSDVDMRDKLTTFIIKNPPEVKKGSKDKKAMRRAEKERQKEGELADEEQKKVKKEVKKKGSSSSKDGTAKSTSSKKKASGSDEDRTSPTHSQIDEKEEAPDEDDDDDVQWLTDTSLDAARQRIQEQLSAVTADMVMLSTDEPEKKKKTVSNGNGGSHNGNSMHYGTLVGEVKANLKKGVGANELLSHLAALPAPAQEKMSALVEALFDGIDKGFAKEADKKKNYFAAAVAEEGSQLLLLHAIEEFSCKSTSNALKEVALVLKAFYDADVLEEEHIVQWYQKGLKGDNKNSKIWKNAQPFIDWLQSAESETEEE

SEQ ID NO: 17978 - DNA, 2234 bp, Zea mays
  CDS (467)..(1822)
aacctaggtctgtggttgatccccaacacctcctgccctcctataaaagccgcccgcctccgtttctcgcccgcaccgcatcgcctcgccgctgttccccgcaacctatcgacccaatctcgtccgacccggcgcgtcgtcccctccagatctccgtcgccctctccaggtagcagaaactgttctgctgcagtctgacaaagtggagggcttaggagcttctgcttcttttatgtctgaacaatctttgctttatttgggattgttgggagagtactctcgtgcaacgaggaaaaggcacaaggttccgtcccactgcatgcgtcaagagcctgtctggttttcttgttctgatttgtcatttgctggtgctcagagccggcttggtttcctcgaaggatcagcaactactcttgattgtggactttgtcacatctgatatcaacttcatagatttttatccaagatggcgctgcaaaacattggtgcttcaaacagggatgatgccttctacaggtacaagatgcccagaatgattactaagatagaaggccgtggtaatggtatcaagacaaatgttgtgaacatggttgacatagcaaaagcacttgccaggccagcttcgtacaccaccaagtactttggatgtgagcttggtgcacagtccaaattcgatgagaagacagggatttccttggttaatggggctcatgatactgcaaagctggctggtctccttgaggtattcatcaagaagtatgtccaatgttatgggtgtgggaatcctgagactgagattctcatctcaaagacccagatgatatcactgaaatgtgcagcctgtgggtttgtctcagatgttgatatgagggacaagctcacaaccttcatcctgaaaaacccaccagaacagaagaagggcggaaaagacaagaaggccatgaggagagctgagaaggaacgcctgaaggaaggtgaggctgctgatgaggagcagaagaaactgaagaaggatgcaaagaagaagggttccaaggattccactgctaagggtttgaagaagaaggctactactgctactggctctgatgaggaccactcatcctctccaactcgcagccatgatggtgacaaagcagctgcagatgatgatgacgatgatgtccagtggcagactgacacttcaattgaggctgcgaagcagcgcatgcaagagcagctgagtgcagcaactgctgaaatggtgatgctgtcgactgaggagactgagaagaagatgaaacaggcaacccacaaagatggaagcactaatggttcagcaaaagaaatccctaatgacaagcctgccgtcactaagcctagtccctatgaagaactgattggagacatcaaggctagcctaggaagtgctccgaccccttcccagctcaaggctgtgctggcctcatcaacccttcccccccaggacgtgatgaatgctcccctggaggctctctttggtggtgtgggtaagggattcaccaaagaggttgtgaagaacaagaagtaccttgcagttgctgtgccagatgagggtgcccagacccttctggttcaggccattgaggcttttggtgggaagtgcaaccctgaggcgctgaaggaggttcccgttgtcctcaaagccctctacgatggagatatcctggacgaggaaaccattgtggactggtacaatgatgctgtcgcagctgggaaggactcccaggttgtcaagaatgccaagccgttcgtcgagtggctccagagtgccgagtctgatgaagagggtgacgacgagtgaagaggccacgctgctctactgctaatggccgaacttgataatattatttcaataagtttgtttgttttgcttgcctggtgtgtcggtgtttaaaactgttaattgtcgtgtggcgcagcatactcttatgtggctgcatgtgtcgtcgtcagtttggttgtctgttgggtgtcacggtttatatcttcttatggattgctactatacaagtatttgtttcggatgtgttgtataacctttcggggtgtaacattttattattgcactgttgcttctctaccttataagggttgaggattatgaaatccttagccggtaaaaaaaaaaaaaaaaaaaaaaaaaaaaaaaaaaaaaaaaaaaaaaaaaaagaaaaaaaaaaaaaaaaaaaaaaaaaaaaaaaactcgagagggg

SEQ ID NO: 17979 - protein, 451 aa, Zea mays
MALQNIGASNRDDAFYRYKMPRMITKIEGRGNGIKTNVVNMVDIAKALARPASYTTKYFGCELGAQSKFDEKTGISLVNGAHDTAKLAGLLEVFIKKYVQCYGCGNPETEILISKTQMISLKCAACGFVSDVDMRDKLTTFILKNPPEQKKGGKDKKAMRRAEKERLKEGEAADEEQKKLKKDAKKKGSKDSTAKGLKKKATTATGSDEDHSSSPTRSHDGDKAAADDDDDDVQWQTDTSIEAAKQRMQEQLSAATAEMVMLSTEETEKKMKQATHKDGSTNGSAKEIPNDKPAVTKPSPYEELIGDIKASLGSAPTPSQLKAVLASSTLPPQDVMNAPLEALFGGVGKGFTKEVVKNKKYLAVAVPDEGAQTLLVQAIEAFGGKCNPEALKEVPVVLKALYDGDILDEETIVDWYNDAVAAGKDSQVVKNAKPFVEWLQSAESDEEGDDE

SEQ ID NO: 17980 - DNA, 2337 bp, Zea mays
  CDS (416)..(1780)
acctcgaggccggccgggccgggaccgcatcgcctcgccgctgttccccgcaacctatcgacccaatctcgtccgacccggcgcgtcgtcccctccagatctccgtcgccctctccaggtagcagaaactgttctgctgcagtctgacaaagtggagggcttaggagcttctgcttcttttatgtctgaacaatctttgctttatttgggattgttgggagagtactctcgtgcaactaggaaaaggcacaaggttccgtcccactgcatgcgtcaagagactgtctggttttcttgttctgatttgtcatttgctggtgctcaaagccggcttggtttcctcgaaggatcagcatctactcttgattgtggactttgtcgcatctgatatcaacttcataaatctttatccaagatggcgctgcaaaacattggtgcttcaaacagggatgatgccttctacaggtacaagatgcccagaatgattaccaagatagaaggccgtggtaatggtatcaagacaaatgttgtgaacatggttgacatagcaaaagcacttgccaggccagcttcctacacaaccaagtactttggatgtgagcttggtgcacagtccaaatttgatgagaagacagggatttccttggttaatggggctcatgatactgcaaagctggctggtctccttgaggtattcatcaagaagtatgtccaatgttatgggtgtggaaatcctgagacagagattctcatctcaaagacccagatgatatcactgaaatgtgcagcctgtgggttcgtctcagatgttgatatgagggacaagctcacaaccttcattctgaaaaacccaccagaacagaagaagggcggaaaagacaagaagaaggccatgaggagagctgagaaggaacggctgaaggaaggtgaggctgctgatgaggagcagaagaaactgaagaaggatgcaaagaagaagggtgcatcttccaaggattccactgctaagggtttgaagaagaaggctactactgctactggctctgatgaggaccactcatcctctccaactcgcagccatgatggtgacaaagcagctgcagatgatgatgacgatgatgtccagtggcagactgacacttcaattgaggctgcgaagcagcgcatgcaagagcagctgagtgcagcaactgctgaaatggtgatgctgtcgactgaggagactgagaagaagatgaaacaggcaacccacaaagatggaagcactaatggttcagcaaaagaaatccctaatgacaagcctgccgtcactaagcctagtccctatgaagaactgattggagacatcaaggctagcctaggaagtgctccgacccctacccagctcaaggctgtgctggcctcatcaacccttcctccccaggacgtgatgaatgctctcctggaggctctctttggtggtgtgggtaagggattcaccaaagaggttgtgaagaacaagaagtaccttgcagttgctgtgccagatgagggtgcccagacccttctggttcaggccattgaggcttttggtgggaagtgcaaccctgaggcgctgaaggaggttcccgttgtcctcaaagccctctacgatggagatatcctggacgaggaaaccattgtggactggtacaatgatgctgtcgcagctgggaaggactcccaggttgtcaagaatgccaagccgttcgtcgagtggctccagagtgccgagtctgatgaagagggtgacgacgagtgaagaggccacgctgctctactgctaatggccgaacttgataatattatttcaataagtttgttttgcttgcctggtgtgtcggtgtttaaaactgttaattgtcgtgtggcgcagcatactcttatgtgtcgtcgtcagtttgtttgtgtcgtcagtttggttgtctgttggatgtcacggtttacttatgttcttatggattgctactatacaagtatttgtttcggatgtgtcatgtgttgtataacctttcgggatgtaacattttattattgcactgttgcttctctaccccgctatgaagaccatgtgtgaagctctggtctcgaggtgcatgtcagcatgtgagtcgtcctttcttccatgttgattgtatagagatgaactctagatatagcgttcgacgaggttcatctaaattttagaggcttatttagcgggtgttattggacatgtttagtacgccttcgatcggaggagaggaggaagcggtttgttgggtgagaaaagaacatagttaaaaagaaataataaaatatatagtttctctcggtctt

SEQ ID NO: 17981 - protein, 454 aa, Zea mays
MALQNIGASNRDDAFYRYKMPRMITKIEGRGNGIKTNVVNMVDIAKALARPASYTTKYFGCELGAQSKFDEKTGISLVNGAHDTAKLAGLLEVFIKKYVQCYGCGNPETEILISKTQMISLKCAACGFVSDVDMRDKLTTFILKNPPEQKKGGKDKKKAMRRAEKERLKEGEAADEEQKKLKKDAKKKGASSKDSTAKGLKKKATTATGSDEDHSSSPTRSHDGDKAAADDDDDDVQWQTDTSIEAAKQRMQEQLSAATAEMVMLSTEETEKKMKQATHKDGSTNGSAKEIPNDKPAVTKPSPYEELIGDIKASLGSAPTPTQLKAVLASSTLPPQDVMNALLEALFGGVGKGFTKEVVKNKKYLAVAVPDEGAQTLLVQAIEAFGGKCNPEALKEVPVVLKALYDGDILDEETIVDWYNDAVAAGKDSQVVKNAKPFVEWLQSAESDEEGDDE

SEQ ID NO: 17982 - DNA, 1778 bp, Triticum aestivum
  CDS (312)..(1616)
gcgcccgccgccatcgcctgcgacctcctgctcgagttccccccgccggcgccgaactccctgccctaggcagcagaatctctttgctacaatctgacaaagtggagggcttggaagtccaagtttctttcatgtctggacaacactcgctgtacttcgaatcagttggattgccgggagagtgttctcgtacaacaagaaaaagggataagcttctttcccctcacttgccactgttcaaggtcagctcaaaggcggctcttgcttctgaatttggacgaggctgataggatcagaaagcttgagccaagatggcgctgcagaacattggcgctttgaacaaggatgacgccttctacaggtacaagatgcccaaaatgttaacaaaaatagaaggccatggtaatggcatcaagacaaacatcgtgaacatggttggcatagcaaaagcgcttgccaggccagcttcctacacaacaaagtactttggctgtgcgcttggggcacagtctacatttgatgacaagacaggggtttgcatagtcaatggtgcccatgacactgcaaaactggctggccttcttgagaacttcatcaacaagtatgttcagtgttataagtgtggcaaccctgaaacagaggttgtcatctccaagaaacagacgctatctctgaaatgtgctgcatgtggcttcatctcggatgttaacatgagtgacaagcttgctaaattcattgtgaacaacccgccagaactgaagaagggaggcaaggacaagaaagccatgcgaagagctgagaaggagcggctcaaggaaggtcaggctgctgatgaggagatgaagaaactcaagaaggatgggaagaagaaaggtgcttcatccaaggacagcactgcaaaaggtgttgctgcaaagaaaaatgctactgctggtggttctgatgaagaacatgcaacctcgtcaacttacagtcaagctgtggactttccagctgctgcagatgacgactatgacgacgacgatgatgacggtgtggagtggcagactgacacgtcagcagaggctgcgagaaagcgcatggaggagcagctgaatgcggcgactgccgagatggtcatgcttgccaccgaagagacagaaaagaagaagcaacatgccaaaatgtctccatatgatgaactggtcgaggagatcaaggccaacgtgggcaatgctgccactccagctcagatcaaggctgtgctgtcctcctcgaccctccccgccaaggacgtgacggacgccctctttgaggcgctcttccacggtgcgggcaaggggtttgcaaaggacgtcaagaagaacaatgactaccttgctgctgccgtgcccgatgaaggagcccagatgctgctgctccaggccatcgaggcgttctgcggcaagtgcagcgccgaggccctgaaggaggtgccggtggtcctgaaatgcctgtatgatggcgacgtcctcgaggaagaagccattgtccagtggtacgatgaagctgttgctgccggcaaggcctcccaggttgtgaagaatgccaggccgtttgtggtctggctccaggtcgccgaaccggacgaggagtgaagaggccgtgctgcttgatcccgtttatacgctctatctttttaccgcctacttgctttaggtatcttttcatagtgtttgaagtgtccattttttggatcagtattttaagtttcagacgttaaacacttgagttgttatggtcgaaaaaaaaaaaaaaaa

SEQ ID NO: 17983 - protein, 434 aa, Triticum aestivum
MALQNIGALNKDDAFYRYKMPKMLTKIEGHGNGIKTNIVNMVGIAKALARPASYTTKYFGCALGAQSTFDDKTGVCIVNGAHDTAKLAGLLENFINKYVQCYKCGNPETEVVISKKQTLSLKCAACGFISDVNMSDKLAKFIVNNPPELKKGGKDKKAMRRAEKERLKEGQAADEEMKKLKKDGKKKGASSKDSTAKGVAAKKNATAGGSDEEHATSSTYSQAVDFPAAADDDYDDDDDDGVEWQTDTSAEAARKRMEEQLNAATAEMVMLATEETEKKKQHAKMSPYDELVEEIKANVGNAATPAQIKAVLSSSTLPAKDVTDALFEALFHGAGKGFAKDVKKNNDYLAAAVPDEGAQMLLLQAIEAFCGKCSAEALKEVPVVLKCLYDGDVLEEEAIVQWYDEAVAAGKASQVVKNARPFVVWLQVAEPDEE

SEQ ID NO: 17984 - DNA, 1392 bp, Bombyx mori
  CDS (1)..(1392)
atgggttccttaaacgtgaaccgtaacgtctccgatgcgttctaccggtacaagatgccgcggatatgcgccaaggtcgaagggaaggggaacggcatcaagacggtcatcgtcaacatgcctgaagtcgccaaggcgctggggagaccagccacgtacccaacaaagtactttggttgtgaattgggtgcccagactcagtttgacttcaagaatgagcgtttcattgtcaacggaagccatgactcatctaaacttcaagatctattggacggatttattcgtaaattcgtgctgtgccctgagtgcgacaaccccgagaccgagctgatagtctccacgaagcggaacaccatctcccaaggatgcaaggcctgcggttaccatggacagcttgacttcaatcacaagttgaatacttttatactcaagaacccgcctgccaatgatccggctgtgcaaggctcttcactgactgagggcaatcgtggaaaacgctcgaagcgctctggtcctggatccaacaacactgcgaccaacggcagccacgagggacaagaaactgaagctaaaaatgaaccggaagcggtgtcgagtcctacagctaccgcagctccgagcactaagaaggagaagtccaagaaaactggcgatgatggcgatgaggacgacgacggctggaccgtggatgtcagcgaggaggctgtgcgggccaggatgcaagatctaactgaaggagctaagatcataacattgtcagaagacagtgagaagaatgagaagcagcggatggatctgttctatgcatttttgaagcaacgagcagccagcggtcaggtgcagggaaccaaagccatctctgagatcctgcacgaggccgagagattggaagtgaagtcgaaggcgccgctggtgctgttcgaggtgctggtgaacgcggcgtcggtgggcggcgacgtgaagaagcaccgcgctctgctgctgcgcttcacgcgccaagacccgcgcgcgcagcgagccgccctgcacgccctcaccgcgctcgcgcaccaccacgccgcgctgctgccgcgcgtgcccgccgtgctcaagcttctttacgacgaagacatcgtagaagagaaggctatactggagtgggctagcaaaccatcgcgcaaatacgcatccaaggaagtcgtagccgaagtgaggaaacgggcccaacccttcctcgactggctgcagcaggccgaggaggactcgagtgacgacgacgacgaggaggaagatatcgagatcgagtacgacgaccgcgccaaggcgacccccatcaaggccgtggctactgcggccaacaacaaaccgaagcaggaagaagacgatgacgatttcgatatcgacgccatttaa

SEQ ID NO: 17985 - protein, 463 aa, Bombyx mori
MGSLNVNRNVSDAFYRYKMPRICAKVEGKGNGIKTVIVNMPEVAKALGRPATYPTKYFGCELGAQTQFDFKNERFIVNGSHDSSKLQDLLDGFIRKFVLCPECDNPETELIVSTKRNTISQGCKACGYHGQLDFNHKLNTFILKNPPANDPAVQGSSLTEGNRGKRSKRSGPGSNNTATNGSHEGQETEAKNEPEAVSSPTATAAPSTKKEKSKKTGDDGDEDDDGWTVDVSEEAVRARMQDLTEGAKIITLSEDSEKNEKQRMDLFYAFLKQRAASGQVQGTKAISEILHEAERLEVKSKAPLVLFEVLVNAASVGGDVKKHRALLLRFTRQDPRAQRAALHALTALAHHHAALLPRVPAVLKLLYDEDIVEEKAILEWASKPSRKYASKEVVAEVRKRAQPFLDWLQQAEEDSSDDDDEEEDIEIEYDDRAKATPIKAVATAANNKPKQEEDDDDFDIDAI

SEQ ID NO: 17986 - DNA, 1353 bp, Oryza sativa (japonica cultivar-group)
  CDS (1)..(1353)
atggctctgcaaaacattggtgcttcaaaccgtgatgatgccttctacaggtataagatgcccaggatgatcaccaaaatagaaggccgtggcaatggcatcaagactaacattgtgaacatggtggatatagcaaaagccctagccaggcctgcttcctacacaacaaagtactttggatgtgagcttggtgcacagtctaaatttgatgagaagactggtatttccttggttaatggggcacatgatactgctaagctggctggtctccttgagaacttcatcaagaagtatgtccaatgctatggatgtggcaaccctgagactgaggtcctaatctccaagacccagatgattacactgaagtgtgctgcctgtggttttgtgtcagatgttgacatgagggacaagctcacaacttttatcctgaagaatccacctgaacagaagaagggtgctgggaaagacaagaaggcaatgaggagagctgagaaggagcgtctaaaggaaggtgaggctgctgatgaggagatgaagaagctaaagaaggaagcaaagaagaaaggtgcatccaaggaaagtacctcctctaaaagtggtgctgggaagaagaaggctgctgctggctctgatgaggatcattcaaattcaccaactcgcagccatgatggtgacaatgtggctgcagatgaggatgatgatgatgatgtccagtggcagactgacacttcgttggaggctgcaaaacagcgcatgcaggaacaactgagcgctgcaactgctgagatggtaatgctgtccactgaagaacctgagaagaagaagaagcatgaggcctcacacaaggagggtgcctccaacggaagtacaaaacatgtggttgaagaggctaaaagcagtccttatgatgatctggtcaaggagatgaaggataacttgagcaagggtgccaatgctgttcagctcaagggtctgatgacttcctcagcgctgccaccccaggatgctatgaatgctctttttgatgcactctttggcggcctcggcaaaggattcgccaaggaggttgtgaagaagaagaaattcctcgctgctgctgtgcctgatgaagcctcccagatggtcctgctgcaagcgctggtggccttcggcgccaagtcaagccccgaagctgtgaaggaggtgccgattgttctcaaggccctgtatgatggggacgtcctggatgaagaagtgataactcagtggtataatgaatctgttgctggtggcaaggagtcccaggtggtgaagaatgccaagccgttcgtggagtggctccagagcgcggattctgaatctgaggaagagtga

SEQ ID NO: 17987 - protein, 450 aa, Oryza sativa (japonica cultivar-group)
MALQNIGASNRDDAFYRYKMPRMITKIEGRGNGIKTNIVNMVDIAKALARPASYTTKYFGCELGAQSKFDEKTGISLVNGAHDTAKLAGLLENFIKKYVQCYGCGNPETEVLISKTQMITLKCAACGFVSDVDMRDKLTTFILKNPPEQKKGAGKDKKAMRRAEKERLKEGEAADEEMKKLKKEAKKKGASKESTSSKSGAGKKKAAAGSDEDHSNSPTRSHDGDNVAADEDDDDDVQWQTDTSLEAAKQRMQEQLSAATAEMVMLSTEEPEKKKKHEASHKEGASNGSTKHVVEEAKSSPYDDLVKEMKDNLSKGANAVQLKGLMTSSALPPQDAMNALFDALFGGLGKGFAKEVVKKKKFLAAAVPDEASQMVLLQALVAFGAKSSPEAVKEVPIVLKALYDGDVLDEEVITQWYNESVAGGKESQVVKNAKPFVEWLQSADSESEEE

SEQ ID NO: 17988 - DNA, 1272 bp, Strongylocentrotus purpuratus
  CDS (1)..(1272)
atgtctctcaacgtcaacagagcggtcactgaccagttctaccgctacaagatgccacgtctcctagccaaggttgagggaagtgggaatggcatcaaaactgtcatcatcaacatggtggagattggcaagtccttgtgtagaccacctacataccctacaaagttttttggctgtgagcttggcgctcaaacccagtttgattttaagaataatcgcttcattgtaaatggctcgcatgacgctaacaagcttcaggacctgctagatatcttcatcaagaaatatgtgctgtgccccgagtgtgacaaccccgagacctttctgattgtgaagaaaggcaacattggacagcgttgcattgcctgcggtcatgtgggtatcgtggaccttcgtcacaagctgagtaccttcatcattaagaatcctccagagcatgacccaaggagcgttggatcttccaagacggaacgcaaggggaagaagtcccagaacaaacagcagaacggagagggtgatgcctgtcaggaggaggaagattttggagatgatgatgatgaggagtggtcagttgatacgagtgaagaggctattcgtgagagaatgggagacttgagcggtggtgctaagggcttgaccctcaacgatgatttagagaagacaggacaggagaggctggacatcttctataaatttgtcaaggccaagaaagcaggaggtgatttgaagggatgcgacaaagagtttctggtagaagctgagcgtcttgatgtgaaggacaaagggcctcttattctggccgagcttcttcttgatgaacaggtgttgacgcagctcaagcagcaccagtatcatttcttgaggcttttgaatgacaaccctaagggtcagaagtatttcctaaatggtcttgaacagctgatagcactgcatgccaagtctctggtccctaaggtaccatcgatactcaaggccgtctatgaccttgacctcatcgatgaagatgtcatcctcacatgggctgctaagccgtccaagaagtacgtgtcgaaagaggtgatgcaacagatccatgagaaagcagctccattcatcaaatggctcaaagaagcagaagaagaggagtccagtgaagatgaagtcgtggttgctttcagtaaccgaggaggggccggtctgaaggtggaaactactgaacccaaaaaggcttctgctgctcaaccagctacccctgctgcaaaggaagacgactttgacatcgatgacatctaa

SEQ ID NO: 17989 - protein, 423 aa, Strongylocentrotus purpuratus
MSLNVNRAVTDQFYRYKMPRLLAKVEGSGNGIKTVIINMVEIGKSLCRPPTYPTKFFGCELGAQTQFDFKNNRFIVNGSHDANKLQDLLDIFIKKYVLCPECDNPETFLIVKKGNIGQRCIACGHVGIVDLRHKLSTFIIKNPPEHDPRSVGSSKTERKGKKSQNKQQNGEGDACQEEEDFGDDDDEEWSVDTSEEAIRERMGDLSGGAKGLTLNDDLEKTGQERLDIFYKFVKAKKAGGDLKGCDKEFLVEAERLDVKDKGPLILAELLLDEQVLTQLKQHQYHFLRLLNDNPKGQKYFLNGLEQLIALHAKSLVPKVPSILKAVYDLDLIDEDVILTWAAKPSKKYVSKEVMQQIHEKAAPFIKWLKEAEEEESSEDEVVVAFSNRGGAGLKVETTEPKKASAAQPATPAAKEDDFDIDDI

SEQ ID NO: 17990 - DNA, 1362 bp, Nasonia vitripennis
  CDS (1)..(1362)
atgggtagcgttaacgtaaatcgtggcgtcagcgatgccttctatcgctacaaaatgccgcgcattcaggcgaaggtcgagggcaaaggcaacggcattaagactgtcatcgtcaatatggttgaagtcgccaaggctatcggccgcccagctacgtatccgaccaagttctttggatgcgagctgggtgctcagacccagtttgacttcaaaaatgagcgttttatcgtcaacggcagtcacgacgcctccaaactgcaggatttgctcgacggcttcatcaggaagtacgtgctctgccccaattgcgacaaccccgagaccgagttgctggttaacgcgaagaagggtactatcgcgcagggttgcaaggcttgcggtcatcacggcatgctagagagcaatcacaagctgaacacctatatcctgaaaaatccaccgagccttgatcctgctgctcagggtagctctctcactgagggaaagcgcggaaaaagatccaagaaacccaacggtgatgctaacggcgatcgctcaggctcgcctgaaaatgataacactagcaccaccgatatcgttgtcgaggcgcccgcgaaattcggtaggtcttacttcgataaggacgacgatgacgacggcaactgggctgtagatacgactgaggaagctgtgcgtgcacgtcttcaagatctaaccgatggcgccaaaggcatgactatcagcgaggacctcgataaaaccgagaaagagcgcatggatattttctacaagctggtcaagtgccgtcgcgatgctggccaactcgacaatcataaggagctgctagccgaggctgaacgtctcgaaatcaagaccaaggctccccttattttggccgagttgctcttcgatcagcacattgctgcccaagttaagaagtatcgaccgctgctgttgcgtttcacccacgaggacgttaaggcccagaagtatctcattcggggtattgagcagatcatcgcgctgcacaaggacgtgctgatgtcgaaggtgcctggaattttgaaacttttctatgactatgatatcttggaagagaaggctctatttgaatgggctagcaaggttagcaagaaatacgtctctaaggatcttgctcaagaaattcatgataaagctgcaccatttctaacatggctcaaggaggctgaagaagaagaatccgaatctgatgaggaagacgatgatctggagattgagtatgatgacagagcgaaacaacctttgaaagagcagcaacaacagcagaagcagcagacgcagaaaccagtggttgatgacgattctgaggaaggagacgatgttgacattgatgccatttaa

SEQ ID NO: 17991 - protein, 453 aa, Nasonia vitripennis
MGSVNVNRGVSDAFYRYKMPRIQAKVEGKGNGIKTVIVNMVEVAKAIGRPATYPTKFFGCELGAQTQFDFKNERFIVNGSHDASKLQDLLDGFIRKYVLCPNCDNPETELLVNAKKGTIAQGCKACGHHGMLESNHKLNTYILKNPPSLDPAAQGSSLTEGKRGKRSKKPNGDANGDRSGSPENDNTSTTDIVVEAPAKFGRSYFDKDDDDDGNWAVDTTEEAVRARLQDLTDGAKGMTISEDLDKTEKERMDIFYKLVKCRRDAGQLDNHKELLAEAERLEIKTKAPLILAELLFDQHIAAQVKKYRPLLLRFTHEDVKAQKYLIRGIEQIIALHKDVLMSKVPGILKLFYDYDILEEKALFEWASKVSKKYVSKDLAQEIHDKAAPFLTWLKEAEEEESESDEEDDDLEIEYDDRAKQPLKEQQQQQKQQTQKPVVDDDSEEGDDVDIDAI

SEQ ID NO: 17992 - DNA, 1383 bp, Anopheles gambiae str. PEST
  CDS (1)..(1383)
atggctaccgtgaacgtgaatcgcaatgtgaccgacatcttctaccggtacaagatgccccgcatcaacgcgaaggtagagggtaagggaaacggcatcaagacggtgatcgtgaacatggccgatgtggcgcgcgcgatcggccgcccggcaacctacccgacgaagtactttggctgcgagctgggagctcaaacgcaatttgaccataagaacgaacgcttcattgtgaacggttcgcacgatgcggccaagctgcaggacctgctcgacgggttcatccgcaagtttgtgctgtgcccggagtgcgacaacccggagacggatctgatcgtctcgtccaagaagggtacgatctcgcagggctgcaaggcgtgcggcttccacgggccgctcgaggtgaaccacaaggtgaacacgttcatcatcaagaacccgccgaacgtgaacccggccagccagggcgcgtccctgaccgagggcaagcgcagcaagcgcaccaagaagggcgaaaacggcgacgactcgacggccgggctgaacaccacggcgaacggtggcggtgagaacggcaccaacggcgagcagaacggcgacgccgactcgccgaacgggtcgattgcgggcggcgacgtggacgacgtcagctggacggtcgacacgtccgaggaggcggtgcgggcccgcatgcaggatctgaccgacggcgcgaagaacatgaccgtgtcggacgacttcgacaagacggagaaggagcggatggacatcttctacgagctggtgaagcgcaagcgggacgcgaacgagctggacaacgtgcaggtgcacaaggagctggtgaccgaggcgagccggctcgacatccagtcgaaggcgacgctcgtgctggtggagctgctgttcaccgccaacatcacgcaggaggcgcgcaagtaccgcaacctgctgctgcgcttcacgcacgaggacaagaaggcgcagaagtactttatcggcgggctggagcagacgatctcgctgcacgcggacaagctgatggacaaggtgcccgggctgctgaagctgttctacgacagcgacgtgctggacgagaaggtcatcctcgactggtcgcagaaggtgagcaagaagtacgtctcgaaggagatcgcggcccagatccacgagcgcgccaaacccttcgtccagtggctgcaggaggcggaggaggaggaatcgtccgaggaggacgacgattccgaggtcgagatcgagtacgacgatcgggcgaaggtggactcgctgcgcaaggagccggccaaaccggacccgaagaagctggcccgcgcctcgctcgaggaggatgacgaggatggcgatgatctgaacattgatgatatctaa

SEQ ID NO: 17993 - protein, 460 aa, Anopheles gambiae str. PEST
MATVNVNRNVTDIFYRYKMPRINAKVEGKGNGIKTVIVNMADVARAIGRPATYPTKYFGCELGAQTQFDHKNERFIVNGSHDAAKLQDLLDGFIRKFVLCPECDNPETDLIVSSKKGTISQGCKACGFHGPLEVNHKVNTFIIKNPPNVNPASQGASLTEGKRSKRTKKGENGDDSTAGLNTTANGGGENGTNGEQNGDADSPNGSIAGGDVDDVSWTVDTSEEAVRARMQDLTDGAKNMTVSDDFDKTEKERMDIFYELVKRKRDANELDNVQVHKELVTEASRLDIQSKATLVLVELLFTANITQEARKYRNLLLRFTHEDKKAQKYFIGGLEQTISLHADKLMDKVPGLLKLFYDSDVLDEKVILDWSQKVSKKYVSKEIAAQIHERAKPFVQWLQEAEEEESSEEDDDSEVEIEYDDRAKVDSLRKEPAKPDPKKLARASLEEDDEDGDDLNIDDI

SEQ ID NO: 17994 - DNA, 1293 bp, Magnaporthe grisea 70-15
  CDS (1)..(1293)
atgtctctcatcaacgtccgccgcgacaacaaggatgttttctatcgttacaagatggagcgcctgcagaccaagatcgagggtaaaggcaacggcatcaagaccgttgtcgtcaaccttacgagcgtcgcccagtctctcgctcgccctggagcctaccttatcaagtactttggctttgagctcggtgcccagaccaacattgatcccgccgacgaccgttggatcatcaacggagctcacgatgctgccaaacttcaggactacctcgacgggtttatcaacaagtttgttctttgcaagaagtgcaagaaccctgagaccgatgtcatcatcaaggacggcaacatcagcctggactgcaaggcttgcggtgcccgctcagatgtcgaccttcgtttgaagctcagcggtttcatcctgaagaacgtgcccaagaagacgaagaaggacaaggctgagcgtaaggccgcccgcaaggccaagcagaacggcacagccaaggatggcgaaggcagcggcgaagaacactctcccgatggctctggcaaggagaacggtgacaagaacggccataatggcgccgatgatggcagtgacgatgacgatgctctcacccgcaagatcaagaatgaggctaaggagatctcctctaacggaggcggcaaggctgatgatgacgagtgggctgtcgacatgagcgctgaggccgtcaaggcccgtcagcaatcgctccctggcgagttcaagcagaagctcaacatcaatggcgaagatgaggatgaggatggcgagggaggcaacagcgtttacgaccagctcggaacctggatcctggaccaggctgccgagaagggcaacatcgacaaggttgacgacattgccatctacgtcaaggctaaggagtttggcattgagaccaagcaccgtactgttttggtgctcgtccagactcttttcaacgagaacatctgtgcacagatcaccaagcgtgccggcatgctcaagcagattgttacttctgagcgccacgagaaggccctcttgggtggtaccgagagactcattggtcaacttagcaaggacaagcctgagatgtttgacaagattgtcaagattcttcaactgtactaccaccacgatctcatttccgaagaggtcgtcaccaagtggggtacacacgcaagcaagaagtacgtggacttgtccacatccaagaaggtccgcaagtcggctgagcctttcttgaactggcttgccgaggctgaggaggaggactctgacgacgagtaa

SEQ ID NO: 17995 - protein, 430 aa, Magnaporthe grisea 70-15
MSLINVRRDNKDVFYRYKMERLQTKIEGKGNGIKTVVVNLTSVAQSLARPGAYLIKYFGFELGAQTNIDPADDRWIINGAHDAAKLQDYLDGFINKFVLCKKCKNPETDVIIKDGNISLDCKACGARSDVDLRLKLSGFILKNVPKKTKKDKAERKAARKAKQNGTAKDGEGSGEEHSPDGSGKENGDKNGHNGADDGSDDDDALTRKIKNEAKEISSNGGGKADDDEWAVDMSAEAVKARQQSLPGEFKQKLNINGEDEDEDGEGGNSVYDQLGTWILDQAAEKGNIDKVDDIAIYVKAKEFGIETKHRTVLVLVQTLFNENICAQITKRAGMLKQIVTSERHEKALLGGTERLIGQLSKDKPEMFDKIVKILQLYYHHDLISEEVVTKWGTHASKKYVDLSTSKKVRKSAEPFLNWLAEAEEEDSDDE

SEQ ID NO: 17996 - DNA, 1263 bp, Gibberella zeae PH-1
  CDS (1)..(1263)
atggctctcgtcaacgttcgccgcgatgttagcgatgctttctatcgttacaagatggagcgtctgcagaccaagatcgaaggcaaaggaaacggtattaagaccgttgttgtcaacctcagcagtgtagcagcctcactcgcccgtcccggctcctacgtcatcaagtacttcggtttcgaacttggtgctcaaaccaacattgaccccaaggacgaccgttggatcatcaacggtgcccacgatgcccccaagctccaggatcacctcgatggcttcatcaacaagtttgttctctgcaaaaagtgcaagaaccccgagaccgatgttgtgatcaaggatgaccacattaccctcgactgcaaggcttgcggtaagatcagcgatgtcgaccttcgcctcaagctcagtggctttatcctcaagaaccagcccaagaagggcaagaaggataaggccgagcgtagggctgccaagaaggcccgacagaacggcaacgctgccaatggcaccaacggtggcagtgatgaagcttctgacaacggctcaaacgagaacgccgacgaggatgctggcagtgatgatgagttccaaaaggtccaagccgaggccgctgcagctgctcaggagaacgaagtcaaggagcatgaatgggctgtcgacatgagtgaggaagctgtcaaggcccgccaggcttctctccctggcgagtttaaggcgaagctcaacattggcgatgatgacgatgaagatggtgagggcggtcccactatctacgatgaacttggtgactggatccagtcccaagctgaggagaagggtggcatcgacaaggttgagtcgatcgacatttatgtcaaggccaaggaacttggtattgagggcaagcaccgcaccgttcttgttcttgttcagactattttcgacaagaacattgttgctcaaatttccaagcgtgctagcatgctcaagcagtttgttacttctgagcgtcacgagagggctcttcttggaggcactgagcgccttgttggcggtcttggcgctgatcatcccgagatgttccagtccattgtcaagattctccagctctactaccaccacgacttgatcagcgaggaggtcgtgaccaagtggggttccaaggccagcaagaagtacactgacatctcaacctccaagaaggtccgcaaggctgctgagcccttcctgacatggctcgccgaggctgactcagaggaggagtcttctgacgaggagtaa

SEQ ID NO: 17997 - protein, 420 aa, Gibberella zeae PH-1
MALVNVRRDVSDAFYRYKMERLQTKIEGKGNGIKTVVVNLSSVAASLARPGSYVIKYFGFELGAQTNIDPKDDRWIINGAHDAPKLQDHLDGFINKFVLCKKCKNPETDVVIKDDHITLDCKACGKISDVDLRLKLSGFILKNQPKKGKKDKAERRAAKKARQNGNAANGTNGGSDEASDNGSNENADEDAGSDDEFQKVQAEAAAAAQENEVKEHEWAVDMSEEAVKARQASLPGEFKAKLNIGDDDDEDGEGGPTIYDELGDWIQSQAEEKGGIDKVESIDIYVKAKELGIEGKHRTVLVLVQTIFDKNIVAQISKRASMLKQFVTSERHERALLGGTERLVGGLGADHPEMFQSIVKILQLYYHHDLISEEVVTKWGSKASKKYTDISTSKKVRKAAEPFLTWLAEADSEEESSDEE

SEQ ID NO: 17998 - DNA, 1365 bp, Apis mellifera
  CDS (1)..(1365)
atggggagtgtaaacgtaaatcgtaacgtcagcgatgcgttttatcgctataaaatgccacggattcaagccaaagtagagggcaagggaaatggtatcaaaactgtgatcgtgaatatggttgatgtcgcgaaagcgattggaagacctgccacctatcctactaagtactttggttgcgagctcggagcacaaactcaatttgatttcaaaaacgaaagatttatagtaaatggttcgcacgatgctacgaagttgcaagatcttttggatggattcattcgcaaatatgtattatgcccggcttgcgataatcctgagaccgaattgatggtcagctcgaaaaaagggactatttcacaggggtgcaaagcgtgcggctatcacgggctactggaaagtaatcataaattgaacacctacattctaaagaacccgccgagcttgaatcctgctgttcaaggtagttctttaaccgagggtaaacgtgggaaacgttcaaaacgtgcgaatggtgaaacaactaccaccacaaccactgctactgctaatggcgatcgatctggttctccggaaaacgataccaacaccaccgacatcgtggtcgaggctcctgagaaaatggcggacgagaacggagatgatgataattgggcagtcgatgtgtcagaggaggcagtcagagcccgtctacaggacttgacagacggggcaaaaggaatgaccatcagcgatgatcttgacaagactgaaaaagagaggatggacatgttttataagttagttaaatgtcgtcgcgacgctgggcaattggataatcataaagagctgatcacagaggccgaacgtctggaaatcaagacaaaagcgccattgattctggccgaactactcttcgatcaaaatattgctgctcaagctaaaaaatatcgagtacttctccttcgtttcacccacgatgatattaaggcgcagaaatatttaattagaggaattgaacaagtaatagcactgcataaagacgctttgatgccgaaagtacctggcattttaaagctcttttacgatgctgatattttggaagaaaaagcgttattcgaatggtcaaacaaagtgactaaaaaatacgtatcaaaagatttatcccaagaaattcatgataaagctgcaccatttttaacttggttacaagaagcagaagaagaggattctgaaccagaagaagaagacgatgatttggagattgaatacgacgatagagccaaacaatcactaaaaccacaagagtcaccccctatgcagaagcctgctgtagtcaatgaagactcggatgacgaagatgattttgatattgatgccatttaa

SEQ ID NO: 17999 - protein, 454 aa, Apis mellifera
MGSVNVNRNVSDAFYRYKMPRIQAKVEGKGNGIKTVIVNMVDVAKAIGRPATYPTKYFGCELGAQTQFDFKNERFIVNGSHDATKLQDLLDGFIRKYVLCPACDNPETELMVSSKKGTISQGCKACGYHGLLESNHKLNTYILKNPPSLNPAVQGSSLTEGKRGKRSKRANGETTTTTTTATANGDRSGSPENDTNTTDIVVEAPEKMADENGDDDNWAVDVSEEAVRARLQDLTDGAKGMTISDDLDKTEKERMDMFYKLVKCRRDAGQLDNHKELITEAERLEIKTKAPLILAELLFDQNIAAQAKKYRVLLLRFTHDDIKAQKYLIRGIEQVIALHKDALMPKVPGILKLFYDADILEEKALFEWSNKVTKKYVSKDLSQEIHDKAAPFLTWLQEAEEEDSEPEEEDDDLEIEYDDRAKQSLKPQESPPMQKPAVVNEDSDDEDDFDIDAI

SEQ ID NO: 18000 - DNA, 1218 bp, Candida glabrata CBS 138
  CDS (1)..(1218)
atgtcgattaatatttgcagagacaatcatgatcctttctaccgttacaaaatgcctcctatccaggccaaggttgaaggtagaggtaatggtatcaagactgctgttttgaacctttccgatgttgcgcgtgcgttgaacagacctcctcaatacctgttgaaatactttggttttgagcttggtgcgcagacttctggtaatgttgagaccgagagatacctggtgaacggtgttcacgagccagctaagttgcaagatgtgctagatggtttcatcaacaagttcgttctgtgtggcagttgtaagaacccggaaaccgagatcatcatcaccaagaatgacgacttggtcagagactgtaaagcctgtggtaagagaactccaatggaattgagacacaagctttcatctttcatcctaaagaatcctccaaacaccttagcaggttctaagaagaataagaagtccgccaccgcttctgccaacgtccgtggtggtggtgtttccattagtgatatcgcccaaggtaagtcccaaggtggtgatgaagatggtgaaggcaatgctggtgacgatgacgacgatgccttggccagagagattaacgctgcggcttccgaactggagcaaattgaggtcaaggatgatgagtgggccgtcgacatgtctgaagaggccatcagagcccgtgccaaggaactgcaagtcgccaacggtgctgttgacactgagctaacgaagcttgaagagtacggtgaatggatcatcaacgaagctggtgaggacaagtctaacctaccatccgatgttgaattgtataagaaggctgttgagctagatgtcctgagcgatccaaagattgcctgcgtcttggctcaatgtatcttcaccgaggatatcgttaatgaaatctctgagcacagtgctttctttaccaaggtattcgttaacgccgattacgagaagaacttcttgggtggtatcgagagatttttgggtctagaacataaggaattgattccaacactacccaagattctagtgcaaatatataatgaagacgtcgtttctgaggaagaaatcatgagatttggtacaaagagttcaaagaagtttgttccaaaggatgtttccaagaaggtccgtagagctgctaagccatttatcacctggttagaaaatgccgaaagtgatgaagaatctgatgaagagtaa

SEQ ID NO: 18001 - protein, 405 aa, Candida glabrata CBS 138
MSINICRDNHDPFYRYKMPPIQAKVEGRGNGIKTAVLNLSDVARALNRPPQYLLKYFGFELGAQTSGNVETERYLVNGVHEPAKLQDVLDGFINKFVLCGSCKNPETEIIITKNDDLVRDCKACGKRTPMELRHKLSSFILKNPPNTLAGSKKNKKSATASANVRGGGVSISDIAQGKSQGGDEDGEGNAGDDDDDALAREINAAASELEQIEVKDDEWAVDMSEEAIRARAKELQVANGAVDTELTKLEEYGEWIINEAGEDKSNLPSDVELYKKAVELDVLSDPKIACVLAQCIFTEDIVNEISEHSAFFTKVFVNADYEKNFLGGIERFLGLEHKELIPTLPKILVQIYNEDVVSEEEIMRFGTKSSKKFVPKDVSKKVRRAAKPFITWLENAESDEESDEE

SEQ ID NO: 18002 - DNA, 1197 bp, Kluyveromyces lactis NRRL Y-1140
  CDS (1)..(1197)
atgtcaatcaatatttgcagagacaacaatgaccctttctaccgttataaaatgcctccaattcaggctaagattgaaggtagaggtaatggtatcaaaactgttgttatgaataccatggatgttgcccgtgctttaaacagaccagctccatacatcatcaaatatttcgggtttgaattgggtgcccaaactgctatcaatgttgaaaatgatcgttacattgtcaatggtgctcatcaaccagccaaattacaggacgtattggatggtttcatcactaagtttgtcctttgtggatcctgtaagaatcctgaaactgaaattgttatcactaaagatggtgatttggttagagactgtaaagcttgtggtaagagaacccctatggatttgagacataagttgtcctcgttcgtcttaaagaaccctcctgacagtatgaacggttccaagaaaaagaagaaggctgccactgcgtctgctaatgtcagaggtggtggtctttctattagtgatatcgctcaaggtaaatcccaagctgaagctggtgacgatgccgaagaaaacgattccgatgatgatgaattggccagacaaattaatgccgctgcctctaacttggctaccattgaagtcaaggatgaggactgggccgttgatatgtctgaagaagccatcagagctcgtgcgaaagaattacaaggtgaagctgacaaagaaactggcgaattctccaagttggaagaatttggtgaatgggtactacatgaagaagaactacctaccgatattgaattatacaaaaagattgcagaactcgagcttctggaagatccaaaggttgctgcagttctggcccaagttcttttcgatgaagatatcgtatcggatatctctgaacatactgcgttcttgcaaaaattattgaaggacgaagacttcgaaaagaactttttgggtggtattgaaagattccttggacttgatcaccaagaattgatcccattactaccaaagatcttggtccaattatacaacaacgacatcatttccgaagaagagattatcagcttcggtaccaaatgctctaagaagtttgtaccaaaggatgtttctaagaaggttcgtagagctgccaagccattcatcacttggttgaaaactgccgaagaagatgatgaggattcggaataa

SEQ ID NO: 18003 - protein, 398 aa, Kluyveromyces lactis NRRL Y-1140
MSINICRDNNDPFYRYKMPPIQAKIEGRGNGIKTVVMNTMDVARALNRPAPYIIKYFGFELGAQTAINVENDRYIVNGAHQPAKLQDVLDGFITKFVLCGSCKNPETEIVITKDGDLVRDCKACGKRTPMDLRHKLSSFVLKNPPDSMNGSKKKKKAATASANVRGGGLSISDIAQGKSQAEAGDDAEENDSDDDELARQINAAASNLATIEVKDEDWAVDMSEEAIRARAKELQGEADKETGEFSKLEEFGEWVLHEEELPTDIELYKKIAELELLEDPKVAAVLAQVLFDEDIVSDISEHTAFLQKLLKDEDFEKNFLGGIERFLGLDHQELIPLLPKILVQLYNNDIISEEEIISFGTKCSKKFVPKDVSKKVRRAAKPFITWLKTAEEDDEDSE

SEQ ID NO: 18004 - DNA, 1200 bp, Debaryomyces hansenii CBS767
  CDS (1)..(1200)
atgtcgtttgtaaatatttgtcgtgacaacaccgatccgttctaccgttataagatgcctgcgattcaatcaaaggttgaaggtagaggtaatggtattaaaactgtcatcgtcaacgtggcagaagttgctagagctttgggtagatcgccagattatgttattaaatattttggtcacgagttaggtgctcaaactaatacggaacgttgtttaattaatggtagtcatgatgcaagcgaattgcaagattcgttagatggcttcattaataagttcgttttatgtgcaagttgtaagaatccagaaactgaaattcaaattaaagaaaaggatagacttcaaagagattgtaaggcatgtggtcatatttctgtaattgatccaagacataagttatacacatatattttgaagaatccaccagcaggcagtggcaaaggtggtaaaggtggtaagaagtctgcgactgcaaccgctaacgttgttggtggtggtaaatctatttctgatattgcttcaggccaagctgtgaaacaatcgcaagacggtgaacaaaatgatgatgatgatatcttaactaaaaaaatcaatgctgaagcagctgcattagccaatgaagccattgaagtcgctgatgatgactgggctgttgatatgtcgaaggaagcgattgaagcaagagctagagagttagagggcttgagtttgaacgaagaccaagaaaaattcaatcagtttggagaatggttattggatgaatctaaagattcaaaagacgacttaccaagtgatattgatatttataagaagattgtcgaattagacatccttgaaaaccctgaaactgttcaagttttagctcaaacgttattcgatgatgatataatcgaacagattgaagaacatttaggtttgttagctaaattaattgatcatgattctgacttcgaaaagtcatttttgggtggtttggaaagatacttgggattagagaaccaagctttaatttctgctcttccaaaaattttagtcactatttatgataaagacttgattagtgaagaagttattacttcgtggggttccaaggtttccaagaaatatgttccaaaagatgtttcaaagaaagttcgtaaagcagctaaaccattccttaaatggcttcaagaagctgatgaagaaagtgacgacgaataa

SEQ ID NO: 18005 - protein, 399 aa, Debaryomyces hansenii CBS767
MSFVNICRDNTDPFYRYKMPAIQSKVEGRGNGIKTVIVNVAEVARALGRSPDYVIKYFGHELGAQTNTERCLINGSHDASELQDSLDGFINKFVLCASCKNPETEIQIKEKDRLQRDCKACGHISVIDPRHKLYTYILKNPPAGSGKGGKGGKKSATATANVVGGGKSISDIASGQAVKQSQDGEQNDDDDILTKKINAEAAALANEAIEVADDDWAVDMSKEAIEARARELEGLSLNEDQEKFNQFGEWLLDESKDSKDDLPSDIDIYKKIVELDILENPETVQVLAQTLFDDDIIEQIEEHLGLLAKLIDHDSDFEKSFLGGLERYLGLENQALISALPKILVTIYDKDLISEEVITSWGSKVSKKYVPKDVSKKVRKAAKPFLKWLQEADEESDDE

SEQ ID NO: 18006 - DNA, 1158 bp, Yarrowia lipolytica CLIB122
  CDS (1)..(1158)
atgtccatgatcaacatcagacgagataaccccgaccccttctaccggtacaagatgcctgccatcacctccaagatcgagggtcgaggtaacggtatcaagactgccgtgatcaacggttctgacgttgcccgagctcttaaccgacctccttcttacgtcattaagtactttggtatcgagcttggagcccagacccagatctccgaggacaaggaccgatacctggtcaatggtcagcacgacgctgcctctctgcaggacactctggacggtttcatcaaccggttcgtgctctgtgaggcctgcaagaaccccgagactgagctcatcatcaccaagaacggagacattacccgagactgtaaggcctgtggtaagcgaactcccgtggacatccgacacaaactcgccaccttcatcgtcaagaaccctccctcgcaagccaagggtaagaagggtgctgctggagctgcctccaacacctctgctcaggcccctgatgtggacgacaacgaggacggcgaaccctctgacgacgagctgaccaagcgaatcaacgccgaggcatccgagcttcccgccgccgctacccgagccgacgacgatacctggactgtcgacacttctgccgaggccgttgctgcccgacagcgagaggtcgagcagggtgttgccggcatcgccctggaggagaacgatgcctacaccatctttggagagtggtgttccgagggtgaacccagcgacgtggagatctacaagaaggccattgagctgggtatttctgacgattccaagaccgtccaggttctgccccaggtcattttcgacaaggacattgtcaagcagattgatgagcacaaaggtctgctgaccaagattgtggcttccgacgagcacgaaaaggccttgcttggtggtattgagcgtctcgttggccttacccaccccgatctcatccccgccgtgcccaagatccttttcaagctctacgagctcgatctcgtgtccgaggaggtggccaagaagtggggaaccaaggtgtccaagcgatacgtcgacaaggagacctccaagaaggtgcgaaaggctgccaagccgttcattgactggctcgatgaggctgaggaggagtctgacagtgatgacgagtaa

SEQ ID NO: 18007 - protein, 385 aa, Yarrowia lipolytica CLIB122
MSMINIRRDNPDPFYRYKMPAITSKIEGRGNGIKTAVINGSDVARALNRPPSYVIKYFGIELGAQTQISEDKDRYLVNGQHDAASLQDTLDGFINRFVLCEACKNPETELIITKNGDITRDCKACGKRTPVDIRHKLATFIVKNPPSQAKGKKGAAGAASNTSAQAPDVDDNEDGEPSDDELTKRINAEASELPAAATRADDDTWTVDTSAEAVAARQREVEQGVAGIALEENDAYTIFGEWCSEGEPSDVEIYKKAIELGISDDSKTVQVLPQVIFDKDIVKQIDEHKGLLTKIVASDEHEKALLGGIERLVGLTHPDLIPAVPKILFKLYELDLVSEEVAKKWGTKVSKRYVDKETSKKVRKAAKPFIDWLDEAEEESDSDDE

SEQ ID NO: 18008 - DNA, 1272 bp, Aspergillus nidulans FGSC A4
  CDS (1)..(1272)
atggctcccaacaacatcaacattcgtcgtgatgtttccgatcctttctaccgttacaagatggagcccttgcagtctaagattgaaggcaagggtaacggtattaagactgttatcgtcaacttgaactcggttgctgggtctttgagccgtccacctgcctatgttatcaagtactttgggttcgaacttggtgcccaggccaacgctaaacctaccgatgaccgctggatcatcaacggcgctcatgattcccggaagctacaagactatcttgacggattcattaccaaatttgttctctgcaagaagtgcaagaacccggagaccgatgtcatcatcaaggacgagaaaattatcctggactgcaaggcttgtggtcagcgttcggatgttgattcccgcctcaaactcagcaccttcattcttcgcaacaacacctccggcaagggcaagaaggataaatccaccaagaagactcgccgcgagaggaacaaggaaaaggaggctgcgaatggagaaaacaatgggagcccaggcgagagcaactcagacaatggcgatgagaatgaagatggcgcactcgaagccggcagcgacgatgagcttactcgtcgcattaacactgccgctcagggtattgaagcggaggatgaaatcgaggacgacaactggaatgttgacgtctcggaagaggctgtgaaggctcgtgccaaggagctcccggacgacctgaagcgcgctcttgctcttgacgagggagacgacgagggtgccgatggccctacagcttatgatgaactcggtagctgggttctggacactgctactgagaagggcggtatctctaaggtcgaggatgtcgagatctatttgaaggccaaggagctcggtatcgaaaccaagcacaagactttggcagttcttgctcaaaccatctttgatgagaagattgccaagcaggtcgatggccgcgcccctctgctcaagaagatgatcacttctgagcgccacgagaaggccttccttggcggcaccgagcgtttcctcggcaaggagcaccccgaacttatctcccaagttcccgctgtcctgctcggctattaccagaacgacctggtctcggaggaaactcttaaggcctggtgctccaaggctagcaagaagtatgtggacattcagaccagcaggaaggttcgcaaggctgcggagccctttctccagtggcttgagagcgccgaaagtgaggaagagagcgaggatgacgagtaa

SEQ ID NO: 18009 - protein, 423 aa, Aspergillus nidulans FGSC A4
MAPNNINIRRDVSDPFYRYKMEPLQSKIEGKGNGIKTVIVNLNSVAGSLSRPPAYVIKYFGFELGAQANAKPTDDRWIINGAHDSRKLQDYLDGFITKFVLCKKCKNPETDVIIKDEKIILDCKACGQRSDVDSRLKLSTFILRNNTSGKGKKDKSTKKTRRERNKEKEAANGENNGSPGESNSDNGDENEDGALEAGSDDELTRRINTAAQGIEAEDEIEDDNWNVDVSEEAVKARAKELPDDLKRALALDEGDDEGADGPTAYDELGSWVLDTATEKGGISKVEDVEIYLKAKELGIETKHKTLAVLAQTIFDEKIAKQVDGRAPLLKKMITSERHEKAFLGGTERFLGKEHPELISQVPAVLLGYYQNDLVSEETLKAWCSKASKKYVDIQTSRKVRKAAEPFLQWLESAESEEESEDDE

SEQ ID NO: 18010 - DNA, 1263 bp, Candida albicans SC5314
  CDS (1)..(1263): transl_table=12
atgtcatttattaacatttgtcgtgataacacggatcctttctaccgttataaaatgcctccacttcaatcaaaaactgaaggtagaggtaatggtattaaaactgctattgtcaatttagctgaagttgctcgagctttaaatcgtccaccagcttatttaatcaagtttttcggttatgaattaggtgctcaaacccaaattttaaatgatagatatttagttaatggagcacatgattcaaatgaattacaagattcattagatggttttattaataaatttgttttatgtggatcttgtaaaaacccggaaacagaaattgttttaaaagggaaagattcattagaaagagattgtaaagcatgtggtaaaatttctatgattgatccaaaacataaattatattcatttattgttaaaaatccacccgataataaaaagggtaaaaaatccgctactgcaactgctaatgttgttggtggtggtaaatccatttccgatattgcttctggtcataatggtcaaggaggtgaacctggaaataataataataataataataatggtggtggtgccaatggtgaaaatggtgaaaatggtgaaggttatgaagatgatgatgaagatgatgatttattagctaaaaaaattaatgctgaagtggcacaattaaaagccatggaaattaaagatgatgaatgggctgttgatatgtcacaagaagcaattgctgctagagcaagagaattagaaggtttatcattacaaaataataaatttgatgaatttggtgaatggttattaaaagaatctaatggatcaaaagatgatttaccttctgatgtcgaaatatataaacgtattgttgaattagaaattgctgatactccagaaactttacaagttttaggtcaagtattatttgatgatgatataataaatcaaattgaacctcatgttggtttattaactaaattaattaatggtgatgaagaatttgaaaaagctttattaggtggtttggaaagattttttggtttagaaaaaccaaatttaattccccaaattccaaaaatattacatggattttatgatcgtgatttaataagtgaagaagttttaattaaatggggttctaaagtttctaaaaaatacgttccaaaagatgtttctaaaaaagttagaaaagctgctaaaccatttgttaaatggttacaagaagctgaagaagaagaagaagaagaaagtgatgatgaataa

SEQ ID NO: 18011 - protein, 420 aa, Candida albicans SC5314
MSFINICRDNTDPFYRYKMPPLQSKTEGRGNGIKTAIVNLAEVARALNRPPAYLIKFFGYELGAQTQILNDRYLVNGAHDSNELQDSLDGFINKFVLCGSCKNPETEIVLKGKDSLERDCKACGKISMIDPKHKLYSFIVKNPPDNKKGKKSATATANVVGGGKSISDIASGHNGQGGEPGNNNNNNNNGGGANGENGENGEGYEDDDEDDDLLAKKINAEVAQLKAMEIKDDEWAVDMSQEAIAARARELEGLSLQNNKFDEFGEWLLKESNGSKDDLPSDVEIYKRIVELEIADTPETLQVLGQVLFDDDIINQIEPHVGLLTKLINGDEEFEKALLGGLERFFGLEKPNLIPQIPKILHGFYDRDLISEEVLIKWGSKVSKKYVPKDVSKKVRKAAKPFVKWLQEAEEEEEEESDDE

SEQ ID NO: 18012 - DNA, 1320 bp, Ustilago maydis 521
  CDS (1)..(1320)
atgtctgtcgttaatatccgtcgcgatgtcgacgacaagttctaccgttaccgcatgcccctgctccagaccaagatcgagggcaagggcaacggtatcaagaccgtcatccccaacatgtctgacattgctcgttccctcagccgtcctcccacctacccgaccaagtttttcggctgcgagctcggcgcccaaacctcgtttgacgagaagaacgatcgttacattgtcaacggtgcccacgatgccgaccgtcttcgcgagctgcttgacggcttcatcgacaagtttgtcctctgcggcgactgcaagaaccccgaaaccgatctcaaaattctcaaggatggcgacatccttcgcaactgcaaggcttgtggcaagcgcaccggcgttgacatgaagcacaagctcaccacttttatcgtcaaacatccgcctcccaagcgcgtcaagggcgccaagggagccggaaaggctgccggtcaggacgccggcgacgccggctcagacgacgagctgaccaagcgcatcaaagccgaagctgccgaaatccccacggccgagcagcgtggtaacgccgatgacgactggtccgtcgacacctcggaagctgccgtcgccgcacgtgtcaaggcgctcgaaggcagcgtcaagtcctcgctcgtgcttggagatgacgacgaggacgaggacgaggatagcccgtacgcacagtttggccagtggctccaggccaaccgcaagggtggtcaagagggtcgcgagtgcaccccagccgaagtgtacaaaaaggcgcaagagtttggcatcgaaaaaaagcacaaaaccgtccaagtgcttgcgcaagccctcttcaccgaagacgctcccaaggagattgaaaagtatggcgccgtgctcgtcaagatggtcggcgactcggagaagcaccagaaagccatgctcggcggctttgagcgattggctggtgttcagtgccctacgctcgttcccaacggtgtccccaagattctcatggctctctaccagatcgacgtgctcgacgaagatttcgtcaaaaactggggcacccatgtcagcaaaaagtacgtctctaaagatatttccaagaaggttcgtcgtgctgcggctcctttcctcgaatggctagaccaggccgattccgaatccgagcaagattccgatgacgacgatgacgacgatgacgacgatgacaagccccccaagtctaaagcgaatgtcaatggaaacggtatcaacaagaccgcacacaacgatgacaatgatgacgatgacgattccgaccttgacaacctctag

SEQ ID NO: 18013 - protein, 439 aa, Ustilago maydis 521
MSVVNIRRDVDDKFYRYRMPLLQTKIEGKGNGIKTVIPNMSDIARSLSRPPTYPTKFFGCELGAQTSFDEKNDRYIVNGAHDADRLRELLDGFIDKFVLCGDCKNPETDLKILKDGDILRNCKACGKRTGVDMKHKLTTFIVKHPPPKRVKGAKGAGKAAGQDAGDAGSDDELTKRIKAEAAEIPTAEQRGNADDDWSVDTSEAAVAARVKALEGSVKSSLVLGDDDEDEDEDSPYAQFGQWLQANRKGGQEGRECTPAEVYKKAQEFGIEKKHKTVQVLAQALFTEDAPKEIEKYGAVLVKMVGDSEKHQKAMLGGFERLAGVQCPTLVPNGVPKILMALYQIDVLDEDFVKNWGTHVSKKYVSKDISKKVRRAAAPFLEWLDQADSESEQDSDDDDDDDDDDDKPPKSKANVNGNGINKTAHNDDNDDDDDSDLDNL

SEQ ID NO: 18014 - DNA, 1209 bp, Cryptococcus neoformans var. neoformans B-3501A
  CDS (1)..(1209)
atggccaccgttaatatccgacgagatgtggacgacaagttctaccgttacaaaatgcccctcctccagatcaagattgaaggtcgaggcaacggtatcaagactgttgtgcccaatatggaagacattgcgcgagccttgaacaggccgcctacctacccgaccaaattctttggttttgaacttggtgcccaaacatccatggccaacgacaggtatatcgttaacggtgctcataccgctgaccgtttgcgagagctccttgacgttttcattgagaaatttgttctttgtccctcttgcaaaaaccccgaaaccgaaattgtcatcacaggcaggtcgggtcacgaggacatgcatcgtgactgcaaagcttgtggtcgtcaaaaccccattgatatgcgccacaagctttctgtctttatcatcaagaacccacccaagaagaaggacaagggtggcaagaagggcaagaagtctggtggtatgacggccgaagccaacctcggtgggccaatggtgtttgagaagacagaggatggtagtggtgaagatgatagttcccctgatgcgggcattgcgggtgtccctaccactggcaccgaaattgacgcggtgcttggacgtggcgaccccatcctcggtgaccctgatgccgctgaggcagcgtccaagaagctcgccaaacttgacgttaacggtggcggcgatgaagaagaggacgaggatgccgattcaccttatgcggctttgggttcttggttggagaacaacaaagaagccgatgacgcctctatcatcgcgcagatcaaagatctcgggattgctggcaagcacaaggttttggtagagattggtcagcatctgttctcggatgacatctgtgacgagatcgccggtcgaactgcccttcttcaagctcttgtgacgtctgagaagcatcaaaagtctctcttgggtggtatcgaacgcctcatcggtctatccccttctctcgagtctcttattgccgctggcaccacttccaagattctcatggtattgtaccaagctgatatcatcgaggaggacgttgttcagcagtggggtacccacgttagcaaaaagtacgtggacaaggacaagagcaagaaagtcagaaagaatgccgaagccttcctcaagtggctcgaggaggctgaggacgagtctgacagcgatgaggagtga

SEQ ID NO: 18015 - protein, 402 aa, Cryptococcus neoformans var. neoformans B-3501A
MATVNIRRDVDDKFYRYKMPLLQIKIEGRGNGIKTVVPNMEDIARALNRPPTYPTKFFGFELGAQTSMANDRYIVNGAHTADRLRELLDVFIEKFVLCPSCKNPETEIVITGRSGHEDMHRDCKACGRQNPIDMRHKLSVFIIKNPPKKKDKGGKKGKKSGGMTAEANLGGPMVFEKTEDGSGEDDSSPDAGIAGVPTTGTEIDAVLGRGDPILGDPDAAEAASKKLAKLDVNGGGDEEEDEDADSPYAALGSWLENNKEADDASIIAQIKDLGIAGKHKVLVEIGQHLFSDDICDEIAGRTALLQALVTSEKHQKSLLGGIERLIGLSPSLESLIAAGTTSKILMVLYQADIIEEDVVQQWGTHVSKKYVDKDKSKKVRKNAEAFLKWLEEAEDESDSDEE

SEQ ID NO: 18016 - DNA, 1314 bp, Tribolium castaneum
  CDS (1)..(1314)
atgggcagcgtcaacgtcaatcgcagcgtcagcgatgtcttttatcgctacaagatgccccggctgatggccaaagtggagggcaaaggtaacggcatcaaaacggtcattgttaatatggccgaagtggccaaggccctaggccgaccccccacctatccgacgaagtactttggctgcgagttgggcgctcagactcaattcgatttcaaaaacgaaagatttatcgtcaatggatcgcacgatgcgggcaaactacaagacctactcgatggcttcatccggaaattcgttttgtgtcccgaatgtgagaaccctgaaaccgagctgcttgtctccaccaaacgcagcaccatttctcaaggttgcaaggcatgtggctaccacggcccgctagaatccaaccataaattggtcacttttattttgaaaaatccgccaaatttaaatcctgccgttcagggctcgtcattgactgaaggtaagagatcaaagaggagcaaacgcgccaacggagacaccaatggagacaccagtcaagtcgacgatcaaaacgaaagcttggagaacggcgatgatgacgacgcacacgaatggcaagctgacgtgtcggaagaagccgttcgcgcccgaatgcaggatttgaccgaaggtgcaaaaaatatgaccatcaatgatgatttagaaaagagcgaaaaggaccgaatggatattttctacgagttggtcaagtcgaagcgcgacgctggtcagttagacaacccacaggtgtataaggagttgtacaatgaagccgatcgtttggaaatcaagactaaggcccctctggtcttggccgaggttctcttcgatcagaatatgaaaaaccagttgtccgattataggttgttgcttttgcgtttctgccatgatgataaaaaggcacagagatatttaatgggagggttcgagcaagtgattgccttgcatcgcgatactttgctcaataaggtaccggttttgctcaaaacgctctacgatttggatgttttgagcgaagctacgattatcgcatgggcggagaaggtgtcgaagaagtatgtgtcaaaggaagtcagtcaggagattcatgataaggccgcgccgtttgtcaagtggttgaaggaagccgaaacggaagagtccgaaagcgaagaagaaagtgatgatgatgtcgaaattgaatacaacgaccgagctcaagtcgttccattgaaaccgacatccactacaaacaataagacggaacgtgtcgaagatgatggagaggatgacgtcgacattgatgccatttaa

SEQ ID NO: 18017 - protein, 437 aa, Tribolium castaneum
MGSVNVNRSVSDVFYRYKMPRLMAKVEGKGNGIKTVIVNMAEVAKALGRPPTYPTKYFGCELGAQTQFDFKNERFIVNGSHDAGKLQDLLDGFIRKFVLCPECENPETELLVSTKRSTISQGCKACGYHGPLESNHKLVTFILKNPPNLNPAVQGSSLTEGKRSKRSKRANGDTNGDTSQVDDQNESLENGDDDDAHEWQADVSEEAVRARMQDLTEGAKNMTINDDLEKSEKDRMDIFYELVKSKRDAGQLDNPQVYKELYNEADRLEIKTKAPLVLAEVLFDQNMKNQLSDYRLLLLRFCHDDKKAQRYLMGGFEQVIALHRDTLLNKVPVLLKTLYDLDVLSEATIIAWAEKVSKKYVSKEVSQEIHDKAAPFVKWLKEAETEESESEEESDDDVEIEYNDRAQVVPLKPTSTTNNKTERVEDDGEDDVDIDAI

SEQ ID NO: 18018 - DNA, 1338 bp, Tribolium castaneum
  CDS (1)..(1338)
atgggcagcgtcaacgtcaatcgcagcgtcagcgatgtcttttatcgctacaagatgccccggctgatggccaaagtggagggcaaaggtaacggcatcaaaacggtcattgttaatatggccgaagtggccaaggccctaggccgaccccccacctatccgacgaagtactttggctgcgagttgggcgctcagactcaattcgatttcaaaaacgaaagatttatcgtcaatggatcgcacgatgcgggcaaactacaagacctactcgatggcttcatccggaaattcgttttgtgtcccgaatgtgagaaccctgaaaccgagctgcttgtctccaccaaacgcagcaccatttctcaaggttgcaaggcatgtggctaccacggcccgctagaatccaaccataaattggtcacttttattttgaaaaatccgccaaatttaaatcctgccgttcagggctcgtcattgactgaaggtaagagatcaaagaggagcaaacgcgccaacggagacaccaatggagacaccagtcaagtcgacgatcaaaacgaaagcttggaggcatcagttaatgaaaattccaagaacggcgatgatgacgacgcacacgaatggcaagctgacgtgtcggaagaagccgttcgcgcccgaatgcaggatttgaccgaaggtgcaaaaaatatgaccatcaatgatgatttagaaaagagcgaaaaggaccgaatggatattttctacgagttggtcaagtcgaagcgcgacgctggtcagttagacaacccacaggtgtataaggagttgtacaatgaagccgatcgtttggaaatcaagactaaggcccctctggtcttggccgaggttctcttcgatcagaatatgaaaaaccagttgtccgattataggttgttgcttttgcgtttctgccatgatgataaaaaggcacagagatatttaatgggagggttcgagcaagtgattgccttgcatcgcgatactttgctcaataaggtaccggttttgctcaaaacgctctacgatttggatgttttgagcgaagctacgattatcgcatgggcggagaaggtgtcgaagaagtatgtgtcaaaggaagtcagtcaggagattcatgataaggccgcgccgtttgtcaagtggttgaaggaagccgaaacggaagagtccgaaagcgaagaagaaagtgatgatgatgtcgaaattgaatacaacgaccgagctcaagtcgttccattgaaaccgacatccactacaaacaataagacggaacgtgtcgaagatgatggagaggatgacgtcgacattgatgccatttaa

SEQ ID NO: 18019 - protein, 445 aa, Tribolium castaneum
MGSVNVNRSVSDVFYRYKMPRLMAKVEGKGNGIKTVIVNMAEVAKALGRPPTYPTKYFGCELGAQTQFDFKNERFIVNGSHDAGKLQDLLDGFIRKFVLCPECENPETELLVSTKRSTISQGCKACGYHGPLESNHKLVTFILKNPPNLNPAVQGSSLTEGKRSKRSKRANGDTNGDTSQVDDQNESLEASVNENSKNGDDDDAHEWQADVSEEAVRARMQDLTEGAKNMTINDDLEKSEKDRMDIFYELVKSKRDAGQLDNPQVYKELYNEADRLEIKTKAPLVLAEVLFDQNMKNQLSDYRLLLLRFCHDDKKAQRYLMGGFEQVIALHRDTLLNKVPVLLKTLYDLDVLSEATIIAWAEKVSKKYVSKEVSQEIHDKAAPFVKWLKEAETEESESEEESDDDVEIEYNDRAQVVPLKPTSTTNNKTERVEDDGEDDVDIDAI

SEQ ID NO: 18020 - DNA, 1353 bp, Oryza sativa subsp
  CDS (1)..(1353)
atggctctgcaaaacattggtgcttcaaaccgcgatgatgctttctacaggtataagatgcccaggatgatcaccaaaatagaaggccgtggcaatggcatcaagactaacatcgtgaacatggtggatatagcaaaagccctagctaggcctgcttcctacacaacaaagtactttggatgtgagcttggtgcacagtctaaatttgatgagaagactggtacttccttggttaatggggcacatgatactgctaaactggctggtctcctcgagaacttcatcaagaagtatgtccaatgctatggatgtggcaaccctgagactgaggtcctcatctccaaggcccagatgattacattgaagtgtgctgcctgtggtttcgtgtcagacgttgacatgagggacaagctcacaacttttatcctgaagaatccacctgaacagaagaagggtggtgggaaagacaagaaggcaatgaggagagctgagaaggagcgtctaaaggaaggtgaggctgctgatgaggagatgaagaagctaaagaaggaagcaaagaagaaaggtgcatccaaggaaagcacctcctctaaaagtggtgctgggaagaagaaggctgcttctggctctgatgaggatcattcaaattcaccaactcgcagccatgatggtgacaatgtggctgcagatgaggatgacgacgatgatgtccagtggcagactgacacttcactggaggctgcaaaacagcgcatgcaagagcaactgagcgctgcaactgctgagatggtgatgctgtccactgaagaacctgagaagaagaagaagcacgaggccttacacaaggagggtacctccaacggaagtgcaaaacatgtggttgaagaggctaaaagcagtccttatgatgatctggtcaaggagatgaaggataacttgagcaagggtgctactgctgttcagctcaagggtctgatgacttcctcagccctgccaccccaggatgctatgaatgctctttttgatgcactctttggtggcctcagcaaaggatttgccaaggaggttgtgaagaagaagaaattcctcgcggctgctgtacctgatgaagcctcccagatggtcctgctgcaagccctggtggccttcggtgccaagtctagccctgaagctgtgaaggaggtgccgattgttctcaaggccctgtatgatggggacatcctggatgaagaagtgataactcagtggtacaatgaatctgttgctgctggcaaggagtcccaggtggtgaagaatgccaaaccattcgtggagtggctccagagcgcggattctgaatccgaggaagagtga

SEQ ID NO: 18021 - protein, 450 aa, Oryza sativa subsp
MALQNIGASNRDDAFYRYKMPRMITKIEGRGNGIKTNIVNMVDIAKALARPASYTTKYFGCELGAQSKFDEKTGTSLVNGAHDTAKLAGLLENFIKKYVQCYGCGNPETEVLISKAQMITLKCAACGFVSDVDMRDKLTTFILKNPPEQKKGGGKDKKAMRRAEKERLKEGEAADEEMKKLKKEAKKKGASKESTSSKSGAGKKKAASGSDEDHSNSPTRSHDGDNVAADEDDDDDVQWQTDTSLEAAKQRMQEQLSAATAEMVMLSTEEPEKKKKHEALHKEGTSNGSAKHVVEEAKSSPYDDLVKEMKDNLSKGATAVQLKGLMTSSALPPQDAMNALFDALFGGLSKGFAKEVVKKKKFLAAAVPDEASQMVLLQALVAFGAKSSPEAVKEVPIVLKALYDGDILDEEVITQWYNESVAAGKESQVVKNAKPFVEWLQSADSESEEE

SEQ ID NO: 18022 - DNA, 1365 bp, Triticum aestivum
  CDS (1)..(1365)
atggcgctgcaaaacattggtgcttcaaacaaggatgatgccttctacaggtacaagatgcccagaatgttgaccaaaattgaaggccgtggcaatggcatcaagaccaatattgtgaacatggttgatatagcaaaagcacttgccaggcctgcttcctacacaaccaagtactttggatgtgagcttggggcacaatcaaagtttgatgagaagacgggaatctccttggtcaatggagcccatgacactttgaagctggctggtctgcttgagaacttcatcaagaagtatgtccagtgttatggctgtggcaaccctgagacggaggtcctcatctccaagaaagagatgataactttgaaatgtgctgcctgtggcttcctctcggatgttgacatgagggacaagctcactacattcatcctgaagaacccaccagaggcaaagaaaggtggcaaggacaagaaagctatgcggagggctgagaaggagcgtctgaaagaaggtgaagctgctgatgaggagatgaagaaactcaagaaggatgggaagaagaaaggtgcttcatccaaggagagtactgcaaaaggtgttgccacaaagaagaagggtgctgggggctctgatgaggaacatgtctcatcaccaagagatgctgactttgcagctgctgcagacggtgatgatgacgacgacgatgatgtacagtgggcgactgacacgtcagcagaggctgcgagaaagcgcatggaggaacagctgagtgcagcaactgctgaaatggttatgcttgccactgaagagactgagaagaagaagaaacaggcccagcacaaggatgatggcggtgccaatggcacagcaaaggctgaagagacctccaacggtaaccagaatggggccaaaaccaccactccctatgatgcactggttgaagagatcaaggccagcctagccaatgctgccaccgcagctcagctcaaggggttgctgtcctcctcgcccctgcccctgaaggatgtgatggatgccctcttcgaggcgctcttccatggtgctgccaaggggtttgcgaaggatgtggtgaagaacaggaagtaccttgctgctgctgtgcctgatgaagccgcccagatgctcctgctccagtctatcgaggcgttctgtggcaagtgcagcgccgaggccctgaaggagctgcctgtcgtcctgaaggccctctacgacggagacgtcctcgaggaagagactattgtgcagtggtacaatgaggctgttgctgccggtaaggactcccagatcgtgaagaatgccaagcccgtcgtggagtggctccagagcgccgagtccgacgaggagtga

SEQ ID NO: 18023 - protein, 454 aa, Triticum aestivum
MALQNIGASNKDDAFYRYKMPRMLTKIEGRGNGIKTNIVNMVDIAKALARPASYTTKYFGCELGAQSKFDEKTGISLVNGAHDTLKLAGLLENFIKKYVQCYGCGNPETEVLISKKEMITLKCAACGFLSDVDMRDKLTTFILKNPPEAKKGGKDKKAMRRAEKERLKEGEAADEEMKKLKKDGKKKGASSKESTAKGVATKKKGAGGSDEEHVSSPRDADFAAAADGDDDDDDDVQWATDTSAEAARKRMEEQLSAATAEMVMLATEETEKKKKQAQHKDDGGANGTAKAEETSNGNQNGAKTTTPYDALVEEIKASLANAATAAQLKGLLSSSPLPLKDVMDALFEALFHGAAKGFAKDVVKNRKYLAAAVPDEAAQMLLLQSIEAFCGKCSAEALKELPVVLKALYDGDVLEEETIVQWYNEAVAAGKDSQIVKNAKPVVEWLQSAESDEE

SEQ ID NO: 18024 - DNA, 1230 bp, Ostreococcus tauri
  CDS (1)..(1230)
atgagagaagataggacgcccgcgatggcgatgattaacatcggggcgtccaacgccggggatcaattctatcgatataaaatgccagccattcagtcgaaaatagagggtcgaggcaacgggatcaagaccaacgtggtgaacctggtggaggtgtcgaaagccctggcgcgaccgccgatgtacacgctgaaatttttcgggaacgatctcggggcgctgacgaagttcgacgagaagagtgggctggccatcgtgaacggggcgcacgacgcgggaaagctcgcgcagagcctcgaaggtttcatcaagcgctttgtgcagtgcttctcgtgcgggaatccggagacgatgatcgagatctcgaagagagagactattcacttgaagtgcaaggcgtgcggggcgctctcggacgtcgatatgcgacacaaactattaaaaaggataaaaaggaaaagcagcttcgccgcgccgagcgcgagcgcgaagaggctggcgccgctctcgatgccgaagaaagacgacgacgaaaggctgagaagaaggagaagaaggagaagaaggagaagaaggagaaaaaggaaaagaaggagaagaaggagaagaaagagcacgtggcagacggatacctccgtcgccgccgcgaaggcgcgtgccgtcgagcagttgaccgacggtgccgccagtatggtcaccgttgttgccgagaagatgaaggatgccaacatcgaggaagagagctctgaagaggaagaagacccacgagtgtccaaacttcgcgcatacgccgcgaagaacgacgcggcgaagacggcggagtatctcatctccgatacgctcggtgttgaatccaaggagctcggtctcgtctttcttcttgaggccatctttgacgaggatgagcccatcccgccgcaaatcaaggcgaagaaggacttcctcgtcgctgcttgtccaagcgatcaacttcagcgcgctctcttgtgcgctttcgagcgctacgtcactgaaactgctacctccggcttcaaggtgttctctctgatcctcagcacgctctacgagctcgatctcgtcgaggaagacataatcaaaaaatggaatgtggacgtcgacgccgcctcaaacatcgaggttgagcccaaggtggcgcaagccgtgcgcaagcaggccgccaagttcattgactggctcgaggattccgatgacgacgaggatagcgactaa

SEQ ID NO: 18025 - protein, 409 aa, Ostreococcus tauri
MREDRTPAMAMINIGASNAGDQFYRYKMPAIQSKIEGRGNGIKTNVVNLVEVSKALARPPMYTLKFFGNDLGALTKFDEKSGLAIVNGAHDAGKLAQSLEGFIKRFVQCFSCGNPETMIEISKRETIHLKCKACGALSDVDMRHKLLKRIKRKSSFAAPSASAKRLAPLSMPKKDDDERLRRRRRRRRRRRRRKRKRRRRRRRKSTWQTDTSVAAAKARAVEQLTDGAASMVTVVAEKMKDANIEEESSEEEEDPRVSKLRAYAAKNDAAKTAEYLISDTLGVESKELGLVFLLEAIFDEDEPIPPQIKAKKDFLVAACPSDQLQRALLCAFERYVTETATSGFKVFSLILSTLYELDLVEEDIIKKWNVDVDAASNIEVEPKVAQAVRKQAAKFIDWLEDSDDDEDSD

SEQ ID NO: 18026 - DNA, 1251 bp, Phaeosphaeria nodorum
  CDS (1)..(1251)
atggctaccatcaacattcgtcgcgatgtcgccgactccttctaccgctacaagatggagcgcatccagtccaagattgaaggcaaaggcaacggcatcaagaccgtcattgtcaacctgagcagcgtcgccaactcacttgcccgccctcccgctcacgtcatcaagtacttcggcttcgagctcggagcccagaccaacaccaaccccaatgacgaccgctggatcatcaacggcgcccacgatgctagcaagctccaggactacctcgacggcttcatcaccaagtttgttctttgcaagaagtgcaagaaccccgagaccgatgtccacatcaaggatggcaacatcacgctcgactgcaaggcttgcggaaagatctccgacgtcgacccgcgcctcaagcttactgctttcatcttgaagagcgagcccaagaagggcaagaaggacaagtccaccaagaaggccgatcgtcgtgcccgcaaggaagccgaggccaagggcgagcccacctcccccgatggcggcagccccggtgacagcgcagaggatgacgatgccaatggcgattacgagatcgaggctggtagtgacgacgagctcacccgccagatccaggagggcgccaaggagattgaagaagaggaggccaaggaggtcgagtggcacattgacacctctgaggaagccatgcgcgcccgcgcccagcagctccctgacgacctcaagcgtgctttggtgattgaggccgacgaagagggaggttcttcctacgacgtcttcggcaaatggatccttgacactgctgcggagaagggtggcgtcgataagcttgacaatgtcgagatcttcctgaaggccaaggagctcggtatcgaggacaagcaccgcacgcttaccgtcattccccagaccctcttctccgataagatcgtcaagcagatcgacacccgtgcgcccatgctcaagaagatgatcacctcagagaagcacgagaaggccttcctcggcggtattgagcgctttgtcggaaacgacaagcccgagctgatcgctcaggtctcgcctatcctaatgaaggtctacgacaacgatctctgctctgaggaggtcctcaagccctggtgcgccaaggccagcaagaagtacgtcgacatcaaggtcagcaagaacgtgcgcaagtctgccgagaagttcaaggactggctcgagactgctgagagtgacgaggaggatgactccgagtaa

SEQ ID NO: 18027 - protein, 416 aa, Phaeosphaeria nodorum
MATINIRRDVADSFYRYKMERIQSKIEGKGNGIKTVIVNLSSVANSLARPPAHVIKYFGFELGAQTNTNPNDDRWIINGAHDASKLQDYLDGFITKFVLCKKCKNPETDVHIKDGNITLDCKACGKISDVDPRLKLTAFILKSEPKKGKKDKSTKKADRRARKEAEAKGEPTSPDGGSPGDSAEDDDANGDYEIEAGSDDELTRQIQEGAKEIEEEEAKEVEWHIDTSEEAMRARAQQLPDDLKRALVIEADEEGGSSYDVFGKWILDTAAEKGGVDKLDNVEIFLKAKELGIEDKHRTLTVIPQTLFSDKIVKQIDTRAPMLKKMITSEKHEKAFLGGIERFVGNDKPELIAQVSPILMKVYDNDLCSEEVLKPWCAKASKKYVDIKVSKNVRKSAEKFKDWLETAESDEEDDSE

SEQ ID NO: 18028 - DNA, 1356 bp, Aedes aegypti
  CDS (1)..(1356)
atgggtaccgtaaacgtcaaccgcaatgtggcggatgtgttctaccgttataaaatgccccggattaatgccaaggtcgaaggaaagggaaacggcatcaagacggtcatcgtcaacatggccgacgtggcgcgtgcaattggccgtccggcaacgtatccaaccaagtactttggttgcgagctgggcgcgcagactcagtttgactacaagaatgaacgcttcatcgtcaatggatcgcacgacgccaacaagctgcaagatctgctggatggtttcatccgcaagttcgttctttgcccggagtgcgataatcccgaaactgatctgatcgtgtcgtcgaagaagggtaccatctcgcagggttgcaaagcgtgcggattccacggtccattggaggtcaatcacaaagttaataccttcattatcaagaatccaccgaacgtgaacccagcaaaccagggcgcgtcgttgactgagggaaagcgcaaagcacgtgctaagaagggcggcgaaaatggcgatgactcgaacgccgctgacagcactctggatgcttccaccgctgccgatgacaccattgatggccaagctggacgcatgaacggagatgacgatgaggacgttaactggacggtagacacttcggaggaagctgtccgtgctcgtatgcaagatttgactgatggggcgaaaaacatgacagtttcggatgattttgataaaaccgaaaaggaacgcttggacatattttatgagctggtgaagaagaagcgcgattctggtgaactggagaatgttcaaactcataaggaactctttacggaagctggtctcctagatatccaggcaaaatcgacccttgtactggctgaactattgttcactgctaacattgtccaagaagttcgtaagcatcggaaattgctgcttcgtttcacccatgaagacctcaaagctcaaaaatacttaatcggtggtctagagcaaattttctcgctgcatgctgataaactaatggaaaaagtgcccaatatcttcaagctgttctacgacactgacatcctggatgagaagacaatcctcgagtggtcgcaaaaggtaagcaagaaatatgtctccaaggaggtagctgcgcaaatccacgagaaggctcttccgttcgtcaagtggcttcaggaagcggaagaagaggaatcgtccgaggatgaagatgactccgatgtcgagatcgagtatgatgatcgtgccaaaaccgactccctgcgcaaagaacctgtcaagcaagaggtcaagaaatcgaagcctatcgaggaggaagaagatggtgacgatctcaacattgatgaaatttaa

SEQ ID NO: 18029 - protein, 451 aa, Aedes aegypti
MGTVNVNRNVADVFYRYKMPRINAKVEGKGNGIKTVIVNMADVARAIGRPATYPTKYFGCELGAQTQFDYKNERFIVNGSHDANKLQDLLDGFIRKFVLCPECDNPETDLIVSSKKGTISQGCKACGFHGPLEVNHKVNTFIIKNPPNVNPANQGASLTEGKRKARAKKGGENGDDSNAADSTLDASTAADDTIDGQAGRMNGDDDEDVNWTVDTSEEAVRARMQDLTDGAKNMTVSDDFDKTEKERLDIFYELVKKKRDSGELENVQTHKELFTEAGLLDIQAKSTLVLAELLFTANIVQEVRKHRKLLLRFTHEDLKAQKYLIGGLEQIFSLHADKLMEKVPNIFKLFYDTDILDEKTILEWSQKVSKKYVSKEVAAQIHEKALPFVKWLQEAEEEESSEDEDDSDVEIEYDDRAKTDSLRKEPVKQEVKKSKPIEEEEDGDDLNIDEI

SEQ ID NO: 18030 - DNA, 1320 bp, Medicago truncatula
  CDS (1)..(1320)
atggcgttacagaacattggtgctggcaacagcgatgatgccttctacaggtacaagatgcctagaatgattaccaaaattgagggcagaggtaatggcatcaaaacgaatattgtcaacatggttgatattgcaaaagctttggcaaggccagcctcttacacaaccaagtattttggctgtgaacttggagcacagtcaaaattcgatgagaaaactgggacttctcatgtcaacggagcacatgatactgcgaaacttgctggccttcttgagaacttcatcaagaaatacgtccagtgttatggttgtggaaatcctgaaactgagatcataattaccaagactcaaatgatccagatgaaatgtgctgcttgtggttttgtgtctgacgtggatatgagagacaagctgactaccttcatcattaagaacccaccagagagtaagaagggcggcaaggacaagaaggccatgaggagagctgagaaggagagactgaaggaaggtgaagcagctgatgaggagctgaaaaagctgaagaaagaggctgtcaagaagaagggagctaaggaaagcaccgcaaaaacaagctcttcaaagaaaaaaggaaatggctctgatgaagaccacacatctcctactcgaagtcaagtcgatgagaaggatgaggctgaagatgaagatgatgtacagtggcaaacagatacatcactagaggctgctcggctgcggatccaagaacagttgagtgctgtgacagctgatatggttatgctctccacaactgaacctgagaaggaggagaaagcagctgcaaaggtaagtgacaatcccgctaatggtaatggtaactccatgaactacaagactctggttggggaaatcaaagctgatttgaagaaaggtgcttcggccaaagaattggtggcccattgggcatcacttcccgtctctccacaagaaaagatgagtgctctgtatgaagccctatttggtgacattgagaaagggtttgcaaaagaagcaattaagaagaagaattaccttgctgctgcagttgctgtggaagagggtatgccgttgctgttgctgcgtgcaattgaggaattttcttgcaagtccacttccaatgcactcaaggaagttgccctggttctgaaggcactctatgatgctgatgcgctggaggaagagcacatattgcagtggtatcaagaagggctgaaaggagacaccaaaaatgctcagatttggaagaatgtgaaacccttcattgaatggcttcagagtgcagagtcagagtcggaggaagaataa

SEQ ID NO: 18031 - protein, 439 aa, Medicago truncatula
MALQNIGAGNSDDAFYRYKMPRMITKIEGRGNGIKTNIVNMVDIAKALARPASYTTKYFGCELGAQSKFDEKTGTSHVNGAHDTAKLAGLLENFIKKYVQCYGCGNPETEIIITKTQMIQMKCAACGFVSDVDMRDKLTTFIIKNPPESKKGGKDKKAMRRAEKERLKEGEAADEELKKLKKEAVKKKGAKESTAKTSSSKKKGNGSDEDHTSPTRSQVDEKDEAEDEDDVQWQTDTSLEAARLRIQEQLSAVTADMVMLSTTEPEKEEKAAAKVSDNPANGNGNSMNYKTLVGEIKADLKKGASAKELVAHWASLPVSPQEKMSALYEALFGDIEKGFAKEAIKKKNYLAAAVAVEEGMPLLLLRAIEEFSCKSTSNALKEVALVLKALYDADALEEEHILQWYQEGLKGDTKNAQIWKNVKPFIEWLQSAESESEEE

SEQ ID NO: 18032 - DNA, 1269 bp, Aspergillus oryzae
  CDS (1)..(1269)
atggctaccgtcaacattcgtcgggatgttaccgatcccttctatcgttacaagatggagcgcctgcagtccaagatcgagggcaagggcaacggaatcaagaccgtcgttgtcaacctcaactcggtcgctcagtcccttgcacgtcctcccgcatacgtgatcaagtacttcggtttcgagcttggcgctcaggccaacgccaagccgaccgatgaccgctggatcatcaacggcgcccacgatgccgccaagctccaggattatcttgacggattcatttccaaattcgttctttgcaagaagtgcaagaaccctgaaaccgacgtcatcatcaaggatgacaagattatcctggattgcaaagcctgcggacagcgttccgatgttgattcccgtctgaaactgagcactttcatcctccgcaacgaaaccagtggaaaaggagggaaaaagaacaaggccgacaagaagacgcgtcgtgaacagcggaacaagaagaatgagacagcgaatggagagaacggcagcccaggagacagcaactctgacaatggcgacgctgagaatggcgatgtgggcatggaagctggcagtgacgatgaactcactcgtcgtatcaagaccgaggccgagaccattgaagctgaggaagccgatgaagtccaatggtccgtcgacgtctctgaggaggccgtccgcgctcgtgccaaggaacttcccgatgacctgaagcgttcccttgtcatcgaggatgcggacgaagatggtgccgatggcccttctgcctatgacgagctcggtagctgggtacaggacacagctaaagaaaagggtggtgttgctaaactcagcgatgtagacatctacgtgaaggccaaggaatacggtatcgagtcgaagcacaagactctggcagttcttgctcaaaccatgttcgacaatgatattgctaagcagatccctggccgcgctggtctgctcaagaagatgattacctcggagcgccacgagaaggccttcctgggtggtatcgaacgcttcgttggcaaggatcaccccgaattgatcggccaaatccctgctatccttcttcgcctctttgaggaggatatcattgatgaggagaccctcaaggcatggggctctaaggctagcaagaagtatgtcgatatctccactagcaagaaagtccgcaaggctgctgcgcctttcctcgaatggcttgagactgccgagtcggaagaggaagaaagtgacgacgaatag

SEQ ID NO: 18033 - protein, 422 aa, Aspergillus oryzae
MATVNIRRDVTDPFYRYKMERLQSKIEGKGNGIKTVVVNLNSVAQSLARPPAYVIKYFGFELGAQANAKPTDDRWIINGAHDAAKLQDYLDGFISKFVLCKKCKNPETDVIIKDDKIILDCKACGQRSDVDSRLKLSTFILRNETSGKGGKKNKADKKTRREQRNKKNETANGENGSPGDSNSDNGDAENGDVGMEAGSDDELTRRIKTEAETIEAEEADEVQWSVDVSEEAVRARAKELPDDLKRSLVIEDADEDGADGPSAYDELGSWVQDTAKEKGGVAKLSDVDIYVKAKEYGIESKHKTLAVLAQTMFDNDIAKQIPGRAGLLKKMITSERHEKAFLGGIERFVGKDHPELIGQIPAILLRLFEEDIIDEETLKAWGSKASKKYVDISTSKKVRKAAAPFLEWLETAESEEEESDDE

SEQ ID NO: 18034 - DNA, 1353 bp, Oryza sativa subsp
  CDS (1)..(1353)
atggctctgcaaaacattggtgcttcaaaccgcgatgatgctttctacaggtataagatgcccaggatgatcaccaaaatagaaggccgtggcaatggcatcaagactaacatcgtgaacatggtggatatagcaaaagccctagctaggcctgcttcctacacaacaaagtactttggatgtgagcttggtgcacagtctaaatttgatgagaagactggtacttccttggttaatggggcacatgatactgctaaactggctggtctcctcgagaacttcatcaagaagtatgtccaatgctatggatgtggcaaccctgagactgaggtcctcatctccaaggcccagatgattacattgaagtgtgctgcctgtggtttcgtgtcagacgttgacatgagggacaagctcacaacttttatcctgaagaatccacctgaacagaagaagggtggtgggaaagacaagaaggcaatgaggagagctgagaaggagcgtctaaaggaaggtgaggctgctgatgaggagatgaagaagctaaagaaggaagcaaagaagaaaggtgcatccaaggaaagcacctcctctaaaagtggtgctgggaagaagaaggctgcttctggctctgatgaggatcattcaaattcaccaactcgcagccatgatggtgacaatgtggctgcagatgaggatgacgacgatgatgtccagtggcagactgacacttcgctggaggctgcaaaacagcgcatgcaagagcaactgagcgctgcaactgctgagatggtgatgctgtccactgaagaacctgagaagaagaagaagcacgaggcctcacacaaggagggtgcctccaacggaagtgcaaaacatgtggttgaagaggctaaaagcagtccttatgatgatctggtcaaggagatgaaggataacttgagcaagggtgctactgctgttcagctcaagggtctgatgacttcctcagccctgccaccccaggatgctatgaatgctctttttgatgcactctttggcggcctcggcaaaggatttgccaaggaggttgtgaagaagaagaaattcctcgcggctgctgtacctgatgaagcctcccagatggtcctgctgcaagccctggtggccttcggtgccaagtctagccctgaagctgtgaaggaggtgccgattgttctcaaggccctgtatgatggggacatcctggatgaagaagtgataactcagtggtacaatgaatctgttgctgctggcaaggagtcccaggtggtgaagaatgccaaaccattcgtggagtggctccagagcgcggattctgaatccgaggaagagtga

SEQ ID NO: 18035 - protein, 450 aa, Oryza sativa subsp
MALQNIGASNRDDAFYRYKMPRMITKIEGRGNGIKTNIVNMVDIAKALARPASYTTKYFGCELGAQSKFDEKTGTSLVNGAHDTAKLAGLLENFIKKYVQCYGCGNPETEVLISKAQMITLKCAACGFVSDVDMRDKLTTFILKNPPEQKKGGGKDKKAMRRAEKERLKEGEAADEEMKKLKKEAKKKGASKESTSSKSGAGKKKAASGSDEDHSNSPTRSHDGDNVAADEDDDDDVQWQTDTSLEAAKQRMQEQLSAATAEMVMLSTEEPEKKKKHEASHKEGASNGSAKHVVEEAKSSPYDDLVKEMKDNLSKGATAVQLKGLMTSSALPPQDAMNALFDALFGGLGKGFAKEVVKKKKFLAAAVPDEASQMVLLQALVAFGAKSSPEAVKEVPIVLKALYDGDILDEEVITQWYNESVAAGKESQVVKNAKPFVEWLQSADSESEEE

SEQ ID NO: 18036 - DNA, 1348 bp, Arabidopsis thaliana
  CDS (1)..(1314)
atggcgctgcagaacattggtgcttccaaccgtaacgatgccttctacaggtacaagatgcctaagatggttaccaaaaccgaaggcaaaggtaatggcattaagaccaacattatcaacaatgttgagattgccaaagccttggctagaccgccttcttatacgaccaagtactttggttgtgagcttggagcgcagtctaagtttgatgagaagactgggacgtcgcttgtgaatggagctcacaacacgtctaagcttgctgggcttttggagaattttattaagaagtttgttcagtgttatggatgtggtaacccggagactgagattattattacgaagacgcagatggtgaatctcaagtgtgctgcttgtgggtttatctctgaggtcgacatgagggataagttgactaatttcattctcaagaacccacctgagcagaagaaggtgtcaaaggataagaaagcaatgaggaaagctgagaaggagaggcttaaagaaggcgagctagctgatgaggagcagagaaagctgaaagctaagaagaaagcattgtctaacggcaaggattctaagacgtctaagaaccattcttctgatgaggatataagcccgaagcatgatgagaatgctctagaggtggatgaggatgaagatgatgatgatggtgtcgagtggcaaactgatacttcccgagaagctgctgagaaaagaatgatggaacagttgagtgctaaaactgccgaaatggtgatgctctctgcaatggaagtagaagagaaaaaggcgcccaaaagcaaatctaacgggaacgttgtgaaaactgagaatcctcctccgcaagagaagaatctcgtgcaggatatgaaagagtatctgaagaaagggtcaccaataagcgcgctcaaaagtttcatctcgtctctctctgaacctcctcaagacatcatggacgcactcttcaatgctctctttgatggtgtgggaaagggattcgccaaagaagtgactaagaagaagaattacttagcggctgctgcaacaatgcaagaggatggatcacagatgcatctgctcaattcgattgggacattctgtggaaagaatggaaacgaagaagctttgaaagaggtggctctggttcttaaagcattgtacgaccaagacatcattgaggaagaggtagtgttggattggtacgaaaagggtctcaccggagctgacaaaagctcgccggtttggaagaatgttaagccttttgtggagtggcttcagagcgctgagtctgagtccgaagaggaggattgagtcacttttttcttccctcctaacttttctttgc

SEQ ID NO: 18037 - protein, 437 aa, Arabidopsis thaliana
MALQNIGASNRNDAFYRYKMPKMVTKTEGKGNGIKTNIINNVEIAKALARPPSYTTKYFGCELGAQSKFDEKTGTSLVNGAHNTSKLAGLLENFIKKFVQCYGCGNPETEIIITKTQMVNLKCAACGFISEVDMRDKLTNFILKNPPEQKKVSKDKKAMRKAEKERLKEGELADEEQRKLKAKKKALSNGKDSKTSKNHSSDEDISPKHDENALEVDEDEDDDDGVEWQTDTSREAAEKRMMEQLSAKTAEMVMLSAMEVEEKKAPKSKSNGNVVKTENPPPQEKNLVQDMKEYLKKGSPISALKSFISSLSEPPQDIMDALFNALFDGVGKGFAKEVTKKKNYLAAAATMQEDGSQMHLLNSIGTFCGKNGNEEALKEVALVLKALYDQDIIEEEVVLDWYEKGLTGADKSSPVWKNVKPFVEWLQSAESESEEED

SEQ ID NO: 18038 - DNA, 1395 bp, Drosophila melanogaster
  CDS (1)..(1395)
atggccaccgtaaacgtaaaccgcagtgtgacggacatcttctatcgctacaagatgccacgtctgcaggcaaaggtcgagggcaaaggaaacggcattaagaccgtgctggtcaacatggcggaagtggctagggccatcggacgcccggccacctatccaaccaagtactttggttgcgagctgggcgcccagacgctgttcgatcacaagaatgagcgctttgttgtgaatggatcgcatgatgtgaacaagttgcaggatttgttggatggttttattcgcaagtttgtgttatgccccgagtgcgacaatccggagaccaatttaactgtgtcggccaaaaaccagaccatttcgcagtcttgcaaggcatgcggcttccatggtctgctcaaggttaaccataaagtgaacacattcattgtgaagaaccccccgtcattgaatccggccgcccaaggatcatcgctaaccgagggcaaacgctcgaggaaacagaagcagaagaacgataacgccgatggctccatgaccaataactctttggccaacaactctggcggtgaatcagatggcggcaacggcacaaatcaggctagccaaactgaggccgagattagcgcagctattccggagaaaacagccaaggatgacgacgatgagggatggagtgtcgatgtttcgaaggaggctattcgtgctcgtttgcaagatctgactgatggtgctaagggtatgactatttcggatgactatgataaaactgaaaaggagcgcattgatattttctacgagttggttaaggacaagcgggacaagaagcaattggatgatgtgcaaactcacaaggagctggtgattgaagccgaacgcttggatattattaacaaggctccattggttctcgccgagctgcttttcactgaaaacatcatcaaggacgtgcagaagaatcgccctttgcttcttcgcttcaccctcaataatccaaaagcacagcgctatctaattggtggagtggagcaaactgtagagctgcataagggtatattgatgagcaaggttgctggaatcttcaaattgttttatgatctggacatactcgatgaggccgtcatactggagtgggcacagaaggttagcaaacgacatgtctcgaaaaatattgctgccgaaatacacgagaaagctatgccattcgttctctggctgaagaatgccgaggaagagtcctccgaaagtgaggaggaggaggacgatgaatccgaggaggataactacgtttccagtgccggccaacgtggcggtcaacgggtcgtccaacgcggaattccacgcgctgttgcaggcgacgaggatgacgaggacgacgtgaacatcgacgatatctaa

SEQ ID NO: 18039 - protein, 464 aa, Drosophila melanogaster
MATVNVNRSVTDIFYRYKMPRLQAKVEGKGNGIKTVLVNMAEVARAIGRPATYPTKYFGCELGAQTLFDHKNERFVVNGSHDVNKLQDLLDGFIRKFVLCPECDNPETNLTVSAKNQTISQSCKACGFHGLLKVNHKVNTFIVKNPPSLNPAAQGSSLTEGKRSRKQKQKNDNADGSMTNNSLANNSGGESDGGNGTNQASQTEAEISAAIPEKTAKDDDDEGWSVDVSKEAIRARLQDLTDGAKGMTISDDYDKTEKERIDIFYELVKDKRDKKQLDDVQTHKELVIEAERLDIINKAPLVLAELLFTENIIKDVQKNRPLLLRFTLNNPKAQRYLIGGVEQTVELHKGILMSKVAGIFKLFYDLDILDEAVILEWAQKVSKRHVSKNIAAEIHEKAMPFVLWLKNAEEESSESEEEEDDESEEDNYVSSAGQRGGQRVVQRGIPRAVAGDEDDEDDVNIDDI

SEQ ID NO: 18040 - DNA, 1975 bp, Zea mays
  CDS (346)..(1701)
gtccgacccggcgcgtcgtcccctccagatctccgtcgccctctccaggtagcagaaactgttctgctgcagtctgacaaagtggagggcttaggagcttctgcttcttttatgtctgaacaatctttgctttatttgggattgttgggagagtactctcgtgcaacgaggaaaaggcacaaggttccgtcccactgcatgcgtcaagagcctgtctggttttcttgttctgatttgtcatttgctggtgctcagagccggcttggtttcctcgaaggatcagcaactactcttgattgtggactttgtcacatctgatatcaacttcatagatttttatccaagatggcgctgcaaaacattggtgcttcaaacagggatgatgccttctacaggtacaagatgcccagaatgattactaagatagaaggccgtggtaatggtatcaagacaaatgttgtgaacatggttgacatagcaaaagcacttgccaggccagcttcgtacaccaccaagtactttggatgtgagcttggtgcacagtccaaattcgatgagaagacagggatttccttggttaatggggctcatgatactgcaaagctggctggtctccttgaggtattcatcaagaagtatgtccaatgctatgggtgtgggaatcccgagactgagattctcatctcaaagacccagatgatatcactgaaatgtgcagcctgtgggtttgtctcagatgttgatatgagggacaagctcacaaccttcatcctgaaaaacccaccagaacagaagaagggcggaaaagacaagaaggccatgaggagagctgagaaggaacgcctgaaggaaggtgaggctgctgatgaggagcagaagaaactgaagaaggatgcaaagaagaagggttccaaggattccactgctaagggtttgaagaagaaggctactactgctactggctctgatgaggaccactcatcctctccaactcgcagccatgatggtgacaaagcagctgcagatgatgatgacgatgatgtccagtggcagactgacacttcaattgaggctgcgaagcagcgcatgcaagagcagctgagtgcagcaactgctgaaatggtgatgctgtcgactgaggagactgagaagaagatgaaacagccaacccacaaagatggaagcactaatggttcagcaaaagaaatccctaatgacaagcctgccgtcactaagcctagtccctatgaagaactgattggagacatcaaggctagcctaggaagtgctccgaccccttcccagctcaaggctgtgctggcctcatcaacccttcccccccaggacgtgatgaatgctcccctggaggctctctttggtggtgtgggtaagggattcaccaaagaggttgtgaagaacaagaagtaccttgcagttgctgtgccagatgagggtgcccagacccttctggttcaggccattgaggcttttggtgggaagtgcaaccctgaggcgctgaaggaggttcccgttgtcctcaaagccctctacgatggagatatcctggacgaggaaaccattgtggactggtacaatgatgctgtcgcagctgggaaggactcccaggttgtcaagaatgccaagccgttcgtcgagtggctccagagtgccgagtctgatgaagagggtgacgacgagtgaagaggccacgctgctctactgctaatggccgaacttgataatattatttcaataagtttgttttgcttgcctggtgtcggtgtttaaaactgttaattgtcgtgtggcgcagcatactcttctgttgctgcatgtgtcgtcgtcagtttggttgtctgttggatgtcacagtttattatggattgctactatacaagtatttctttcggatgtgttgtataacctttcgggatgtaacattttatgattgcactgttgcttcaaaaaaaaaaaa

SEQ ID NO: 18041 - protein, 451 aa, Zea mays
MALQNIGASNRDDAFYRYKMPRMITKIEGRGNGIKTNVVNMVDIAKALARPASYTTKYFGCELGAQSKFDEKTGISLVNGAHDTAKLAGLLEVFIKKYVQCYGCGNPETEILISKTQMISLKCAACGFVSDVDMRDKLTTFILKNPPEQKKGGKDKKAMRRAEKERLKEGEAADEEQKKLKKDAKKKGSKDSTAKGLKKKATTATGSDEDHSSSPTRSHDGDKAAADDDDDDVQWQTDTSIEAAKQRMQEQLSAATAEMVMLSTEETEKKMKQPTHKDGSTNGSAKEIPNDKPAVTKPSPYEELIGDIKASLGSAPTPSQLKAVLASSTLPPQDVMNAPLEALFGGVGKGFTKEVVKNKKYLAVAVPDEGAQTLLVQAIEAFGGKCNPEALKEVPVVLKALYDGDILDEETIVDWYNDAVAAGKDSQVVKNAKPFVEWLQSAESDEEGDDE

SEQ ID NO: 18042 - DNA, 1688 bp, Phaseolus vulgaris
  CDS (89)..(1420)
gaattcggcacgagtagaggccgaaattgctgctgcttataacttgaattctagcgtttgctgttactgaatatctctgaaactcaacatggctttacagaacattggtgctggaaacagcgatgatgccttctacaggtacaagatgcctcgaatggtcaccaaaattgagggcagaggtaatggcatcaaaacaaatgttgtcaatatggttgatattgcgaaacgcttggctaggccagcttcctacacaacaaagtatttcggatgtgagcttggagcccaatcaaagtttgatgagaaaaccgggacttcccatgttaatggtgcacatgaaactgcaaaacttgctggccttcttgagatcttcatcaagaaatatgtccagtgttatggttgtgggaatcctgaaactgaaatcttaattactaagaaccagatgatccagctgaaatgtgctgcttgtggttttgtgtctgatgttgatatgagggacaagctgactactttcatcgttaagaatcctccagaagtaaagaaaggatctaaggacaagaaggccatgcggagagctgagaaggagagactcaaggaaggggaagcagctgatgaggaactgaagaaagtgaagaaagaggttaagaagaaaggttcttcatctgcaaaggatggcactgcaaaatccaccatttcaaagaagaaaggaagtggctctgatgaagaccgcagatcgcctactcacaaacaaattgaagagaaagaggaggctaaggatgaagatgatgatgatgatgatggtgtgcaatggctgacagatacgtcacttgatgcttctcgtcaacgtatcaaagaacagttaagtgccgtgacagctgatatggttatgcttactactgatgaaccagagaagaagaaaaaagcagcaagtaatcaaaatggtggttctcagaatggtaattcaaagaactacgggactgtggtcgctgaagtgaaagcaaatttgaagaaaggttttggagcaagtgaattgctttctcatcttgcagcacttcctgtacctgctcaagaaaagatgagtgctctggttgaagctctattcgagggaacagagaaaggttttggtagagaaactcttaagaagaagaattacttcgctgcagctgttgccgaggagggatcccagattttattgcttcatgctattgaggaattctgttgcaagcctaattccaatgctttgaaagaggttgccctggttctgaagacactgtacgatgctgatgtgttggaggaagaggccatagttctgtggtatcaaaagggattgaaaggcgataacaagaactccaagatttggaagaatgctcaacctttcattgactggcttcagaacgcagaatcagaatcggatgaagaataacgtgtgatcattatgatggaggaagaaaaactctttaagattttcctttccttatgtttgcttgcttgtgtcatgtcctttatttccaataaaggtccgttggccccatgtgttgaactactctaatctttaaacttaagggttcatgcctgtctggtctagtagcatgtacgtgtcagtgaatggttcttgagtattttgtttttttatgattatgttttatgcttttaataaaacgtcttgataaaaaaaaaaaaaaaaaaaaaaa

SEQ ID NO: 18043 - protein, 443 aa, Phaseolus vulgaris
MALQNIGAGNSDDAFYRYKMPRMVTKIEGRGNGIKTNVVNMVDIAKRLARPASYTTKYFGCELGAQSKFDEKTGTSHVNGAHETAKLAGLLEIFIKKYVQCYGCGNPETEILITKNQMIQLKCAACGFVSDVDMRDKLTTFIVKNPPEVKKGSKDKKAMRRAEKERLKEGEAADEELKKVKKEVKKKGSSSAKDGTAKSTISKKKGSGSDEDRRSPTHKQIEEKEEAKDEDDDDDDGVQWLTDTSLDASRQRIKEQLSAVTADMVMLTTDEPEKKKKAASNQNGGSQNGNSKNYGTVVAEVKANLKKGFGASELLSHLAALPVPAQEKMSALVEALFEGTEKGFGRETLKKKNYFAAAVAEEGSQILLLHAIEEFCCKPNSNALKEVALVLKTLYDADVLEEEAIVLWYQKGLKGDNKNSKIWKNAQPFIDWLQNAESESDEE

SEQ ID NO: 18044 - DNA, 1188 bp, Schizosaccharomyces pombe
  CDS (1)..(1188)
atggcaaccattaacatccgacgtgatgtcaaagatagcttctatcgttatagaatgccaaaactgcaatctaaaatcgaaggcaagggaaatggtataaagactgtaatcccgaacatgtccgatatcgctaaggcgttgggaagaccccctttgtatgtaactaaattttttggttttgagttgggcgcccaaaccaccattattgctgacatggaccgttacattgtgaacggtgctcatgatgctggaaagcttcaagatctgttggatgtatttatccgccgttttgtgctatgcgcttcttgtcaaaatccggaaactgaattaagcattaataagaaggatcagacaatttcctatgattgtaaagcttgtggctatcgtggtgtcattgacggtcgtcacaagcttactggtgtcatcgtcaagaaccctcctgcaaaaaagaagtcccacaaacataaaagggattctcctgttgcagaggaagaagatggtgctgaagacgaactcactcgtagaattcgtcaagaagccgcggaactccctaccgctgaggtcgtaaatgacgaagattgggctgtggataccagtgaagaagctgttcgtgctcgtgttcaagagttagaaggtaatatgaaagattcgctcactttgagtgacttacgtggcgacgaggaagaagcggaatctagccgttatgatcaattcggtgaatggcttgaagacaactaccctggtgtttctgatgttgaaatttacaaaaagatgaaggaagagaatattcatcataaaagtaaagctattgttgtactagttcaatgtattattacttcgccttacgttggggagtttgaaaagcatggtgcattgtttaaaaagctttgcacgacagataaacatgaacgtgctcttcttggtgggtttgaacgtttgatggaaaacactgaattagtgcacatcgacgttgttcccaaggtactcttggagatttatcagaatgacttggtctctgatgacatgtttgagaaatggggagcaaaggctagcaagaaatatgtgagccgtgaaactagtaagaagattcatgaagctgctgaaccttttttgacatggttggctgaagcaagtgacgaatctgagagtgaagatgaggaggaagaagaagaagacgacgacgaataa

SEQ ID NO: 18045 - protein, 395 aa, Schizosaccharomyces pombe
MATINIRRDVKDSFYRYRMPKLQSKIEGKGNGIKTVIPNMSDIAKALGRPPLYVTKFFGFELGAQTTIIADMDRYIVNGAHDAGKLQDLLDVFIRRFVLCASCQNPETELSINKKDQTISYDCKACGYRGVIDGRHKLTGVIVKNPPAKKKSHKHKRDSPVAEEEDGAEDELTRRIRQEAAELPTAEVVNDEDWAVDTSEEAVRARVQELEGNMKDSLTLSDLRGDEEEAESSRYDQFGEWLEDNYPGVSDVEIYKKMKEENIHHKSKAIVVLVQCIITSPYVGEFEKHGALFKKLCTTDKHERALLGGFERLMENTELVHIDVVPKVLLEIYQNDLVSDDMFEKWGAKASKKYVSRETSKKIHEAAEPFLTWLAEASDESESEDEEEEEEDDDE

SEQ ID NO: 18046 - DNA, 1218 bp, Saccharomyces cerevisiae
  CDS (1)..(1218)
atgtctattaatatttgtagagataatcatgatccattttaccgttacaaaatgcctcccatccaagccaaggtggaaggtagaggtaacggtatcaagactgccgttttgaacgtcgctgacatctctcacgcgctaaatagacctgctccatatattgtcaagtattttggtttcgaattaggtgctcaaacttccatctctgttgacaaagatcgttatttagttaatggtgttcacgaacctgccaaattgcaagacgtattggatggctttattaacaagtttgttctctgtggaagctgtaaaaatccagaaacggagatcatcattaccaaagataatgatttggttcgagactgtaaagcctgtggtaagagaactccaatggacttgagacataaactatcatccttcattttgaaaaacccacctgactccgtttctggttccaagaagaagaagaaagcagctaccgcttcggccaatgttcgtggtggtgggttgtccattagtgatattgctcaaggtaagtctcagaatgcaccttcagatggcaccggctcatccactccacaacatcatgacgaagacgaagatgaattatctcgtcaaatcaaggcggctgcctctaccttagaagatatcgaggtcaaagatgacgaatgggcggttgatatgtctgaagaagccattagagctcgtgccaaggaactagaagtgaactctgagctcactcaactggatgaatatggtgaatggattttggagcaggctggtgaagataaggagaacttaccatcagatgtggagctttataagaaggctgcagaactagacgtcttgaatgatccaaaaattggttgtgtcttggcgcaatgtctattcgatgaggatatcgtaaacgaaatcgctgaacataatgcatttttcactaaaattttagtcactccagaatacgaaaagaactttatgggtggtattgaaagatttttaggtttagaacataaggatctaatcccactattaccaaaaattttggtacaactatacaataatgatatcatctcggaagaagaaatcatgagatttggtaccaaatcatccaagaaatttgtacctaaggaggtatccaaaaaggttcgtagggctgctaagccattcattacgtggttagaaaccgctgaaagtgacgatgatgaagaagacgacgaatag

SEQ ID NO: 18047 - protein, 405 aa, Saccharomyces cerevisiae
MSINICRDNHDPFYRYKMPPIQAKVEGRGNGIKTAVLNVADISHALNRPAPYIVKYFGFELGAQTSISVDKDRYLVNGVHEPAKLQDVLDGFINKFVLCGSCKNPETEIIITKDNDLVRDCKACGKRTPMDLRHKLSSFILKNPPDSVSGSKKKKKAATASANVRGGGLSISDIAQGKSQNAPSDGTGSSTPQHHDEDEDELSRQIKAAASTLEDIEVKDDEWAVDMSEEAIRARAKELEVNSELTQLDEYGEWILEQAGEDKENLPSDVELYKKAAELDVLNDPKIGCVLAQCLFDEDIVNEIAEHNAFFTKILVTPEYEKNFMGGIERFLGLEHKDLIPLLPKILVQLYNNDIISEEEIMRFGTKSSKKFVPKEVSKKVRRAAKPFITWLETAESDDDEEDDE

SEQ ID NO: 18048 - DNA, 1254 bp, Brassica napus
  CDS (1)..(1254)
atggcgctgcagaacattggtgcgtccaaccgcaacgatgcgttttacaggtacaagatgcccaagatggttaccaagattgaagggaaaggtaacggcatcaagaccaacattgtcaacaacgtcgagattgcaaaggctctggggaggcctgcttcttacacgaccaagtactttggttgtgagcttggagcgcagtccaagtttgatgagaagactgggacttcgcttgtgaatggagctcacagcacctctaagcttgctgggcttcttgaggtttttatcaagaagtatgtccagtgctatggatgtgggaaccctgagactgagattgttattaccaaggcgcagatggtgaatctcaagtgtgctgcttgtgggtttatctctgaggttgacatgagggataagctgacgacgtttattctcaagaacccaccggaggcgaagaagggggggaaggataagaaggctatgcggagagctgagaaggagaggcttaaggaaggtgaagcagctgatgaggcgcagaagaagctcaagaagaaagcgcattctaacgggaacgagggttcttctaaggcgtctaagaatcatacttctgatgaggatatcagcccaaagcgtgatgatgagagtgcagatgaggtggatgatgatgatgaagacgatggtatccagtggcaaaccgatacttctagagaagcagctgagaagagaatgaaggaacagctgagtgctgcaactgccgaattggtgatggtctctttaaaagaagaagaggagaagaagtcgcccaagaagctcgtgcaggtgatgaaagagtgtctgaagaaaggctcaaccataagcgagctcaaagctttcatctcctctctccctgatcctcctcaagatgtcatggacgcactcttgaacgctctctttgatggtgtaagcaaaggatttactgaagaagtgactaagaataagaagtacttagcggctgcaacgcaagaggatggttcacagatgcatctgctcaactcaatcggatcattctttggaaagaaaggaaacgatgaggtgggtaaggaggtggctctggttcttaaagaactgtacgatgaagacattgttgaggaagagtttgtgttggaatggtaccaaaagggtctgaacggagctgacaaaagctcgcctgtttggaagaatgttaagccttttgtggtgtggctacagagcgctgagtcggagaccgaaggggaggattga

SEQ ID NO: 18049 - protein, 417 aa, Brassica napus
MALQNIGASNRNDAFYRYKMPKMVTKIEGKGNGIKTNIVNNVEIAKALGRPASYTTKYFGCELGAQSKFDEKTGTSLVNGAHSTSKLAGLLEVFIKKYVQCYGCGNPETEIVITKAQMVNLKCAACGFISEVDMRDKLTTFILKNPPEAKKGGKDKKAMRRAEKERLKEGEAADEAQKKLKKKAHSNGNEGSSKASKNHTSDEDISPKRDDESADEVDDDDEDDGIQWQTDTSREAAEKRMKEQLSAATAELVMVSLKEEEEKKSPKKLVQVMKECLKKGSTISELKAFISSLPDPPQDVMDALLNALFDGVSKGFTEEVTKNKKYLAAATQEDGSQMHLLNSIGSFFGKKGNDEVGKEVALVLKELYDEDIVEEEFVLEWYQKGLNGADKSSPVWKNVKPFVVWLQSAESETEGED

SEQ ID NO: 18050 - DNA, 1332 bp, Glycine max
  CDS (1)..(1332)
atggccttgcagaacattggtgctggaaatagtgatgatgccttctatcggtataagatgcctaaaatgattaccaagattgagggtagagggaatggcatcaaaacaaatattgtcaacatggttgacattgccaaggcattggcaaggccaccctcttacacaaccaagtactttggttgcgaacttggggcacagtctaaatttgatgagaaagttgggacttctcatgttaatggggcacatgacactgcaaaacttgcagctcttcttgagatctttatcaagaaatacgtccagtgttatggttgtggaaaccctgaaactgagatattgattactaagaaccaaatgatccagctgaaatgcgctgcttgtggttttgtgtcagatgtggatatgagagacaagctgactagctttattattaaaaaccctcctgaaacaaagaaaggatccaaagacaagaaggctatgaggagagccgagaaggagagactgaaggaaggtgcagcagctgacgaggaacaaaagaaaatgaagaaagagactaagaagaaaagctcgtccacttccaaggatgagaccacaaagttgacctctacaaagaagaaagccagtggctctgatgaagatcatcgatctccagctcacagtcaagttgatgagaaagaagaggctcctgatgaagatgatgatgatggtgaagtgcagtggctaacagatacgtcattagaggctgctcagcagcgtatccaagaacagctaagtgccgtaacagctgatatggtcatgctctccacagatgagccagagaagaaggaaaaagcatcaagtaagacaagtgatggttctgaaaatggtaatgcgatgcactacaggaaactggttggagaagtgaaagcaatcttgaacaaaggtgttgtggcgagtgaattgcagtcccatatggaagcaattccagcaccagctcaagaaaagatcagtgctctgattgaggccttatttgagggtattgagaaagggtttgcaaaagaagtggtcaagaagaagcgctaccttgctgctgcagtttccatggaggagggatcacatttgctattgcttcatgcaattgaggctttctgtctaaagtccacttccaatgctttgaaggaaattcccattgttttgaaggcactttatgattctgatctgttggaggaagagcacatcgtgcagtggtatcaagaagggctgaatggcgacaacaaggactctcagatatggaagaaggccaaacctttgattgaatggcttcaaagtgcggaatcagaaacagaggaagagtaa

SEQ ID NO: 18051 - protein, 443 aa, Glycine max
MALQNIGAGNSDDAFYRYKMPKMITKIEGRGNGIKTNIVNMVDIAKALARPPSYTTKYFGCELGAQSKFDEKVGTSHVNGAHDTAKLAALLEIFIKKYVQCYGCGNPETEILITKNQMIQLKCAACGFVSDVDMRDKLTSFIIKNPPETKKGSKDKKAMRRAEKERLKEGAAADEEQKKMKKETKKKSSSTSKDETTKLTSTKKKASGSDEDHRSPAHSQVDEKEEAPDEDDDDGEVQWLTDTSLEAAQQRIQEQLSAVTADMVMLSTDEPEKKEKASSKTSDGSENGNAMHYRKLVGEVKAILNKGVVASELQSHMEAIPAPAQEKISALIEALFEGIEKGFAKEVVKKKRYLAAAVSMEEGSHLLLLHAIEAFCLKSTSNALKEIPIVLKALYDSDLLEEEHIVQWYQEGLNGDNKDSQIWKKAKPLIEWLQSAESETEEE

SEQ ID NO: 18052 - DNA, 1344 bp, Brassica napus
  CDS (1)..(1344)
atggctttacaaaacattggtgcctccaaccgtgacgatgccttctacaggtacaagatgccgaggatgatgaccaagatcgaaggtagaggtaacggcatcaagactaatgtggttaacatggttgaaatcgccaaggccttggggagacctgctgcttacaccaccaagtactttggctgtgagctgggtgcgcagtccaagtttgatgagaagacgggaacctcattggttaacggagcccacgacacttccaagcttgcggggcttcttgagaactttatcaaaaagtatgtccagtgttatggatgcggaaaccccgaaaccgagatacttatcaccaagacgcagatgctccagctgaaatgtgcggctggtgggtttatctcggatgtcgatatgagggacaagctcactgcttttattctgaagcatcctccagaacaaaagaaatcttcgaaagacaagaaatctatgaggagagctgagaaagaaaggctgaaggaaggtgaagcggctgatgaggagatgaagaaacttaagaaggaggctgcctctaagaagaaaacaactgctggtagttcgaaagagaaagttttgaagaagaaagatcattccccacctccaagccagtctgatgaaaatgagcaagcagacagtgaagaagaagaagaagatgatgatgatgtccagtggcaaacagatacatcgcgggaggctgctgaaaaacgaatgaaagaacagctcagcgctgcaacagcagatatggtgatgctaactacgatggaagagaagacgccagcagttgtggagaagaagtcgcttgaagtgcagcaaccattgaagaagctacatgagaatggcatcggcaagatccctgaaaatgctcatgaaaagcttgtgagtgagataaaagagcttcttaacaacggttcaactccttcccaactcagaaccgccatatcgtcaaactccgccactcctcaggagaggatggacgccttgttctctgctctttttgctggccaagggaaggggttcgctaaagatactctcaagaagaagaaatatctcgtggcgttcatgatgatgcaagaagatgatggagctcctcggcagatggttttgcttaacgcaattgaatctttctgcgagaaagctaatgcagaggctgctaaagaagtcgctcttgttatcaaaggtttttatgatgaagaccttctggaggaagatgtcatttttgcatggtacaataaaggcatcaaaagctcgccggtgatgaagaacgtgactccttttatcgagtggctcaagaacgcggagtccgagtccgaagaagagtga

SEQ ID NO: 18053 - protein, 447 aa, Brassica napus
MALQNIGASNRDDAFYRYKMPRMMTKIEGRGNGIKTNVVNMVEIAKALGRPAAYTTKYFGCELGAQSKFDEKTGTSLVNGAHDTSKLAGLLENFIKKYVQCYGCGNPETEILITKTQMLQLKCAAGGFISDVDMRDKLTAFILKHPPEQKKSSKDKKSMRRAEKERLKEGEAADEEMKKLKKEAASKKKTTAGSSKEKVLKKKDHSPPPSQSDENEQADSEEEEEDDDDVQWQTDTSREAAEKRMKEQLSAATADMVMLTTMEEKTPAVVEKKSLEVQQPLKKLHENGIGKIPENAHEKLVSEIKELLNNGSTPSQLRTAISSNSATPQERMDALFSALFAGQGKGFAKDTLKKKKYLVAFMMMQEDDGAPRQMVLLNAIESFCEKANAEAAKEVALVIKGFYDEDLLEEDVIFAWYNKGIKSSPVMKNVTPFIEWLKNAESESEEE

SEQ ID NO: 18054 - DNA, 1344 bp, Brassica napus
  CDS (1)..(1344)
atggctttacaaaacattggtgcctccaaccgtgacgatgccttctacaggtacaagatgccgaggatgatgaccaagatcgaaggtagaggtaacggcatcaagactaatgttgttaacatggttgaaatcgccaaggccttggggagacctgctgcttacacgaccaagtactttggctgtgagctgggtgcgcagtccaagtttgatgagaagacgggaacctcattggttaacggagcccacgacacttccaagcttgcggggcttcttgagaactttatcaaaaagtatgtccagtgttatggatgcggaaaccccgaaaccgagatacttatcaccaagacgcagatgctccagctgaaatgtgcggcttgtgggtttatctcggatgtcgatatgagggacaagctcactgcttttattctgaagcatcctccagaacaaaagaagtcttcgaaagacaagaaatctatgaggagagctgagaaagaaaggctgaaggaaggtgaagcggctgatgaggagatgaagaaacttaagaaggaggctgcctctaagaagaaaacaactgctggtagttcgaaagagaaagttttgaagaagaaagatcattccccacctccaagccagtctgatgaaaatgagcaagcggacagtgaagaagaagaagaagatgatgatgatgtccagtggcaaacagatacatcgcgggaggctgctgaaaaacgaatgaaagaacagctcagcgctgcaacagcagatatggtgatgctaactacgatggaagagaagacgccagcagttgtggagaagaagtcgcttgaagtgcagcaaccattgaagaagctacatgagaatggcatcggcaagatccctgaaaatgctcatgaaaagcttgtgagtgagataaaagagcttcttaacaacggttcaactccttcccaactcagaaccgccatatcgtcaaactccgccactcctcaggagaggatggacgccttgttctctgctctttttgctggccaagggaaggggttcgctaaagatactctcaagaagaagaaatatctcgtggcgttcatgatgatgcaagaagatgatggagctcctcggcagatgtttttgcttaacgcaattgaatctttctgcgagaaagctaatgcagaggctgctaaagaagtcgctcttgttatcaaaggtttttatgatgaagaccttctggaggaagatgtcatttttgcatggtacgataaaggcatcaaaagctcgccggtgatgaagaacgtgagtccttttatcgaatggctcaagaacgcggagtccgagtccgaagaagagtga

SEQ ID NO: 18055 - protein, 447 aa, Brassica napus
MALQNIGASNRDDAFYRYKMPRMMTKIEGRGNGIKTNVVNMVEIAKALGRPAAYTTKYFGCELGAQSKFDEKTGTSLVNGAHDTSKLAGLLENFIKKYVQCYGCGNPETEILITKTQMLQLKCAACGFISDVDMRDKLTAFILKHPPEQKKSSKDKKSMRRAEKERLKEGEAADEEMKKLKKEAASKKKTTAGSSKEKVLKKKDHSPPPSQSDENEQADSEEEEEDDDDVQWQTDTSREAAEKRMKEQLSAATADMVMLTTMEEKTPAVVEKKSLEVQQPLKKLHENGIGKIPENAHEKLVSEIKELLNNGSTPSQLRTAISSNSATPQERMDALFSALFAGQGKGFAKDTLKKKKYLVAFMMMQEDDGAPRQMFLLNAIESFCEKANAEAAKEVALVIKGFYDEDLLEEDVIFAWYDKGIKSSPVMKNVSPFIEWLKNAESESEEE

SEQ ID NO: 18056 - DNA, 1320 bp, Glycine max
  CDS (1)..(1320)
atggctttacagaacattggtgctgcaaacagtgatgatgccttctacaggtataagatgcctaggatgattaccaaaattgagggcagaggtaatggcatcaaaactaatgttgtcaatatggttgacattgcaaaggcactggcaaggcctgcgtcttacacgaccaagtattttggttgtgagcttggggcccagtcgaaatttgatgagaagacccgcacttctcacgtcaatggagcacacgatactgctaagcttgctggccttcttgagaacttcattaagaaatatgtccagtgttatggttgtggaaatcctgaaactgagatcataattactaagaatcaaatgatccagctgaaatgcgcagcttgtggttttgtgtctgatgttgatatgagagacaagctgactaccttcatcattaagaaccctccagaagttaagaaaggatccaaagacaagaaggccatgaggagagctgagaaggagagactgaaggaaggtgaattagctgatgaggaacagaagaaagtgaagaaagaggttaagaagaaaggctcttcatcttctaaggatggcactaaatccacctcttcaaagaagaaagcaagtggctctgatgaagaccgcacttcacctactcacagtcaaattgatgagaaagaggaggctctagatgaggatgatgacgatgatgtgcaatggcagacagatacgtcacttgatgctgctcgtcaacgtatccaagaacaattaagtgctgtgacagctgatatggttatgctttctacagatgaaccagagaagaaaaaagaagcaagtaatggaaatgatggttctcagaatggtaactcaatgcactgcaggaccttggttggtgaagtgaaagcaaatttgaagaaaggtgttggagcaaatgaattgctgtcgcaacttgcagcacatcctgtacctgctcaagaaaagatgagtgctctggttgaagctttgttcgagggaactgagaaaggttttgctaaagaagctgataaaaagaagaactacttttctgttgctgttgcggatgagggatcccagccgttgttgcttcatgctattgaagagttttcttgcaagtctacttcaaatgctttgaaggaggttgccctggttctaaaggcactctacgatgctgatgtgttagaggaagaacacatagtgcagtggtatcaaaagggactgaagggtgataacaagaactctaggatttggaagaatgctcaacctttcattgattggcttcagaatgcagaatcagaaaccgaggaagaataa

SEQ ID NO: 18057 - protein, 439 aa, Glycine max
MALQNIGAANSDDAFYRYKMPRMITKIEGRGNGIKTNVVNMVDIAKALARPASYTTKYFGCELGAQSKFDEKTRTSHVNGAHDTAKLAGLLENFIKKYVQCYGCGNPETEIIITKNQMIQLKCAACGFVSDVDMRDKLTTFIIKNPPEVKKGSKDKKAMRRAEKERLKEGELADEEQKKVKKEVKKKGSSSSKDGTKSTSSKKKASGSDEDRTSPTHSQIDEKEEALDEDDDDDVQWQTDTSLDAARQRIQEQLSAVTADMVMLSTDEPEKKKEASNGNDGSQNGNSMHCRTLVGEVKANLKKGVGANELLSQLAAHPVPAQEKMSALVEALFEGTEKGFAKEADKKKNYFSVAVADEGSQPLLLHAIEEFSCKSTSNALKEVALVLKALYDADVLEEEHIVQWYQKGLKGDNKNSRIWKNAQPFIDWLQNAESETEEE

SEQ ID NO: 18058 - DNA, 1326 bp, Glycine max
  CDS (1)..(1326)
atggctttacagaacattggtgctgcaaacagtgatgatgccttctacaggtataagatgcctaagatgattaccaaaattgagggcagaggtaatggcatcaaaactaatgttgtcaatatggttgacattgcaaaggcattggcaaggcctgcgtcttacacgaccaagtattttggttgtgaacttggggcccagtcgaaatttgatgagaagaccggaacttctcacgtcaatggagcacatgatactactaagcttgctggccttcttgagaacttcattaagaaatatgtccagtgttatggttgtggaaatcctgaaactgagatcataatcactaagaaccaaatgatccagctgaaatgcgctgcttgtggttttgtgtctgatgttgatatgagagacaagctgactaccttcatcattaagaaccctccagaagttaagaaaggatccaaagacaagaaggccatgaggagagctgagaaggagagacagaaggaaggtgaattagctgatgaggaacagaagaaagtgaagaaagaggttaagaagaaaggctcttcatcttctaaggatggcactgctaaatcaacctcttctaagaaaaaagcaagtggctctgatgaagaccacacttcacctactcacagtcaaattgacgagaaagaggaggctccagatgaagatgatgacgacgacgtgcaatggctgacagatacatcacttgatgctgcccgtcaacgtatccaagaacagttaagtgctgtgacagctgatatggttatgctttctacagatgaaccagagaagaagaaaaaaacaataagtaacagaaatggtggttctcacaatggtaactcaatgcactacgggaccctggttggtgaagtgaaagcaaatttcaagaaaggtgttggggcaaatgaattgctgtcccatcttgcagcacttcctgcacctgctcaagaaaagatgagtgcactggttgaagctctatttgatggaattgataaaggttttgctaaagaagctgataagaagaagaactactttgctgctgctgttgctgaggagggatcccagctgttattgcttcatgctattgaagaattttcttgcaagtctacttccaatgctttaaaggaggttgccctggttctaaagacattctacgatgctgatgtgttggaggaagagcacatagtgcagtggtatcaaaagggactgaagggcaataacaagaactctaagatttggaagaatgctcaacctttcattgattggcttcagagtgcagaatcagaaaccgaggaagaataa

SEQ ID NO: 18059 - protein, 441 aa, Glycine max
MALQNIGAANSDDAFYRYKMPKMITKIEGRGNGIKTNVVNMVDIAKALARPASYTTKYFGCELGAQSKFDEKTGTSHVNGAHDTTKLAGLLENFIKKYVQCYGCGNPETEIIITKNQMIQLKCAACGFVSDVDMRDKLTTFIIKNPPEVKKGSKDKKAMRRAEKERQKEGELADEEQKKVKKEVKKKGSSSSKDGTAKSTSSKKKASGSDEDHTSPTHSQIDEKEEAPDEDDDDDVQWLTDTSLDAARQRIQEQLSAVTADMVMLSTDEPEKKKKTISNRNGGSHNGNSMHYGTLVGEVKANFKKGVGANELLSHLAALPAPAQEKMSALVEALFDGIDKGFAKEADKKKNYFAAAVAEEGSQLLLLHAIEEFSCKSTSNALKEVALVLKTFYDADVLEEEHIVQWYQKGLKGNNKNSKIWKNAQPFIDWLQSAESETEEE

SEQ ID NO: 18060 - DNA, 1365 bp, Zea mays
  CDS (1)..(1365)
atggcactgcaaaacattggtgcttcaaacagggatgatgccttctacaggtacaagatgcccagaatgattaccaagatagaaggtcgtggtaatggtatcaagacaaatattgtgaacatggttgacatagcaaaagcacttgccaggcctgcttcctatacaaccaaatactttggatgtgagcttggtgcacagtccaaatttgatgagaagacagggatttccttggttaatggggctcatgatactgcaaagctggctggtctccttgaggtattcatcaagaagtatgtccagtgttatgggtgtgggaatcctgagactgagattctcatatcaaagactcagatgctatcactgaaatgtgcagcctgtgggtttgtctcagatgttgacatgagggacaagctcacaaccttcatcctgaaaaacccaccagaacagaagaagggaggaaaagacaagaagaaggccatgaggagagctgagaaggaacgcctgaaggaaggtggggctgctgatgaggagcagaagaaactgaagaaggatgcaaagaagaagggtgcatcttccaaggagtctactgccaagggttcaaagaagaaggctactgctggtggctctgatgaggaccactcaacctctccaactcgcagccgtgatggtgaccatgcagctgcggacgaggaagaggatgatgatgatgtccagtggcagactgacacttctattgaggctgcgaagcagcgtatgcaggagcagctgagtgcagcaaccgctgaaatggtgatgctgtccactgaggagactgagaagaagaaacatgcaacccacaaagatggcactgctaatggttcagcaaaagaaatacctgatgaaaagcctgctgtcactaagcctagtccctataaagaactgattggagacatcaaggctagcctgggaagtgctcccacacctacccagctcaaggctatgctggcctcctcgacccttccttcccaggacgtgatgaatgctctcctcgaggctctctttgacggtgtgggcaagggatttgcaaaggaggtcgtgaagaacaagaagtaccttgcagttgctgtgccagatgagggtgcccagaccctgctggttcaagccatcgaggcttttggcagcaagtgcaaccccgaggcgctgaaggaggtcccagttgtcctgaaagccctgtacgacggagatatcctggaggaggaaaccgttgtggactggtacaacgctgctgtcgcagctggaaaggactcccaggtcgtcaagaatgccaagccgtttgtcgagtggctccagagcgccgagtctgacgacgaggatggcgatgaatga

SEQ ID NO: 18061 - protein, 454 aa, Zea mays
MALQNIGASNRDDAFYRYKMPRMITKIEGRGNGIKTNIVNMVDIAKALARPASYTTKYFGCELGAQSKFDEKTGISLVNGAHDTAKLAGLLEVFIKKYVQCYGCGNPETEILISKTQMLSLKCAACGFVSDVDMRDKLTTFILKNPPEQKKGGKDKKKAMRRAEKERLKEGGAADEEQKKLKKDAKKKGASSKESTAKGSKKKATAGGSDEDHSTSPTRSRDGDHAAADEEEDDDDVQWQTDTSIEAAKQRMQEQLSAATAEMVMLSTEETEKKKHATHKDGTANGSAKEIPDEKPAVTKPSPYKELIGDIKASLGSAPTPTQLKAMLASSTLPSQDVMNALLEALFDGVGKGFAKEVVKNKKYLAVAVPDEGAQTLLVQAIEAFGSKCNPEALKEVPVVLKALYDGDILEEETVVDWYNAAVAAGKDSQVVKNAKPFVEWLQSAESDDEDGDE

SEQ ID NO: 18062 - DNA, 20 bp, Artificial sequence
  primer
atggctttgcaaaacattgg

SEQ ID NO: 18063 - DNA, 24 bp, Artificial sequence
  primer
tcactcttcctcggactcagactc

SEQ ID NO: 18064 - protein, 476 aa, Artificial sequence
  consensus sequence
  Variant (2)..(10): Xaa in position 2 to 10 is any amino acid
  Variant (11)..(13): Xaa in position 11 to 13 is any or no amino acid
  Variant (15)..(15): Xaa in position 15 is any amino acid
  Variant (23)..(26): Xaa in position 23 to 26 is any amino acid
  Variant (28)..(28): Xaa in position 28 is any amino acid
  Variant (31)..(31): Xaa in position 31 is any amino acid
  Variant (38)..(39): Xaa in position 38 to 39 is any amino acid
  Variant (42)..(45): Xaa in position 42 to 45 is any amino acid
  Variant (47)..(47): Xaa in position 47 is any amino acid
  Variant (50)..(50): Xaa in position 50 is any amino acid
  Variant (53)..(54): Xaa in position 53 to 54 is any amino acid
  Variant (56)..(57): Xaa in position 56 to 57 is any amino acid
  Variant (62)..(62): Xaa in position 62 is any amino acid
  Variant (68)..(74): Xaa in position 68 to 74 is any amino acid
  Variant (75)..(78): Xaa in position 75 to 78 is any or no amino acid
  Variant (82)..(82): Xaa in position 82 is any amino acid
  Variant (85)..(86): Xaa in position 85 to 86 is any amino acid
  Variant (89)..(91): Xaa in position 89 to 91 is any amino acid
  Variant (93)..(94): Xaa in position 93 to 94 is any amino acid
  Variant (97)..(97): Xaa in position 97 is any amino acid
  Variant (99)..(99): Xaa in position 99 is any amino acid
  Variant (101)..(101): Xaa in position 101 is any amino acid
  Variant (103)..(104): Xaa in position 103 to 104 is any amino acid
  Variant (106)..(106): Xaa in position 106 is any amino acid
  Variant (111)..(122): Xaa in position 111 to 122 is any amino acid
  Variant (123)..(126): Xaa in position 123 to 126 is any or no amino acid
  Variant (128)..(128): Xaa in position 128 is any amino acid
  Variant (132)..(136): Xaa in position 132 to 136 is any amino acid
  Variant (138)..(140): Xaa in position 138 to 140 is any amino acid
  Variant (143)..(144): Xaa in position 143 to 144 is any amino acid
  Variant (147)..(147): Xaa in position 147 is any amino acid
  Variant (152)..(195): Xaa in position 152 to 195 is any amino acid
  Variant (196)..(247): Xaa in position 196 to 247 is any or no amino acid
  Variant (249)..(250): Xaa in position 249 to 250 is any amino acid
  Variant (252)..(252): Xaa in position 252 is any amino acid
  Variant (254)..(254): Xaa in position 254 is any amino acid
  Variant (257)..(259): Xaa in position 257 to 259 is any amino acid
  Variant (261)..(315): Xaa in position 261 to 315 is any amino acid
  Variant (316)..(358): Xaa in position 316 to 358 is any or no amino acid
  Variant (360)..(377): Xaa in position 360 to 377 is any amino acid
  Variant (378)..(378): Xaa in position 378 is any or no amino acid
  Variant (380)..(396): Xaa in position 380 to 396 is any amino acid
  Variant (397)..(401): Xaa in position 397 to 401 is any or no amino acid
  Variant (403)..(418): Xaa in position 403 to 418 is any amino acid
  Variant (419)..(423): Xaa in position 419 to 423 is any or no amino acid
  Variant (425)..(427): Xaa in position 425 to 427 is any amino acid
  Variant (429)..(430): Xaa in position 429 to 430 is any amino acid
  Variant (432)..(434): Xaa in position 432 to 434 is any amino acid
  Variant (436)..(440): Xaa in position 436 to 440 is any amino acid
  Variant (442)..(454): Xaa in position 442 to 454 is any amino acid
  Variant (455)..(464): Xaa in position 455 to 464 is any or no amino acid
  Variant (466)..(466): Xaa in position 466 is any amino acid
  Variant (469)..(470): Xaa in position 469 to 470 is any amino acid
  Variant (473)..(474): Xaa in position 473 to 474 is any amino acid
MXXXXXXXXXXXXDXFYRYKMPXXXXKXEGXGNGIKTXXVNXXXXAXALXRPXXYXXKYFGXELGAQXXXXXXXXXXXVNGXHDXXKLXXXLXXFIXKXVXCXXCXNPETXXXXXXXXXXXXXXXXCXACGXXXXXDXXXKLXXFIXKNPPXXXXXXXXXXXXXXXXXXXXXXXXXXXXXXXXXXXXXXXXXXXXXXXXXXXXXXXXXXXXXXXXXXXXXXXXXXXXXXXXXXXXXXXXXXXXXXXXWXXDXSXEAXXXRXXXXXXXXXXXXXXXXXXXXXXXXXXXXXXXXXXXXXXXXXXXXXXXXXXXXXXXXXXXXXXXXXXXXXXXXXXXXXXXXXXXXXXXXXXXXXXXXXXAXXXXXXXXXXXXXXXXXXXLXXXXXXXXXXXXXXXXXXXXXXEXXXXXXXXXXXXXXXXXXXXXLXXXYXXDXXXEXXXXXWXXXXXXXXXXXXXXXXXXXXXXXAXPFXXWLXXAE

SEQ ID NO: 18065 - protein, 53 aa, Artificial sequence
  protein pattern
  Variant (2)..(2): Xaa in position 2 is any amino acid
  Variant (8)..(8): Xaa in position 8 is any amino acid
  Variant (9)..(9): Xaa in position 9 is Ile, Leu or Met
  Variant (10)..(11): Xaa in position 10 to 11 is any amino acid
  Variant (13)..(13): Xaa in position 13 is any amino acid
  Variant (16)..(16): Xaa in position 16 is His, Lys or Arg
  Variant (23)..(23): Xaa in position 23 is Ala, Asn or Val
  Variant (24)..(24): Xaa in position 24 is Ile, Leu or Val
  Variant (25)..(25): Xaa in position 25 is any amino acid
  Variant (27)..(28): Xaa in position 27 to 28 is any amino acid
  Variant (29)..(29): Xaa in position 29 is Asp, Glu or Gly
  Variant (30)..(30): Xaa in position 30 is Ile or Val
  Variant (31)..(31): Xaa in position 31 is Ala or Ser
  Variant (32)..(32): Xaa in position 32 is His, Lys or Arg
  Variant (34)..(34): Xaa in position 34 is Ile or Leu
  Variant (35)..(35): Xaa in position 35 is Ala, Gly or Asn
  Variant (37)..(37): Xaa in position 37 is Pro or Ser
  Variant (38)..(38): Xaa in position 38 is Ala or Pro
  Variant (39)..(39): Xaa in position 39 is any amino acid
  Variant (41)..(42): Xaa in position 41 to 42 is any amino acid
  Variant (44)..(44): Xaa in position 44 is Phe or Tyr
  Variant (47)..(47): Xaa in position 47 is any amino acid
  Variant (48)..(48): Xaa in position 48 is Ala, Asp or Glu
  Variant (52)..(52): Xaa in position 52 is any amino acid
  Variant (53)..(53): Xaa in position 53 is Ser or Thr
FXRYKMPXXXXKXEGXGNGIKTXXXNXXXXXXAXXRXXXYXXKXFGXXLGAXX

SEQ ID NO: 18066 - protein, 36 aa, Artificial sequence
  protein pattern
  Variant (3)..(3): Xaa in position 3 is Ala, Ser or Val
  Variant (5)..(5): Xaa in position 5 is Asp, Glu, Asn, Ser or Thr
  Variant (6)..(6): Xaa in position 6 is Ala, Pro, Ser or Thr
  Variant (7)..(7): Xaa in position 7 is any amino acid
  Variant (8)..(8): Xaa in position 8 is Glu, Lys or Arg
  Variant (10)..(10): Xaa in position 10 is any amino acid
  Variant (11)..(11): Xaa in position 11 is Ala, Asp, Glu, Gly or Gln
  Variant (12)..(12): Xaa in position 12 is any amino acid
  Variant (14)..(14): Xaa in position 14 is Asp or Glu
  Variant (15)..(15): Xaa in position 15 is any amino acid
  Variant (18)..(18): Xaa in position 18 is any or no amino acid
  Variant (20)..(20): Xaa in position 20 is any amino acid
  Variant (21)..(21): Xaa in position 21 is any or no amino acid
  Variant (23)..(23): Xaa in position 23 is any amino acid
  Variant (25)..(26): Xaa in position 25 to 26 is any amino acid
  Variant (28)..(28): Xaa in position 28 is any amino acid
  Variant (33)..(34): Xaa in position 33 to 34 is any amino acid
  Variant (35)..(35): Xaa in position 35 is any or no amino acid
NGXHXXXXLXXXLXXFIXKXXVXCXXCXNPETXXXI

SEQ ID NO: 18067 - protein, 26 aa, Artificial sequence
  protein pattern
  Variant (2)..(2): Xaa in position 2 is any or no amino acid
  Variant (4)..(4): Xaa in position 4 is any or no amino acid
  Variant (7)..(8): Xaa in position 7 to 8 is any amino acid
  Variant (9)..(9): Xaa in position 9 is Gly, Asn, Ser or Thr
  Variant (10)..(10): Xaa in position 10 is any amino acid
  Variant (11)..(11): Xaa in position 11 is Ile, Leu, Met or Val
  Variant (12)..(12): Xaa in position 12 is Asp, Glu or Asn
  Variant (13)..(15): Xaa in position 13 to 15 is any amino acid
  Variant (18)..(19): Xaa in position 18 to 19 is any amino acid
  Variant (21)..(21): Xaa in position 21 is Ile or Val
  Variant (22)..(22): Xaa in position 22 is Ile, Leu or Val
  Variant (23)..(25): Xaa in position 23 to 25 is any amino acid
  Variant (26)..(26): Xaa in position 26 is Pro or Thr
CXAXCGXXXXXXXXXKLXXFXXXXXX

SEQ ID NO: 18068 - protein, 18 aa, Artificial sequence
  protein pattern
  Variant (2)..(4): Xaa in position 2 to 4 is any or no amino acid
  Variant (7)..(7): Xaa in position 7 is Ile, Leu or Val
  Variant (8)..(8): Xaa in position 8 is any amino acid
  Variant (11)..(11): Xaa in position 11 is any amino acid
  Variant (12)..(12): Xaa in position 12 is Glu, Asn, Ser or Thr
  Variant (14)..(14): Xaa in position 14 is Asp or Glu
  Variant (15)..(15): Xaa in position 15 is Glu, Ser or Thr
  Variant (16)..(16): Xaa in position 16 is Asp or Glu
  Variant (17)..(17): Xaa in position 17 is Asp, Glu, Ser or Thr
  Variant (18)..(18): Xaa in position 18 is Asp, Glu or Ser
KXXXPFXXWLXXAXXXXX

SEQ ID NO: 18069 - protein, 18 aa, Artificial sequence
  protein pattern
  Variant (2)..(2): Xaa in position 2 is Ala, Gln, Ser or Thr
  Variant (3)..(3): Xaa in position 3 is Ala, Thr or Val
  Variant (5)..(5): Xaa in position 5 is any amino acid
  Variant (7)..(7): Xaa in position 7 is any amino acid
  Variant (8)..(8): Xaa in position 8 is Ala, Asp or Glu
  Variant (10)..(11): Xaa in position 10 to 11 is any or no amino acid
  Variant (13)..(14): Xaa in position 13 to 14 is any or no amino acid
  Variant (16)..(17): Xaa in position 16 to 17 is any amino acid
  Variant (18)..(18): Xaa in position 18 is Ala, Asp, Glu or Ser
WXXDXSXXAXXAXXRXXX

SEQ ID NO: 18070 - DNA, 2634 bp, Arabidopsis thaliana
  CDS (1)..(2634)
atggtaccatcagagccgcctaatcctgttgggggtggtgaaaatgttccgccttcgatattaggaggacaaggaggagctcctcttccttctcaaccagcatttccttcacttgtctctccgcgtactcagtttggtaacaatatgagtatgagtatgcttgggaatgctccaaatatatcttctcttctcaataatcagtcttttgtaaatggtatccctggttctatgatttctatggatacaagtggtgctgagtctgacccgatgtctaacgtcgggtttagtggtttgtcgtcttttaatgcgtcgagtatggtgtctccgcgctcatcaggtcaagttcagggtcagcagttttcgaatgtttcggctaaccagttgttggctgagcaacaacggaataagaaaatggagacgcagagttttcaacatggtcagcagcagtcaatgcagcagcagttttcgacagtgcgtggtggtggattagcaggtgtgggacctgttaagatggagcctggtcaggtttcgaatgatcagcagcatggtcaagtacaacagcagcaacagaaaatgttgagaaacctagggtcagttaagttggaaccgcagcaaattcaggccatgagaaatttggcccaagtgaaaatggaacctcaacattctgagcagtcattgtttctccaacaacagcagaggcaacaacagcaacaacaacaacaacaatttcttcaaatgccggggcaatctccgcaggctcaaatgaacatatttcagcagcagagacttatgcaacttcaacaacagcaactcttgaaatctatgcctcaacagcgtcctcaattaccacagcagttccaacagcagaatttacctctaaggccacctctgaaaccagtgtatgaacctggcatgggtgctcagcgtcttacacagtatatgtacagacaacaacataggcctgaagacaataatatcgagttctggagaaaatttgtagctgagtactttgctcctaatgccaaaaagagatggtgcgtctctatgtatggcagtggcaggcaaacaacaggcgttttccctcaggatgtgtggcactgtgagatatgtaaccgaaagcctggacgtggttttgaggcaaccgccgaagtccttccgcggctgtttaagattaagtatgagagtgggacgttagaagaactgttatatgtagatatgccaagggagtcccagaattcatctggccaaattgtcctggagtatgcaaaagcaacacaagagagtgtctttgagcatcttcgggttgttcgtgatggccaacttcgaatagtcttctcgccagatcttaagatattctcctgggaattttgtgctcggcggcatgaagagcttattccacgaagacttttgataccgcaggttagtcagcttggatcggcagctcagaaatatcaacaagctgctcaaaatgcaacaacagattctgctcttccggagctacaaaataattgcaatatgtttgttgcatctgctagacaattggcaaaggccctggaagtaccacttgtgaatgatttgggatacacaaagagatatgttcggtgtttgcagatctcagaggtggtaaatagtatgaaggacctgatagattatagcagagaaacacgaacaggaccaatcgagagtttagccaagtttcctcggagaacaggcccttcatctgcactgcctggtccttctcctcagcaagccagcgaccagcttaggcagcagcagcaacaacaacagcagcagcagcaacagcaacaacaacaacaacaacaacagcagcagcagcaaacagtttcccagaatacaaacagtgatcaaagtagtaggcaagttgcactaatgcagggtaatccaagcaatggtgtaaattatgcctttaatgcagcctctgcatccacttccaccagcagcatcgcagggctcatccaccagaattcaatgaagggaagacatcagaatgctgcttacaatcctccaaacagcccctatggaggaaactctgttcagatgcaatcacctagttcctcgggtaccatggtgccatcatcatcgcagcaacaacacaacctgccaacatttcagtctccaacatcctcatctaataacaataatccctctcaaaacgggataccatctgttaatcacatgggttccacaaactcaccagcaatgcaacaggcaggtgaggttgatggaaacgagtctagctcggtgcagaagatactgaatgaaatcctgatgaacaaccaagctcataataatagctcaggaggaagcatggttgggcatgggtctttcgggaatgatgggaagggtcaagctaatgtaaatagttctggtgttttactgatgaatggccaagtgaacaacaacaacaacacaaatattggaggtgctggtgggtttggtggtgggattggtcaatccatggcagcaaacggaatcaataatataaacggtaacaatagtctcatgaacggaagagttgggatgatggtgcgggatccaaacggtcaacaggatttaggaaaccaacttttaggagcagtgaatggtttcaacaattttgattggaacgcgtga

SEQ ID NO: 18071 - protein, 877 aa, Arabidopsis thaliana
MVPSEPPNPVGGGENVPPSILGGQGGAPLPSQPAFPSLVSPRTQFGNNMSMSMLGNAPNISSLLNNQSFVNGIPGSMISMDTSGAESDPMSNVGFSGLSSFNASSMVSPRSSGQVQGQQFSNVSANQLLAEQQRNKKMETQSFQHGQQQSMQQQFSTVRGGGLAGVGPVKMEPGQVSNDQQHGQVQQQQQKMLRNLGSVKLEPQQIQAMRNLAQVKMEPQHSEQSLFLQQQQRQQQQQQQQQFLQMPGQSPQAQMNIFQQQRLMQLQQQQLLKSMPQQRPQLPQQFQQQNLPLRPPLKPVYEPGMGAQRLTQYMYRQQHRPEDNNIEFWRKFVAEYFAPNAKKRWCVSMYGSGRQTTGVFPQDVWHCEICNRKPGRGFEATAEVLPRLFKIKYESGTLEELLYVDMPRESQNSSGQIVLEYAKATQESVFEHLRVVRDGQLRIVFSPDLKIFSWEFCARRHEELIPRRLLIPQVSQLGSAAQKYQQAAQNATTDSALPELQNNCNMFVASARQLAKALEVPLVNDLGYTKRYVRCLQISEVVNSMKDLIDYSRETRTGPIESLAKFPRRTGPSSALPGPSPQQASDQLRQQQQQQQQQQQQQQQQQQQQQQQQTVSQNTNSDQSSRQVALMQGNPSNGVNYAFNAASASTSTSSIAGLIHQNSMKGRHQNAAYNPPNSPYGGNSVQMQSPSSSGTMVPSSSQQQHNLPTFQSPTSSSNNNNPSQNGIPSVNHMGSTNSPAMQQAGEVDGNESSSVQKILNEILMNNQAHNNSSGGSMVGHGSFGNDGKGQANVNSSGVLLMNGQVNNNNNTNIGGAGGFGGGIGQSMAANGINNINGNNSLMNGRVGMMVRDPNGQQDLGNQLLGAVNGFNNFDWNA

SEQ ID NO: 18072 - DNA, 4012 bp, Oryza sativa
  CDS (768)..(3512)
ggttttttttttcgttttcttttttcttcctcgctttctctctctctctctcctcctctccctcttcttcttcttctctgccaaatcccatcgcgaaggcgagagagagagagagagaagaaaaagtgaggggattaacaaactcgcgagtttttcttttttttttttgtttattgtgtgaatttggcccacgtcggcggcggcggcggaggagctaaaccctagccggaggtgaggtggtggtggtggtggtcgggaagtggcggcgccggtggtggggcgggggggcgatttggcgcgcgcggccgagctccggatcgccggatttgtgcgtgagcgcgtggagtttgtggcggtgtgctcgtgttgctgttggtggtgaggtgtgaggtgaggtggggtggtgtggcttctgctgctgctgctactgctgctgctggtgcttaattttgctcgggttcgtggggttgggaagcgagggatgcgatctgggaggtgttcgggagctcggtgttgcttaattccggtgctggtttgcggtggtgcgcgcgcggcttcttctcggggtggatttggtggtggttttttttgttgccctcgttgttgcgggtggatttcggggggagggagagtttgagggatgactgctcgttcttgctcaattccggtggatcttacggtggaaggatggcgagctgagtaaaggcgcgcgatatcttgctgcggtttgtgcggagcttcggagcactttgtcattgctggcaaggatgatgccgtcggggccgctcaacccgatgggtcccgggcagccggtgggcgccgccgcctcgctgctccggacgagctcaagcctgcttagtggtggtcagcaggggatgggcagtggcggaggcatgattccttcgcagtcgcccttctcatcccttgtgtcgccgcgcacgcagtttggtgctaatggcctgctgggaggtggctccaatgtttcctccctgctcaaccggccgtttgggaatggtggacatatgctcggtccggggttgatgccaggtggtggtgggattccaatgaataccctccagcagcagagaggagggcttgatggtgctggcgatttggttggcgtgggaggttctgatcctctctcgtttccttcatcgtcgcaagttagtttgggcaatcagctgggttcagataatctgcatcaaccaccgcaacatcagcaacaacaacagcagctggatgctatgcacgacttgcagcagcagcagcatcatcagcaactgccgatgtcttacaaccaacaacatttgccaccgcaaccaccacagcagccacaggctacagtgaagttggagaatggtggcagcacaggtggggtcaaattggaaccgcagatggggcagcctgaccagaacagctcagcccagatgatgcgccatgctagcaatgttaaaattgagcctcagcagttgcaagctctaagaagtttgagtgcggtgaagatggagcagccgacttcagacccatcagcattcctgcaacagcaacagcagcagcaacatttgctgcagctgacaaagcagaaccctcaagctgctgcggctgctcaactgaaccttttgcaacagcaacggatattgcaaatgcagcagcaacagcagcaacaacaacaacagattctaaagaatctgcctttgcagagaaaccaattacaacagcagcagctacttcgccaacagagtctaaacatgagaactccaggaaagtcggccccttatgagcccggaacctgcgcaaagagattgacccattacatgtatcatcaacagaacaggccacaggataacaatattgagtactggagaaattttgtcaatgagtatttttctccaaatgctaaaaagaggtggtgtgtatctctctatggaagtggtcgccaaactactggagttttccctcaggatgtatggcattgtgagatatgcaatcggaagcctgggcgaggctttgagaccacagttgaggtgttaccacggttgtgccaaatcaaatatgccagtggtacattggaagaattactatatgtggacatgccacgtgaatcgcagaatgcctctggccagattgttttggactataccaaagctgtccaggaaagtgtattcgagcaattgcgtgtggtacgcgaaggacatctaaggatagtttttaatccagatctcaagatcgcgtcttgggagttttgtgctaggcgacacgaggaacttattccacggagatcaataataccacaggttagtcaactgggcgcagttgtgcaaaaataccaaagcgctgttcaaaattcgacaaatctgtcaactcaagacatgcagaataattgcaactcgtttgttgcatgtgcccgccaattggctaaagcactggaggtgccattggttaatgatctgggatacacaaaacgatatgtgcgctgccttcagattgcagaggtggtaaactgtatgaaagatttaattgattacagcagacaaaatggatctggaccaattgctagtttgcatagctttcctcggaggacttcatcaggggtcagccctcaccagtcacagcagcaacagcctgaagagcagcaatctataccgcagagttcaaaccaaagcggtcaaaatgctgctcccatgaccggtgtgcaggcttctgcctctgcaaatgcagatgtgacatcaaataattctctcagctgtgcaccctcaacgtctgcaccttcaccatccgttgttgggctcctccaaggttcaatgaactctagacaagatcatccaatgagcagtgctaatggtccatataccagtggaaacagtgctgcaattcccaaggtgaactcgacaacctcactgcagtcaaatccatctacctcttttccttcacccatgccaacaacatccaataacaacatgatgcctgcccctcagagcacaaaccaactcagctccccaaccacatcatcaaacctaccgccaatgcagccacctgctactcggcctcaggagcctgagccaaatgagtcccaaagctcggttcagagaatattgcaagatttgatgatgtcaccgcagatgaatggtattggccagcttgggaatgacatgaaaagaccgaacggacttacatctagtgttaacggagttaattgtttagttggtaatgctgttacaaataactcaggaatgggaggaatggggtttggggccatgggtgggctaggtccaaatcatgcagctagtggattgagaactgcaatggtgaacaatgcgatggcaatcagtggtaggatgggaatgaatcacagtgcacatgacctatcacagttgggccaactacagcagcaacagcaacatcaacagcagcagcagcagcagcaacatgacttaggaaaccaactgttgaatggacttagagcagcaaacagcttcaataaccttcagtatgactggaaaccatctcaataaagatagaacattacaagttcgacaacacggctgctctcattggcctcattgcttatgaagcatcagtaagagtgccaacacctcgaactgtgtcaaagcatttggcctttgcaataatgctgtcatggaaaaaggtcattcgcgacagcaagcatctgagcctgtcaactgtatgttgtaattgttcgtttagctgcttgtgtgttgtgcaactatggcattttgctgcttgcttcagttgtcttaccgaaagatagagttaaaaggattagagccttgcctgcacctgttgctatcccttgatggtacggtgttacttcttacccggaaaagaagttttacctccctttttttccatgtcagatgacatccgatatgtaatttatcgtcccctccaccttccgcccttagcaagcatatgttctgatatctttctttgcctggggattctctctttgtagccttacttgactttgtataagctgccataatttagtagt

SEQ ID NO: 18073 - protein, 914 aa, Oryza sativa
MMPSGPLNPMGPGQPVGAAASLLRTSSSLLSGGQQGMGSGGGMIPSQSPFSSLVSPRTQFGANGLLGGGSNVSSLLNRPFGNGGHMLGPGLMPGGGGIPMNTLQQQRGGLDGAGDLVGVGGSDPLSFPSSSQVSLGNQLGSDNLHQPPQHQQQQQQLDAMHDLQQQQHHQQLPMSYNQQHLPPQPPQQPQATVKLENGGSTGGVKLEPQMGQPDQNSSAQMMRHASNVKIEPQQLQALRSLSAVKMEQPTSDPSAFLQQQQQQQHLLQLTKQNPQAAAAAQLNLLQQQRILQMQQQQQQQQQQILKNLPLQRNQLQQQQLLRQQSLNMRTPGKSAPYEPGTCAKRLTHYMYHQQNRPQDNNIEYWRNFVNEYFSPNAKKRWCVSLYGSGRQTTGVFPQDVWHCEICNRKPGRGFETTVEVLPRLCQIKYASGTLEELLYVDMPRESQNASGQIVLDYTKAVQESVFEQLRVVREGHLRIVFNPDLKIASWEFCARRHEELIPRRSIIPQVSQLGAVVQKYQSAVQNSTNLSTQDMQNNCNSFVACARQLAKALEVPLVNDLGYTKRYVRCLQIAEVVNCMKDLIDYSRQNGSGPIASLHSFPRRTSSGVSPHQSQQQQPEEQQSIPQSSNQSGQNAAPMTGVQASASANADVTSNNSLSCAPSTSAPSPSVVGLLQGSMNSRQDHPMSSANGPYTSGNSAAIPKVNSTTSLQSNPSTSFPSPMPTTSNNNMMPAPQSTNQLSSPTTSSNLPPMQPPATRPQEPEPNESQSSVQRILQDLMMSPQMNGIGQLGNDMKRPNGLTSSVNGVNCLVGNAVTNNSGMGGMGFGAMGGLGPNHAASGLRTAMVNNAMAISGRMGMNHSAHDLSQLGQLQQQQQHQQQQQQQQHDLGNQLLNGLRAANSFNNLQYDWKPSQ

SEQ ID NO: 18074 - DNA, 2328 bp, Oryza sativa (japonica cultivar-group)
  CDS (1)..(2328)
atgtctggggcgccatgctccaaccttggacttgttcccagggatatgcatggtagtatccctattagcactacaaattcctctgggccaagcattggtgttagctctttggtgacggatgctaactcatcgctctccggaggtgcccagttgcagccaattattgatggtcccattgtgcaacaaagtcctccccaagagcagatgcagaagcgaaggtcttctagtgtaacatcacaacctgttattgatgctgctggtgcattgcatgctcagaagaagtcaagggttgatattaggcaagatgatatcctgcaacacaatttaatccagcaactgctccaaggccagagttctcttcatctgcagggtcaacagaaccctcagattcaagccttgatccatcagcataaactggcacagattcagcagcaacagcagcatcagatgttgcaaccattttcacagatccaacaatctcaagttggcatacctcggcagccacagttgaggcctccactagcgcagcctggaatgcagctagctggacctgttaggactcctgtcgagaatgggctttgttctcgaaggttaaagcaatacttataccataagcgtcaccgaccagagaataatccaataacatactggaggaagcttattgatgaatattttgcaccacgagcaagagaaagatggtgtgtatcctcgtatgagaaaagaggaaatccttcaggtgctgttccacacacagctccggattcatggcgctgtgacatttgtaatacacatgggggcaaaggatatgaggctacctatgaaatacttcctagactctgtcaaattagatttgaccatggtgttatagatgaatacttattccttgacatggccaatgaattccggttgcccaatggactaatgctgctggaacatactaaagttgttcagaaaagcatttatgaacatatgcatgtgatacacgaggggcagttgagaatcatattcacaccagaactgaagataatgtcctgggagttctgttcacggcgacatgatgagtatatcactcgcaggtttctttcaccccaggttgctcatctgctgcaagttgcccagaaatatcaaactgttgccactgaaagtggtccagctggggtctcaaacagtgatgcacagaacatttgcaacatgtttgtgacggcgtcacgacagctagcgaaaaatatagaccaccacaccttaaatgagcatggtctatctaaaagatatgttcgctgcttgcagatatcagaggtggtgaatcacatgaaagacctgattgaattcagccacaagaacaagcttggtcctatagagggtctgaagagctatcccaagcaaactgcagcaaaacttccagtacaaaacatgcacgagccaaagcaactaatggcagctgctggccttcctaatgaccagactaacctcaaagccatgggtgtcaaaacagaaatgaacacccatgcgaatgagacgcacggtattggaccaattggaaatggtccgcagaatgctgctgcacttaacaattaccagaatcccattggaaatggtctgcagaatgctgctgcacttaacaattaccagaatatccttagaagttcagtcgcaaaccagagtttgcttcagcaggaggcatcaagcatgtttaaaggtcccacagcaatgcacaatggcattcagctggaagcatctagatccttccgtggaccaaaccaggtgcatctcgcgcagttccaacatccggcctcatttcagcagcctatgcctcagcagagcagcctccagggcttgggtgtgagcccacaatatcagcagcatgtgctccatcagttgctgcaagaggccaagaacactaacaaccgtgtcttggcgcagcagcagcagcaacaacaacttcaacatgctcctgctaacagtggtcttgcatcaggaggaacggctatcaccggcagcgccgctagcggggatcatatgaataacaacggcgcggtgaagggtgggactccaatggttacaacaggtcctagcagtgtgatcaacaatacagccagcatcctccccagcagaagtaacagcttcaagtcagtgagcagcaacccccaagttgcagctgctgcgggcggcggcattggcagcggcggccatgcggctacccccaaggctgatgctctgcatgagttggatgatcttgacaatcttgggaatctgatcagtactgaactggaggagagtgggctgttcctgggtgaccaggcaggtggtggctactcatggaacatgtga

SEQ ID NO: 18075 - protein, 775 aa, Oryza sativa (japonica cultivar-group)
MSGAPCSNLGLVPRDMHGSIPISTTNSSGPSIGVSSLVTDANSSLSGGAQLQPIIDGPIVQQSPPQEQMQKRRSSSVTSQPVIDAAGALHAQKKSRVDIRQDDILQHNLIQQLLQGQSSLHLQGQQNPQIQALIHQHKLAQIQQQQQHQMLQPFSQIQQSQVGIPRQPQLRPPLAQPGMQLAGPVRTPVENGLCSRRLKQYLYHKRHRPENNPITYWRKLIDEYFAPRARERWCVSSYEKRGNPSGAVPHTAPDSWRCDICNTHGGKGYEATYEILPRLCQIRFDHGVIDEYLFLDMANEFRLPNGLMLLEHTKVVQKSIYEHMHVIHEGQLRIIFTPELKIMSWEFCSRRHDEYITRRFLSPQVAHLLQVAQKYQTVATESGPAGVSNSDAQNICNMFVTASRQLAKNIDHHTLNEHGLSKRYVRCLQISEVVNHMKDLIEFSHKNKLGPIEGLKSYPKQTAAKLPVQNMHEPKQLMAAAGLPNDQTNLKAMGVKTEMNTHANETHGIGPIGNGPQNAAALNNYQNPIGNGLQNAAALNNYQNILRSSVANQSLLQQEASSMFKGPTAMHNGIQLEASRSFRGPNQVHLAQFQHPASFQQPMPQQSSLQGLGVSPQYQQHVLHQLLQEAKNTNNRVLAQQQQQQQLQHAPANSGLASGGTAITGSAASGDHMNNNGAVKGGTPMVTTGPSSVINNTASILPSRSNSFKSVSSNPQVAAAAGGGIGSGGHAATPKADALHELDDLDNLGNLISTELEESGLFLGDQAGGGYSWNM

SEQ ID NO: 18076 - DNA, 2745 bp, Oryza sativa (japonica cultivar-group)
  CDS (1)..(2745)
atgatgccgtcggggccgctcaacccgatgggtcccgggcagccggtgggcgccgccgcctcgctgctccggacgagctcaagcctgcttagtggtggtcagcaggggatgggcagtggcggaggcatgattccttcgcagtcgcccttctcatcccttgtgtcgccgcgcacgcagtttggtgctaatggcctgctgggaggtggctccaatgtttcctccctgctcaaccggccgtttgggaatggtggacatatgctcggtccggggttgatgccaggtggtggtgggattccaatgaataccctccagcagcagagaggagggcttgatggtgctggcgatttggttggcgtgggaggttctgatcctctctcgtttccttcatcgtcgcaagttagtttgggcaatcagctgggttcagataatctgcatcaaccaccgcaacatcagcaacaacaacagcagctggatgctatgcacgacttgcagcagcagcagcatcatcagcaactgccaatgtcttacaaccaacaacatttgccaccgcaaccaccacagcagccacaggctacagtgaagttggagaatggtggcagcacaggtggggtcaaattggaaccgcagatggggcagcctgaccagaacagctcagcccagatgatgcgccatgctagcaatgttaaaattgagcctcagcagttgcaagctctaagaagtttgagtgcggtgaagatggagcagccgacttcagacccatcagcattcctgcaacagcaacagcagcagcaacatttgctgcagctgacaaagcagaaccctcaagctgctgcggctgctcaactgaaccttttgcaacagcaacggatattgcaaatgcagcagcaacagcagcaacaacaacaacagattctaaagaatctgcctttgcagagaaaccaattacaacagcagcagctacttcgccaacagagtctaaacatgagaactccaggaaagtcggccccttatgagcccggaacctgcgcaaagagattgacccattacatgtatcatcaacagaacaggccacaggataacaatattgagtactggagaaattttgtcaatgagtatttttctccaaatgctaaaaagaggtggtgtgtatctctctatggaagtggtcgccaaactactggagttttccctcaggatgtatggcattgtgagatatgcaatcggaagcctgggcgaggctttgagaccacagttgaggtgttaccacggttgtgccaaatcaaatatgccagtggtacattggaagaattactatatgtggacatgccacgtgaatcgcagaatgcctctggccagattgttttggactataccaaagctatccaggaaagtgtattcgagcaattgcgtgtggtacgcgaaggacatctaaggatagtttttaatccagatctcaagatcgcgtcttgggagttttgtgctaggcgacacgaggaacttattccacggagatcaataataccacaggttagtcaactgggcgcagttgtgcaaaaataccaaagcgctgttcaaaattcgacaaatctgtcaactcaagacatgcagaataattgcaactcgtttgttgcatgtgcccgccaattggctaaagcactggaggtgccattggttaatgatctgggatacacaaaacgatatgtgcgctgccttcagattgcagaggtggtaaactgtatgaaagatttaattgattacagcagacaaaatggatctggaccaattgctagtttgcatagctttcctcggaggacttcatcaggggtcagccctcaccagtcacagcagcaacagcctgaagagcagcaatctataccgcagagttcaaaccaaagcggtcaaaatgctgctcccatgaccggtgtgcaggcttctgcctctgcaaatgcagatgtgacatcaaataattctctcagctgtgcaccctcaacgtctgcaccttcaccatccgttgttgggctcctccaaggttcaatgaactctagacaagatcatccaatgagcagtgctaatggtccatataccagtggaaacagtgctgcaattcccaaggtgaactcgacaacctcactgcagtcaaatccatctacctcttttccttcacccatgccaacaacatccaataacaacatgatgcctgcccctcagagcacaaaccaactcagctccccaaccacatcatcaaacctaccgccaatgcagccacctgctactcggcctcaggagcctgagccaaatgagtcccaaagctcggttcagagaatattgcaagatttgatgatgtcaccgcagatgaatggtattggccagcttgggaatgacatgaaaagaccgaacggacttacatctagtgttaacggagttaattgtttagttggtaatgctgttacaaataactcaggaatgggaggaatggggtttggggccatgggtgggctaggtccaaatcatgcagctagtggattgagaactgcaatggtgaacaatgcgatggcaatcagtggtaggatgggaatgaatcacagtgcacatgacctatcacagttgggccaactacagcagcaacagcaacatcaacagcagcagcagcagcagcaacatgacttaggaaaccaactgttgaatggacttagagcagcaaacagcttcaataaccttcagtatgactggaaaccatctcaataa

SEQ ID NO: 18077 - protein, 914 aa, Oryza sativa (japonica cultivar-group)
MMPSGPLNPMGPGQPVGAAASLLRTSSSLLSGGQQGMGSGGGMIPSQSPFSSLVSPRTQFGANGLLGGGSNVSSLLNRPFGNGGHMLGPGLMPGGGGIPMNTLQQQRGGLDGAGDLVGVGGSDPLSFPSSSQVSLGNQLGSDNLHQPPQHQQQQQQLDAMHDLQQQQHHQQLPMSYNQQHLPPQPPQQPQATVKLENGGSTGGVKLEPQMGQPDQNSSAQMMRHASNVKIEPQQLQALRSLSAVKMEQPTSDPSAFLQQQQQQQHLLQLTKQNPQAAAAAQLNLLQQQRILQMQQQQQQQQQQILKNLPLQRNQLQQQQLLRQQSLNMRTPGKSAPYEPGTCAKRLTHYMYHQQNRPQDNNIEYWRNFVNEYFSPNAKKRWCVSLYGSGRQTTGVFPQDVWHCEICNRKPGRGFETTVEVLPRLCQIKYASGTLEELLYVDMPRESQNASGQIVLDYTKAIQESVFEQLRVVREGHLRIVFNPDLKIASWEFCARRHEELIPRRSIIPQVSQLGAVVQKYQSAVQNSTNLSTQDMQNNCNSFVACARQLAKALEVPLVNDLGYTKRYVRCLQIAEVVNCMKDLIDYSRQNGSGPIASLHSFPRRTSSGVSPHQSQQQQPEEQQSIPQSSNQSGQNAAPMTGVQASASANADVTSNNSLSCAPSTSAPSPSVVGLLQGSMNSRQDHPMSSANGPYTSGNSAAIPKVNSTTSLQSNPSTSFPSPMPTTSNNNMMPAPQSTNQLSSPTTSSNLPPMQPPATRPQEPEPNESQSSVQRILQDLMMSPQMNGIGQLGNDMKRPNGLTSSVNGVNCLVGNAVTNNSGMGGMGFGAMGGLGPNHAASGLRTAMVNNAMAISGRMGMNHSAHDLSQLGQLQQQQQHQQQQQQQQHDLGNQLLNGLRAANSFNNLQYDWKPSQ

SEQ ID NO: 18078 - DNA, 2802 bp, Oryza sativa (japonica cultivar-group)
  CDS (1)..(2802)
atggtgccgtcggggccgccgaacccgatgggtcctgggcagccggttggcgcggcctcgttgctcaggacgagctccagcctgctcagcggcggccagcaggggatgggcagtggcggaggcatgcttccttcgcagtcgcccttctcgtccctcgtgtcgccgcgcacgcagtttggtgctaatggcctgctgggaggtggctccaatgtttcctccctgctcaaccggccgtttgggaatgggggacatatgctcggtccggggtcgatgccaggtggtggtgggcttccaatgaataccctccagcagcagagaggagggcttgatggtgctggcgatttggttggcgcgggaggttctgattctctctcgttcccttcatcgtcgcaagttagtttgggcaatcagctgggttcagataatctgcatccaccaccgcaacatcagcagcaacaacaacacctggatgctatgcaggacttgcagcaccagcatcagcatcagcagcaactgccaatgtcttacaaccaacaacagttgccaccgcaaccgccacagcagccgcaggctacagtgaagttggagaatggtggcagcacaggtggggtcaaattggaaccgcagatggggcagcctgaccagaatagcacagcccagatgatgcgcaatgctagcaatgttaaaattgagccgccgcagttgcaagctttgaggagtttgagtgcggtgaagatggagcagcagagttcagacccatcagcattcctgcaacagcaacagcagcagcaacatttgctgcagctgacaaagcagaatcctcaagctgctgcggcagctcaactgaaccttttgcaacagcaacggatattgcaaatgcagcaacaacagcagcaacaacaacagattctaaagaatctgcctttgcagagaaaccaattacaacagcaacaacagcagcagcagcaacagcagcagctacttcgccaacagagtctaaacatgagaactccaggaaaatcggctccttatgagccaggaacctgtgcaaagagattgactcattacatgtatcatcaacaaaacaggccacaggataacaatatcgagtactggagaaactttgtcaatgagtatttttctccaaatgctaaaaaaaggtggtgtgtatctctctatggaagtggtcgtcaaactactggagttttccctcaggatgtatggcattgtgagatatgcaatcggaagcctgggcgaggctttgagaccaccgttgaggtgttaccacgattatgccaaattaaatatgccagtggtacattggaagaattactatatgtcgacatgccacgtgaatcgcagaatgcctctggtcagattgttttggactataccaaagcaatccaggaaagtgtctttgagcagttgcgtgtggtacgcgaaggacatctaaggatagtttttaatcctgatctcaagatcgcttcttgggagttttgtgcaaggcgtcacgaggagcttattccacgtagatcaataatcccacaggttagtcaactgggcgcagttgtgcaaaaataccagagtgctgttcaaaattcgacaaatttgtcaactcaagacatgcagaataattgcaactcgtttgttgcatgtgcccgccaattggctaaagcactggaggtgcctttggtaaatgatctgggatacacaaaacgatatgtgcgctgccttcagattgctgaggtggtaaactgtatgaaagatttgattgattatagcaggcaaaatgggtctggaccaattgctagtttgcatagctttcctcggaggacttcatcaggaggggtaaaccctcaacagtcacagcagcaacagcctgaagaacagcaatctatcccgcagagttcaaaccagagtggtcaaaatgctgctcccatgactggtgtgcaggcttctgcctctgcaaatgcagatgtgacatcaaataattctctcagctgtgcaccctcaacgtctgcaccttcaccgtccgttgttgggctcctccaaggttcaatgaactctagacaagatcatccaatgagcagtgctaatggtccatataccagtggaaacagtgctgcaattcccaaggtgaactcgacaacctcactgcagtcaactccatctacctcttttccttcaccagtgccaacaacatccaataacaacatgatgcctgcccctcagaacacaaaccaactcagctccccaaccgcatcatcaaacctaccgccaatgcagccacctgctactcgacctcaggagcctgatccaaatgagtcccaaagctcggttcagagaatattgcaagatttgatgatgtcaccgcagatgaatggtgttggccagcttgggaatgacatgaaaagaccgaacggacttacatctagtgttaacggagttaattgtttagttggtaatgctgttacaaataactcaggaatgggaggaatggggtttggggccatgggtgggcttggtccaaatcatgcagctagtggattgagaactgcaatagcgaacaatgcgatggcaattagtggtaggatgggaatgaatcacagtgcacatgacctatcacagttgggccaactacagcagcaacagcaacatcaacatcaacatcaacatcaacatcaacagcaacagcagcagcagcagcagcagcaacatgacttaggaaaccaactgttgagtggacttagagcagcaaacagcttcaataaccttcagtatgactggaaaccatctcaataa

SEQ ID NO: 18079 - protein, 933 aa, Oryza sativa (japonica cultivar-group)
MVPSGPPNPMGPGQPVGAASLLRTSSSLLSGGQQGMGSGGGMLPSQSPFSSLVSPRTQFGANGLLGGGSNVSSLLNRPFGNGGHMLGPGSMPGGGGLPMNTLQQQRGGLDGAGDLVGAGGSDSLSFPSSSQVSLGNQLGSDNLHPPPQHQQQQQHLDAMQDLQHQHQHQQQLPMSYNQQQLPPQPPQQPQATVKLENGGSTGGVKLEPQMGQPDQNSTAQMMRNASNVKIEPPQLQALRSLSAVKMEQQSSDPSAFLQQQQQQQHLLQLTKQNPQAAAAAQLNLLQQQRILQMQQQQQQQQQILKNLPLQRNQLQQQQQQQQQQQQLLRQQSLNMRTPGKSAPYEPGTCAKRLTHYMYHQQNRPQDNNIEYWRNFVNEYFSPNAKKRWCVSLYGSGRQTTGVFPQDVWHCEICNRKPGRGFETTVEVLPRLCQIKYASGTLEELLYVDMPRESQNASGQIVLDYTKAIQESVFEQLRVVREGHLRIVFNPDLKIASWEFCARRHEELIPRRSIIPQVSQLGAVVQKYQSAVQNSTNLSTQDMQNNCNSFVACARQLAKALEVPLVNDLGYTKRYVRCLQIAEVVNCMKDLIDYSRQNGSGPIASLHSFPRRTSSGGVNPQQSQQQQPEEQQSIPQSSNQSGQNAAPMTGVQASASANADVTSNNSLSCAPSTSAPSPSVVGLLQGSMNSRQDHPMSSANGPYTSGNSAAIPKVNSTTSLQSTPSTSFPSPVPTTSNNNMMPAPQNTNQLSSPTASSNLPPMQPPATRPQEPDPNESQSSVQRILQDLMMSPQMNGVGQLGNDMKRPNGLTSSVNGVNCLVGNAVTNNSGMGGMGFGAMGGLGPNHAASGLRTAIANNAMAISGRMGMNHSAHDLSQLGQLQQQQQHQHQHQHQHQQQQQQQQQQQHDLGNQLLSGLRAANSFNNLQYDWKPSQ

SEQ ID NO: 18080 - DNA, 2247 bp, Arabidopsis thaliana
  CDS (1)..(2247)
atgaacagaacggtggtctcgggagctgttgaatcgagtttctcattgactgatgctgttggcacggaagctctaaatatgcagaggagcagtggcatcaataataatatgcgtatcccaacatcaccgatgtctttctcctcgaatagcgttaacataccgggttcattggttcttgatggctctgctgcttcaatgcaacacttacctcagcagcagcagcagcaactactacaacagcaaacaggacaaggttctgttccaatgagggagaacagttattcccatgtagataagaaacccagattagaagtgaagcaagaagatatgttgcagcagcagattttacagcagttgatccagcgtcaggaccccacggggaggaatccgcagatgcaagctttgcttcagcagcagagactgaggcaacatcagcagatgcttcaatccatgtcaccctctcagagactccaacttcagcaacagcagcagctgagacagcagttacagcaacaaggaacccaacagattcctcctaatgtacgtccttatgaagttggcgtctgtgctcggaaattgatgatgtacttgtatcatctgcagcaacggcctgctgaaaattgcattacctattggaggaaatttgtggcagaatacttttcacctcgtgcaaagcagagattgtgcttgtcacagtacgaaagtgctgggcaccatgcgcttggcatgttcccacaggcagctccggatatgtggcagtgtgatctttgcggcaccaagtctggaaagggatttgaggcaacgtttgatgtgcttgccagactaattgaaatcaaatttgcaagtggtattattgatgagctgttatatctggatcaccctcgagaaaacagatttcccaatggactgatgatgttagaatatagaaaagcagttcaggaaactgtacacgagcagtttcgtgttgtccgtgagggccatcttcgcatcatattttctcaagatttgaagatactttcttgggagttttgcgctcggcgtcatgaagagcttcttcttcgcagacttattgctccacaggtgaaccaattgcttcaggttgcacagaaatgccagagcacgatctcagagagtgggtcagagggggtttctcagcaggatttacagtcaaatagtaacatggtcttgggagcaggacggcaactggcaaagttcatggaactacagtcgctgaatgatcttggctatccaaaaagatatatcaggactctgcagatatctgaagttgtcaagagcatgaaggatctgatgaatttcactggcgagcaaaaaatcggtcctattgaggggttgaaacggcttttggaacagacggtgacagtgaagctacagaaacagaaaatgcaagagatggagcagtttgggaataatggagctataaatgggccagttcaagctcaaatggtgttaacttcaggaacgatgaatggctcaacgggcaataacaccaataatcaccatcaaattgttggtcgtggagctatgagtgggccagctgaaggtcaaatggtgatatcttcaggaacggtgagcggcgcaactgccaacaacaactccaataatcacaatcaaattgttggtcgtggagctatgaatggctctgctcaagccgcagcagctctgaccaactaccaaagcatgcttatgaggcaaaatgctatgaataacccaaactcaaatacgggtaaacaagaggggttctcgagtcagaacccaaccccaaactcaaaccagagtccatcttcttcatcccagcagaggcataacttagttacaggtggatttcccaactctcctcaaatgcaacagcagcagcgcaccatgaatggccctaccaacatacttccgcagaatcatcctcatcagttacaatcaccacattcacatggtaacactccggagcagcagatgcttcatcagctgttgcaggagatgtctgaaaatggagggagtgtgcaacagcaacaagccttttcgggtcaaagtggtagcaacagtaacgcagagagaaacacaactgcctctacttccaacatctcaggaggaggccgagctccaagtcgaaacaacagttttaaagcagcctcgaacaacaaccttcatttttcagaagatatatcgatcacagaccatgatttctcagaagatggcttcttcaacaacaatgatatctatggtggcttgtaa

SEQ ID NO: 18081 - protein, 748 aa, Arabidopsis thaliana
MNRTVVSGAVESSFSLTDAVGTEALNMQRSSGINNNMRIPTSPMSFSSNSVNIPGSLVLDGSAASMQHLPQQQQQQLLQQQTGQGSVPMRENSYSHVDKKPRLEVKQEDMLQQQILQQLIQRQDPTGRNPQMQALLQQQRLRQHQQMLQSMSPSQRLQLQQQQQLRQQLQQQGTQQIPPNVRPYEVGVCARKLMMYLYHLQQRPAENCITYWRKFVAEYFSPRAKQRLCLSQYESAGHHALGMFPQAAPDMWQCDLCGTKSGKGFEATFDVLARLIEIKFASGIIDELLYLDHPRENRFPNGLMMLEYRKAVQETVHEQFRVVREGHLRIIFSQDLKILSWEFCARRHEELLLRRLIAPQVNQLLQVAQKCQSTISESGSEGVSQQDLQSNSNMVLGAGRQLAKFMELQSLNDLGYPKRYIRTLQISEVVKSMKDLMNFTGEQKIGPIEGLKRLLEQTVTVKLQKQKMQEMEQFGNNGAINGPVQAQMVLTSGTMNGSTGNNTNNHHQIVGRGAMSGPAEGQMVISSGTVSGATANNNSNNHNQIVGRGAMNGSAQAAAALTNYQSMLMRQNAMNNPNSNTGKQEGFSSQNPTPNSNQSPSSSSQQRHNLVTGGFPNSPQMQQQQRTMNGPTNILPQNHPHQLQSPHSHGNTPEQQMLHQLLQEMSENGGSVQQQQAFSGQSGSNSNAERNTTASTSNISGGGRAPSRNNSFKAASNNNLHFSEDISITDHDFSEDGFFNNNDIYGGL

SEQ ID NO: 18082 - DNA, 2451 bp, Arabidopsis thaliana
  CDS (1)..(2451)
atggcttcttcaacttctgggattttctttcaaggagatgatgaatctcaaagcttcattaactctcacttgacttcctcttatgggaattcatctaactctgctcctggatgtggtggacctactggtggctatcacaatctcagtatggtttctggtgatatgcataatccggttatgatgagtgtttcaacacccggtccaagcgcaggagctagttcgcttgtcacagatgctaattcagggctctctggaggtggtcctcatttgcagcgtagtgctagtatcaataatgagtcatatatgcgtttaccggcgtctcctatgtcgttctcttctaataatatcagcatatctggttcatcagttgtagatgggtcgactgtggtacaacggcatgatcctagtgttcagctaggtggctctagtgctacatcactgcctacatcacaaactaatcaaatcccgctttctatggctcggcgtgcttctgaatcgttctttcaggatccaaacaacttaactcaagcacggaaaaaacctagattagattcaaagcaggatgatgctttgcagcagcagattttacgtcagtggcttcagagacaggatatattgcagcagcagcagcaacaacaacaacaaggccaaaatccacagttccaaatcttgcttcagcaacaaaagctgaggcaacagcaacaatatctccagtccctcccaccattgcaacgggttcaactgcagcagcagcaacaagtgcagcaacagcaacagttgcagcagcagcaccaacagcaacagcaacagttgcaacaacaaggaatgcaaatgcaactaaccggtgggccaagaccttatgaaaatagcgtttgcgctcgaagattgatgcagtacctatatcatcagcgacaaaggccttctgagagcagtattgtttactggaggaaatttgtgacggagtatttttctccccgggcaaagaaaagatggtgtctttctcattatgataatgtggggcatagtgcacttggtgtttctcctcaggcagccacggatgaatggcagtgtgatctatgtggttctaaatcgggaagaggatttgaagcaacttttgatgtcttgccaaggcttaacgaaatcaaattcgcaagtggtgtcctggacgagcttctttatctgggtgtaccgtctgaacgcagatatggatctggaattatggtgttagagtatggaaaagcagttcaggagagtgtgtacgaacatatccgtgttgttcgcgaaggccatcttcggattatattctcccaagagctgaagattctctcatgggagttctgtactcgtcgacatgaagaactacttcctcgtcgcctagtagctccacaggtgaaccaattgcttcaggttgcagagaaatgtcagagcacaattgatcaaagtggatcagatgggattcatcaacaagatttgcaagctaatagcaacatggtcatggctgctggacgtcaactagcaaaaagcttggagtcacattcactcaatgacttaggcttctcaaaacgatatgttcggtgtctgcagatttctgaggttgtcagcagcatgaaagatatgattgacttttgccgtgaccaaaaagtgggtccaatcgaggctttgaagagctatccatatcgaatgaaggctggtaaacctcagatgcaggagatggagcaactagcggctgcccgagggcttccacctgataggaacagtctcaacaagctaatggccttgcgcaattccgggataaacataccaatgaacaacatgagcggtcaaggatctcttcccggctctgcacaagctgccgcttttgcgcttaccaactaccagagcatgctcatgaaacaaaaccatctgaattcagacctaaacaacaccacaatccagcaagaaccatcaagaaaccggagtgcatccccgagctatcaaggaactagtcccttgttacctggttttgtgcatagcccatcaataagtggtgtatcttcccatctatctcctcagcggcaaatgccaagctccagttataatggctcaacccagcaataccaccaacagccaccttcctgtagtagcggtaaccaaacattggaacaacaaatgattcatcaaatatggcaacagatggcaaacagcaatggaggctccggtcaacaacaacagtcactttctggtcagaacatgatgaattgcaataccaacatgggaagaaacagaacagattatgttcccgcagcagctgaaacaccaagcacctccaacagattcagaggcatcaaggggttagaccaaagccaaaacctggaaggtattatctctaatacatcgctcaactttgggaataacggggtttttagcaatgaggttgatgaaagcatgggaggatattcttggaagtcatga

SEQ ID NO: 18083 - protein, 816 aa, Arabidopsis thaliana
MASSTSGIFFQGDDESQSFINSHLTSSYGNSSNSAPGCGGPTGGYHNLSMVSGDMHNPVMMSVSTPGPSAGASSLVTDANSGLSGGGPHLQRSASINNESYMRLPASPMSFSSNNISISGSSVVDGSTVVQRHDPSVQLGGSSATSLPTSQTNQIPLSMARRASESFFQDPNNLTQARKKPRLDSKQDDALQQQILRQWLQRQDILQQQQQQQQQGQNPQFQILLQQQKLRQQQQYLQSLPPLQRVQLQQQQQVQQQQQLQQQHQQQQQQLQQQGMQMQLTGGPRPYENSVCARRLMQYLYHQRQRPSESSIVYWRKFVTEYFSPRAKKRWCLSHYDNVGHSALGVSPQAATDEWQCDLCGSKSGRGFEATFDVLPRLNEIKFASGVLDELLYLGVPSERRYGSGIMVLEYGKAVQESVYEHIRVVREGHLRIIFSQELKILSWEFCTRRHEELLPRRLVAPQVNQLLQVAEKCQSTIDQSGSDGIHQQDLQANSNMVMAAGRQLAKSLESHSLNDLGFSKRYVRCLQISEVVSSMKDMIDFCRDQKVGPIEALKSYPYRMKAGKPQMQEMEQLAAARGLPPDRNSLNKLMALRNSGINIPMNNMSGQGSLPGSAQAAAFALTNYQSMLMKQNHLNSDLNNTTIQQEPSRNRSASPSYQGTSPLLPGFVHSPSISGVSSHLSPQRQMPSSSYNGSTQQYHQQPPSCSSGNQTLEQQMIHQIWQQMANSNGGSGQQQQSLSGQNMMNCNTNMGRNRTDYVPAAAETPSTSNRFRGIKGLDQSQNLEGIISNTSLNFGNNGVFSNEVDESMGGYSWKS

SEQ ID NO: 18084 - DNA, 2586 bp, Oryza sativa subsp
  CDS (1)..(2586)
atggcggtcaatgtgggcccggcccaccggctgcagccggtcgccaccgtcccgggcgccgcgaatctatttaaccggtttgctcgtcggcgaggacgccgcctacaggcgcaggaagaggaggagaagaagcggaagaggagagaaaaaaaaaattcgcagcaaaaaagaaaaaaaaatcgcagctgcaaggttcttcaaagtgatgattgggatcgaaccctggtaacctccatgtctggggcgccatgctccaaccttggacttgttcccagggatatgcatggtagtatccctattagcactacaaattcctctgggccaagcattggtgttagctctttggtgacggatgctaactcatcgctctccggaggtgcccagttgcagccaagtacgagcatgaatgctgattcattcatgcgccttcctgcttccccaatgtcgttttcatccaataacatctctggatcttcagttattgatggtcccattgtgcaacaaagtcctccccaagagcagatgcagaagcgaaggtcttctagtgtaacatcacaacctgttattgatgctgctggtgcattgcatgctcagaagaagtcaagggttgatattaggcaagatgatatcctgcaacacaatttaatccagcaactgctccaaggccagagttctcttcatctgcagggtcaacagaaccctcagattcaagccttgatccatcagcataaactggcacagattcagcagcaacagcagcatcagatgttgcaaccattttcacagatccaacaatctcaagttggcatacctcggcagccacagttgaggcctccactagcgcagcctggaatgcagctagctggacctgttaggactcctgtcgagaatgggctttgttctcgaaggttaaagcaatacttataccataagcgtcaccgaccagagaataatccaataacatactggaggaagcttattgatgaatattttgcaccacgagcaagagaaagatggtgtgtatcctcgtatgagaaaagaggaaatccttcaggtgctgttccacacacagctccggattcatggcgctgtgacatttgtaatacacatgggggcaaaggatatgatgaatacttattccttgacatggccaatgaattccggttgcccaatggactaatgctgctggaacatactaaagttgttcagaaaagcatttatgaacatatgcatgtgatacacgaggggcagttgagaatcatattcacaccagaactgaagataatgtcctgggagttctgttcacggcgacatgatgagtatatcactcgcaggtttctttcaccccaggttgctcatctgctgcaagttgcccagaaatatcaaactgttgccactgaaagtggtccagctggggtctcaaacagtgatgcacagaacatttgcaacatgtttgtgacggcgtcacgacagctagcgaaaaatatagaccaccacaccttaaatgagcatggtctatctaaaagatatgttcgctgcttgcagatatcagaggtggtgaatcacatgaaagacctgattgaattcagccacaagaacaagcttggtcctatagagggtctgaagagctatcccaagcaaactgcagcaaaacttccagtacaaaacatgcacgagccaaagcaactaatggcagctgctggccttcctaatgaccagactaacctcaaagccatgggtgtcaaaacagaaatgaacacccatgcgaatgagacgcacggtattggaccaattggaaatggtccgcagaatgctgctgcacttaacaattaccagaatcccattggaaatggtctgcagaatgctgctgcacttaacaattaccagaatatccttagaagttcagtcgcaaaccagagtttgcttcagcaggaggcatcaagcatgtttaaaggtcccacagcaatgcacaatggcattcagctggaagcatctagatccttccgtggaccaaaccaggtgcatctcgcgcagttccaacatccggcctcatttcagcagcctatgcctcagcagagcagcctccagggcttgggtgtgagcccacaatatcagcagcatgtgctccatcagttgctgcaagaggccaagaacactaacaaccgtgtcttggcgcagcagcagcagcaacaacaacttcaacatgctcctgctaacagtggtcttgcatcaggaggaacggctatcaccggcagcgccgctagcggggatcatatgaataacaacggcgcggtgaagggtgggactccaatggttacaacaggtcctagcagtgtgatcaacaatacagccagcatcctccccagcagaagtaacagcttcaagtcagtgagcagcaacccccaagttgcagctgctgcgggcggcggcattggcagcggcggccatgcggctacccccaaggctgatgctctgcatgagttggatgatcttgacaatcttgggaatctgatcagtactgaactggaggagagtgggctgttcctgggtgaccaggcaggtggtggctactcatggaacatgtga

SEQ ID NO: 18085 - protein, 861 aa, Oryza sativa subsp
MAVNVGPAHRLQPVATVPGAANLFNRFARRRGRRLQAQEEEEKKRKRREKKNSQQKRKKNRSCKVLQSDDWDRTLVTSMSGAPCSNLGLVPRDMHGSIPISTTNSSGPSIGVSSLVTDANSSLSGGAQLQPSTSMNADSFMRLPASPMSFSSNNISGSSVIDGPIVQQSPPQEQMQKRRSSSVTSQPVIDAAGALHAQKKSRVDIRQDDILQHNLIQQLLQGQSSLHLQGQQNPQIQALIHQHKLAQIQQQQQHQMLQPFSQIQQSQVGIPRQPQLRPPLAQPGMQLAGPVRTPVENGLCSRRLKQYLYHKRHRPENNPITYWRKLIDEYFAPRARERWCVSSYEKRGNPSGAVPHTAPDSWRCDICNTHGGKGYDEYLFLDMANEFRLPNGLMLLEHTKVVQKSIYEHMHVIHEGQLRIIFTPELKIMSWEFCSRRHDEYITRRFLSPQVAHLLQVAQKYQTVATESGPAGVSNSDAQNICNMFVTASRQLAKNIDHHTLNEHGLSKRYVRCLQISEVVNHMKDLIEFSHKNKLGPIEGLKSYPKQTAAKLPVQNMHEPKQLMAAAGLPNDQTNLKAMGVKTEMNTHANETHGIGPIGNGPQNAAALNNYQNPIGNGLQNAAALNNYQNILRSSVANQSLLQQEASSMFKGPTAMHNGIQLEASRSFRGPNQVHLAQFQHPASFQQPMPQQSSLQGLGVSPQYQQHVLHQLLQEAKNTNNRVLAQQQQQQQLQHAPANSGLASGGTAITGSAASGDHMNNNGAVKGGTPMVTTGPSSVINNTASILPSRSNSFKSVSSNPQVAAAAGGGIGSGGHAATPKADALHELDDLDNLGNLISTELEESGLFLGDQAGGGYSWNM

SEQ ID NO: 18086 - DNA, 3027 bp, Oryza sativa subsp
  CDS (1)..(3027)
atgggtcccgggcagccggtgggcgccgccgcctcgctgctccggacgagctcaagcctgcttagtggtggtcagcaggggatgggcagtggcggaggcatgattccttcgcagtcgcccttctcatcccttgtgtcgccgcgcacgcagtttggtgctaatggcctgctgggaggtggctccaatgtttcctccctgctcaaccggccgtttgggaatggtggacatatgctcggtccggggttgatgtcaggtggtggtgggattccaatgaataccctccagcagcagagaggagggcttgatggtgctggcgatttggttggcgtgggaggttctgatcctctctcgtttccttcatcgtcgcaagttagtttgggcaatcagctgggttcagataatctgcatcaaccaccgcaacatcagcaacaacaacagcagctggatgctatgcacgacttgcagcagcagcagcagcatcagcaactgccaatgtcttacaaccaacaacatttgccaccgcaaccaccacagcagccacaggctacagtgaagttggagaatggtggcagcacaggtggggtcaaattggaaccgcagatggggcagcctgaccagaacagctcagcccagatgatgcgccatgctagcaatgttaaaattgagcctcagcagttgcaagctctaagaagtttgagtgcggtgaagatggagcagccgacttcagacccatcagcattcctgcaacagcaacagcagcagcaacatttgctgcagctgacaaagcagaaccctcaagctgctgcggctgctcaactgaaccttttgcaacagcaacggatattgcaaatgcagcagcaacagcagcaacaacaacaacagattctaaagaatctgcctttgcagagaaaccaattacaacagcagcagctacttcgccaacagagtctaaacatgagaactccaggaaagtcggccccttatgagcccggaacctgcgcaaagagattgacccattacatgtatcatcaacagaacaggccacaggcaagtttttgggttattcctaacaagataacaatattgagtactggagaaattttgtcaatgagtatttttctccaaatgctaaaaagaggtggtgtgtatctctctatggaagtggtcgccaaactactggagttttccctcaggatgtatggcattgtgagatatgcaatcggaagcctgggcgaggctttgaatgcctctggccagattgttttggactataccaaagctatccaggaaagtgtattcgagcaattgcgtgtggtacgcgaaggacatctaaggatagtttttaatccagatctcaagatcgcgtcttgggagttttgtgctaggcgacacgaggaacttattccacggagatcaataataccacaggttagtcaactgggcgcagttgtgcaaaaataccaaagcgctgttcaaaattcgacaaatctgtcaactcaagacatgcagaataattgcaactccaatgcggcgccattactgagctctggccaccccgcatcaggaaggatgggaccaacgccgttgtgcacccaccgcacgccaccgcactctcccgatgaggacagctggcggcagagctccatgaggatattcgcgcacgagcatgatgaggttggtggcgtgcaatggagctggaggaggccactgctgcttgaggaggctgcggtggcgctgaaggaggccgctggtgcgagagcttggggaggacaccggcatggaagctggaaaaggccggtggtacgggcggcgatgcaggagcttgagttgttctcctctgtttctgcctcaatccatggcagaaaaaatatcagtgcaaagtattctggacctatgggtgtatggtttgttgcatgtgcccgccaattggctaaagcactggaggtgccattggttaatgatctgggatacacaaaacgatatgtgcgctgccttcagattgcagaggtggtaaactgtatgaaagatttaattgattacagcagacaaaatggatctggaccaattgctagtttgcatagctttcctcggaggacttcatcaggggtcagccctcaccagtcacagcagcaacagcctgaagagcagcaatctataccgcagagttcaaaccaaagcggtcaaaatgctgctcccatgaccggtgtgcaggcttctgcctctgcaaatgcagatgtgacatcaaataattctctcagctgtgcaccctcaacgtctgcaccttcaccatccgttgttgggctcctccaaggttcaatgaactctagacaagatcatccaatgagcagtgctaatggtccatataccagtggaaacagtgctgcaattcccaaggtgaactcgacaacctcactgcagtcaaatccatctacctcttttccttcacccatgccaacaacatccaataacaacatgatgcctgcccctcagagcacaaaccaactcagctccccaaccacatcatcaaacctaccgccaatgcagccacctgctactcggcctcaggagcctgagccaaatgagtcccaaagctcggttcagagaatattgcaagatttgatgatgtcaccgcagatgaatggtattggccagcttgggaatgacatgaaaagaccgaacggacttacatctagtgttaacggagttaattgtttagttggtaatgctgttacaaataactcaggaatgggaggaatggggtttggggccatgggtgggctaggtccaaatcatgcagctagtggattgagaactgcaatggtgaacaatgcgatggcaatcagtggtaggatgggaatgaatcacagtgcacatgacctatcacagttgggccaactacagcagcaacagcaacatcaacagcagcagcagcagcagcaacatgacttaggaaaccaactgttgaatggacttagagcagcaaacagcttcaataaccttcagtatgactggaaaccatctcaataa

SEQ ID NO: 18087 - protein, 1008 aa, Oryza sativa subsp
MGPGQPVGAAASLLRTSSSLLSGGQQGMGSGGGMIPSQSPFSSLVSPRTQFGANGLLGGGSNVSSLLNRPFGNGGHMLGPGLMSGGGGIPMNTLQQQRGGLDGAGDLVGVGGSDPLSFPSSSQVSLGNQLGSDNLHQPPQHQQQQQQLDAMHDLQQQQQHQQLPMSYNQQHLPPQPPQQPQATVKLENGGSTGGVKLEPQMGQPDQNSSAQMMRHASNVKIEPQQLQALRSLSAVKMEQPTSDPSAFLQQQQQQQHLLQLTKQNPQAAAAAQLNLLQQQRILQMQQQQQQQQQQILKNLPLQRNQLQQQQLLRQQSLNMRTPGKSAPYEPGTCAKRLTHYMYHQQNRPQASFWVIPNKITILSTGEILSMSIFLQMLKRGGVYLSMEVVAKLLEFSLRMYGIVRYAIGSLGEALNASGQIVLDYTKAIQESVFEQLRVVREGHLRIVFNPDLKIASWEFCARRHEELIPRRSIIPQVSQLGAVVQKYQSAVQNSTNLSTQDMQNNCNSNAAPLLSSGHPASGRMGPTPLCTHRTPPHSPDEDSWRQSSMRIFAHEHDEVGGVQWSWRRPLLLEEAAVALKEAAGARAWGGHRHGSWKRPVVRAAMQELELFSSVSASIHGRKNISAKYSGPMGVWFVACARQLAKALEVPLVNDLGYTKRYVRCLQIAEVVNCMKDLIDYSRQNGSGPIASLHSFPRRTSSGVSPHQSQQQQPEEQQSIPQSSNQSGQNAAPMTGVQASASANADVTSNNSLSCAPSTSAPSPSVVGLLQGSMNSRQDHPMSSANGPYTSGNSAAIPKVNSTTSLQSNPSTSFPSPMPTTSNNNMMPAPQSTNQLSSPTTSSNLPPMQPPATRPQEPEPNESQSSVQRILQDLMMSPQMNGIGQLGNDMKRPNGLTSSVNGVNCLVGNAVTNNSGMGGMGFGAMGGLGPNHAASGLRTAMVNNAMAISGRMGMNHSAHDLSQLGQLQQQQQHQQQQQQQQHDLGNQLLNGLRAANSFNNLQYDWKPSQ

SEQ ID NO: 18088 - DNA, 2673 bp, Oryza sativa subsp
  CDS (1)..(2673)
atggtgccgtcggggccgccgaacccgatgggtcctgggcagccggttggcgcggcctcgttgctcaggacgagctccagcctgctcagcggcggccagcaggggatgggcagtggcggaggcatgcttccttcgcagtcgcccttctcgtccctcgtgtcgccgcgcacgcagtttggtgctaatggcctgctgggaggtggctccaatgtttcctccctgctcaaccggccgtttgggaatgggggacatatgctcggtccggggtcgatgccaggtggtggtgggcttccaatgaataccctccagcagcagagaggagggcttgatggtgctgtcgatttggttggcgcgggaggttctgattctctctcgttcccttcatcgtcgcaagttagtttgggcaatcagctgggttcagataatctgcatccaccaccgcaacatcagcagcaacaacagcacctggatgctatgcaggacttgcagcaccagcatcagcatcagcagcaactgccaatgtcttacaaccaacaacagttgccaccgcaaccgccacagcagccgcaggctacagtgaagttggagaatggtggcagcacaggtggggtcaaattggaaccgcagatggggcagcctgaccagaatagcacagcccagatgatgcgcaatgctagcaatgttaaaattgagccgccgcagttgcaagctttgaggagtttgagtgcggtgaagatggagcagcagagttcagacccatcagcattcctgcaacagcaacagcagcagcaacatttgctgcagctgacaaagcagaatcctcaagctgctgcggcagctcaactgaaccttttgcaacagcaacggatattgcaaatgcagcaacaacagcagcaacaacaacagattctaaagaatctgcctttgcagagaaaccaattacaacagcaacaacagcagcagcagcaacagcagcagctacttcgccaacagagtctaaacatgagaactccaggaaaatcggctccttatgagccaggaacctgtgcaaagagattgactcattacatgtatcatcaacaaaacaggccacaggataacaatatcgagtactggagaaactttgtcaatgagtatttttctccaaatgctaaaaaaaggtggatgtatggcattgtgagatatgcaatcggaagcctgggcgaggctttgaatgcctctggtcagattgttttggactataccaaagcaatccaggaaagtgtctttgagcagttgcgtgtggtacgcgaaggacatctaaggatagtttttaatcctgatctcaagatcgcttcttgggagttttgtgcaaggcgtcacgaggagcttattccacgtagatcaataataccacaggttagtcaactgggcgcagttgtgcaaaaataccagagtgctgttcaaaattcgacaaatttgtcaactcaagacatgcagaataattgcaactcgtttgttgcatgtgcccgccaattggctaaagcactggaggtgcctttggtaaatgatctgggatacacaaaacgatatgtgcgctgccttcagattgctgaggtggtaaactgtatgaaagatttgattgattatagcaggcaaaatgggtctggaccaattgctagtttgcatagctttcctcggaggacttcatcaggaggggtaaaccctcaacagtcacagcagcaacagcctgaagaacagcaatctatcccgcagagttcaaaccagagtggtcaaaatgctgctcccatgactggtgtgcaggcttctgcctctgcaaatgcagatgtgacatcaaataattctctcagctgtgcaccctcaacgtctgcaccttcaccgtccgttgttgggctcctccaaggttcaatgaactctagacaagatcatccaatgagcagtgctaatggtccatataccagtggaaacagtgctgcaattcccaaggtgaactcgacaacctcactgcagtcaactccatctacctcttttccttcaccagtgccaacaacatccaataacaacatgatgcctgcccctcagaacacaaaccaactcagctccccaaccgcatcatcaaacctaccgccaatgcagccacctgctactcgacctcaggagcctgatccaaatgagtcccaaagctcggttcagagaatattgcaagatttgatgatgtcaccgcagatgaatggtgttggccagcttgggaatgacatgaaaagaccgaacggacttacatctagtgttaacggagttaattgtttagttggtaatgctgttacaaataactcaggaatgggaggaatgggaggaatggggtttggggccatgggtgggcttggtccaaatcatgcagctagtggattgagaactgcaatagcgaacaatgcgatggcaattagtggtaggatgggaatgaatcacagtgcacatgacctatcacagttgggccaactacagcagcaacagcaacagcaacatcaacatcaacatcaacatcaacatcaacatcaacagcaacagcagcagcagcagcagcagcaacatgacttaggaaaccaactgttgagtggacttagagcagcaaacagcttcaataaccttcagtatgactggaaaccatctcaataa

SEQ ID NO: 18089 - protein, 890 aa, Oryza sativa subsp
MVPSGPPNPMGPGQPVGAASLLRTSSSLLSGGQQGMGSGGGMLPSQSPFSSLVSPRTQFGANGLLGGGSNVSSLLNRPFGNGGHMLGPGSMPGGGGLPMNTLQQQRGGLDGAVDLVGAGGSDSLSFPSSSQVSLGNQLGSDNLHPPPQHQQQQQHLDAMQDLQHQHQHQQQLPMSYNQQQLPPQPPQQPQATVKLENGGSTGGVKLEPQMGQPDQNSTAQMMRNASNVKIEPPQLQALRSLSAVKMEQQSSDPSAFLQQQQQQQHLLQLTKQNPQAAAAAQLNLLQQQRILQMQQQQQQQQQILKNLPLQRNQLQQQQQQQQQQQQLLRQQSLNMRTPGKSAPYEPGTCAKRLTHYMYHQQNRPQDNNIEYWRNFVNEYFSPNAKKRWMYGIVRYAIGSLGEALNASGQIVLDYTKAIQESVFEQLRVVREGHLRIVFNPDLKIASWEFCARRHEELIPRRSIIPQVSQLGAVVQKYQSAVQNSTNLSTQDMQNNCNSFVACARQLAKALEVPLVNDLGYTKRYVRCLQIAEVVNCMKDLIDYSRQNGSGPIASLHSFPRRTSSGGVNPQQSQQQQPEEQQSIPQSSNQSGQNAAPMTGVQASASANADVTSNNSLSCAPSTSAPSPSVVGLLQGSMNSRQDHPMSSANGPYTSGNSAAIPKVNSTTSLQSTPSTSFPSPVPTTSNNNMMPAPQNTNQLSSPTASSNLPPMQPPATRPQEPDPNESQSSVQRILQDLMMSPQMNGVGQLGNDMKRPNGLTSSVNGVNCLVGNAVTNNSGMGGMGGMGFGAMGGLGPNHAASGLRTAIANNAMAISGRMGMNHSAHDLSQLGQLQQQQQQQHQHQHQHQHQHQQQQQQQQQQQHDLGNQLLSGLRAANSFNNLQYDWKPSQ

SEQ ID NO: 18090 - DNA, 2463 bp, Oryza sativa subsp
  CDS (1)..(2463)
atgcggctccgcggccgatccgacggcccggaggcctcccgtgggccccacggagaccggtcaatggcggttcttcaaagtgatgattgggatcgaaccctggtaacctccatgtctggggcgccatgctccaaccttggacttgttcccagggatatgcatggtagtatccctattagcactacaaattcctctgggccaagcattggtgttagctctttggtgacggatgctaactcatcgctctccggaggtgcccagttgcagccaagtacgagcatgaatgctgattcattcatgcgccttcctgcttccccaatgtcgttttcatccaataacatctctggatcttcagttattgatggtcccattgtgcaacaaagtcctccccaagagcagatgcagaagcgaaggtcttctagtgtaacatcacaacctgttattgatgctgctggtgcattgcatgctcagaagaagtcaagggttgatattaggcaagatgatatcctgcaacacaatttaatccagcaactgctccaaggccagagttctcttcatctgcagggtcaacagaaccctcagattcaagccttgatccatcagcataaactggcacagattcagcagcaacagcagcatcagatgttgcaaccattttcacagatccaacaatctcaagttggcatacctcggcagccacagttgaggcctccactagcgcagcctggaatgcagctagctggacctgttaggactcctgtcgagaatgggctttgttctcgaaggttaaagcaatacttataccataagcgtcaccgaccagagaataatccaataacatactggaggaagcttattgatgaatattttgcaccacgagcaagagaaagatggtgtgtatcctcgtatgagaaaagaggaaatccttcaggtgctgttccacacacagctccggattcatggcgctgtgacatttgtaatacacatgggggcaaaggatatgatgaatacttattccttgacatggccaatgaattccggttgcccaatggactaatgctgctggaacatactaaagttgttcagaaaagcatttatgaacatatgcatgtgatacacgaggggcagttgagaatcatattcacaccagaactgaagataatgtcctgggagttctgttcacggcgacatgatgagtatatcactcgcaggtttctttcaccccaggttgctcatctgctgcaagttgcccagaaatatcaaactgttgccactgaaagtggtccagctggggtctcaaacagtgatgcacagaacatttgcaacatgtttgtgacggcgtcacgacagctagcgaaaaatatagaccaccacaccttaaatgagcatggtctatctaaaagatatgttcgctgcttgcagatatcagaggtggtgaatcacatgaaagacctgattgaattcagccacaagaacaagcttggtcctatagagggtctgaagagctatcccaagcaaactgcagcaaaacttccagtacaaaacatgcacgagccaaagcaactaatggcagctgctggccttcctaatgaccagactaacctcaaagccatgggtgtcaaaacagaaatgaacacccatgcgaatgagacgcacggtattggaccaattggaaatggtccgcagaatgctgctgcacttaacaattaccagaatcccattggaaatggtctgcagaatgctgctgcacttaacaattaccagaatatccttagaagttcagtcgcaaaccagagtttgcttcagcaggaggcatcaagcatgtttaaaggtcccacagcaatgcacaatggcattcagctggaagcatctagatccttccgtggaccaaaccaggtgcatctcgcgcagttccaacatccggcctcatttcagcagcctatgcctcagcagagcagcctccagggcttgggtgtgagcccacaatatcagcagcatgtgctccatcagttgctgcaagaggccaagaacactaacaaccgtgtcttggcgcagcagcagcagcaacaacaacttcaacatgctcctgctaacagtggtcttgcatcaggaggaacggctatcaccggcagcgccgctagcggggatcatatgaataacaacggcgcggtgaagggtgggactccaatggttacaacaggtcctagcagtgtgatcaacaatacagccagcatcctccccagcagaagtaacagcttcaagtcagtgagcagcaacccccaagttgcagctgctgcgggcggcggcattggcagcggcggccatgcggctacccccaaggctgatgctctgcatgagttggatgatcttgacaatcttgggaatctgatcagtactgaactggaggagagtgggctgttcctgggtgaccaggcaggtggtggctactcatggaacatgtga

SEQ ID NO: 18091 - protein, 820 aa, Oryza sativa subsp
MRLRGRSDGPEASRGPHGDRSMAVLQSDDWDRTLVTSMSGAPCSNLGLVPRDMHGSIPISTTNSSGPSIGVSSLVTDANSSLSGGAQLQPSTSMNADSFMRLPASPMSFSSNNISGSSVIDGPIVQQSPPQEQMQKRRSSSVTSQPVIDAAGALHAQKKSRVDIRQDDILQHNLIQQLLQGQSSLHLQGQQNPQIQALIHQHKLAQIQQQQQHQMLQPFSQIQQSQVGIPRQPQLRPPLAQPGMQLAGPVRTPVENGLCSRRLKQYLYHKRHRPENNPITYWRKLIDEYFAPRARERWCVSSYEKRGNPSGAVPHTAPDSWRCDICNTHGGKGYDEYLFLDMANEFRLPNGLMLLEHTKVVQKSIYEHMHVIHEGQLRIIFTPELKIMSWEFCSRRHDEYITRRFLSPQVAHLLQVAQKYQTVATESGPAGVSNSDAQNICNMFVTASRQLAKNIDHHTLNEHGLSKRYVRCLQISEVVNHMKDLIEFSHKNKLGPIEGLKSYPKQTAAKLPVQNMHEPKQLMAAAGLPNDQTNLKAMGVKTEMNTHANETHGIGPIGNGPQNAAALNNYQNPIGNGLQNAAALNNYQNILRSSVANQSLLQQEASSMFKGPTAMHNGIQLEASRSFRGPNQVHLAQFQHPASFQQPMPQQSSLQGLGVSPQYQQHVLHQLLQEAKNTNNRVLAQQQQQQQLQHAPANSGLASGGTAITGSAASGDHMNNNGAVKGGTPMVTTGPSSVINNTASILPSRSNSFKSVSSNPQVAAAAGGGIGSGGHAATPKADALHELDDLDNLGNLISTELEESGLFLGDQAGGGYSWNM

SEQ ID NO: 18092 - DNA, 3027 bp, Oryza sativa subsp
  CDS (1)..(3027)
atgggtcccgggcagccggtgggcgccgccgcctcgctgctccggacgagctcaagcctgcttagtggtggtcagcaggggatgggcagtggcggaggcatgattccttcgcagtcgcccttctcatcccttgtgtcgccgcgcacgcagtttggtgctaatggcctgctgggaggtggctccaatgtttcctccctgctcaaccggccgtttgggaatggtggacatatgctcggtccggggttgatgccaggtggtggtgggattccaatgaataccctccagcagcagagaggagggcttgatggtgctggcgatttggttggcgtgggaggttctgatcctctctcgtttccttcatcgtcgcaagttagtttgggcaatcagctgggttcagataatctgcatcaaccaccgcaacatcagcaacaacaacagcagctggatgctatgcacgacttgcagcagcagcagcatcatcagcaactgccaatgtcttacaaccaacaacatttgccaccgcaaccaccacagcagccacaggctacagtgaagttggagaatggtggcagcacaggtggggtcaaattggaaccgcagatggggcagcctgaccagaacagctcagcccagatgatgcgccatgctagcaatgttaaaattgagcctcagcagttgcaagctctaagaagtttgagtgcggtgaagatggagcagccgacttcagacccatcagcattcctgcaacagcaacagcagcagcaacatttgctgcagctgacaaagcagaaccctcaagctgctgcggctgctcaactgaaccttttgcaacagcaacggatattgcaaatgcagcagcaacagcagcaacaacaacaacagattctaaagaatctgcctttgcagagaaaccaattacaacagcagcagctacttcgccaacagagtctaaacatgagaactccaggaaagtcggccccttatgagcccggaacctgcgcaaagagattgacccattacatgtatcatcaacagaacaggccacaggcaagtttttgggttattcctaacaagataacaatattgagtactggagaaattttgtcaatgagtatttttctccaaatgctaaaaagaggtggtgtgtatctctctatggaagtggtcgccaaactactggagttttccctcaggatgtatggcattgtgagatatgcaatcggaagcctgggcgaggctttgaatgcctctggccagattgttttggactataccaaagctatccaggaaagtgtattcgagcaattgcgtgtggtacgcgaaggacatctaaggatagtttttaatccagatctcaagatcgcgtcttgggagttttgtgctaggcgacacgaggaacttattccacggagatcaataataccacaggttagtcaactgggcgcagttgtgcaaaaataccaaagcgctgttcaaaattcgacaaatctgtcaactcaagacatgcagaataattgcaactccaatgcggcgccattactgagctctggccaccccgcatcaggaaggatgggaccaacgccgttgtgcacccaccgcacgccaccgcactctcccgatgaggacagctggcggcagagctccatgaggatattcgcgcacgagcatgatgaggttggtggcgtgcaatggagctggaggaggccactgctgcttgaggaggctgcggtggcgctgaaggaggccgctggtgcgagagcttggggaggacaccggcatggaagctggaaaaggccggtggtacgggcggcgatgcaggagcttgagttgttctcctctgtttctgcctcaatccatggcagaaaaaatatcagtgcaaagtattctggacctatgggtgtatggtttgttgcatgtgcccgccaattggctaaagcactggaggtgccattggttaatgatctgggatacacaaaacgatatgtgcgctgccttcagattgcagaggtggtaaactgtatgaaagatttaattgattacagcagacaaaatggatctggaccaattgctagtttgcatagctttcctcggaggacttcatcaggggtcagccctcaccagtcacagcagcaacagcctgaagagcagcaatctataccgcagagttcaaaccaaagcggtcaaaatgctgctcccatgaccggtgtgcaggcttctgcctctgcaaatgcagatgtgacatcaaataattctctcagctgtgcaccctcaacgtctgcaccttcaccatccgttgttgggctcctccaaggttcaatgaactctagacaagatcatccaatgagcagtgctaatggtccatataccagtggaaacagtgctgcaattcccaaggtgaactcgacaacctcactgcagtcaaatccatctacctcttttccttcacccatgccaacaacatccaataacaacatgatgcctgcccctcagagcacaaaccaactcagctccccaaccacatcatcaaacctaccgccaatgcagccacctgctactcggcctcaggagcctgagccaaatgagtcccaaagctcggttcagagaatattgcaagatttgatgatgtcaccgcagatgaatggtattggccagcttgggaatgacatgaaaagaccgaacggacttacatctagtgttaacggagttaattgtttagttggtaatgctgttacaaataactcaggaatgggaggaatggggtttggggccatgggtgggctaggtccaaatcatgcagctagtggattgagaactgcaatggtgaacaatgcgatggcaatcagtggtaggatgggaatgaatcacagtgcacatgacctatcacagttgggccaactacagcagcaacagcaacatcaacagcagcagcagcagcagcaacatgacttaggaaaccaactgttgaatggacttagagcagcaaacagcttcaataaccttcagtatgactggaaaccatctcaataa

SEQ ID NO: 18093 - protein, 1008 aa, Oryza sativa subsp
MGPGQPVGAAASLLRTSSSLLSGGQQGMGSGGGMIPSQSPFSSLVSPRTQFGANGLLGGGSNVSSLLNRPFGNGGHMLGPGLMPGGGGIPMNTLQQQRGGLDGAGDLVGVGGSDPLSFPSSSQVSLGNQLGSDNLHQPPQHQQQQQQLDAMHDLQQQQHHQQLPMSYNQQHLPPQPPQQPQATVKLENGGSTGGVKLEPQMGQPDQNSSAQMMRHASNVKIEPQQLQALRSLSAVKMEQPTSDPSAFLQQQQQQQHLLQLTKQNPQAAAAAQLNLLQQQRILQMQQQQQQQQQQILKNLPLQRNQLQQQQLLRQQSLNMRTPGKSAPYEPGTCAKRLTHYMYHQQNRPQASFWVIPNKITILSTGEILSMSIFLQMLKRGGVYLSMEVVAKLLEFSLRMYGIVRYAIGSLGEALNASGQIVLDYTKAIQESVFEQLRVVREGHLRIVFNPDLKIASWEFCARRHEELIPRRSIIPQVSQLGAVVQKYQSAVQNSTNLSTQDMQNNCNSNAAPLLSSGHPASGRMGPTPLCTHRTPPHSPDEDSWRQSSMRIFAHEHDEVGGVQWSWRRPLLLEEAAVALKEAAGARAWGGHRHGSWKRPVVRAAMQELELFSSVSASIHGRKNISAKYSGPMGVWFVACARQLAKALEVPLVNDLGYTKRYVRCLQIAEVVNCMKDLIDYSRQNGSGPIASLHSFPRRTSSGVSPHQSQQQQPEEQQSIPQSSNQSGQNAAPMTGVQASASANADVTSNNSLSCAPSTSAPSPSVVGLLQGSMNSRQDHPMSSANGPYTSGNSAAIPKVNSTTSLQSNPSTSFPSPMPTTSNNNMMPAPQSTNQLSSPTTSSNLPPMQPPATRPQEPEPNESQSSVQRILQDLMMSPQMNGIGQLGNDMKRPNGLTSSVNGVNCLVGNAVTNNSGMGGMGFGAMGGLGPNHAASGLRTAMVNNAMAISGRMGMNHSAHDLSQLGQLQQQQQHQQQQQQQQHDLGNQLLNGLRAANSFNNLQYDWKPSQ

SEQ ID NO: 18094 - DNA, 2760 bp, Oryza sativa subsp
  CDS (1)..(2760)
atggtgccgtcggggccgccgaacccgatgggtcctgggcagccggttggcgcggcctcgttgctcaggacgagctccagcctgctcagcggcggccagcaggggatgggcagtggcggaggcatgcttccttcgcagtcgcccttctcgtccctcgtgtcgccgcgcacgcagtttggtgctaatggcctgctgggaggtggctccaatgtttcctccctgctcaaccggccgtttgggaatgggggacatatgctcggtccggggtcgatgccaggtggtggtgggcttccaatgaataccctccagcagcagagaggagggcttgatggtgctggcgatttggttggcgcgggaggttctgattctctctcgttcccttcatcgtcgcaagttagtttgggcaatcagctgggttcagataatctgcatccaccaccgcaacatcagcagcaacaacaacacctggatgctatgcaggacttgcagcaccagcatcagcatcagcagcaactgccaatgtcttacaaccaacaacagttgccaccgcaaccgccacagcagccgcaggctacagtgaagttggagaatggtggcagcacaggtggggtcaaattggaaccgcagatggggcagcctgaccagaatagcacagcccagatgatgcgcaatgctagcaatgttaaaattgagccgccgcagttgcaagctttgaggagtttgagtgcggtgaagatggagcagcagagttcagacccatcagcattcctgcaacagcaacagcagcagcaacatttgctgcagctgacaaagcagaatcctcaagctgctgcggcagctcaactgaaccttttgcaacagcaacggatattgcaaatgcagcaacaacagcagcaacaacaacagattctaaagaatctgcctttgcagagaaaccaattacaacagcaacaacagcagcagcagcaacagcagcagctacttcgccaacagagtctaaacatgagaactccaggaaaatcggctccttatgagccaggaacctgtgcaaagagattgactcattacatgtatcatcaacaaaacaggccacaggataacaatatcgagtactggagaaactttgtcaatgagtatttttctccaaatgctaaaaaaaggtggatgtatggcattgtgagatatgcaatcggaagcctgggcgaggctttgaatgcctctggtcagattgttttggactataccaaagcaatccaggaaagtgtctttgagcagttgcgtgtggtacgcgaaggacatctaaggatagtttttaatcctgatctcaagatcgcttcttgggagttttgtgcaaggcgtcacgaggagcttattccacgtagatcaataatcccacagatgtctcattttgatattctgaattttgggcaaaacgggaaagggtttaatatattttgggaaccctcggtgttctatgcagtatgcgaaggagttgcacgaaacaaagtggtgggtataaccactgattttttgaagaaaaactataagcgtaaagcattctggatctatgggtgtatggttattcttactgttctagcaccgtttgttgcatgtgcccgccaattggctaaagcactggaggtgcctttggtaaatgatctgggatacacaaaacgatatgtgcgctgccttcagattgctgaggtggtaaactgtatgaaagatttgattgattatagcaggcaaaatgggtctggaccaattgctagtttgcatagctttcctcggaggacttcatcaggaggggtaaaccctcaacagtcacagcagcaacagcctgaagaacagcaatctatcccgcagagttcaaaccagagtggtcaaaatgctgctcccatgactggtgtgcaggcttctgcctctgcaaatgcagatgtgacatcaaataattctctcagctgtgcaccctcaacgtctgcaccttcaccgtccgttgttgggctcctccaaggttcaatgaactctagacaagatcatccaatgagcagtgctaatggtccatataccagtggaaacagtgctgcaattcccaaggtgaactcgacaacctcactgcagtcaactccatctacctcttttccttcaccagtgccaacaacatccaataacaacatgatgcctgcccctcagaacacaaaccaactcagctccccaaccgcatcatcaaacctaccgccaatgcagccacctgctactcgacctcaggagcctgatccaaatgagtcccaaagctcggttcagagaatattgcaagatttgatgatgtcaccgcagatgaatggtgttggccagcttgggaatgacatgaaaagaccgaacggacttacatctagtgttaacggagttaattgtttagttggtaatgctgttacaaataactcaggaatgggaggaatggggtttggggccatgggtgggcttggtccaaatcatgcagctagtggattgagaactgcaatagcgaacaatgcgatggcaattagtggtaggatgggaatgaatcacagtgcacatgacctatcacagttgggccaactacagcagcaacagcaacatcaacatcaacatcaacatcaacatcaacagcaacagcagcagcagcagcagcagcaacatgacttaggaaaccaactgttgagtggacttagagcagcaaacagcttcaataaccttcagtatgactggaaaccatctcaataa

SEQ ID NO: 18095 - protein, 919 aa, Oryza sativa subsp
MVPSGPPNPMGPGQPVGAASLLRTSSSLLSGGQQGMGSGGGMLPSQSPFSSLVSPRTQFGANGLLGGGSNVSSLLNRPFGNGGHMLGPGSMPGGGGLPMNTLQQQRGGLDGAGDLVGAGGSDSLSFPSSSQVSLGNQLGSDNLHPPPQHQQQQQHLDAMQDLQHQHQHQQQLPMSYNQQQLPPQPPQQPQATVKLENGGSTGGVKLEPQMGQPDQNSTAQMMRNASNVKIEPPQLQALRSLSAVKMEQQSSDPSAFLQQQQQQQHLLQLTKQNPQAAAAAQLNLLQQQRILQMQQQQQQQQQILKNLPLQRNQLQQQQQQQQQQQQLLRQQSLNMRTPGKSAPYEPGTCAKRLTHYMYHQQNRPQDNNIEYWRNFVNEYFSPNAKKRWMYGIVRYAIGSLGEALNASGQIVLDYTKAIQESVFEQLRVVREGHLRIVFNPDLKIASWEFCARRHEELIPRRSIIPQMSHFDILNFGQNGKGFNIFWEPSVFYAVCEGVARNKVVGITTDFLKKNYKRKAFWIYGCMVILTVLAPFVACARQLAKALEVPLVNDLGYTKRYVRCLQIAEVVNCMKDLIDYSRQNGSGPIASLHSFPRRTSSGGVNPQQSQQQQPEEQQSIPQSSNQSGQNAAPMTGVQASASANADVTSNNSLSCAPSTSAPSPSVVGLLQGSMNSRQDHPMSSANGPYTSGNSAAIPKVNSTTSLQSTPSTSFPSPVPTTSNNNMMPAPQNTNQLSSPTASSNLPPMQPPATRPQEPDPNESQSSVQRILQDLMMSPQMNGVGQLGNDMKRPNGLTSSVNGVNCLVGNAVTNNSGMGGMGFGAMGGLGPNHAASGLRTAIANNAMAISGRMGMNHSAHDLSQLGQLQQQQQHQHQHQHQHQQQQQQQQQQQHDLGNQLLSGLRAANSFNNLQYDWKPSQ

SEQ ID NO: 18096 - DNA, 2247 bp, Arabidopsis thaliana
  CDS (1)..(2247)
atgaacagaacggtggtctcgggagctgttgaatcgagtttctcattgactgatgctgttggcacggaagctctaaatatgcagaggagcagtggcatcaataataatatgcgtatcccaacatcaccgatgtctttctcctcgaatagcgttaacataccgggttcattggttcttgatggctctgctgcttcaatgcaacacttacctcagcagcagcagcagcaactactacaacagcaaacaggacaaggttctgttccaatgagggagaacaattattcccatgtggataagaaacccagattagaagtgaagcaagaagatatgttgcagcagcagattttacagcagttgatccagcgtcaggaccccacggggaggaatccgcagatgcaagctttgcttcagcagcagagactgaggcaacatcagcagatgcttcaatccatgtcaccctctcagagactccaacttcagcaacagcagcagctgagacagcagttacagcaacaaggaacccaacagattcctcctaatgtacgtccttatgaagttggcgtctgtgctcggaaattgatgatgtacttgtatcatctgcagcaacggcctgctgaaaattgcattacctattggaggaaatttgtggcagaatacttttcacctcgtgcaaagcagagattgtgcttgtcacagtacgaaagtgctgggcaccatgcgcttggcatgttcccacaggcagctccggatatgtggcagtgtgatctttgcggcaccaagtctggaaagggatttgaggcaacgtttgatgtgcttgccagactaattgaaatcaaatttgcaagtggtattattgatgagctgttatatctggatcaccctcgagaaaacagatttcccaatggactgatgatgttagaatatagaaaagcagttcaggaaactgtacacgagcagtttcgtgttgtccgtgagggccatcttcgcatcatattttctcaagatttgaagatactttcttgggagttttgcgctcggcgtcatgaagagcttcttcttcgcagacttattgctccacaggtgaaccaattgcttcaggttgcacagaaatgccagagcacgatctcagagagtgggtcagagggggtttctcagcaggatttacagtcaaatagtaacatggtcttgggagcaggacggcaactggcaaagttcatggaactacagtcgctgaatgatcttggctatccaaaaagatatatcaggactctgcagatatctgaagttgtcaagagcatgaaggatctgatgaatttcactggcgagcaaaaaatcggtcctattgaggggttgaaacggcttttggaacagacggtgacagtgaagctacagaaacagaaaatgcaagagatggagcagtttgggaataatggagctataaatgggccagttcaagctcaaatggtgttaacttcaggaacgatgaatggctcaacgggcaataacaccaataatcaccatcaaattgttggtcgtggagctatgagtgggccagctgaaggtcaaatggtgatatcttcaggaacggtgagcggcgcaactgccaacaacaactccaataatcacaatcaaattgttggtcgtggagctatgaatggctctgctcaagccgcagcagctctgaccaactaccaaagcatgcttatgaggcaaaatgctatgaataacccaaactcaaatacgggtaaacaagaggggttctcgagtcagaacccaaccccaaactcaaaccagagtccatcttcttcatcccagcagaggcataacttagttacaggtggatttcccaactctcctcaaatgcaacagcagcagcgcaccatgaatggccctaccaacatacttccgcagaatcatcctcatcagttacaatcaccacattcacatggtaacactccggagcagcagatgcttcatcagctgttgcaggagatgtctgaaaatggagggagtgtgcaacagcaacaagccttttcgggtcaaagtggtagcaacagtaacgcagagagaaacacaactgcctctacttccaacatctcaggaggaggccgagctccaagtcgaaacaacagttttaaagcagcctcgaacaacaaccttcatttttcagaagatatatcgatcacagaccatgatttctcagaagatggcttcttcaacaacaatgatatctatggtggcttgtaa

SEQ ID NO: 18097 - protein, 748 aa, Arabidopsis thaliana
MNRTVVSGAVESSFSLTDAVGTEALNMQRSSGINNNMRIPTSPMSFSSNSVNIPGSLVLDGSAASMQHLPQQQQQQLLQQQTGQGSVPMRENNYSHVDKKPRLEVKQEDMLQQQILQQLIQRQDPTGRNPQMQALLQQQRLRQHQQMLQSMSPSQRLQLQQQQQLRQQLQQQGTQQIPPNVRPYEVGVCARKLMMYLYHLQQRPAENCITYWRKFVAEYFSPRAKQRLCLSQYESAGHHALGMFPQAAPDMWQCDLCGTKSGKGFEATFDVLARLIEIKFASGIIDELLYLDHPRENRFPNGLMMLEYRKAVQETVHEQFRVVREGHLRIIFSQDLKILSWEFCARRHEELLLRRLIAPQVNQLLQVAQKCQSTISESGSEGVSQQDLQSNSNMVLGAGRQLAKFMELQSLNDLGYPKRYIRTLQISEVVKSMKDLMNFTGEQKIGPIEGLKRLLEQTVTVKLQKQKMQEMEQFGNNGAINGPVQAQMVLTSGTMNGSTGNNTNNHHQIVGRGAMSGPAEGQMVISSGTVSGATANNNSNNHNQIVGRGAMNGSAQAAAALTNYQSMLMRQNAMNNPNSNTGKQEGFSSQNPTPNSNQSPSSSSQQRHNLVTGGFPNSPQMQQQQRTMNGPTNILPQNHPHQLQSPHSHGNTPEQQMLHQLLQEMSENGGSVQQQQAFSGQSGSNSNAERNTTASTSNISGGGRAPSRNNSFKAASNNNLHFSEDISITDHDFSEDGFFNNNDIYGGL

SEQ ID NO: 18098 - DNA, 3683 bp, Antirrhinum majus
  CDS (320)..(3025)
  misc_feature (564)..(564): n is a, g, c or t
  misc_feature (1023)..(1023): n is a, g, c or t
  misc_feature (1038)..(1038): n is a, g, c or t
  misc_feature (1488)..(1488): n is a, g, c or t
  misc_feature (1806)..(1806): w is a or t
  misc_feature (2851)..(2851): m is a or c
  misc_feature (3311)..(3311): n is a, g, c or t
  misc_feature (3668)..(3668): n is a, g, c or t
aattgataccaagcttaagtaggatgttcagagataaagccagcttctttgattctgattttcacaatcagtttggtcgaacaaacgacactatcttcgtgcatgaggcctatcccgttctcctctttcatagtaaacattttagaaattcgaaaatttgttggttgtgtgtgtagattgtaacatttttctgaatttgtacctttgttcacactttccagtggtggggaatttagattaatgttatttagggggttcaatctgtagtgtataaagagttttgtgaactagtgtgttgataatttgatatcatctaataatggtgccccaagggcctcccactccacttggtgggggccagcctgttccggcttcgatgctgaggtcaaattctgggattttgggaagtcaaggcggtggaatggcttcacagaatggatttccttctctggtgtctcctcgcaatcagtttaatagtatgaacatgttggggaatgttcccaatgtttcgtcgttgctccatcagccattcggaaatgggggtcccaattctggattgtctgntcctgggagctcccagcgggggcttattgatggcggggcagagtctgatccgctttcaagcgtcggtaatgggatgggatttaacgctccttcctcatcttatatatcgtcgtccattacagccaaccagaactcatctggtcaagtacaagggcagcaacaattttcaaaccattctggcagccagatgttgacggaccagcaacatgctcaacaacttgattcgcagaattttcatcacaatcagcagcagtttactgtctccagcaactctcaacaacaacagcaaccgcagcagcagcagtatcaagcaatgcgagctggattaggaggtgtcggacctgttaagctagagcagcaagttactaatgagcaagtgcctcagcagctgcaagctttgcggaatcttggttccgtgaagttggaaccgcagcaactgcaaaatatgagaagcttggntcctgtcaaaatggnacctcagcattcagacccatctttgtttttgcagcaacaacagcaacaacagcaacaacagctcctcttgtcacggcagtcatcacaggctgctgcagccgctcagattttgcatcaacagaggcttatgcaaattcaacatcagcaacaacagcaactcatgaaatccatgcctcaacaaagatctccacttcaatcacagttccaatcacagaatttgtcaaatagagctccagtaaaaccggtttatgagcccgggatgtgtgctcgaaggctaacacattacatgtatcagcaacaaaatagacctgaagacaacaacatcgagttctggaggaaatttgtagccgagtattttgcacccaatgccaagaaaaagtggtgtgtttcattgtatggaagtggtcggcaaactaccggagttttccctcaggatgtttggcactgcgnaatttgcaaacgcaagcctggtcgtggttttgaggcaactgcggaggttcttcctagactcttcaaaataaaatatgaaagtggcactttagaagaattactctatgttgatatgccaagagagtatcagaattcctctggacaaattgttctggactatgcaaaagccatacaggagagtgtctttgagcaacttcgcgttgttcgtgacggtcagcttcgaattgtgttctctcctgacctcaagatatgttcctgggagttttgtgctcagcgtcatgaagagcttattcctagaagattgctgataccccaggwtggtcaacttggcgctgctgcccaaaagtaccaggctgctacccagaatgctggatccactgcctctgtctcagagctacaaaataattgcaatacgtttgttgcttctgctcgtcaacttgctaaagccttggaagttccactggtaaatgatttgggatatacaaagagatacgtgcggtgcctgcagatatcagaagtggtgaacagcatgaaagatcttattgattatagtcgtcacactagcacaggtcctatggagagcttggctaagtttcctcgaagaacaaatccttcacctgggtttcaaagtcagcctcaacaacctgagggtcagctgcagcagcaacaatatcaaacgccaggacaaaacccaaacaatgataattctgtccaggctgctgctatgcaacttgcttcgagtaacgggatgccaagtgttaataacactatgaactcattgcccacaacttcatctgctggtaccattgccggacttcttcatcaaaattcaatgaactcacgacaacaaaacccaatgtccaatgcaaacagcccttacggaggtagtagcgttcagatgccatctccaggtccttcaagcagtatgccacaagctcaaccctccccgtctcctttccagtccccaactccttcctcgtctaataataatccacagccaacacataatagtttatcaggagctcactttaattcggtgacttcaccaaatgtttcaatgcaacaaccagctctctctggtgatgcggatgcaaatgattcacagagttcggttcagaaaattatacacgacatgatgatgtcttcacagctcagtgggggtggtatgatgggcatgggcaatatgggcagtgacatgaaaaatgtgaatgtaatgctgtcgtctaacaataatgcgagtatgaatggcagcaatattcttgtaggaaatggaatggccaatggtaatatgagtggtccaggctttggtggcattggtggcgggcgtggtcaacctgccctggtaaacgggattccagcagcmcttgggaataataactcactgtcaatgaatgggagagtaggcatggcgatggcacgagagcagaccatgaatcatcagcagcaacaggatatgggtaaccaactgcttagtggacttggggcagtcaatggcttccaatacccttccaatttggattggaaaacgtctccctgaagatttccttctcctggtattgaccttggtagctgtttgtgcagcacagaaacttcgggagttccctttggacaggatgagtttgaagtgccttaaacgcgacaaagatgaatggtgtcatggttcataaaccactaagtgtttcttgatcttaaattcatctaacttgaacttgtcctggttcgtgcgaatctgcactgaaccgtctttgaggggagcagcaatagggacctggataaccaacgctatttctccccagctctgtcccctcctgagttctacatcncccaatatgtgagtgtatatagtctggattgccttctaagccaagtttactgtagcagttttaagagttgccagaattgttttatgctcattttgttcctataatcatcttttatttattacatgaagtgcttccttatggttatctccgaatcccacccccacccttgccccgtgcatttaaaaatagtctagctatagaaatcttactatttgaattattataatgggagtgcagttttttggtaattagaccgagttcaggggtgtacatgtaattattcgaaaaattgtaagcatcaagagccatgcaagtcgatctcatatataaatggattttccctaaaaaaaacctcgngccgaattcagcgtg

SEQ ID NO: 18099 - protein, 901 aa, Antirrhinum majus
  misc_feature (82)..(82): The Xaa at location 82 stands for Ala, Asp, Gly, or Val.
  misc_feature (235)..(235): The Xaa at location 235 stands for Ala, Asp, Gly, or Val.
  misc_feature (240)..(240): The Xaa at location 240 stands for Ala, Glu, Gly, or Val.
  misc_feature (390)..(390): The Xaa at location 390 stands for Ala, Glu, Gly, or Val.
  misc_feature (496)..(496): The Xaa at location 496 stands for Asp, or Val.
MVPQGPPTPLGGGQPVPASMLRSNSGILGSQGGGMASQNGFPSLVSPRNQFNSMNMLGNVPNVSSLLHQPFGNGGPNSGLSXPGSSQRGLIDGGAESDPLSSVGNGMGFNAPSSSYISSSITANQNSSGQVQGQQQFSNHSGSQMLTDQQHAQQLDSQNFHHNQQQFTVSSNSQQQQQPQQQQYQAMRAGLGGVGPVKLEQQVTNEQVPQQLQALRNLGSVKLEPQQLQNMRSLXPVKMXPQHSDPSLFLQQQQQQQQQQLLLSRQSSQAAAAAQILHQQRLMQIQHQQQQQLMKSMPQQRSPLQSQFQSQNLSNRAPVKPVYEPGMCARRLTHYMYQQQNRPEDNNIEFWRKFVAEYFAPNAKKKWCVSLYGSGRQTTGVFPQDVWHCXICKRKPGRGFEATAEVLPRLFKIKYESGTLEELLYVDMPREYQNSSGQIVLDYAKAIQESVFEQLRVVRDGQLRIVFSPDLKICSWEFCAQRHEELIPRRLLIPQXGQLGAAAQKYQAATQNAGSTASVSELQNNCNTFVASARQLAKALEVPLVNDLGYTKRYVRCLQISEVVNSMKDLIDYSRHTSTGPMESLAKFPRRTNPSPGFQSQPQQPEGQLQQQQYQTPGQNPNNDNSVQAAAMQLASSNGMPSVNNTMNSLPTTSSAGTIAGLLHQNSMNSRQQNPMSNANSPYGGSSVQMPSPGPSSSMPQAQPSPSPFQSPTPSSSNNNPQPTHNSLSGAHFNSVTSPNVSMQQPALSGDADANDSQSSVQKIIHDMMMSSQLSGGGMMGMGNMGSDMKNVNVMLSSNNNASMNGSNILVGNGMANGNMSGPGFGGIGGGRGQPALVNGIPAALGNNNSLSMNGRVGMAMAREQTMNHQQQQDMGNQLLSGLGAVNGFQYPSNLDWKTSP

SEQ ID NO: 18100 - DNA, 3495 bp, Antirrhinum majus
  CDS (660)..(3185)
  misc_feature (430)..(430): m is a or c
  misc_feature (431)..(431): y is t or c
  misc_feature (432)..(432): y is t or c
  misc_feature (434)..(434): k is g or t
  misc_feature (476)..(476): m is a or c
  misc_feature (502)..(502): k is g or t
  misc_feature (566)..(566): n is a, g, c or t
  misc_feature (3329)..(3329): n is a, g, c or t
  misc_feature (3351)..(3351): n is a, g, c or t
  misc_feature (3373)..(3373): n is a, g, c or t
  misc_feature (3399)..(3399): n is a, g, c or t
ggcaaagtttctcctaaaattaactctctctataaagttccacgtttgattagacgcgtaatctgagaaatttattaccatttttctttggagaaatttacttaattgaagtgggattggaggttgattcgctgtgtttttaaggcttcgattgagttgggttttggtttgcgaatcttgtcaggtcagtagattgctaattagtataaaattttaatcttatttagcttgtaattgttgtaaaaaatcgttctttataaagtttgggtttagtattgattgtttctgaattagggttttgttgctgaaattgggtagtaaagtaaatttcgcaacgaggttgttcttctgtctgtttgaagttgttctgtgtttttttcaaattcatttcttgtgttaattatggtcgatcttgagcttcattgggttmyytkctgatctgtttgtgatttaattagcagaactccgaacaagcmctcttttttttttccaagattgcagkgtgtttagtgaaaaaacaagtgggttttgcaagaagataatgggggaaaaagtagctgtacttncatatgacttggtgccaaggttattgtaggggaaagtaagtttttttgtgggacagctgtttcgatcccagtggccaagtatcactgccccccatggttccttctcgggtggttggtggcatagcacaatcatcttcaagctcaggaatcttttttcagggagacggacaaaaccaggttggagggaattctcagttaagttctaattttaggaactcgtctaattcagttcctggacaagcacgtgctaacttgggtctgctgtcgggagaagttagcaacactttattaaatagtgtggcgagttctggccccagtgtcggggcaagttctttggtaactgatgctaactctggactttcagctggtcctcatctacagaggagtgctagtataaatacagaatcttacatgcgcttgcctgcttcacccatgtcattctcatctaataacgttagcatttctggctcgtccgtcatcgatggatcctctggtatgcagcaaagctctaatcaagacccaggttcgcatcatgcccagcaaactcagcaacatcagggagcttctagtgtcacatctctggccgcatcacgtatggggccagctcagctccatggtggtccaaggatgcacaattctttgattcaggacccagctgctatatctcagcttcaaaagaaaccccgcttggacatcaagcaagaagatattgtccagcagcaagttttgcaacaactcttgcagagagaccccatgcaattgcagagccccaatctgcagttgcaagctctgatccagcaacagagacttaggcagccacagcaacaccaacagcaacaactcctgcagtctatgacgccaatgcagcgggcccagttattgcagcaacagcagcagcagcagcagcagcaacagcaacagcaacagcagcagcagttaagacagcagcttctgcagcagggtatgcagcctgggtctgggataaagcgtccctacgatggtggtgtatgctcgcgtcgattaatgcaatacttgtatcatcagagacagagacctgctgacaatacaattgcttattggagaaaatttgtggctgagtattactctccacgcgcaaagaagaggtggtgcctatccctatatgataatgttggacatcactcactcggggtattcccccaggcagcaatggatgcatggcagtgtgacatttgtggttcaaaatctggaagaggatttgaggcaacttttgaagtgctccctagacttaacgaaatcaaatttggtagtggtgttatcgatgaacttttgttcttggacttgcctcgcgaatgtcgtttcccatcaggaatgatgatgctggagtatgcaaaggcagttcaggaaagtatatatgaacaacttcgtgtggttcgggagcgtcagctccggatcattttcacccaggatttgaagattttgtcttgggaattttgtgctcggcgtcatgaagaacttcttcctcgtagagtggttgcaccacaggtgaatcacttgcttcaagttgcacagaaatgccaaagcacgatatcggaaagtgggccagagggcgtttctcaaccagatatacaggcaaacagtgctatggtcgtaacagctggacgccagcttgctaggagtttggaattacagtcgctaaatgatttaggcttctccaaacgatatgtgcggtgcctgcagatagctgaggttgtcaatagcatgaaggatgtcatgaatttttgcagagaccataaagtcggcccaattgaggccctgaaaacttttccacgacacgcatctgcaaccaaggtccagatgcaaaagatgcatgaactggagatgggaggtctccagggtctaccaactgatcgaaacatgctcaataaactaatggcattacatccaggaggactcaatagccctatgaacaataatcaacgtatggtcggccaaggagccatgaatggctcagctcaagctgctcttgcattaagtaactatcaaaatatgctaatgagacaaaattcaatgaactcaaaccaggagccgtcttctcctttcagtacttccagccaacctccatctactccaaggtcttcaggtattttatcaggaactgtgcaaaactcgcccggtcgtggctttcctagtcaccagggaccacatcagcaacagtatcaaagcgggaatggtttactactgcaaaatcagtctatgccttcccaaggcagccaatcattgcaacagcagatgatacagcaaatgctgcatgatatgagcaataagaataatggtcagggagttcaacaacagtccatatctgctcaaaattcaggtggtaatgtatctcgagctgggagtgggcctgggaatgttgcatcacagcctccaaacagaagcaatagtttcaaatctgcttccaatggtgaatctccgtctgctgttagcaatgttggatttagccaaaagggaacagatttgccacagaaccttcatatctctgatgagatggttcaagattttggacacgattttagtgagagtggtttttttagcagtgatcttgacgacagcatgaacttcagttggaagggatgagtggttaacagtgtcttaatgttgtattatgagaaagtggaatctgaggatgtctttgtacaggcagttataacttataagttgctctctttacgtttatgtattgggttactgactacggagtttattggccccgttcagtantctgccagttttgttttcttgnggggattcaaactttgaagttnccggtcttgcaattgtatctaatganacgaattggggacttcttgattggataacctgactggcctgaccagtggtgcgacattagactggttaagttgatgacctaaaaaaaaaaaaaaaa

SEQ ID NO: 18101 - protein, 841 aa, Antirrhinum majus
MVPSRVVGGIAQSSSSSGIFFQGDGQNQVGGNSQLSSNFRNSSNSVPGQARANLGLLSGEVSNTLLNSVASSGPSVGASSLVTDANSGLSAGPHLQRSASINTESYMRLPASPMSFSSNNVSISGSSVIDGSSGMQQSSNQDPGSHHAQQTQQHQGASSVTSLAASRMGPAQLHGGPRMHNSLIQDPAAISQLQKKPRLDIKQEDIVQQQVLQQLLQRDPMQLQSPNLQLQALIQQQRLRQPQQHQQQQLLQSMTPMQRAQLLQQQQQQQQQQQQQQQQQQLRQQLLQQGMQPGSGIKRPYDGGVCSRRLMQYLYHQRQRPADNTIAYWRKFVAEYYSPRAKKRWCLSLYDNVGHHSLGVFPQAAMDAWQCDICGSKSGRGFEATFEVLPRLNEIKFGSGVIDELLFLDLPRECRFPSGMMMLEYAKAVQESIYEQLRVVRERQLRIIFTQDLKILSWEFCARRHEELLPRRVVAPQVNHLLQVAQKCQSTISESGPEGVSQPDIQANSAMVVTAGRQLARSLELQSLNDLGFSKRYVRCLQIAEVVNSMKDVMNFCRDHKVGPIEALKTFPRHASATKVQMQKMHELEMGGLQGLPTDRNMLNKLMALHPGGLNSPMNNNQRMVGQGAMNGSAQAALALSNYQNMLMRQNSMNSNQEPSSPFSTSSQPPSTPRSSGILSGTVQNSPGRGFPSHQGPHQQQYQSGNGLLLQNQSMPSQGSQSLQQQMIQQMLHDMSNKNNGQGVQQQSISAQNSGGNVSRAGSGPGNVASQPPNRSNSFKSASNGESPSAVSNVGFSQKGTDLPQNLHISDEMVQDFGHDFSESGFFSSDLDDSMNFSWKG

SEQ ID NO: 18102 - DNA, 2271 bp, Arabidopsis thaliana
  CDS (1)..(2271)
atgagtgtttcaacacccggtccaagcgcaggagctagttcgcttgtcacagatgctaattcagggctctctggaggtggtcctcatttgcagcgtagtgctagtatcaataatgagtcatatatgcgtttaccggcgtctcctatgtcgttctcttctaataatatcagcatatctggttcatcagttgtagatgggtcgactgtggtacaacggcatgatcctagtgttcagctaggtggctctagtgctacatcactgcctacatcacaaactaatcaaatcccgctttctatggctcggcgtgcttctgaatcgttctttcaggatccaaacaacttaactcaagcacggaaaaaacctagattagattcaaagcaggatgatgctttgcagcagcagattttacgtcagtggcttcagagacaggatatattgcagcagcagcagcaacaacaacaacaaggccaaaatccacagttccaaatcttgcttcagcaacaaaagctgaggcaacagcaacaatatctccagtccctcccaccattgcaacgggttcaactgcagcagcagcaacaagtgcagcaacagcaacagttgcagcagcagcaccaacagcaacagcaacagttgcaacaacaaggaatgcaaatgcaactaaccggtgggccaagaccttatgaaaatagcgtttgcgctcgaagattgatgcagtacctatatcatcagcgacaaaggccttctgagagcagtattgtttactggaggaaatttgtgacggagtatttttctccccgggcaaagaaaagatggtgtctttctcattatgataatgtggggcatagtgcacttggtgtttctcctcaggcagccacggatgaatggcagtgtgatctatgtggttctaaatcgggaagaggatttgaagcaacttttgatgtcttgccaaggcttaacgaaatcaaattcgcaagtggtgtcctggacgagcttctttatctgggtgtaccgtctgaacgcagatatggatctggaattatggtgttagagtatggaaaagcagttcaggagagtgtgtacgaacatatccgtgttgttcgcgaaggccatcttcggattatattctcccaagagctgaagattctctcatgggagttctgtactcgtcgacatgaagaactacttcctcgtcgcctagtagctccacaggtgaaccaattgcttcaggttgcagagaaatgtcagagcacaattgatcaaagtggatcagatgggattcatcaacaagatttgcaagctaatagcaacatggtcatggctgctggacgtcaactagcaaaaagcttggagtcacattcactcaatgacttaggcttctcaaaacgatatgttcggtgtctgcagatttctgaggttgtcagcagcatgaaagatatgattgacttttgccgtgaccaaaaagtgggtccaatcgaggctttgaagagctatccatatcgaatgaaggctggtaaacctcagatgcaggagatggagcaactagcggctgcccgagggcttccacctgataggaacagtctcaacaagctaatggccttgcgcaattccgggataaacataccaatgaacaacatgagcggtcaaggatctcttcccggctctgcacaagctgccgcttttgcgcttaccaactaccagagcatgctcatgaaacaaaaccatctgaattcagacctaaacaacaccacaatccagcaagaaccatcaagaaaccggagtgcatccccgagctatcaaggaactagtcccttgttacctggttttgtgcatagcccatcaataagtggtgtatcttcccatctatctcctcagcggcaaatgccaagctccagttataatggctcaacccagcaataccaccaacagccaccttcctgtagtagcggtaaccaaacattggaacaacaaatgattcatcaaatatggcaacagatggcaaacagcaatggaggctccggtcaacaacaacagtcactttctggtcagaacatgatgaattgcaataccaacatgggaagaaacagaacagattatgttcccgcagcagctgaaacaccaagcacctccaacagattcagaggcatcaaggggttagaccaaagccaaaacctggaaggtattatctctaatacatcgctcaactttgggaataacggggtttttagcaatgaggttgatgaaagcatgggaggatattcttggaagtcatga

SEQ ID NO: 18103 - protein, 756 aa, Arabidopsis thaliana
MSVSTPGPSAGASSLVTDANSGLSGGGPHLQRSASINNESYMRLPASPMSFSSNNISISGSSVVDGSTVVQRHDPSVQLGGSSATSLPTSQTNQIPLSMARRASESFFQDPNNLTQARKKPRLDSKQDDALQQQILRQWLQRQDILQQQQQQQQQGQNPQFQILLQQQKLRQQQQYLQSLPPLQRVQLQQQQQVQQQQQLQQQHQQQQQQLQQQGMQMQLTGGPRPYENSVCARRLMQYLYHQRQRPSESSIVYWRKFVTEYFSPRAKKRWCLSHYDNVGHSALGVSPQAATDEWQCDLCGSKSGRGFEATFDVLPRLNEIKFASGVLDELLYLGVPSERRYGSGIMVLEYGKAVQESVYEHIRVVREGHLRIIFSQELKILSWEFCTRRHEELLPRRLVAPQVNQLLQVAEKCQSTIDQSGSDGIHQQDLQANSNMVMAAGRQLAKSLESHSLNDLGFSKRYVRCLQISEVVSSMKDMIDFCRDQKVGPIEALKSYPYRMKAGKPQMQEMEQLAAARGLPPDRNSLNKLMALRNSGINIPMNNMSGQGSLPGSAQAAAFALTNYQSMLMKQNHLNSDLNNTTIQQEPSRNRSASPSYQGTSPLLPGFVHSPSISGVSSHLSPQRQMPSSSYNGSTQQYHQQPPSCSSGNQTLEQQMIHQIWQQMANSNGGSGQQQQSLSGQNMMNCNTNMGRNRTDYVPAAAETPSTSNRFRGIKGLDQSQNLEGIISNTSLNFGNNGVFSNEVDESMGGYSWKS

SEQ ID NO: 18104 - DNA, 2412 bp, Oryza sativa subsp
  CDS (1)..(2412)
atgtctggggcgccatgctccaaccttggacttgttcccagggatatgcatggtagtatccctattagcactacaaattcctctgggccaagcattggtgttagctctttggtgacggatgctaactcatcgctctccggaggtgcccagttgcagccaagtacgagcatgaatgctgattcattcatgcgccttcctgcttccccaatgtcgttttcatccaataacatctctggatcttcagttattgatggtcccattgtgcaacaaagtcctccccaagagcagatgcagaagcgaaggtcttctagtgtaacatcacaacctgttattgatgctgctggtgcattgcatgctcagaagaagtcaagggttgatattaggcaagatgatatcctgcaacacaatttaatccagcaactgctccaaggccagagttctcttcatctgcagggtcaacagaaccctcagattcaagccttgatccatcagcataaactggcacagattcagcagcaacagcagcatcagatgttgcaaccattttcacagatccaacaatctcaagttggcatacctcggcagccacagttgaggcctccactagcgcagcctggaatgcagctagctggacctgttaggactcctgtcgagaatgggctttgttctcgaaggttaaagcaatacttataccataagcgtcaccgaccagagaataatccaataacatactggaggaagcttattgatgaatattttgcaccacgagcaagagaaagatggtgtgtatcctcgtatgagaaaagaggaaatccttcaggtgctgttccacacacagctccggattcatggcgctgtgacatttgtaatacacatgggggcaaaggatatgaggctacctatgaaatacttcctagactctgtcaaattagatttgaccatggtgttatagatgaatacttattccttgacatggccaatgaattccggttgcccaatggactaatgctgctggaacatactaaagttgttcagaaaagcatttatgaacatatgcatgtgatacacgaggggcagttgagaatcatattcacaccagaactgaagataatgtcctgggagttctgttcacggcgacatgatgagtatatcactcgcaggtttctttcaccccaggttgctcatctgctgcaagttgcccagaaatatcaaactgttgccactgaaagtggtccagctggggtctcaaacagtgatgcacagaacatttgcaacatgtttgtgacggcgtcacgacagctagcgaaaaatatagaccaccacaccttaaatgagcatggtctatctaaaagatatgttcgctgcttgcagatatcagaggtggtgaatcacatgaaagacctgattgaattcagccacaagaacaagcttggtcctatagagggtctgaagagctatcccaagcaaactgcagcaaaacttccagtacaaaacatgcacgagccaaagcaactaatggcagctgctggccttcctaatgaccagactaacctcaaagccatgggtgtcaaaacagaaatgaacacccatgcgaatgagacgcacggtattggaccaattggaaatggtccgcagaatgctgctgcacttaacaattaccagaatcccattggaaatggtctgcagaatgctgctgcacttaacaattaccagaatatccttagaagttcagtcgcaaaccagagtttgcttcagcaggaggcatcaagcatgtttaaaggtcccacagcaatgcacaatggcattcagctggaagcatctagatccttccgtggaccaaaccaggtgcatctcgcgcagttccaacatccggcctcatttcagcagcctatgcctcagcagagcagcctccagggcttgggtgtgagcccacaatatcagcagcatgtgctccatcagttgctgcaagaggccaagaacactaacaaccgtgtcttggcgcagcagcagcagcaacaacaacttcaacatgctcctgctaacagtggtcttgcatcaggaggaacggctatcaccggcagcgccgctagcggggatcatatgaataacaacggcgcggtgaagggtgggactccaatggttacaacaggtcctagcagtgtgatcaacaatacagccagcatcctccccagcagaagtaacagcttcaagtcagtgagcagcaacccccaagttgcagctgctgcgggcggcggcattggcagcggcggccatgcggctacccccaaggctgatgctctgcatgagttggatgatcttgacaatcttgggaatctgatcagtactgaactggaggagagtgggctgttcctgggtgaccaggcaggtggtggctactcatggaacatgtga

SEQ ID NO: 18105 - protein, 803 aa, Oryza sativa subsp
MSGAPCSNLGLVPRDMHGSIPISTTNSSGPSIGVSSLVTDANSSLSGGAQLQPSTSMNADSFMRLPASPMSFSSNNISGSSVIDGPIVQQSPPQEQMQKRRSSSVTSQPVIDAAGALHAQKKSRVDIRQDDILQHNLIQQLLQGQSSLHLQGQQNPQIQALIHQHKLAQIQQQQQHQMLQPFSQIQQSQVGIPRQPQLRPPLAQPGMQLAGPVRTPVENGLCSRRLKQYLYHKRHRPENNPITYWRKLIDEYFAPRARERWCVSSYEKRGNPSGAVPHTAPDSWRCDICNTHGGKGYEATYEILPRLCQIRFDHGVIDEYLFLDMANEFRLPNGLMLLEHTKVVQKSIYEHMHVIHEGQLRIIFTPELKIMSWEFCSRRHDEYITRRFLSPQVAHLLQVAQKYQTVATESGPAGVSNSDAQNICNMFVTASRQLAKNIDHHTLNEHGLSKRYVRCLQISEVVNHMKDLIEFSHKNKLGPIEGLKSYPKQTAAKLPVQNMHEPKQLMAAAGLPNDQTNLKAMGVKTEMNTHANETHGIGPIGNGPQNAAALNNYQNPIGNGLQNAAALNNYQNILRSSVANQSLLQQEASSMFKGPTAMHNGIQLEASRSFRGPNQVHLAQFQHPASFQQPMPQQSSLQGLGVSPQYQQHVLHQLLQEAKNTNNRVLAQQQQQQQLQHAPANSGLASGGTAITGSAASGDHMNNNGAVKGGTPMVTTGPSSVINNTASILPSRSNSFKSVSSNPQVAAAAGGGIGSGGHAATPKADALHELDDLDNLGNLISTELEESGLFLGDQAGGGYSWNM

SEQ ID NO: 18106 - DNA, 2337 bp, Zea mays
  CDS (1)..(2337)
atgaacggaactcatccctggacctccatgtccgggggtgcatgttctaaccttggatatgccagggacatgaatggtaatgttccaattagcactacaaattcctctggaccaagcattggagttagctcgttggtgactgacgccaactcgtcactttccggtggtgcccagttacagccaagtactagcatgaatggtgattcattgatgcgtgttcctgcatcaccaatgtcattttcatccaataacatctctggctcttcagtcattgatggttgcatcatgcagcaaagtccaccccaagaacagatgcagaaaaggaggtcttcaagtgtaacatcacaacatgtgatcgatgctggtggtgcattgcatgctcagaagaaatcaaggactgatgttagtcagggtgatatcatgcaacatcagctgattcagcatctgatccatggtcagaattctcttcatttccaggggcaacagaacccacagcttcaagcttttatccagcagcataaactagcacaacttcagcaacggcagcagcagcatttgttgcaaccattttctcagatgcaacaaccccaagttggtattcctcggcagccgcaacttaggccgccattggcacagactggaatgcagttaggtggtcctgttaggactcctatcgagaggggcgtttgttctcgcaggatactgcagtatctatttcacaagcgtcatcgcccagagaataactctataacatactggaggaagattgttgaagagtactttgcacctcgagcaagagaaaggtggtgtgtctcttcttatgaaaacagagggaattcttcagctgctgctccacagaaagctctggatacatggcgatgtggcatttgcaatacacatgctgggaaaggatatgaagctacctatgaaatacttcctaggctctgccaaattagatttgaccatggtgttattgatgaatacttatactttgactcacccaacgaatttgggttgcctaatggacaaatggtgctggagcatgcaaaagttgttcaaaaaagtgtttatgaacatctacatgttatacacgagggacatctgagaatcattttcacaccagaactgaagataatatcgtgggaattttgttcaagacgtcatgaggaatacaccactcgtaagactatagcaccacaggttaataatcttctgcaagttgtccagaaataccaagctgttgtcactgaaagtggatcagccgggatatcaaataatgatgcacaaaccatctgcaacatgtttgtcactgcatcacaacaactggcaaaaaatctagagcatcacaccttaaatgaacatgggctctctaaaagatatgtacgctccctgcagatatcggaggtggtgaatcacatgaaggacttgattgagttcagccacaagagcaagcttggtcctaaagagagcctgaacagctattctaaaaccacggcaaagtttgagaatatgcatgattcgagacaggccatggctgccgctaaccttgccaacaaccagagcaacaccaaattgatgggggtcaaacaagagacaagcacttctgcgaacaaccagactcctggtgccggagccattggcaacaacaatctaccgattgccgcacctctaaacacctaccagaacatgctcagaagctcaggtgccagtacgatttctctgcagcaggaggcgtcgagtgtcttcaaaggtcctacagcaatgcacaacggcatgcagctggaagcggccaggtccttcctgggacctaaccaagttcaattccagcaccacccaccgtcgtcgtcgtttcagcagcagcagcaaaacagtttccatggctttggtgtcaacccgcagtaccagcagcatgtcctcaaccagcttctgcaggaagttaagaacagtaacaaccgctcgaaagcgcagcaaccgcctctggatgcaccaccgccgaatgcgagcggcgggggtctcgcgccaggagttgctacccccaacgtcattgctgctactggggagcaggggcagcatgtcaataacagtagctctaaccataacggcacggtaaagggtgctgctggtactggccctagcaatgtcatcaacaatagcacagccagcatggcttcggccagaaacagcagcttcaagtcggtgagcagcagtccagctgctgctggcaatgccgtgagctcgaaggtcgatgactccttccatcaactggaggacctcgacgacatgatcgctaacgaactggtggagagcgggctgttcggtgcaggacacgggtggtag

SEQ ID NO: 18107 - protein, 778 aa, Zea mays
MNGTHPWTSMSGGACSNLGYARDMNGNVPISTTNSSGPSIGVSSLVTDANSSLSGGAQLQPSTSMNGDSLMRVPASPMSFSSNNISGSSVIDGCIMQQSPPQEQMQKRRSSSVTSQHVIDAGGALHAQKKSRTDVSQGDIMQHQLIQHLIHGQNSLHFQGQQNPQLQAFIQQHKLAQLQQRQQQHLLQPFSQMQQPQVGIPRQPQLRPPLAQTGMQLGGPVRTPIERGVCSRRILQYLFHKRHRPENNSITYWRKIVEEYFAPRARERWCVSSYENRGNSSAAAPQKALDTWRCGICNTHAGKGYEATYEILPRLCQIRFDHGVIDEYLYFDSPNEFGLPNGQMVLEHAKVVQKSVYEHLHVIHEGHLRIIFTPELKIISWEFCSRRHEEYTTRKTIAPQVNNLLQVVQKYQAVVTESGSAGISNNDAQTICNMFVTASQQLAKNLEHHTLNEHGLSKRYVRSLQISEVVNHMKDLIEFSHKSKLGPKESLNSYSKTTAKFENMHDSRQAMAAANLANNQSNTKLMGVKQETSTSANNQTPGAGAIGNNNLPIAAPLNTYQNMLRSSGASTISLQQEASSVFKGPTAMHNGMQLEAARSFLGPNQVQFQHHPPSSSFQQQQQNSFHGFGVNPQYQQHVLNQLLQEVKNSNNRSKAQQPPLDAPPPNASGGGLAPGVATPNVIAATGEQGQHVNNSSSNHNGTVKGAAGTGPSNVINNSTASMASARNSSFKSVSSSPAAAGNAVSSKVDDSFHQLEDLDDMIANELVESGLFGAGHGW

SEQ ID NO: 18108 - DNA, 2337 bp, Zea mays
  CDS (1)..(2337)
atgaacggaactcatccctggacctccatgtccgggggtgcatgttctaaccttggatatgccagagacatgaatggtaatgttccaattagcactacaaattcctctggaccaagcattggagttagctcgttggtgactgacgccaactcgtcactttccggtggtgcccagttacagccaagtactagcatgaatggtgattcattgatgcgtgttcctgcatcaccaatgtcattttcatccaataacatctctggctcttcagtcattgatggttccatcatgcagcaaagtccaccccaagaacagatgcagaaaaggaggtcttcaagtgtaacatcacaacatgtgatcgatgctggtggtgcattgcatgctcagaagaaatcaagggctgatgttagtcagggtgatatcatgcaacatcagctgattcagcatctgatccatggtcagaattctcttcatttccaggggcaacagaacccacagcttcaagcttttatccagcagcataaactagcacaacttcagcaacggcagcagcagaatttgttgcaaccattttctcagatgcaacaaccccaagttggtattcctcggcagccgcaacttaggccgccattggcacagactggaatgcagttaggtggtcctgttaggactcctatcgagaggggcgtttgttctcgcaggatactgcagtatctatatcacaagcgtcatcgcccagagaataaccctataacatactggaggaagcttgttgaagagtacttcgcacctcgagcaagagaaagatggtgtgtctcttcttatgaaaacagagggaattcttcagctgctgctccacagaaagctttggatacgtggcgatgtggcatttgcaatacacatggtgggaaaggatatgaagttacctatgaagtacttcctaggctctgccaaattagatttgaccatggtgttattgatgaatacttatactttgactcacccaacgaattccggttgcctaatggacaaatggtgctggagcatgcaaaagtagttcaaaaaagtgtttatgaacatctgcatgttatacacgagggacatctgagaataattttcacaccagaactgaagataatgtcttgggagttctgttcacgacgccatgaggagtacaccactcgcaagactatagcaccacaggttaataatcttctgcaagttgcccagaaattccaagctgttgtcagtgaaagtggatcagctgggatatcaaataatgatgcacaaaccatctgcaacatgtttgttaatgcatcacggcaactggcaaaaaatctagagcatcacaccttaaatgaacatgggctttctaaaagatatgtacgctgcctgcagatatcggaggtggtgaatcacatgaaggacttgatcgagttcagccacaagagcaagcttggtcctaaagagagcctgaacagttattctaaaaccacggcaaagtttgagaatatgcatgattcgagacaggccatggctgccgctaaccttgccaacaaccagagcaacaccaaattgatgggggtcaaacaagagacaagcacttctgcgaacaaccagactcctggtgccggagccattggcaacaacaatctaccgattgccgcacctctaaacacctaccagaacatgctcagaagctcaggtgccagtacgatttcgctgcagcaggaggcgtcgagtgtcttcaaaggtcctacagcaatgcacaacggcatgcagctggaagcggccaggtccttcctgggacctaaccaagttcaattccagcaccacccaccgtcgtcgtcgtttcagcagcagcagcaaaacagtttccatggctttggtgtcaacccgcagtaccagcagcatgtcctcaaccagcttctgcaggaagttaagaacagtaacaaccgctcgaaagcgcagcaaccgcctctggatgcaccaccgccgaatgcgagcggcgggggtctcgcgccaggagttgctacccccaacgtcattgctgctactggggagcaggggcagcatgtcaataacagtagctctaaccataacggcacggtaaagggtgctgctggtactggccctagcaatgtcatcaacaatagcacagccagcatggcttcggccagaaacagcagcttcaagtcggtgagcagcagtccagctgctgctggcaatgccgtgagctcgaaggtcgatgactccttccatcaactggaggacctcgacgacatgatcgctaacgaactggtggagagcgggctgttcggtgcaggacacgggtggtag

SEQ ID NO: 18109 - protein, 778 aa, Zea mays
MNGTHPWTSMSGGACSNLGYARDMNGNVPISTTNSSGPSIGVSSLVTDANSSLSGGAQLQPSTSMNGDSLMRVPASPMSFSSNNISGSSVIDGSIMQQSPPQEQMQKRRSSSVTSQHVIDAGGALHAQKKSRADVSQGDIMQHQLIQHLIHGQNSLHFQGQQNPQLQAFIQQHKLAQLQQRQQQNLLQPFSQMQQPQVGIPRQPQLRPPLAQTGMQLGGPVRTPIERGVCSRRILQYLYHKRHRPENNPITYWRKLVEEYFAPRARERWCVSSYENRGNSSAAAPQKALDTWRCGICNTHGGKGYEVTYEVLPRLCQIRFDHGVIDEYLYFDSPNEFRLPNGQMVLEHAKVVQKSVYEHLHVIHEGHLRIIFTPELKIMSWEFCSRRHEEYTTRKTIAPQVNNLLQVAQKFQAVVSESGSAGISNNDAQTICNMFVNASRQLAKNLEHHTLNEHGLSKRYVRCLQISEVVNHMKDLIEFSHKSKLGPKESLNSYSKTTAKFENMHDSRQAMAAANLANNQSNTKLMGVKQETSTSANNQTPGAGAIGNNNLPIAAPLNTYQNMLRSSGASTISLQQEASSVFKGPTAMHNGMQLEAARSFLGPNQVQFQHHPPSSSFQQQQQNSFHGFGVNPQYQQHVLNQLLQEVKNSNNRSKAQQPPLDAPPPNASGGGLAPGVATPNVIAATGEQGQHVNNSSSNHNGTVKGAAGTGPSNVINNSTASMASARNSSFKSVSSSPAAAGNAVSSKVDDSFHQLEDLDDMIANELVESGLFGAGHGW

SEQ ID NO: 18110 - DNA, 20 bp, Artificial sequence
  primer
atggtaccatcagagccgcc

SEQ ID NO: 18111 - DNA, 22 bp, Artificial sequence
  primer
tcacgcgttccaatcaaaattg

SEQ ID NO: 18112 - protein, 1020 aa, Artificial sequence
  consensus sequence
  Variant (2)..(2): Xaa in position 2 is any amino acid
  Variant (3)..(16): Xaa in position 3 to 16 is any or no amino acid
  Variant (18)..(26): Xaa in position 18 to 26 is any amino acid
  Variant (27)..(28): Xaa in position 27 to 28 is any or no amino acid
  Variant (30)..(39): Xaa in position 30 to 39 is any amino acid
  Variant (40)..(80): Xaa in position 40 to 80 is any or no amino acid
  Variant (82)..(82): Xaa in position 82 is any amino acid
  Variant (84)..(108): Xaa in position 84 to 108 is any amino acid
  Variant (109)..(110): Xaa in position 109 to 110 is any or no amino acid
  Variant (112)..(129): Xaa in position 112 to 129 is any amino acid
  Variant (130)..(137): Xaa in position 130 to 137 is any or no amino acid
  Variant (139)..(139): Xaa in position 139 is any amino acid
  Variant (141)..(145): Xaa in position 141 to 145 is any amino acid
  Variant (146)..(154): Xaa in position 146 to 154 is any or no amino acid
  Variant (156)..(162): Xaa in position 156 to 162 is any amino acid
  Variant (164)..(164): Xaa in position 164 is any amino acid
  Variant (165)..(167): Xaa in position 165 to 167 is any or no amino acid
  Variant (169)..(173): Xaa in position 169 to 173 is any amino acid
  Variant (174)..(175): Xaa in position 174 to 175 is any or no amino acid
  Variant (177)..(178): Xaa in position 177 to 178 is any amino acid
  Variant (180)..(184): Xaa in position 180 to 184 is any amino acid
  Variant (186)..(195): Xaa in position 186 to 195 is any amino acid
  Variant (197)..(198): Xaa in position 197 to 198 is any amino acid
  Variant (199)..(202): Xaa in position 199 to 202 is any or no amino acid
  Variant (204)..(212): Xaa in position 204 to 212 is any amino acid
  Variant (213)..(246): Xaa in position 213 to 246 is any or no amino acid
  Variant (248)..(248): Xaa in position 248 is any amino acid
  Variant (250)..(250): Xaa in position 250 is any amino acid
  Variant (252)..(252): Xaa in position 252 is any amino acid
  Variant (254)..(255): Xaa in position 254 to 255 is any amino acid
  Variant (258)..(259): Xaa in position 258 to 259 is any amino acid
  Variant (261)..(261): Xaa in position 261 is any amino acid
  Variant (264)..(266): Xaa in position 264 to 266 is any amino acid
  Variant (269)..(270): Xaa in position 269 to 270 is any amino acid
  Variant (272)..(272): Xaa in position 272 is any amino acid
  Variant (274)..(274): Xaa in position 274 is any amino acid
  Variant (278)..(281): Xaa in position 278 to 281 is any amino acid
  Variant (285)..(285): Xaa in position 285 is any amino acid
  Variant (287)..(287): Xaa in position 287 is any amino acid
  Variant (289)..(290): Xaa in position 289 to 290 is any amino acid
  Variant (294)..(294): Xaa in position 294 is any amino acid
  Variant (296)..(296): Xaa in position 296 is any amino acid
  Variant (298)..(298): Xaa in position 298 is any amino acid
  Variant (299)..(313): Xaa in position 299 to 313 is any or no amino acid
  Variant (315)..(315): Xaa in position 315 is any amino acid
  Variant (317)..(317): Xaa in position 317 is any amino acid
  Variant (319)..(319): Xaa in position 319 is any amino acid
  Variant (320)..(320): Xaa in position 320 is any or no amino acid
  Variant (322)..(325): Xaa in position 322 to 325 is any amino acid
  Variant (327)..(327): Xaa in position 327 is any amino acid
  Variant (329)..(329): Xaa in position 329 is any amino acid
  Variant (331)..(336): Xaa in position 331 to 336 is any amino acid
  Variant (337)..(346): Xaa in position 337 to 346 is any or no amino acid
  Variant (348)..(348): Xaa in position 348 is any amino acid
  Variant (349)..(350): Xaa in position 349 to 350 is any or no amino acid
  Variant (352)..(352): Xaa in position 352 is any amino acid
  Variant (354)..(359): Xaa in position 354 to 359 is any amino acid
  Variant (361)..(363): Xaa in position 361 to 363 is any amino acid
  Variant (364)..(365): Xaa in position 364 to 365 is any or no amino acid
  Variant (367)..(369): Xaa in position 367 to 369 is any amino acid
  Variant (371)..(373): Xaa in position 371 to 373 is any amino acid
  Variant (375)..(376): Xaa in position 375 to 376 is any amino acid
  Variant (378)..(378): Xaa in position 378 is any amino acid
  Variant (380)..(381): Xaa in position 380 to 381 is any amino acid
  Variant (383)..(385): Xaa in position 383 to 385 is any amino acid
  Variant (387)..(388): Xaa in position 387 to 388 is any amino acid
  Variant (391)..(391): Xaa in position 391 is any amino acid
  Variant (395)..(395): Xaa in position 395 is any amino acid
  Variant (397)..(399): Xaa in position 397 to 399 is any amino acid
  Variant (403)..(403): Xaa in position 403 is any amino acid
  Variant (409)..(409): Xaa in position 409 is any amino acid
  Variant (415)..(417): Xaa in position 415 to 417 is any amino acid
  Variant (420)..(422): Xaa in position 420 to 422 is any amino acid
  Variant (426)..(427): Xaa in position 426 to 427 is any amino acid
  Variant (429)..(430): Xaa in position 429 to 430 is any amino acid
  Variant (432)..(432): Xaa in position 432 is any amino acid
  Variant (435)..(435): Xaa in position 435 is any amino acid
  Variant (437)..(445): Xaa in position 437 to 445 is any amino acid
  Variant (446)..(464): Xaa in position 446 to 464 is any or no amino acid
  Variant (466)..(467): Xaa in position 466 to 467 is any amino acid
  Variant (469)..(469): Xaa in position 469 is any amino acid
  Variant (471)..(473): Xaa in position 471 to 473 is any amino acid
  Variant (475)..(476): Xaa in position 475 to 476 is any amino acid
  Variant (477)..(603): Xaa in position 477 to 603 is any or no amino acid
  Variant (605)..(607): Xaa in position 605 to 607 is any amino acid
  Variant (613)..(614): Xaa in position 613 to 614 is any amino acid
  Variant (616)..(619): Xaa in position 616 to 619 is any amino acid
  Variant (621)..(622): Xaa in position 621 to 622 is any amino acid
  Variant (624)..(625): Xaa in position 624 to 625 is any amino acid
  Variant (635)..(635): Xaa in position 635 is any amino acid
  Variant (640)..(640): Xaa in position 640 is any amino acid
  Variant (646)..(653): Xaa in position 646 to 653 is any amino acid
  Variant (657)..(658): Xaa in position 657 to 658 is any amino acid
  Variant (660)..(662): Xaa in position 660 to 662 is any amino acid
  Variant (664)..(665): Xaa in position 664 to 665 is any amino acid
  Variant (667)..(788): Xaa in position 667 to 788 is any amino acid
  Variant (789)..(837): Xaa in position 789 to 837 is any or no amino acid
  Variant (839)..(848): Xaa in position 839 to 848 is any amino acid
  Variant (849)..(852): Xaa in position 849 to 852 is any or no amino acid
  Variant (854)..(876): Xaa in position 854 to 876 is any amino acid
  Variant (877)..(885): Xaa in position 877 to 885 is any or no amino acid
  Variant (887)..(897): Xaa in position 887 to 897 is any amino acid
  Variant (898)..(910): Xaa in position 898 to 910 is any or no amino acid
  Variant (912)..(912): Xaa in position 912 is any amino acid
  Variant (913)..(915): Xaa in position 913 to 915 is any or no amino acid
  Variant (917)..(939): Xaa in position 917 to 939 is any amino acid
  Variant (940)..(949): Xaa in position 940 to 949 is any or no amino acid
  Variant (951)..(978): Xaa in position 951 to 978 is any amino acid
  Variant (979)..(1019): Xaa in position 979 to 1019 is any or no amino acid
QXXXXXXXXXXXXXXXSXXXXXXXXXXXSXXXXXXXXXXXXXXXXXXXXXXXXXXXXXXXXXXXXXXXXXXXXXXXXXXXPXQXXXXXXXXXXXXXXXXXXXXXXXXXXXQXXXXXXXXXXXXXXXXXXXXXXXXXXQXLXXXXXXXXXXXXXXPXXXXXXXQXXXXQXXXXXXXQXXQXXXXXQXXXXXXXXXXQXXXXXXQXXXXXXXXXXXXXXXXXXXXXXXXXXXXXXXXXXXXXXXXXXXPXEXGXCXXRLXXYXYHXXXRPXXNXIXYWRXXXXEYFXPXAXXRWCXSXYXXXXXXXXXXXXXXXXDXWXCXXCXXXXGXGXEXXXXXXXXXXXXXXXXGXXXEXLXXXXXXEXXXXXGXXXLXXXKXXQXSXXEXXXVXXEGXLRIXFXXXLKIXSWEFCXRRHEEXXXRRXXXPQVXXLXXVXQKXQXXXXXXXXXXXXXXXXXXXXXXXXXXXXSXXDXQXXXNXXXXXXXXXXXXXXXXXXXXXXXXXXXXXXXXXXXXXXXXXXXXXXXXXXXXXXXXXXXXXXXXXXXXXXXXXXXXXXXXXXXXXXXXXXXXXXXXXXXXXXXXXXXXXXXXXXXXXXXXXXXXXXXXXVXXXRQLAKXXEXXXXNXXGXXKRYVRCLQIXEVVNXMKDLIXXXXXXXXGPIXXLXXXPXXTXXXXXXXXXXXXXXXXXXXXXXXXXXXXXXXXXXXXXXXXXXXXXXXXXXXXXXXXXXXXXXXXXXXXXXXXXXXXXXXXXXXXXXXXXXXXXXXXXXXXXXXXXXXXXXXXXXXXXXXXXXXXXXXXXXXXXXXXXXXXXXXXXXXXXXXXXXXXXXXXXXXXXXXXXXXQXXXXXXXXXXXXXXQXXXXXXXXXXXXXXXXXXXXXXXXXXXXXXXXNXXXXXXXXXXXXXXXXXXXXXXXXGXXXXNXXXXXXXXXXXXXXXXXXXXXXXXXXXXXXXXXNXXXXXXXXXXXXXXXXXXXXXXXXXXXXXXXXXXXXXXXXXXXXXXXXXXXXXXXXXXXXXXXXXXXXXF

SEQ ID NO: 18113 - protein, 61 aa, Artificial sequence
  protein pattern
  Variant (2)..(7): Xaa in position 2 to 7 is any amino acid
  Variant (8)..(9): Xaa in position 8 to 9 is any or no amino acid
  Variant (11)..(11): Xaa in position 11 is any amino acid
  Variant (12)..(13): Xaa in position 12 to 13 is any or no amino acid
  Variant (15)..(15): Xaa in position 15 is Glu or Lys
  Variant (16)..(16): Xaa in position 16 is Ser or Thr
  Variant (17)..(17): Xaa in position 17 is Ile or Val
  Variant (18)..(18): Xaa in position 18 is Phe, His or Tyr
  Variant (20)..(20): Xaa in position 20 is any amino acid
  Variant (21)..(21): Xaa in position 21 is Phe, Ile or Leu
  Variant (22)..(22): Xaa in position 22 is His or Arg
  Variant (24)..(24): Xaa in position 24 is Ile or Val
  Variant (25)..(25): Xaa in position 25 is His or Arg
  Variant (26)..(26): Xaa in position 26 is Asp or Glu
  Variant (27)..(28): Xaa in position 27 to 28 is any amino acid
  Variant (32)..(32): Xaa in position 32 is Ile or Val
  Variant (34)..(34): Xaa in position 34 is Asn, Ser or Thr
  Variant (35)..(35): Xaa in position 35 is Pro or Gln
  Variant (36)..(36): Xaa in position 36 is Asp or Glu
  Variant (40)..(40): Xaa in position 40 is any amino acid
  Variant (46)..(46): Xaa in position 46 is Ala, Ser or Thr
  Variant (47)..(47): Xaa in position 47 is Gln or Arg
  Variant (52)..(54): Xaa in position 52 to 54 is any amino acid
  Variant (56)..(56): Xaa in position 56 is Lys or Arg
  Variant (57)..(57): Xaa in position 57 is any amino acid
  Variant (58)..(58): Xaa in position 58 is Ile, Leu or Val
  Variant (59)..(59): Xaa in position 59 is Ala or Ile
GXXXXXXXXAXXXQXXXXEXXXVXXXXXLRIXFXXXLKIXSWEFCXXRHEEXXXRXXXXPQ

SEQ ID NO: 18114 - protein, 58 aa, Artificial sequence
  protein pattern
  Variant (2)..(3): Xaa in position 2 to 3 is any or no amino acid
  Variant (5)..(5): Xaa in position 5 is any amino acid
  Variant (6)..(6): Xaa in position 6 is any or no amino acid
  Variant (12)..(12): Xaa in position 12 is Ala, Asn or Ser
  Variant (13)..(13): Xaa in position 13 is Ile or Leu
  Variant (14)..(14): Xaa in position 14 is Asp or Glu
  Variant (15)..(17): Xaa in position 15 to 17 is any amino acid
  Variant (18)..(18): Xaa in position 18 is Leu or Val
  Variant (20)..(20): Xaa in position 20 is Asp or Glu
  Variant (21)..(21): Xaa in position 21 is any amino acid
  Variant (23)..(23): Xaa in position 23 is any amino acid
  Variant (24)..(24): Xaa in position 24 is Ser or Thr
  Variant (34)..(34): Xaa in position 34 is Ala or Ser
  Variant (38)..(38): Xaa in position 38 is Asn or Ser
  Variant (39)..(39): Xaa in position 39 is any amino acid
  Variant (43)..(43): Xaa in position 43 is Leu or Met
  Variant (45)..(45): Xaa in position 45 is Asp or Glu
  Variant (46)..(46): Xaa in position 46 is Phe or Tyr
  Variant (47)..(47): Xaa in position 47 is Cys or Ser
  Variant (48)..(48): Xaa in position 48 is His or Arg
  Variant (49)..(49): Xaa in position 49 is any amino acid
  Variant (50)..(50): Xaa in position 50 is Asn, Gln, Ser or Thr
  Variant (51)..(52): Xaa in position 51 to 52 is any amino acid
  Variant (55)..(55): Xaa in position 55 is any amino acid
  Variant (56)..(56): Xaa in position 56 is Ala or Glu
  Variant (57)..(57): Xaa in position 57 is Ala, Gly or Ser
VXXAXXRQLAKXXXXXXXNXXGXXKRYVRCLQIXEVVXXMKDXIXXXXXXXXGPXXXL

SEQ ID NO: 18115 - protein, 31 aa, Artificial sequence
  protein pattern
  Variant (2)..(4): Xaa in position 2 to 4 is any amino acid
  Variant (5)..(5): Xaa in position 5 is any or no amino acid
  Variant (7)..(7): Xaa in position 7 is any amino acid
  Variant (8)..(8): Xaa in position 8 is Asp or Glu
  Variant (9)..(9): Xaa in position 9 is any amino acid
  Variant (10)..(10): Xaa in position 10 is Gly or Ser
  Variant (11)..(11): Xaa in position 11 is any amino acid
  Variant (13)..(13): Xaa in position 13 is Ala or Ser
  Variant (14)..(14): Xaa in position 14 is Lys or Arg
  Variant (16)..(16): Xaa in position 16 is any or no amino acid
  Variant (18)..(18): Xaa in position 18 is any amino acid
  Variant (19)..(19): Xaa in position 19 is any or no amino acid
  Variant (21)..(21): Xaa in position 21 is Leu or Met
  Variant (22)..(22): Xaa in position 22 is Phe or Tyr
  Variant (24)..(24): Xaa in position 24 is any amino acid
  Variant (25)..(25): Xaa in position 25 is Gln or Arg
  Variant (26)..(26): Xaa in position 26 is any amino acid
  Variant (29)..(29): Xaa in position 29 is Ala, Glu, Gln or Ser
  Variant (30)..(30): Xaa in position 30 is Ala, Asp, Glu or Asn
  Variant (31)..(31): Xaa in position 31 is Asn or Ser
GXXXXPXXXXXCXXRXLXXYXXHXXXRPXXX

SEQ ID NO: 18116 - protein, 21 aa, Artificial sequence
  protein pattern
  Variant (4)..(4): Xaa in position 4 is any amino acid
  Variant (5)..(5): Xaa in position 5 is Phe, Ile or Leu
  Variant (6)..(6): Xaa in position 6 is Ile or Val
  Variant (7)..(7): Xaa in position 7 is Ala, Asp, Glu, Asn or Thr
  Variant (10)..(10): Xaa in position 10 is Phe or Tyr
  Variant (11)..(11): Xaa in position 11 is Ala or Ser
  Variant (13)..(13): Xaa in position 13 is Asn or Arg
  Variant (15)..(15): Xaa in position 15 is Lys or Arg
  Variant (16)..(16): Xaa in position 16 is any amino acid
  Variant (18)..(20): Xaa in position 18 to 20 is any amino acid
  Variant (21)..(21): Xaa in position 21 is Gly or Ser
YWRXXXXEYXXPXAXXRXXXX

SEQ ID NO: 18117 - protein, 18 aa, Artificial sequence
  protein pattern
  Variant (2)..(2): Xaa in position 2 is any amino acid
  Variant (4)..(4): Xaa in position 4 is any amino acid
  Variant (6)..(6): Xaa in position 6 is any amino acid
  Variant (7)..(7): Xaa in position 7 is Ile or Leu
  Variant (9)..(10): Xaa in position 9 to 10 is any amino acid
  Variant (11)..(11): Xaa in position 11 is His or Lys
  Variant (12)..(12): Xaa in position 12 is Ala, Gly, Pro or Ser
  Variant (14)..(14): Xaa in position 14 is Lys or Arg
  Variant (16)..(16): Xaa in position 16 is any amino acid
  Variant (17)..(17): Xaa in position 17 is any or no amino acid
DXWXCXXCXXXXGXGXXE

SEQ ID NO: 18118 - protein, 20 aa, Artificial sequence
  protein pattern
  Variant (2)..(2): Xaa in position 2 is any amino acid
  Variant (3)..(3): Xaa in position 3 is any or no amino acid
  Variant (5)..(6): Xaa in position 5 to 6 is any or no amino acid
  Variant (9)..(9): Xaa in position 9 is any amino acid
  Variant (11)..(11): Xaa in position 11 is Ala, Gln, Ser or Thr
  Variant (12)..(12): Xaa in position 12 is Ala, Thr or Val
  Variant (13)..(13): Xaa in position 13 is any amino acid
  Variant (14)..(14): Xaa in position 14 is Gln, Ser or Thr
  Variant (15)..(15): Xaa in position 15 is Glu or Asn
  Variant (16)..(16): Xaa in position 16 is Ala or Ser
  Variant (17)..(17): Xaa in position 17 is Gly or Thr
  Variant (18)..(18): Xaa in position 18 is Asn, Pro, Ser or Thr
  Variant (19)..(19): Xaa in position 19 is any amino acid
  Variant (20)..(20): Xaa in position 20 is Ala, Gly or Ser
LXXAXXQKXQXXXXXXXXXX

SEQ ID NO: 18119 - protein, 26 aa, Artificial sequence
  protein pattern
  Variant (2)..(4): Xaa in position 2 to 4 is any amino acid
  Variant (5)..(7): Xaa in position 5 to 7 is any or no amino acid
  Variant (9)..(9): Xaa in position 9 is Ala or Val
  Variant (10)..(10): Xaa in position 10 is Asn or Ser
  Variant (11)..(11): Xaa in position 11 is Cys or Ser
  Variant (14)..(14): Xaa in position 14 is Gly or Thr
  Variant (15)..(15): Xaa in position 15 is Asp or Asn
  Variant (17)..(17): Xaa in position 17 is Asn or Val
  Variant (18)..(18): Xaa in position 18 is Ser or Thr
  Variant (19)..(19): Xaa in position 19 is Gly, Asn or Ser
  Variant (20)..(20): Xaa in position 20 is any amino acid
  Variant (22)..(22): Xaa in position 22 is any or no amino acid
  Variant (24)..(25): Xaa in position 24 to 25 is any amino acid
  Variant (26)..(26): Xaa in position 26 is Gly, Leu or Pro
GXXXXXXGXXXLVXXAXXXXSXGXXX

SEQ ID NO: 18120 - protein, 20 aa, Artificial sequence
  protein pattern
  Variant (2)..(2): Xaa in position 2 is Ile, Leu or Met
  Variant (3)..(3): Xaa in position 3 is Asn or Gln
  Variant (4)..(4): Xaa in position 4 is Ala or Leu
  Variant (5)..(5): Xaa in position 5 is Phe or Leu
  Variant (6)..(7): Xaa in position 6 to 7 is any amino acid
  Variant (9)..(10): Xaa in position 9 to 10 is any amino acid
  Variant (12)..(12): Xaa in position 12 is any or no amino acid
  Variant (14)..(14): Xaa in position 14 is any amino acid
  Variant (17)..(18): Xaa in position 17 to 18 is any or no amino acid
  Variant (20)..(20): Xaa in position 20 is Gln or Ser
QXXXXXXQXXLXQXQQXXQX

SEQ ID NO: 18121 - protein, 18 aa, Artificial sequence
  protein pattern
  Variant (2)..(2): Xaa in position 2 is any amino acid
  Variant (3)..(3): Xaa in position 3 is Asp, Asn or Gln
  Variant (4)..(5): Xaa in position 4 to 5 is any amino acid
  Variant (8)..(9): Xaa in position 8 to 9 is any or no amino acid
  Variant (11)..(11): Xaa in position 11 is any amino acid
  Variant (13)..(13): Xaa in position 13 is any amino acid
  Variant (14)..(15): Xaa in position 14 to 15 is any or no amino acid
  Variant (17)..(17): Xaa in position 17 is Asn, Arg or Ser
  Variant (18)..(18): Xaa in position 18 is Asp, Pro, Gln or Ser
QXXXXQQXXLXQXXXQXX

SEQ ID NO: 18122 - DNA, 1287 bp, Arabidopsis thaliana
  CDS (1)..(1287)
atgtcaacaaagggagaacatcatacagttccactttctgtgttgcttaaacgtgaatcagctaatgaaaagatagacaatcctgaacttatacacggccagcacaaccaaagcaagaaaggagaggattttactcttgttaaaacagagtgtcaacgtgttatgggcgatggtgttaccaccttctccgtttttgggctttttgatggacacaatggttctgcagcagctatctacactaaagagaaccttttgaataatgtattagctgcaataccttctgatcttaacagagatgagtgggttgctgcacttcctagggctttggttgcaggatttgtgaaaactgataaagatttccaggaaagagcaaggacgtctggaacgactgtaacttttgtcatagtagaaggatgggtggtgagtgttgcatctgtaggtgactctcgttgcatacttgagcctgctgagggcggtgtctattatttgtctgctgatcatcggcttgaaataaacgaagaagagcgagatcgagtcactgcaagtggtggtgaagttggtcggttaaatactggtggcggtactgagattggtcctctgagatgttggcctggtggtctgtgtctctcaagatccattggagatctggatgttggcgaatacattgttccagttccttatgtaaagcaagtcaagttgtcttcagctggtggtcgactgatcatctcaagtgatggtgtgtgggatgcaatatctgcagaagaggctcttgattgttgccgggggttgccacctgaatcttctgcggagcatatcgttaaagaagctgtgggtaaaaaaggtattcgtgatgatacaacctgtattgttgttgatatattgccactagaaaaaccggctgcttccgtgccgcctccaaaaaagcaaggaaaaggaatgttaaagtccatgttcaaaaggaaaacatctgactcctcttctaatatcgagaaagagtacgcagaacctgatgtagttgaagaactctttgaagagggctctgctatgctatcagagagattagacacaaagtacccgctttgcaatatgtttaagttgttcatgtgtgctgtgtgtcaagtagaagtgaaacctggagaaggtgtctcgatccatgccgggtcggataattgccgtaagcttcgtccctgggatggtccattcctttgtgcaagttgccaagataagaaagacgcaatggaagggaaaagatcatcgggagatagacatagtagtgaaagcgactag

SEQ ID NO: 18123 - protein, 428 aa, Arabidopsis thaliana
MSTKGEHHTVPLSVLLKRESANEKIDNPELIHGQHNQSKKGEDFTLVKTECQRVMGDGVTTFSVFGLFDGHNGSAAAIYTKENLLNNVLAAIPSDLNRDEWVAALPRALVAGFVKTDKDFQERARTSGTTVTFVIVEGWVVSVASVGDSRCILEPAEGGVYYLSADHRLEINEEERDRVTASGGEVGRLNTGGGTEIGPLRCWPGGLCLSRSIGDLDVGEYIVPVPYVKQVKLSSAGGRLIISSDGVWDAISAEEALDCCRGLPPESSAEHIVKEAVGKKGIRDDTTCIVVDILPLEKPAASVPPPKKQGKGMLKSMFKRKTSDSSSNIEKEYAEPDVVEELFEEGSAMLSERLDTKYPLCNMFKLFMCAVCQVEVKPGEGVSIHAGSDNCRKLRPWDGPFLCASCQDKKDAMEGKRSSGDRHSSESD

SEQ ID NO: 18124 - DNA, 2384 bp, Glycine max
  CDS (307)..(1593)
ctagttgtgtccgctttctttctatcaacgaaaaacaacaatggaatatttgcaggacgctgggatccgcgtttctcgatcacacagaacaattcaattcatcagcgtgtctccacattttcgcgcgtgaaacctcatcgccattttccctcttcttcttcttcttcttcactgattggattaattgcacgtaaaggaggtttaaagcttcgcagcacgtgttgttgttgttgttcgtataattgttgttgttgtggcggcagtggtagtatttggaaattgaggattgagtggggtgtgtgaaaaatggctgccaggagtgatcaccaaacggttcctctttcggtgctcctgaggcgcgaattggcgaacgagaaaattgagaagcctgagattgctcatggtcaagcgtgccagagcaagaaaggcgaggatttgacgctgctcaagacggaatgccagagggtggtgggcgatggggtctctacatactcagtttttgggctatttgatggacacaatggatctgctgctgctatttattctaaggagaatcttctaaataatgttttaagcgcgattcctccagatcttaacagagatgagtggatagcagccttgcccagggctttggttgctggttttgtaaaaactgataaagattttcaagagaaaggccaaaaatctggaacaactgtcacctttgtcattatagaaggatgggttgtaacagttgcatcagttggtgattcccgttgcgtccttgaatcttctgatggtgagctttattacttgtccgcagatcacaggctagaaacgaatgaagaagagagggtgcggatcacctctagcggtggtgaagttggtcggctaaatacagggggaggtgcagaggttggtcctttgagatgttggcctggtggtttgtgtctctcacgatctattggagatatggatattggtgaatttattgtacctgtcccgtatgtaaagcaagtgaagatgtccactgctggaggccggcttgttatctgcagtgatggtgtttgggattctctacctgcagaagtagcccttgattgttgtcgtggaatgccagccgatgctgctgcaccacatattgttaaagaagctgtacaagcaaagggacttagagatgatacaacctgcattgtagttgatatattacctcaggagaaaccacctgtttctgcgccacaaacaaagaggccagtaaagggaatgctcaagtccatgtttcgtaaaaaatcttctgaatcatcttcttatattgacaaagagtacatggagccagatgtagtagaagaattgtacgaggaaggatctgccatgctttcagagaggttagatactaaatatccagtctgcaacatgttcaagttgtttatgtgtgcagtatgtcaagtagagataaaacctggagagggtatttcaatacacgagggtgcacccgactctcgaaaatttcgtccctgggacggacctttcctgtgctcaagttgccaagagaagaaagaagccatggaagggaaaagatcatcaggtagaattagcagtggaagtgatgaatgaactctcgtgtaaatttgcattttgagagtgataaaaattgttcatatgatgggaaagtcaaacaattcaatcaacaaagactcccttctaattttcactggggctttatggatataattttgaattccacatgaaaagacatatgaaaagtaaaccaatagcagcctgttagaagatttctgacttggaagtatgaaatagcaacaagtattgtgaagggttgtgttaaatgtggaagtacacaacaagatatcagaggtaatgcattctttttatatacttttttttgtgggatccgttcatttgtatacgggtcatttggaatcactatagacctttaatgaaagtggtctttgttattgtaatgtaatatagggagtttaattagaattcatagaatcaattctactgtaggttagatgtgtgttaagccttctgaatgattttttcctctaacattcgattttgacaattccttttgccatacgagcattaggtcttttgtaaaagatgttaggtggaattatcccccgcaccccgtctcaaaagtctcacagaaaaaagaggggaaaaaaatacatagtagtttattacacatttacatcccacctaactttgctgtttttccgtatgttatttgtaaattacaccccacccttgaaaattgctgaaccgtttcacccaatatgcatgctgtaatgtctttgtttttattactgtatttttttttacaactattccttcttggagaattggaccagaattcaagaataaaaaataagatgttatcc

SEQ ID NO: 18125 - protein, 428 aa, Glycine max
MAARSDHQTVPLSVLLRRELANEKIEKPEIAHGQACQSKKGEDLTLLKTECQRVVGDGVSTYSVFGLFDGHNGSAAAIYSKENLLNNVLSAIPPDLNRDEWIAALPRALVAGFVKTDKDFQEKGQKSGTTVTFVIIEGWVVTVASVGDSRCVLESSDGELYYLSADHRLETNEEERVRITSSGGEVGRLNTGGGAEVGPLRCWPGGLCLSRSIGDMDIGEFIVPVPYVKQVKMSTAGGRLVICSDGVWDSLPAEVALDCCRGMPADAAAPHIVKEAVQAKGLRDDTTCIVVDILPQEKPPVSAPQTKRPVKGMLKSMFRKKSSESSSYIDKEYMEPDVVEELYEEGSAMLSERLDTKYPVCNMFKLFMCAVCQVEIKPGEGISIHEGAPDSRKFRPWDGPFLCSSCQEKKEAMEGKRSSGRISSGSDE

SEQ ID NO: 18126 - DNA, 2390 bp, Glycine max
  CDS (138)..(1418)
gcaagatctctactccctctctctgagtctgttctattagggtttaggatcttttcctccaaatgctgaatcttccatctccatttttcacctgatttctttgacagggttccagagatgtttaattttaaacaaagatgagcagaactgaattatctaatatgaagcaacctcctgttcccctggcaaccctgattggccaggagttacggaatggaaaaatcgaaaagccttttgtgaagtatgggcaggctggcctggcaaagaaaggagaagattactttttaatcaaagcagattgccagagagttccaggggattcatcaacactgttttctgtctttgcgatctttgatgggcacaatggtatatctgctgctatttttgcgaaggaaagcatactaagtaatgttttgagtgcaataccacaagatatcagtagggatgagtggcttcaagctctgcctcgtgctctagttgttggttttgtgaaaactgacatagagtttcagaaaaagggggaaacttctggaacaacagctacatttgttttggttgatggatggactgtcactgttgcatctgttggggattcccgctgcatattagatactcagggaggtgttgtttctctcttgacagttgatcacagactggaagagaatgcagaagagagggagcgcgttactgccagcggtggtgaagtaggaagactcaatgtatttggaggcaatgaggttgggcctcttcgctgctggccaggtggattgtgcctatctagatctataggtgacacagacgtgggagaatttattgtgccaataccacatgttaagcaagtgaagctttcaaatgctggtggaaggcttattatagcttctgatggtatttgggatgctttatcatctgatatggctgctaagtcttgtcggggtctacctgcagagcttgctgcaaaactagtggttaaggaagctctaaggtcaagaggcctcaaggatgatacaacttgccttgttgtagatattattccttcggacctccctgtattaccaccaattccaagaaagaaacataatatgctaacttcgcttctattttttggaaagaaatctgagaactctgtgaacaaagctaccaataagctttctgcagttggtgttgtggaggagttatttgaagagggttctgcaatgcttaccgaaaggctaggtaaggattttccgcttaataaaaattctggtattttccgttgtgcggtttgccaagtggaccaaccccctggtgatgatggtttatcagtgaactctgggccttttttctctccagcatctaatccattcctctgcacaaactgtcagaagaagaaagatgccatggaaggaaaaaggcctagcagagcctccattacagcatagtaattatctagtattacagtagtaacatagtaaatattagtataatttttccctggcagtgtgagcatgcttgattttacattttcggtggttattgtcatagacgtgtaagaaatgaggttgagaattgaggtaggcttagtaggtgttttggaggttgctgcaagtttgattctggcttgtgctcagctgtaggactggctgacagaacaaacaagaaagttgtgtctggtagaaaaaaattctagtggaatctgctaacggcttgtatttgtaagtaaactgaagcttttgtggctgcctctgttttgagagtgcttcaatgctacagcccaaatgcatctgtatcttttaaacttatgttatacaaatacaactacatgtctcgaatgtccctccgaattcgatgagtaagattcttgtgaaaaaattggccctcggagacagcatagtaatatagtattctagcagcatagtaaatattagtataatttttctctggcagtgtgagcatgcttacttctacatttgggtggtgattgtcattggtgtgtaagaatgaggttgagatagccatattaggtctattggaggttgtcgcaagtttgtttttggcgtgtgctctcagctgttggactgactgacagaacaagcaatgttgtttagtagataacttctattagtttgattactaacggcttgtaattaactggcaatttcattgttaccctttataggtttatttgtttttaacaacagtacatgttgtgtgtgactctgtcggaacaggatatgctcaatctcgaattgtaagttttttttaacttgctacattattaagttgtgtctggtagataaaaattctagtggaatctgctaacggcttgtatttgtaagtaaactgaagcttttgtggctgcctctctatcgagagtgcttcaatgttacagcccaaatgcatctgtgtctttt

SEQ ID NO: 18127 - protein, 426 aa, Glycine max
MSRTELSNMKQPPVPLATLIGQELRNGKIEKPFVKYGQAGLAKKGEDYFLIKADCQRVPGDSSTLFSVFAIFDGHNGISAAIFAKESILSNVLSAIPQDISRDEWLQALPRALVVGFVKTDIEFQKKGETSGTTATFVLVDGWTVTVASVGDSRCILDTQGGVVSLLTVDHRLEENAEERERVTASGGEVGRLNVFGGNEVGPLRCWPGGLCLSRSIGDTDVGEFIVPIPHVKQVKLSNAGGRLIIASDGIWDALSSDMAAKSCRGLPAELAAKLVVKEALRSRGLKDDTTCLVVDIIPSDLPVLPPIPRKKHNMLTSLLFFGKKSENSVNKATNKLSAVGVVEELFEEGSAMLTERLGKDFPLNKNSGIFRCAVCQVDQPPGDDGLSVNSGPFFSPASNPFLCTNCQKKKDAMEGKRPSRASITA

SEQ ID NO: 18128 - DNA, 2038 bp, Zea mays
  CDS (293)..(1585)
ctcgagccgcttcgaccaggggagggcctgtttgctttattaaaatcctcgtccccttttgccgccgctctgttcacggccctcgccaaatccccaaaatccaagcgcgtcgccgacggcattgcgtcgccattgcctccaaatccgtgtgcgactcgcgtgatcccagatcccgctcgccgtattccccgcagtgacctctgaccagagcattttccgcgcggaaaatgccgccgtttcggccggctcttggaagggcgcttcttctgtaggaccgcggcgcgaggctgcgatggcgttcgccgccagcgagggaaatctttccccggcgctgcccctggccactctgatcggccgcgagctccgcggcgacggtaccgagcgcccgcacgtgcgctacggccactctggcttcgccaagcgcggcgaggactacttcctcgtcaagcccgactgcctccgcgtccccggagacccttcctcctctttctccgtcttcgctgtattcgacggccacaatggcgtgtcggcggcggtgttcagcaaggagaaattgctggagcacgtgatgagcgcggtgcccgagggcatcagtcgcgaggactggctacaggcgctgccgcgcgcgctcgtcgcaggattcgtcaagacagacattgacttccagcgcaagggtgagacgtcaggaacgacggcgacacttgttgtggttgatgggttcacggtcactgtcgcgtcggtgggagattctaggtgcattctggatacacagggaggcgaggtctcattgctgactgtggatcaccggctagaggagaatgcagaggagcgtgagcgcgtcacagcgagtggaggagaggtcagccggcttaatctctgtggtggacaggaggtgggtcctctccgatgctggccaggtggattgtgcctttcaaggtcaattggggatactgatgtcggcgagttcattgtaccgattccacatgtcaagcaagtgaagctcccaaatactggtggaagactaataattgcatcagatggaatatgggacgctctgtcctcagagagtgctgctcaggcgtgccggggattacgtgcagaactggctgcaaaacttgttgttaagcaagctctgaagacaagtgggctgaaagatgacaccacatgtgtggttgtcgacatcatcccatctgatcattgttcaacaccaccagcattgtctccaaagaaaaatcagaacaagttgaagcatcttatttttggtaaaaggtctcatagttctgttggaaagctcagcaaatctgcttcattgggttcagtggaagaaatattcgaggagggatctgcaatgttggaagaaaggttgggaagtaattttccaccaaaagcaaatctgcctccatttcgctgtgcaatctgccaagtggaccaagagccattcgaaggtttaatgacggacaatgtaggtggctgctgctcaaccccatcaacaccatggggtggtccttatctttgctcaggctgtaggaaaaagaaggacgcgatggaaggtaaacgatcgaatcgttcaacgacgtgcaggtgaaggttctgataggaatcactgggactgggtcctgtgatcctgtcatgcaagcttgcaaagtagtctccgatttcggttttctgctccttgtaaaaagagaagaataaaccgtctgtcgtttgattgaagtattgttcggtgaaaactaactgcactccagcctgatctgagaaaaaccggggtactaataacaagcctgatttctattgacatcccctatcaaactttcgtttgctctgagaggatagctgacagaactttgaggctgtagttttgtgaacccttagcatgtagagggaaatgagtagcttaacaatgttttatagaacgatggtgtggcttctcattgttgctttagaatgtattttgtgtttgtggagctaaagacccaaatgttttttttaaaaaaaaaaaaaaaaaaaaacaaagaaaaaaaaaaaaaaaaaagcggcc

SEQ ID NO: 18129 - protein, 430 aa, Zea mays
MAFAASEGNLSPALPLATLIGRELRGDGTERPHVRYGHSGFAKRGEDYFLVKPDCLRVPGDPSSSFSVFAVFDGHNGVSAAVFSKEKLLEHVMSAVPEGISREDWLQALPRALVAGFVKTDIDFQRKGETSGTTATLVVVDGFTVTVASVGDSRCILDTQGGEVSLLTVDHRLEENAEERERVTASGGEVSRLNLCGGQEVGPLRCWPGGLCLSRSIGDTDVGEFIVPIPHVKQVKLPNTGGRLIIASDGIWDALSSESAAQACRGLRAELAAKLVVKQALKTSGLKDDTTCVVVDIIPSDHCSTPPALSPKKNQNKLKHLIFGKRSHSSVGKLSKSASLGSVEEIFEEGSAMLEERLGSNFPPKANLPPFRCAICQVDQEPFEGLMTDNVGGCCSTPSTPWGGPYLCSGCRKKKDAMEGKRSNRSTTCR

SEQ ID NO: 18130 - DNA, 1622 bp, Zea mays subsp. mays
  CDS (56)..(1351)
acatctgactgaggagggccgagggtttttagaggaaggaacccgtccgcgaccgatggcgatggcgttgtcgccggggacggtgcctttgggagtgctgctgcggcgggaggtcaccaaggagcggatggagcggccggacgtgctgtgcggcgaggccaacctcagccgcaagggcgaggacttcacgctgctccgcgccgacgcaggccagcgcatccccggcgacccgtccacctccttctccgtcttcgcgatttttgatgggcacaacggatcaggagctgccatatacgcaagggagaatctgttgaaaaacgtcttgcgtgccattcctacatgtttctgcagggaggagtggcttgccgtgctcccacgtgcgcttgttgcagcgttcgtcaagactgataaagattttcaggcagtggatgaaacttctggcacaactgtgacatttgtgataatagacgagtgggttgtgactgtagcatctgtcggtgattcacgttgcatactagaatctgccgatggctcaatctactttttatcagctgatcatcgctttgactccaacccagatgaggtcaagcgcgtgacagcatgtgggagcaaagttgggaaaatggatattgtcggtggaccagaggttggtcctctaagatgttggccaggtggtttgtgtctatctagatccataggggatcttgatgttggtgaatgcatcattgctgttcctcatgttaagcaagtgaagctttctaatgctggaggcagaattatcattgcaagcgatggtgtgtgggatgatttgacttgtgaaatggctcttgattgttcccgtgggttctcatcagatgtagctgccaatcgaattgttaatgaagcaacccggcctcgtggaatcagggatgatactacttgcatcgtaatcgacattctaccaccagaaaatatagtcccgagtcctcgtaagagaccccgcaggattacattcaataatgtgtttcgcaaaagacatctagacgtcccccccgaaacaaatagatcagaatatgctgaaccggatgtggtggaagaaatatttgaagatggctctccgatgctttctaaaaggctaactaccggatatacacttgagaaaacttttgcaccctccagttgtgcagtttgtctggtacggttgaaatctggacagggaatttcagtgcatgataacccattgcaatatgagaaactacaaggttggcagggtcctttcctgtgcccgagctgtcatgaaaagaaagaagcaatggaagggaaacgccggccaaaaggatcttcatcaaacgtctttggtcacatgtgctaggcctgcctaccactaaagattcttttattgattgttagctggaaataatagtcagcccataacaattcattggctagaattgaccgtttcagttgagtaagacggaatattcttgacaaacagcctggagatttattcatcagtttgagtagagcataggaaaacccatcttattttttcgaaggactacggctgtgtccgcatctaggcatttcactgtacagactcttgcttgtatagagatcttctaaatgatcattagtcttcctgt

SEQ ID NO: 18131 - protein, 431 aa, Zea mays subsp. mays
MAMALSPGTVPLGVLLRREVTKERMERPDVLCGEANLSRKGEDFTLLRADAGQRIPGDPSTSFSVFAIFDGHNGSGAAIYARENLLKNVLRAIPTCFCREEWLAVLPRALVAAFVKTDKDFQAVDETSGTTVTFVIIDEWVVTVASVGDSRCILESADGSIYFLSADHRFDSNPDEVKRVTACGSKVGKMDIVGGPEVGPLRCWPGGLCLSRSIGDLDVGECIIAVPHVKQVKLSNAGGRIIIASDGVWDDLTCEMALDCSRGFSSDVAANRIVNEATRPRGIRDDTTCIVIDILPPENIVPSPRKRPRRITFNNVFRKRHLDVPPETNRSEYAEPDVVEEIFEDGSPMLSKRLTTGYTLEKTFAPSSCAVCLVRLKSGQGISVHDNPLQYEKLQGWQGPFLCPSCHEKKEAMEGKRRPKGSSSNVFGHMC

SEQ ID NO: 18132 - DNA, 1622 bp, Zea mays subsp. mays; identical to SEQ ID NO: 18130
  CDS (62)..(1351)

SEQ ID NO: 18133 - protein, 429 aa, Zea mays subsp. mays
MALSPGTVPLGVLLRREVTKERMERPDVLCGEANLSRKGEDFTLLRADAGQRIPGDPSTSFSVFAIFDGHNGSGAAIYARENLLKNVLRAIPTCFCREEWLAVLPRALVAAFVKTDKDFQAVDETSGTTVTFVIIDEWVVTVASVGDSRCILESADGSIYFLSADHRFDSNPDEVKRVTACGSKVGKMDIVGGPEVGPLRCWPGGLCLSRSIGDLDVGECIIAVPHVKQVKLSNAGGRIIIASDGVWDDLTCEMALDCSRGFSSDVAANRIVNEATRPRGIRDDTTCIVIDILPPENIVPSPRKRPRRITFNNVFRKRHLDVPPETNRSEYAEPDVVEEIFEDGSPMLSKRLTTGYTLEKTFAPSSCAVCLVRLKSGQGISVHDNPLQYEKLQGWQGPFLCPSCHEKKEAMEGKRRPKGSSSNVFGHMC

SEQ ID NO: 18134 - DNA, 2009 bp, Zea mays subsp. mays
  CDS (259)..(1551)
gcacgagaccattacctagaacatcctaatcaaaactgttcacggccctcgccaaatccccaaaatccaagcgcgtcgccgacggcattgcgtcgccattgcctccaaatccgtgtgcgactcgcgtgatcccagatcccgctcgccgtattccccgcagtgacctctgacaagagcattttccgcgcggaaaatgccgccgtttcggccggctcttggaagggcgcttcttctgtaggaccgcggcgcgaggctgcgatggcgttcgccgccagcgagggaaatctttccccggcgctgcccctggccactctgatcggccgcgagctccgcggcgacggtaccgagcgcccgcacgtgcgctacggccactctggcttcgccaagcgcggcgaggactacttcctcgtcaagcccgactgcctccgcgtccccggagacccttcctcctctttctccgtcttcgctgtattcgacggccacaatggcgtgtcggcggcggtgttcagcaaggagaaactgctggagcacgtgatgagcgcggtgcccgagggcatcagtcgcgaggactggctacaggcgctgccgcgcgcgctcgtcgcaggattcgtcaagacagacattgacttccagcgcaagggtgagacgtcaggaacgacggcgacacttgttgtggttgatgggttcacggtcactgtcgcgtcggtgggagattctaggtgcattctggatacacagggaggcgaggtctcattgctgactgtggatcaccggctagaggagaatgcagaggagcgtgagcgcgtcacagcgagtggaggagaggtcagccggcttaatctctgtggtggacaggaggtgggtcctctccgatgctggccaggtggattgtgcctttcaaggtcaattggggatactgatgtcggcgagttcatcgtaccgattccacatgtcaagcaagtgaagctcccaaatactggtggaagactaataattgcatcagatggaatatgggacgctctgtcctcagagagtgctgctcaggcatgccggggattgcgtgcagaactggctgcaaaacttgttgttaagcaagctctgaagacaagtgggctgaaagatgacaccacatgtgtggttgtcgacatcatcccatctgatcattgttcaacaccaccagcattgtctccaaagaaaaatcagaacaagttgaagcatcttatttttggtaaaaggtctcatagttctgttggaaagctcagcaaatctgcttcattgggttcagtggaagaaatattcgaggagggatctgcaatgttggaagaaaggttgggaagtaattttccaccaaaagcaaatctgcctccatttcgctgtgcaatctgccaagtggaccaagagccattcgaaggtttaatgacggacaatgtaggtggctgctgctcaaccccatcaacaccatggggtggtccttatctttgctcaggctgtaggaaaaagaacgacgcgatggaaggtaaacgatcgaatcgttcaacgacgtgcaggtgaaggttctgataggaatcactgggactgggtcctgtgatcctgtcgtgcaagcttgcaaagtagtctccgatttcggttttctgctccttgtaaaaagagaagaataaaccgtctgtcgtttgattgaagtattgttcggtgaaaactaactgaactccagcctgatctgaaaaaaccggggtactaataacaagcctgatttctattgacatcccctatcaaactttcgtttgctctgagaggatagctgacagaactttgaggctgtagttttgtgaacccttagcatgtagagggaaatgagtagcttaacaatgttttatagaacgatggtgtggcttctcattgttgctttagaatgcattttgtgtttgtggagcaaaaaaaaaaaaaaaaaagcttcgggtggacccggtcaacttcaagctcctaagccactgcctgctggtgagcccatc

SEQ ID NO: 18135 - protein, 430 aa, Zea mays subsp. mays
MAFAASEGNLSPALPLATLIGRELRGDGTERPHVRYGHSGFAKRGEDYFLVKPDCLRVPGDPSSSFSVFAVFDGHNGVSAAVFSKEKLLEHVMSAVPEGISREDWLQALPRALVAGFVKTDIDFQRKGETSGTTATLVVVDGFTVTVASVGDSRCILDTQGGEVSLLTVDHRLEENAEERERVTASGGEVSRLNLCGGQEVGPLRCWPGGLCLSRSIGDTDVGEFIVPIPHVKQVKLPNTGGRLIIASDGIWDALSSESAAQACRGLRAELAAKLVVKQALKTSGLKDDTTCVVVDIIPSDHCSTPPALSPKKNQNKLKHLIFGKRSHSSVGKLSKSASLGSVEEIFEEGSAMLEERLGSNFPPKANLPPFRCAICQVDQEPFEGLMTDNVGGCCSTPSTPWGGPYLCSGCRKKNDAMEGKRSNRSTTCR

SEQ ID NO: 18136 - DNA, 1667 bp, Zea mays subsp. mays
  CDS (194)..(1483)
acaccaatcctcatcacctccgagattttcatcgcctgccgcgcaatctcgggatcctagccgtccgcacatcgccgcggccttcctccgcgccacgaatggtgttctctggccgctgtcttttcccgaggacctaacccaaggcggtaggtaccagctaaaagtctaaaggcgaccaccggaccgggcggcaatgacgaccgccgcgagggagaggcgcctgccgccgacgctgcccctggccacgcttatcggtcgcgagctccgtgcggggggctccgagcgcccggccctgcgctacggccacgccggcttcgccaagcgcggcgaggactacttcctcgtcaagcccgactgcgtccgcgtccccggggaccccgcatcggcgttctcagttttcgccgtgttcgacggccacaacggcgtgtcggcggcggtctatagcaaagagcatctgctcgagcacgtcatgagcgcgctgccgccggacatcgggcgcgacgactggctgcaggcgctgccgcgcgctctcgtcgccggctttgtcaaggccgacattgatttccagcgcaagggggaggtgtcaggaaccacggcgacactggtggtcatcgatgggttcacggtcacagtggcgtcggtgggagactcgcgctgcatcctggacacgcagggcggcgagttgcagctgctaaccgtggaccaccgcctggaggagaatgcagaggagcgggagcgcgtcacggccagcggtggggaagtaggccggctcaatctcttcggtggtcaggaggttggtcctctccggtgctggcctggtggcttgtgcctttcaagatccattggggacatggatgttggggagtacattgtgcccattccacatgtcaagcaagtcaagctatcaaacgctggaggaaggctgataatagcatccgatggcatatgggatgcattatccaatgaagcagctgcaaaagcatgcagaggattgcctgcagaactggcagcgaagcttgtcgttaagcaagctctgaaaacaagcgggctaaaggatgacaccacctgtgttgtagttgacattatcccatccgatcatttgacatcaccacaattgtctccaaagaaaaatcataacaagttgaagtcactttttcgtagaaggtcgcatagttctgttggaaagctcgggggcaagtctgcctccattggttctgtggaggagttatttgaagaaggctctgcaatgttagaagaaaggttgggcaggaatttgtctttgaaagcagtttcagcaccttttcgctgtgcaatctgccaagtggaccaagagcccttcgaagatttgatgagagataatggaggtggttactgctcttccccatgcgctccatggggtggtccatatctctgtttggactgtcggaaaaagaaagatgcaatggaaggtaaaagatctagctgctccacagcatgcaggtgaaacagtccttgcctcaagcagaaaagaaccgatgagagaggataataagttgctggacccaagtataattgtttgctgaaactaactgtattgccagcccggtaaaagacatatttggctggtagtaagacctaactagtctgttacctgcgcacaatccgaatggaaaagtttgttgtcgtcg

SEQ ID NO: 18137 - protein, 429 aa, Zea mays subsp. mays
MTTAARERRLPPTLPLATLIGRELRAGGSERPALRYGHAGFAKRGEDYFLVKPDCVRVPGDPASAFSVFAVFDGHNGVSAAVYSKEHLLEHVMSALPPDIGRDDWLQALPRALVAGFVKADIDFQRKGEVSGTTATLVVIDGFTVTVASVGDSRCILDTQGGELQLLTVDHRLEENAEERERVTASGGEVGRLNLFGGQEVGPLRCWPGGLCLSRSIGDMDVGEYIVPIPHVKQVKLSNAGGRLIIASDGIWDALSNEAAAKACRGLPAELAAKLVVKQALKTSGLKDDTTCVVVDIIPSDHLTSPQLSPKKNHNKLKSLFRRRSHSSVGKLGGKSASIGSVEELFEEGSAMLEERLGRNLSLKAVSAPFRCAICQVDQEPFEDLMRDNGGGYCSSPCAPWGGPYLCLDCRKKKDAMEGKRSSCSTACR

SEQ ID NO: 18138 - DNA, 1311 bp, Arabidopsis thaliana
  CDS (1)..(1311)
atggcgtctagagaaggaaagagacgtaatcataatcatgatgatgagaagcttgtgcctcttgctgctttgataagtagagagacgaaagctgctaaaatggagaaaccgattgtgagatttggacaagctgctcaatctaggaaaggagaagattatgtcttgatcaagactgatagtcttcgtgttccttccaattcttcaactgctttctctgtttttgcggtatttgatgggcataatggaaaagcggcagcggtttatacaagggagaatctgttgaaccatgttattagtgctcttcctagtgggcttagccgtgacgagtggcttcacgctttacctcgtgcattagtttctggatttgtgaagactgataaggagtttcagagcagaggggaaacttctggaacaacagcaacgtttgtgatagtagatggatggactgtgaccgttgcatgtgttggcgactcgcgctgcatcttggatactaagggtggttcagtttctaaccttactgttgatcacaggcttgaagataatacagaagagagggaacgcgttactgcgagtggtggagaagttggcaggctaagcattgttggaggcgttgagattggtccactacggtgttggcctggaggtctctgcctttcaaggtctattggggatatggatgttggggagttcattgttccagttccctttgtaaagcaagtgaagctatcaaaccttggaggaaggcttatcattgcatcagatggcatatgggatgctctctcctcagaagtcgcagctaaaacttgccgtgggttatctgctgaacttgctgctagacaagtagttaaggaagcattgagaagaaggggacttaaggatgacacaacttgcattgtggtcgacataatcccacccgaaaacttccaagaaccaccgccttcacctcctaagaagcacaacaacttctttaaatcattactcttcagaaagaaatcaaactcatctaacaaactctccaagaaactttccactgttggtattgttgaagagctcttcgaagaaggttcggcaatgctcgctgaaaggttaggatcaggtgactgttctaaggaatcaacaacaggaggagggatattcacgtgtgccatatgccaactagacctagctccaagcgagggaatatcagtccacgcaggttcaatcttctcgacaagtctaaaaccgtggcaaggaccgttcttatgcacagattgtcgtgacaaaaaagacgcgatggaagggaaacgtccaagtggagttaaagtcatctag

SEQ ID NO: 18139 - protein, 436 aa, Arabidopsis thaliana
MASREGKRRNHNHDDEKLVPLAALISRETKAAKMEKPIVRFGQAAQSRKGEDYVLIKTDSLRVPSNSSTAFSVFAVFDGHNGKAAAVYTRENLLNHVISALPSGLSRDEWLHALPRALVSGFVKTDKEFQSRGETSGTTATFVIVDGWTVTVACVGDSRCILDTKGGSVSNLTVDHRLEDNTEERERVTASGGEVGRLSIVGGVEIGPLRCWPGGLCLSRSIGDMDVGEFIVPVPFVKQVKLSNLGGRLIIASDGIWDALSSEVAAKTCRGLSAELAARQVVKEALRRRGLKDDTTCIVVDIIPPENFQEPPPSPPKKHNNFFKSLLFRKKSNSSNKLSKKLSTVGIVEELFEEGSAMLAERLGSGDCSKESTTGGGIFTCAICQLDLAPSEGISVHAGSIFSTSLKPWQGPFLCTDCRDKKDAMEGKRPSGVKVI

SEQ ID NO: 18140 - DNA, 1329 bp, Oryza sativa (japonica cultivar-group)
  CDS (1)..(1329)
atgtcgacgcggtccaagtcggtgccggtgcccgcggggggcggcgcggcgacggtgccgctcgccgtgctgctgcggcgggaggtggtcagcgagaagaccgcggcggagcgccccgagctgcaggtcgggctcttcagccaggccaagaagggggaggactacaccttcctcaagcccgactgcgagcgcctccccggcgtcccctcctcctccttctccgccttcggcctgtttgatgggcacaatgggaatggagccgcgatttacaccaaggagaatctcttgagcaacatcttgaccgcaatcccagctgatctcaacagggaggattggcttgccgcgcttccgagagcgatggttgcagcatttgtcaaaactgataaagatttccaaacgaaagcccgctcatcagggacaacggtgacatttgtcataatagatggattgtttattaccgttgcatctgttggtgattcgcgttgtgtactagaagctgaaggttctatttatcatttatctgctgatcatcgatttgatgccagtaaagaggaggttgaccgtgtaacagaatctgggggtgatgttggtagacttaatgtcgttggtggtgctgagattggccctcttagatgctggcctggtggtttgtgtctatcaaggtcaattggagaccaggatgtgggtcaattcattgttccggttccttatgtcaagcaagtaaagctatcaacggctggaggccggcttattatttcaagtgatggtgtttgggatgtcttgactgcagaagttgcatttaactgttcacgaacacttcctccagaggctgctgcggaacaaattgtcaaagaagcagtgcaacaaaagggacttagggatgacactacttgtattgttgttgacatactaccagacaaagcaaatcttaccatgccacatacaaaaaagcaaccaggaatgggtgttttcaaaaacatgtttcgcaagaaaacaccatctgattcatcatcccatacagatagagaatatatggacccagacattgtggaggaaatatttgaggacggatgcgcatttctttccaaacggttggattccgaatacccagttcgaaatatgttcaagctcttcatatgtgccatttgccaagtggagttaaaaccaagtcaagggatatccgtacatgaagattcatcacaacctgggaacttgcgtcgctgggatggtccattcctttgccaaggctgtcaagaaaagaaagaagccatggaggggaagcgtcgttcacgagattcttcgtctagaaacagtgggtcaagtgaatag

SEQ ID NO: 18141 - protein, 442 aa, Oryza sativa (japonica cultivar-group)
MSTRSKSVPVPAGGGAATVPLAVLLRREVVSEKTAAERPELQVGLFSQAKKGEDYTFLKPDCERLPGVPSSSFSAFGLFDGHNGNGAAIYTKENLLSNILTAIPADLNREDWLAALPRAMVAAFVKTDKDFQTKARSSGTTVTFVIIDGLFITVASVGDSRCVLEAEGSIYHLSADHRFDASKEEVDRVTESGGDVGRLNVVGGAEIGPLRCWPGGLCLSRSIGDQDVGQFIVPVPYVKQVKLSTAGGRLIISSDGVWDVLTAEVAFNCSRTLPPEAAAEQIVKEAVQQKGLRDDTTCIVVDILPDKANLTMPHTKKQPGMGVFKNMFRKKTPSDSSSHTDREYMDPDIVEEIFEDGCAFLSKRLDSEYPVRNMFKLFICAICQVELKPSQGISVHEDSSQPGNLRRWDGPFLCQGCQEKKEAMEGKRRSRDSSSRNSGSSE

SEQ ID NO: 18142 - DNA, 1299 bp, Oryza sativa (japonica cultivar-group)
  CDS (1)..(1299)
atggagagcgccgccggggaggaggggaaggctgccccgtcgcttcccctggcgaccctgatcggccgcgagctccgcggcggcggctccgagcggccgctcgtccggtacggccacttcggcttcgccaagcgcggcgaggactacttcctcgtcaagcccgactgcctccgcgtcccgggcgacccttcctccgccttctccgtcttcgccgtgttcgacggacacaatggcgtgtcggcggcggtgttcagcaaggagcacctgctggagcacgtgatgagcgccgtgccgcagggcatcggccgcgacgactggctgcaggcgctgccgcgcgcgctggtcgcgggcttcgtgaagacggacatcgacttccaacgcaagggggaggcatcagggacgacagcgacgctggtcgtcgtcgatgggttcacggtcacggtggcgtctgttggggactccaggtgcatattggacacgcagggcggtgtgatctcgctgctaaccgtggaccatcgtctcgaggagaatgtagaggagcgggagcgcgtcaccgcgagtggaggggaggtcagccggctcaacctgtgtggtggacaggaggtgggacctctcagatgctggccaggtggattgtgcctttcaagatcgattggggatactgacgttggggagttcattgtgccaattccacatgtcaagcaagtgaagctatcaaatgctggagggaggctaataattgcatcagatggaatttgggatgcactgtcctcagaagctgctgctcaggcatgccgaggattgcctgcagagctggctgcaaagcttgtcgtgaagcaagcactgaagacaagtgggctgaaagatgacaccacctgtgtggttgttgatatcatcccatctgatcattcttcaacacctccatcactatctccaaagaaaaaccagaacaagttgagatctcttctttttggtaggaggtcacatagttctgttggaaagcttggaaacaagtctgcttcatttgactctgtggaggaattatttgaagagggttccgcaatgttggatgaaaggttgggtaggaattttccatcaaaagcaaactcgtccccatctcgctgtgcaatctgccaagtggatcaagcaccttttgaagatttagtgacagataatggaggtggttgctgttctgccccatcgacaccatgggttggcccttatctttgttcagattgtaggaaaaagaaggatgcaatggaaggtaaaagatctagtcgctcaacagcgtgcaggtga

SEQ ID NO: 18143 - protein, 432 aa, Oryza sativa (japonica cultivar-group)
MESAAGEEGKAAPSLPLATLIGRELRGGGSERPLVRYGHFGFAKRGEDYFLVKPDCLRVPGDPSSAFSVFAVFDGHNGVSAAVFSKEHLLEHVMSAVPQGIGRDDWLQALPRALVAGFVKTDIDFQRKGEASGTTATLVVVDGFTVTVASVGDSRCILDTQGGVISLLTVDHRLEENVEERERVTASGGEVSRLNLCGGQEVGPLRCWPGGLCLSRSIGDTDVGEFIVPIPHVKQVKLSNAGGRLIIASDGIWDALSSEAAAQACRGLPAELAAKLVVKQALKTSGLKDDTTCVVVDIIPSDHSSTPPSLSPKKNQNKLRSLLFGRRSHSSVGKLGNKSASFDSVEELFEEGSAMLDERLGRNFPSKANSSPSRCAICQVDQAPFEDLVTDNGGGCCSAPSTPWVGPYLCSDCRKKKDAMEGKRSSRSTACR

SEQ ID NO: 18144 - DNA, 1335 bp, Oryza sativa (japonica cultivar-group)
  CDS (1)..(1335)
atggaggtgcagggagaggtggatggatcgggggtgcccctggcggtgctcctgaagcgagagctgtgcaaccagaaggtggagaggccggacatgctgttcggcgaggcgagcaagagcaagaaaggggaggacttcacgttcctcttgcccaagtgcagccgccgtccaggtcaagcccaggctgacggggaggatgcaggaggcgccggcgacgacgacaccatctcggtgtttgcgatcttcgatggccacaatggatctgcggctgccatatacaccagggagaacctcttgaacaatgtgttggctgctattcccccaaatcttacaagtgaggagtggacaactgcattaccgagggcactagttgcaggttttgttaagacagataaagagttccaaacaaaagcggcgcgctcagggaccactgtgacttttgttataatagatggatgggttgtcactgtagcatcagttggcgattcccgctgtatcctagaatctgctgaaggttcagtatattttttgtcagctgatcatcgcctagataccaatgaggaggaggtagagcgtgtaacagcaagtggaggtgatgttgggagaataaatattgctggaggggctgggattggtccacttagatgctggccaggcggattgtgtttatcaaggtcaattggtgatatcgacgttggagagtttatagttcctgtcccacatgtgaagcaagtaaagttgtctaatgctggaggacggcttgtcattgctagcgatggtgtctgggatgcactgcgctttcaggaagctctgaactataccagaggactgccagctgaagctgctgctagtcgaattgttaaagaatctgtgagttcaaagggactacgagatgatactacttgcatcgtagttgacatattacctccagaaaagttgagccctccattaaagaagcatgggaaaggaggcatcaaagctttgttccgtcggaggccatctgatgaattgactgaagatcagatggacagaggatgtctagaacctgatgtcgtggaggaaatatatgaggagggctctgctatgcttgctcaaagattaaaaataaattatccgacaggaaatatgttcaaactgcatgattgtgctgtctgccaattggtgatgaaacctggtgagggcatctctgttcatggtagcattccgaggaattcaagggttgatccttggggtggcccttttctatgttcatcctgccaattgaaaaaggaggctatggaagggaagcaacatttgacaaattctcaaccgacagtccaacctgttctcaagtag

SEQ ID NO: 18145 - protein, 444 aa, Oryza sativa (japonica cultivar-group)
MEVQGEVDGSGVPLAVLLKRELCNQKVERPDMLFGEASKSKKGEDFTFLLPKCSRRPGQAQADGEDAGGAGDDDTISVFAIFDGHNGSAAAIYTRENLLNNVLAAIPPNLTSEEWTTALPRALVAGFVKTDKEFQTKAARSGTTVTFVIIDGWVVTVASVGDSRCILESAEGSVYFLSADHRLDTNEEEVERVTASGGDVGRINIAGGAGIGPLRCWPGGLCLSRSIGDIDVGEFIVPVPHVKQVKLSNAGGRLVIASDGVWDALRFQEALNYTRGLPAEAAASRIVKESVSSKGLRDDTTCIVVDILPPEKLSPPLKKHGKGGIKALFRRRPSDELTEDQMDRGCLEPDVVEEIYEEGSAMLAQRLKINYPTGNMFKLHDCAVCQLVMKPGEGISVHGSIPRNSRVDPWGGPFLCSSCQLKKEAMEGKQHLTNSQPTVQPVLK

SEQ ID NO: 18146 - DNA, 1446 bp, Oryza sativa (japonica cultivar-group)
  CDS (1)..(1446)
atggcggcggcggcggcggcggcgacggtggaggcggtgggggtggcgggggggaggaggaggcggagcgggagcgtggcgctcggggacctgctgcggcgtgaggcgtcggcggagcgcgcttcggcgtcggcgtcggcgggtgcgggcgggcgggagcgggagcggcggcccagcgtcgcggcggggcaggcgtgtagggctaagaagggggaggacttcgcgctgctcaagccggcctgcgagcgcctcccggccggcggcgcccccttctccgccttcgccctgttcgatgggcacaacgggagcggcgccgcggtgtacgccaaggagaatatcctcagcaacgtcatgtgctgcgttcctgccgatctgagcggcgacgagtggctcgcagcgctcccgagggcgctggtggccgggttcgtcaagacggacaaggattttcaaacaagaggaacaaccgtgacgtttgtcataatcgatgggtacgttgtgaccgttgcatccgttggcgattcgcggtgcgtccttgaagctgagggtaccatttaccatttgtccgctgaccatcgcttcgatgctagcgaagaggaggttggacgtgtaacagaatgcggaggtgaagttggaaggctaaatgttgtcggcggagctgagattgggccacttagatgttggcctggtggcttgtgcctatcaagatcaattggtgatcaggatgtaggtgaatttatcattcccgtgccttatgtgaagcagatcaagctatcaagtgctggaggcagaatcattatttcaagtgatggtgtttgggatgccttgactgtggatacggcttttagttgtgcacgagggcttcctccagaagctgcagcggatcaaattgtcaaagaagcaattgcatcaaaaggattgagagatgatacgacttgtattgtcattgacataatacctccagaaaaaataagccccactgtgcaacctgcaaaaaaggcagggaaaggacttttcaaaaatatcttttacaagaaagcaacatcagactcaccatgtcatgcagataaggaccaatgtacccagccagatttggtggaggaagtctttgaggatggatgtccttccctttcaagacggctagattctgaatatccagttcggaatatgttcaagctcttcatatgtgcaatttgtcaagtagagttagagtctggtcagggtatatccatacatgagggtttgtcaaagtcaggaaagctgcgtccatgggatgggcctttcctttgccacagttgccaggaaaagaaagaagcaatggaaggaaaacgtcactcacgagcggtatcttctttaccaagcattttgcacgagtgctgttgtgaggactggtatgagttcactacatgtttgcttgttcttgagtacagaaagatgcgttcaccgtaa

SEQ ID NO: 18147 - protein, 481 aa, Oryza sativa (japonica cultivar-group)
MAAAAAAATVEAVGVAGGRRRRSGSVALGDLLRREASAERASASASAGAGGRERERRPSVAAGQACRAKKGEDFALLKPACERLPAGGAPFSAFALFDGHNGSGAAVYAKENILSNVMCCVPADLSGDEWLAALPRALVAGFVKTDKDFQTRGTTVTFVIIDGYVVTVASVGDSRCVLEAEGTIYHLSADHRFDASEEEVGRVTECGGEVGRLNVVGGAEIGPLRCWPGGLCLSRSIGDQDVGEFIIPVPYVKQIKLSSAGGRIIISSDGVWDALTVDTAFSCARGLPPEAAADQIVKEAIASKGLRDDTTCIVIDIIPPEKISPTVQPAKKAGKGLFKNIFYKKATSDSPCHADKDQCTQPDLVEEVFEDGCPSLSRRLDSEYPVRNMFKLFICAICQVELESGQGISIHEGLSKSGKLRPWDGPFLCHSCQEKKEAMEGKRHSRAVSSLPSILHECCCEDWYEFTTCLLVLEYRKMRSP

SEQ ID NO: 18148 - DNA, 1296 bp, Oryza sativa (japonica cultivar-group)
  CDS (1)..(1296)
atggctggtattgctaaggagaggcggctgccgccggcgctgccactcgccactctcatcggccgcgagctccgcgccgggggctccgagcgcccctccctccgctacggccacgccggcttcgccaagcgcggcgaggactacttcctcgtcaagcccgactgcctccgcgtccccggggacacctccaccgccttctccgtcttcgcggtgttcgacggccacaacggggtctcggcggcggtctacagcaaggagcatttgctcgagcacgtcatgagcgcgctgccgccggacatcggccgcgacgactggctacaggcgctgccgcgggcgctcgtcgccggcttcgtcaaggccgacatcgacttccagcgcaagggggaggtgtcggggaccaccgcaacgctggtggtcgtcgatggattcacggtcacggtggcgtcagtcggggactcgcggtgcatcctggacacgcagggtggtgaggtgcagctgctcaccgtcgaccaccgcctggaagagaatgccgaggagcgggagcgggttaccgccagcggtggggaggtcggccgcctcaatctcttcggcggccaggaggttggtcctctccggtgctggccaggtggcctgtgcctttcaagatctatcggggacatggatgtcggggagttcattgtgccgattccacatgtgaagcaagtgaagctctcaaacattggaggaaggttgatcatcgcatcagatggtatatgggatgcactaccctctgaagcagcagcaaaggcatgccgaggtttacctgcagaactggctgcaaagcttgtggttaagcaagctctcaaaaaaagtgggctgaaagatgacaccacttgtgtggtggttgatatcatcccttccgattatcgtttgacatcgccgcagttgtccccaaagagaaaccagagcaagttcaagtctcttcttttcggtagaaggtcacacagttcaattggaaagcttggaggcaagtctgcctcttttggctctgtggaggaattatttgaagaaggctctgcaatgttggaagaaaggttgggtaggaatttgtccttgaaagcaacctcggcacctcttcgatgtgctatctgccaggtggaccaagaaccatttgaaagtatgatgactgagaaaggaggcagttactgctcttccccatgcgccccctggggaggtccatatctttgtttggagtgtcgaaaaaagaaagacgcaatggagggtaaaagatcaagccactctacagcgtgcaggtga

SEQ ID NO: 18149 - protein, 431 aa, Oryza sativa (japonica cultivar-group)
MAGIAKERRLPPALPLATLIGRELRAGGSERPSLRYGHAGFAKRGEDYFLVKPDCLRVPGDTSTAFSVFAVFDGHNGVSAAVYSKEHLLEHVMSALPPDIGRDDWLQALPRALVAGFVKADIDFQRKGEVSGTTATLVVVDGFTVTVASVGDSRCILDTQGGEVQLLTVDHRLEENAEERERVTASGGEVGRLNLFGGQEVGPLRCWPGGLCLSRSIGDMDVGEFIVPIPHVKQVKLSNIGGRLIIASDGIWDALPSEAAAKACRGLPAELAAKLVVKQALKKSGLKDDTTCVVVDIIPSDYRLTSPQLSPKRNQSKFKSLLFGRRSHSSIGKLGGKSASFGSVEELFEEGSAMLEERLGRNLSLKATSAPLRCAICQVDQEPFESMMTEKGGSYCSSPCAPWGGPYLCLECRKKKDAMEGKRSSHSTACR

SEQ ID NO: 18150 - DNA, 1269 bp, Oryza sativa (japonica cultivar-group)
  CDS (1)..(1269)
atggcgatgacggcggcggcggtgacggtgccgctgggggtgctgctgcggcgggaggtgacgagcgagcggatggagcggcccgacgtgctgtgcggggaggcggcgcgcagccgcaagggggaggacttcacgctgctcctcgccgaggccggggagcgcgtcgccggcgacccgtccacctccttctccgtcttcgcgctatttgatgggcacaacggatctggagcggccatgtacgcgaagaagaatctgttgaacaatcttctacgtgccattccttcaggtttgagcagggatgagtggcttgcagtgcttcctcgtgcgcttgtcgcagcatttgtcaagacagacaaagatttccaggcagtagcggaaacttctggtaccactgttacatttgtagtaatagatgagtgggttgtaacggtagcatcagttggtgattcacgttgcatactagaatctgctgatggttcattataccatttgtcagctgatcatcgctttgactccaaccaagatgaggttcaacgtgttactgcatgtggaagcaaggttgggaaactgaatcttgtaggtggcccagaggttggtcctctaagatgttggccaggtggtctgtgcttatctagatcaattggggatatggatgttggtgaatgcatcattcctgttcctcatgtgaaacaagtgaagctatccaatgctggaggcaggattatcattgcaagtgatggtgtatgggatgatttgacttttgaaatggcacttgagtgttctcgtggattcccatcagatatagctgccaatcgaattgtgaatgaagcaattcatcctcggggactaagagatgatactacctgcatcgtggtggacatattacctccagaaaaactagctccaagtcctcccacaaagaggcaggggaagattgtattcaataatatgtttcgccgaaaacatacagacgtatcctttatactagatcgagagtatgctgagccagatgaggtggaagaaatatttgacgatggttccgctatgctttctaaaaggcttgctgcaggttatgcactccagagcatgtttgagcccttcagctgtgcagtttgccaagtacagttgaaagctggccagggaatttctgtacacagcaatccattgcaacacgaaaaattgcaaggatggcagggacctttcctgtgccaaagctgcaacgaaaagaaagacgcaattgaagggaaacgacctccaagagattcttga

SEQ ID NO: 18151 - protein, 422 aa, Oryza sativa (japonica cultivar-group)
MAMTAAAVTVPLGVLLRREVTSERMERPDVLCGEAARSRKGEDFTLLLAEAGERVAGDPSTSFSVFALFDGHNGSGAAMYAKKNLLNNLLRAIPSGLSRDEWLAVLPRALVAAFVKTDKDFQAVAETSGTTVTFVVIDEWVVTVASVGDSRCILESADGSLYHLSADHRFDSNQDEVQRVTACGSKVGKLNLVGGPEVGPLRCWPGGLCLSRSIGDMDVGECIIPVPHVKQVKLSNAGGRIIIASDGVWDDLTFEMALECSRGFPSDIAANRIVNEAIHPRGLRDDTTCIVVDILPPEKLAPSPPTKRQGKIVFNNMFRRKHTDVSFILDREYAEPDEVEEIFDDGSAMLSKRLAAGYALQSMFEPFSCAVCQVQLKAGQGISVHSNPLQHEKLQGWQGPFLCQSCNEKKDAIEGKRPPRDS

SEQ ID NO: 18152 - DNA, 1287 bp, Arabidopsis thaliana
  CDS (1)..(1287)
atgagcgtgtcaaaagcatcgaggacgcaacattcgctcgttcctcttgcgaccctgattggtagggagctgaggagcgagaaagtagagaagccttttgtcaagtatggtcaagcagctctcgctaagaaaggagaggactactttttgatcaaaactgactgtgaaagggtacctggtgatccatcatcggctttttcagttttcgggatatttgacggacacaatggtaattcagctgccatatatactaaggaacatcttctggaaaacgtggtgagtgcaattcctcaaggcgcaagcagggatgagtggcttcaagctcttcctagggctttagttgctggctttgtgaaaactgacattgaatttcagcagaaaggggaaacttcaggaacaaccgtgacttttgttataattgatggttggactattactgttgcttctgttggtgactcgcgctgcatattggacacccaaggtggtgtggtttctctactgactgttgatcacaggctagaagagaatgttgaagaaagagaacgcataactgctagtggaggtgaggtcggaagactcaatgtatttggtggcaatgaggtcggcccactacgatgctggcctggtggtttatgtctttcgaggtccattggtgatacggatgtgggagaatttattgtccctataccacacgttaagcaagtgaaacttcctgatgctggagggagactcatcatagcttcagatggtatatgggatatactgtcttctgatgtggctgccaaagcttgtcgtggtttatctgccgatcttgctgctaaacttgttgttaaggaagcattgcgaacaaaagggttgaaagatgatacgacttgtgtagtcgttgacatagttccatctggtcatctttccttggctccagcacccatgaagaaacagaacccatttacctcatttctttcaaggaaaaaccatatggataccaacaacaaaaatggcaacaagctttctgctgttggagttgtagaagaattgtttgaagaaggttctgctgtgcttgcagatagattgggaaaggatcttctctcaaatacggaaactgggctcttaaaatgtgctgtatgccaaatagatgaatctccgagtgaagatttatcaagcaatgggggttccatcatttcctcagcatctaaacgatgggaaggtcccttcctatgcacaatatgcaagaaaaagaaagacgccatggaaggaaaaagaccaagcaaaggttcagtgactacttga

SEQ ID NO: 18153 - protein, 428 aa, Arabidopsis thaliana
MSVSKASRTQHSLVPLATLIGRELRSEKVEKPFVKYGQAALAKKGEDYFLIKTDCERVPGDPSSAFSVFGIFDGHNGNSAAIYTKEHLLENVVSAIPQGASRDEWLQALPRALVAGFVKTDIEFQQKGETSGTTVTFVIIDGWTITVASVGDSRCILDTQGGVVSLLTVDHRLEENVEERERITASGGEVGRLNVFGGNEVGPLRCWPGGLCLSRSIGDTDVGEFIVPIPHVKQVKLPDAGGRLIIASDGIWDILSSDVAAKACRGLSADLAAKLVVKEALRTKGLKDDTTCVVVDIVPSGHLSLAPAPMKKQNPFTSFLSRKNHMDTNNKNGNKLSAVGVVEELFEEGSAVLADRLGKDLLSNTETGLLKCAVCQIDESPSEDLSSNGGSIISSASKRWEGPFLCTICKKKKDAMEGKRPSKGSVTT

SEQ ID NO: 18154 - DNA, 1230 bp, Oryza sativa subsp
  CDS (1)..(1230)
atgtcgtcgccgtctccgtcatcggaggcggcggcggcgcaccaccaccaccaccaacggcgccagcatgcgggcgccgcgggggggagcgggctcgtgccgctcgccgcgctcatcaaggaggaggcccgcgcggagcggccgatgggcagcgggagcaggatctgcgcgcgcgacgaggaggacggcggcggcggcgccggcgccgagggggggcggcggtggcggaggccgctgctgcggtacgggtgcgcggcgcagtcgaagaagggggaagacttcttcctcctcaggaccgactgcgcccggccctccacctcgtcgtcctcctcctcctccttggcgtcctcgcctccccacaccttcgccgtcttcgccgttcttgatggccataatggtaatgccgccgcaatatacaccagggacaatctgctcaatcatgtccttagcgcaatgccaagaggactctccagggaggagtggttgcatgcgctcccccgccaaacatctggcacaactgccacattcgtgatcattgacggatggactatcaccgttgcttcagttggtgattcccggtgtattttggatgctcagggtggcgctgtttctttgcttactgtggatcacagactagaagaaaatgtggaggagagggaacgtgtcactgcgagtggaggtgaagttggaaggcttagtgttgttggtggggcagagattggtccactgagatgctggccaggaggtttatgtctatcaagatccattggagatatcgatgttggagaatttatagttcctgttccctatgtcaagcaagtgaagttgtcgaatgctggagggaggcttattattgcatcagatggcatttgggatgccttgtcatcagaggcagctgcaaagtgttgcagaggtttgcctgctgagcttgctgctaagcaagttgttaaggaggcgctcaggacaagagggctaaaagatgatacgacctgcatcgttgttgacatgatcccacctgatcaaacaatacgtcatccatctccaccaaaaaagataaacaagttgaagtctttaatctttagaaaaaagacaaaagaccatcctaataaactgactaagcagctgtcagcagcgggtatggtggaagagttattcgaagaaggttcagcaatgctatcagagaggtcaatgaagtacaaagctatttatcatagtacaacccacatatag

SEQ ID NO: 18155 - protein, 409 aa, Oryza sativa subsp
MSSPSPSSEAAAAHHHHHQRRQHAGAAGGSGLVPLAALIKEEARAERPMGSGSRICARDEEDGGGGAGAEGGRRWRRPLLRYGCAAQSKKGEDFFLLRTDCARPSTSSSSSSSLASSPPHTFAVFAVLDGHNGNAAAIYTRDNLLNHVLSAMPRGLSREEWLHALPRQTSGTTATFVIIDGWTITVASVGDSRCILDAQGGAVSLLTVDHRLEENVEERERVTASGGEVGRLSVVGGAEIGPLRCWPGGLCLSRSIGDIDVGEFIVPVPYVKQVKLSNAGGRLIIASDGIWDALSSEAAAKCCRGLPAELAAKQVVKEALRTRGLKDDTTCIVVDMIPPDQTIRHPSPPKKINKLKSLIFRKKTKDHPNKLTKQLSAAGMVEELFEEGSAMLSERSMKYKAIYHSTTHI

SEQ ID NO: 18156 - DNA, 1104 bp, Oryza sativa subsp
  CDS (1)..(1104)
atgtcgacgcggtccaagtcggtgcctgtgcccgcggggggcggcgcggcgacggtgccgctcgccgtgctgctgcggcgggaggtggtcagcgagaagaccgcggcggagcgccccgagctgcaggtcgggctcttcagccaggccaagaagggggaggactacaccttcctcaagcccgactgcgagcgcctccccggcgtcccctcctcttccttctccgccttcggcctgtttgatgggcacaatgggaatggagccgcgatttacaccaaggagaatctcttgagcaacatcttgaccgcaatccctgctgatctcaacagggaggattggcttgccgcgcttccgagagcgatggttgcagcatttgtcaaaactgataaagatttccaaacgaaagcccgctcatcagggacaacggtgacatttgtcataatagatggattgtttattaccgttgcatctgttggtgattcgcgttgtgtactagaagctgaaggttctatttatcatttatctgctgatcatcgatttgatgccagtaaagaggaggttgaccgtgtaacagaatctgggggtgatgttggtagacttaatgtcgttggtggtgctgagattggccctcttagatgctggcctggtggtttgtgtctatcaaggtcaattggagaccaggatgtgggtcaattcattgtttcggttccttatgtcaagcaagtaaagctatcaacggctggaggccggcttattatttcaagtgatggtgtttgggatgtcttgactgcagaagttgcatttaactgttcacgaacacttcctccagaggctgctgcggaacaaattgtcaaagaagcagtgcaacaaaagggacttagggatgacactacttgtattgttgttgacatactaccagacaaagcaaatcttaccatgccacatacaaaaaagcaaccaggaatgggtgttttcaaaaacatgtttcgcaagaaaacaccatctgattcatcatcccatacagatagagaatatatggacccagacattgtggaggaaatatttgaggacggatgcgcatttctttccaaacggttggttcactaa

SEQ ID NO: 18157 - protein, 367 aa, Oryza sativa subsp
MSTRSKSVPVPAGGGAATVPLAVLLRREVVSEKTAAERPELQVGLFSQAKKGEDYTFLKPDCERLPGVPSSSFSAFGLFDGHNGNGAAIYTKENLLSNILTAIPADLNREDWLAALPRAMVAAFVKTDKDFQTKARSSGTTVTFVIIDGLFITVASVGDSRCVLEAEGSIYHLSADHRFDASKEEVDRVTESGGDVGRLNVVGGAEIGPLRCWPGGLCLSRSIGDQDVGQFIVSVPYVKQVKLSTAGGRLIISSDGVWDVLTAEVAFNCSRTLPPEAAAEQIVKEAVQQKGLRDDTTCIVVDILPDKANLTMPHTKKQPGMGVFKNMFRKKTPSDSSSHTDREYMDPDIVEEIFEDGCAFLSKRLVH

SEQ ID NO: 18158 - DNA, 1320 bp, Oryza sativa subsp
  CDS (1)..(1320)
atggaggtgcagggagaggtggatggatcgggggtgcccctggcggtgctcctgaagcgagagctgtgcaaccagaaggtggagaggccggacatgctgttcggcgaggcgagcaagagcaagaaaggggaggacttcacgtttctcttgcccaagtgcagccgccgtccaggtcaagcccaggctgacggggaggatgcaggaggcgccggcgacgacgacaccatctcggtgtttgcgatcttcgatggccacaatggatctgcggctgccatatacaccagggagaacctcttgaacaatgtgttggctgctattcccccaaatcttacaagtgaggagtggacaactgcattaccgagggcactagttgcaggttttgttaagacagataaagagttccaaacaaaagcggcgcgctcagggaccactgtgacttttgttataatagatggatgggttgtcactgtagcatcagttggcgattcccgctgtatcctagaatctgctgaaggttcagtatattttttgtcagctgatcatcgcctagataccaatgaggaggaggtagagcgtgtaacagcaagtggaggtgatgttgggagaataaatattgctggaggggctgggattggtccacttagatgctggccaggcggattgtgtttatcaaggtcaattggtgatatcgacgttggagagtttatagttcctgtcccacatgtgaagcaagtaaagttgtctaatgctggaggacggcttgtcattgctagcgatggtgtctgggatgcactgcgctttcaggaagctctgaactataccagaggactgccagctgaagctgctgctagtcgaattgttaaagaatctgtgagttcaaagggactacgagatgatactacttgcatcgtagttgacatattacctccagaaaagttgagccctccattaaagaagcatgggaaaggaggcatcaaagctttgttccgtcggaggccatctgatgaattgactgaagatcagatggacagaggatgtctagaacctgatgtcgtggaggaaatatatgaggagggctctgctatgcttgctcaaagattaaaaataaattatccgacaggaaatatgttcaaactgcatgattgtgctgtctgccaattggtgatgaaacctggtgagggcatctctgttcatggtagcattccgaggaattcaagggttgatccttggggtggcccttttctatgttcatcctgccaattgaaaaaggaggctatggaagggaagcaacatttgacaagtatgaatgccttcatctaa

SEQ ID NO: 18159 - protein, 439 aa, Oryza sativa subsp
MEVQGEVDGSGVPLAVLLKRELCNQKVERPDMLFGEASKSKKGEDFTFLLPKCSRRPGQAQADGEDAGGAGDDDTISVFAIFDGHNGSAAAIYTRENLLNNVLAAIPPNLTSEEWTTALPRALVAGFVKTDKEFQTKAARSGTTVTFVIIDGWVVTVASVGDSRCILESAEGSVYFLSADHRLDTNEEEVERVTASGGDVGRINIAGGAGIGPLRCWPGGLCLSRSIGDIDVGEFIVPVPHVKQVKLSNAGGRLVIASDGVWDALRFQEALNYTRGLPAEAAASRIVKESVSSKGLRDDTTCIVVDILPPEKLSPPLKKHGKGGIKALFRRRPSDELTEDQMDRGCLEPDVVEEIYEEGSAMLAQRLKINYPTGNMFKLHDCAVCQLVMKPGEGISVHGSIPRNSRVDPWGGPFLCSSCQLKKEAMEGKQHLTSMNAFI

SEQ ID NO: 18160 - DNA, 2616 bp, Oryza sativa subsp
  CDS (1)..(2616)
atggcggcggcggcggcggcggcgacggtggaggcggcgtcggcggagcgcgcttcggcgtcggcgtcgccgggtgcgggcgggcgggagcgggagcggcggcccagcgtcgcggcggggcaggcgtgtagggctaagaagggggaggacttcgcgctgctcaagccggcctgcgagcgcctcccggccggcggcgcccccttctccgccttcgccctgttcgatgggcacaacgggagcggcgccgcggtgtacgccaaggagaatatcctcagcaacgtcatgggctgcgttcctgccgatctgagcggcgacgagtggctcgcagcgctcccgagggcgctggtggccgggttcgtcaagacggacaaggattttcaaacaagaggaacaaccgtgacgtttgtcataatcgatgggtacgttgtgaccgttgcatccgttggcgattcgcggtgcgtccttgaagccgagggtaccatttaccatttgtccgctgaccatcgcttcgatgctagcgaagaggaggttggacgtgtaacagaatgcggaggtgaagttggaaggctaaatgttgtcggcggagctgagattgggccacttagatgttggcctggtggcttgtgcctatcaagatcaattggtgatcaggatgtaggtgaatttatcattcccgtgccttatgtgaagcagatcaagctatcaagtgctggaggcagaatcattatttcaagtgatggtgtttgggatgccttgactgtggatacggcttttagttgtgcacgagggcttcctccagaagctgcagcggatcaaattgtcaaagaagcaattgcatcaaaaggattgagagatgatacgacttgtattgtcattgacataatacctccagaaaaaataagccccactgtgcaacctgcaaaaaaggcagggaaaggacttttcaaaaatatcttttacaagaaagcaacatcagactcaccatgtcatgcagataaggaccaatgtacccagccagatttggtggaggaagtctttgaggatggatgtccttccctttcaagacggctagattctgaatatccagttcggaatatgttcaagctcttcatatgtgcaatttgtcaagtagagttagagtctggtcagggtatatccatacatgagggtttgtcaaagtcaggaaagctgcgtccatgggatgggcctttcctttgccacagttgccaggaaaagaaagaagcaatggaaggaaaacgtcactcacgagaattcattatgcgtgatcgatgtctgcatacgattttgatggtcaaagtctttaaggttatgtgcttcccgagatttgacgatatgaacaaggtacgtcggacgtacgctgccagagtcgccgatgccgacgactcaacggaggagaatgcgaggcgagttatctcgtcgtttcggggttgccacactgaagctagcgcgatgagtcctcgggtcagaatgtcggtggcgcggtggctgccaagcagcccagcgcacggcaagaccaagagccggcgctcgtcgtcggccgtgcgcccgacgctgctggtgatcgcggtgaccgtgattgccgtgctgctcgtcgccgtcgtcttcggcggcgccggccggtggacgctctccggcggcggggacaccagctgggtctccgccggagcccgcgtcgtcatcaacgccgtgtccggccaacaacgcgacggcgacgatcccgtcgcggcggcggtggagccgcggaacgacaggctcctgggtggcctcctctcgccggacttcgacgacagctcctgcctcagccgctaccgcgccgggctctaccgccggcagtccccccacgctgtctcgccgcacctggtcgcctcattccgacgctacgagtccatccaccgccgctgcggccccggcacctccgcctacgagcgcgccgtggagcgcctccgctccccgccgccgtcgaacacctccgacgccgagtgcaggtacctcgtgtggacgccgctcgaggggctcggcaaccgcatgctcacgctcacgtcggctttcctctacgcgctcctcaccgaccgcgtcctcctcttccaccaccccgccggcgaaggcctcagggacctcttctgcgagccgttcccgggctccacgtggacgctcccggagggggacttcccgttctccggcatgcagggcttcaacgcgcgcacccgcgagagcctcgggaacgcgctgcggcgcggcgagggcgccgccaaggaccacccgccgccgccgccgccgtggatgtacgtgcacctgcggcacgactacaaccgcaacgccaacgacccgcgcttcttctgcgacgacgggcaggacgcgctgcggcgcgtcggctgggtggtgctcctctccgacaactacttcgtgcccgggctgttcctggtcccgcggttcgagcgcgcgctgtcgcggatgctgccgcgccgcgacgccgcgttccaccacctcggccgctacctgctccacccgagcaacacggtgtgggggatggtggcgcggtaccacgcctcgtacatggcctgcgccaacgagcgcgtcggcatccagcttatgtga

SEQ ID NO: 18161 - protein, 871 aa, Oryza sativa subsp
MAAAAAAATVEAASAERASASASPGAGGRERERRPSVAAGQACRAKKGEDFALLKPACERLPAGGAPFSAFALFDGHNGSGAAVYAKENILSNVMGCVPADLSGDEWLAALPRALVAGFVKTDKDFQTRGTTVTFVIIDGYVVTVASVGDSRCVLEAEGTIYHLSADHRFDASEEEVGRVTECGGEVGRLNVVGGAEIGPLRCWPGGLCLSRSIGDQDVGEFIIPVPYVKQIKLSSAGGRIIISSDGVWDALTVDTAFSCARGLPPEAAADQIVKEAIASKGLRDDTTCIVIDIIPPEKISPTVQPAKKAGKGLFKNIFYKKATSDSPCHADKDQCTQPDLVEEVFEDGCPSLSRRLDSEYPVRNMFKLFICAICQVELESGQGISIHEGLSKSGKLRPWDGPFLCHSCQEKKEAMEGKRHSREFIMRDRCLHTILMVKVFKVMCFPRFDDMNKVRRTYAARVADADDSTEENARRVISSFRGCHTEASAMSPRVRMSVARWLPSSPAHGKTKSRRSSSAVRPTLLVIAVTVIAVLLVAVVFGGAGRWTLSGGGDTSWVSAGARVVINAVSGQQRDGDDPVAAAVEPRNDRLLGGLLSPDFDDSSCLSRYRAGLYRRQSPHAVSPHLVASFRRYESIHRRCGPGTSAYERAVERLRSPPPSNTSDAECRYLVWTPLEGLGNRMLTLTSAFLYALLTDRVLLFHHPAGEGLRDLFCEPFPGSTWTLPEGDFPFSGMQGFNARTRESLGNALRRGEGAAKDHPPPPPPWMYVHLRHDYNRNANDPRFFCDDGQDALRRVGWVVLLSDNYFVPGLFLVPRFERALSRMLPRRDAAFHHLGRYLLHPSNTVWGMVARYHASYMACANERVGIQLM

SEQ ID NO: 18162 - DNA, 1278 bp, Oryza sativa subsp
  CDS (1)..(1278)
atggcgatgacggcggcggcgggggcggcggtgacggtgccgctgggggtgctgctgcggcgggaggtgacgagcgagcggatggagcggcccgacgtgctgtgcggggaggcggcgcgcagccgcaagggggaggacttcacgctgctcctcgccgaggccggggagcgcgtcgccggcgacccgtccacctccttctccgtcttcgcgctatttgatgggcacaacggatctggagcggccatgtacgcgaagaagaatctgttgaacaatcttctacgtgccattccttcaggtttgagcagggatgagtggcttgcagtgcttcctcgtgcgcttgtcgcagcatttgtcaagacagacaaagatttccaggcagtagcggaaacttctggtaccactgttacatttgtagtaatagatgagtgggttgtaacggtagcatcagttggtgattcacgttgcatactagaatctgctgatggttcattataccatttgtcagctgatcatcgctttgactccaaccaagatgaggttcaacgtgttactgcatgtggaagcaaggttgggaaactgaatcttgtaggtggcccagaggttggtcctctaagatgttggccaggtggtctgtgcttatctagatcaattggggatatggatgttggtgaatgcatcattcctgttcctcatgtgaaacaagtgaagctatccaatgctggaggcaggattatcattgcaagtgatggtgtatgggatgatttgacttttgaaatggcacttgagtgttctcgtggattcccatcagatatagctgccaatcgaattgtgaatgaagcaattcaacctcggggactaagagatgatactacctgcatcgtggtggacatattacctccagaaaaactagctccaagtcctcccacaaagaggcaggggaagattgtattcaataatatgtttcgccgaaaacatacagacgtatcctttatactagatcgagagtatgctgagccagatgaggtggaagaaatatttgacgatggttccgctatgctttctaaaaggcttgctgcaggttatgcactccagagcatgtttgagcccttcagctgtgcagtttgccaagtacagttgaaagctggccagggaatttctgtacacagcaatccattgcaacacgaaaaattgcaaggatggcagggacctttcctgtgccaaagctgcaacgaaaagaaagacgcaattgaagggaaacgacctccaagagattcttga

SEQ ID NO: 18163 - protein, 425 aa, Oryza sativa subsp
MAMTAAAGAAVTVPLGVLLRREVTSERMERPDVLCGEAARSRKGEDFTLLLAEAGERVAGDPSTSFSVFALFDGHNGSGAAMYAKKNLLNNLLRAIPSGLSRDEWLAVLPRALVAAFVKTDKDFQAVAETSGTTVTFVVIDEWVVTVASVGDSRCILESADGSLYHLSADHRFDSNQDEVQRVTACGSKVGKLNLVGGPEVGPLRCWPGGLCLSRSIGDMDVGECIIPVPHVKQVKLSNAGGRIIIASDGVWDDLTFEMALECSRGFPSDIAANRIVNEAIQPRGLRDDTTCIVVDILPPEKLAPSPPTKRQGKIVFNNMFRRKHTDVSFILDREYAEPDEVEEIFDDGSAMLSKRLAAGYALQSMFEPFSCAVCQVQLKAGQGISVHSNPLQHEKLQGWQGPFLCQSCNEKKDAIEGKRPPRDS

SEQ ID NO: 18164 - DNA, 1230 bp, Oryza sativa subsp
  CDS (1)..(1230)
atgtcgtcgccgtcgccgtcatcggaggcggcggcggcgcaccaccaccaccaccaacggcgccagcatgcgggcgccgcgggggggagcgggctcgtgccgctcgccgcgctcatcaaggaggaggcccgcgcggagcggccgatgggcagcgggagcaggatctgcgcgcgcgacgaggaggacggcggcggcggcggcggcgccgagggggggcggcggtggcggaggccgctgctgcggtacgggtgcgcggcgcagtcgaagaagggggaagacttcttcctcctcaggaccgactgcgcccggccctccacctcgtcgtcgtcctcctcctccttggcgtcctcgcctccccacaccttcgccgtcttcgccgttcttgatggccataatggtaatgccgccgcaatatacaccagggacaatctgctcaatcatgtccttagcgcaatgccaagaggactctccagggaggagtggttgcatgcgctcccacgccaaacatctggcacaactgccacattcgtgatcattgacggatggactatcaccgttgcttccgttggtgattcccggtgtattttggatgctcagggtggcgctgtttctttgcttactgtggatcacagactagaagaaaatgtggaggagagggaacgtgtcactgcgagtggaggtgaagttggaaggcttagtgttgttggtggggcagagattggtccactgagatgctggccaggaggtttatgtctatcaagatccattggagatatcgatgttggagaatttatagttcctgttccctatgtcaagcaagtgaagttgtcgaatgctggagggaggcttattattgcatcagatggcatttgggatgccttgtcatcagaggcagctgcaaagtgttgcagaggtttgcctgctgagcttgctgctaagcaagttgttaaggaggcgctcaggacaagagggctaaaagatgatacgacctgcatcgttgttgacatgatcccacctgatcaaacaatacgtcatccatctccaccaaaaaagataaacaagttgaagtctttaatctttagaaaaaagacaaaagaccatcctaataaactgactaagcagctgtcagcagcgggtatggtggaagagttattcgaagaaggttcagcaatgctatcagagaggtcaatgaagtacaaagctatttatcatagtacaacccacatatag

SEQ ID NO: 18165 - protein, 409 aa, Oryza sativa subsp
MSSPSPSSEAAAAHHHHHQRRQHAGAAGGSGLVPLAALIKEEARAERPMGSGSRICARDEEDGGGGGGAEGGRRWRRPLLRYGCAAQSKKGEDFFLLRTDCARPSTSSSSSSSLASSPPHTFAVFAVLDGHNGNAAAIYTRDNLLNHVLSAMPRGLSREEWLHALPRQTSGTTATFVIIDGWTITVASVGDSRCILDAQGGAVSLLTVDHRLEENVEERERVTASGGEVGRLSVVGGAEIGPLRCWPGGLCLSRSIGDIDVGEFIVPVPYVKQVKLSNAGGRLIIASDGIWDALSSEAAAKCCRGLPAELAAKQVVKEALRTRGLKDDTTCIVVDMIPPDQTIRHPSPPKKINKLKSLIFRKKTKDHPNKLTKQLSAAGMVEELFEEGSAMLSERSMKYKAIYHSTTHI

SEQ ID NO: 18166 - DNA, 1104 bp, Oryza sativa subsp
  CDS (1)..(1104)
atgtcgacgcggtccaagtcggtgccggtgcccgcggggggcggcgcggcgacggtgccgctcgccgtgctgctgcggcgggaggtggtcagcgagaagaccgcggcggagcgccccgagctgcaggtcgggctcttcagccaggccaagaagggggaggactacaccttcctcaagcccgactgcgagcgcctccccggcgtcccctcctcctccttctccgccttcggcctgtttgatgggcacaatgggaatggagccgcgatttacaccaaggagaatctcttgagcaacatcttgaccgcaatcccagctgatctcaacagggaggattggcttgccgcgcttccgagagcgatggttgcagcatttgtcaaaactgataaagatttccaaacgaaagcccgctcatcagggacaacggtgacatttgtcataatagatggattgtttattaccgttgcatctgttggtgattcgcgttgtgtactagaagctgaaggttctatttatcatttatctgctgatcatcgatttgatgccagtaaagaggaggttgaccgtgtaacagaatctgggggtgatgttggtagacttaatgtcgttggtggtgctgagattggccctcttagatgctggcctggtggtttgtgtctatcaaggtcaattggagaccaggatgtgggtcaattcattgttccggttccttatgtcaagcaagtaaagctatcaacggctggaggccggcttattatttcaagtgatggtgtttgggatgtcttgactgcagaagttgcatttaactgttcacgaacacttcctccagaggctgctgcggaacaaattgtcaaagaagcagtgcaacaaaagggacttagggatgacactacttgtattgttgttgacatactaccagacaaagcaaatcttaccatgccacatacaaaaaagcaaccaggaatgggtgttttcaaaaacatgtttcgcaagaaaacaccatctgattcatcatcccatacagatagagaatatatggacccagacattgtggaggaaatatttgaggacggatgcgcatttctttccaaacggttggttcactaa

SEQ ID NO: 18167 - protein, 367 aa, Oryza sativa subsp
MSTRSKSVPVPAGGGAATVPLAVLLRREVVSEKTAAERPELQVGLFSQAKKGEDYTFLKPDCERLPGVPSSSFSAFGLFDGHNGNGAAIYTKENLLSNILTAIPADLNREDWLAALPRAMVAAFVKTDKDFQTKARSSGTTVTFVIIDGLFITVASVGDSRCVLEAEGSIYHLSADHRFDASKEEVDRVTESGGDVGRLNVVGGAEIGPLRCWPGGLCLSRSIGDQDVGQFIVPVPYVKQVKLSTAGGRLIISSDGVWDVLTAEVAFNCSRTLPPEAAAEQIVKEAVQQKGLRDDTTCIVVDILPDKANLTMPHTKKQPGMGVFKNMFRKKTPSDSSSHTDREYMDPDIVEEIFEDGCAFLSKRLVH

SEQ ID NO: 18168 - DNA, 1203 bp, Oryza sativa subsp
  CDS (1)..(1203)
atggagagcgccgccggggaggaggggaaggctgccccgtcgcttcccctggcgaccctgatcggccgcgagctccgcggcggcggctccgagcggccgctcgtccggtacggccacttcggcttcgccaagcgcggcgaggactacttcctcgtcaagcccgactgcctccgcgtcccgggcgacccttcctccgccttctccgtcttcgccgtgttcgacggacacaatggcgtgtcggcggcggtgttcagcaaggagcacctgctggagcacgtgatgagcgccgtgccgcagggcatcggccgcgacgactggctgcaggcgctgccgcgcgcgctggtcgcgggcttcgtgaagacggacatcgacttccaacgcaagggggaggcatcagggacgacagcgacgctggtcgtcgtcgatgggttcacggtcacggtggcgtctgttggggactccaggtgcatattggacacgcagggcggtgtgatctcgctgctaaccgtggaccatcgtctcgaggagaatgtagaggagcgggagcgcgtcaccgcgagtggaggggaggtcagccggctcaacctgtgtggtggacaggaggtgggacctctcagatgctggccaggtggattgtgcctttcaagatcgattggggatactgacgttggggagttcattgtgccaattccacatgtcaagcaagtgaagctatcaaatgctggagggaggctaataattgcatcagatggaatttgggatgcactgtcctcagaagctgctgctcaggcatgccgaggattgcctgcagagctggctgcaaagcttgtcgtgaagcaagcactgaagacaagtgggctgaaagatgacaccacctgtgtggttgttgatatcatcccatctgatcattcttcaacacctccatcactatctccaaagaaaaaccagaacaagttgagatctcttctttttggtaggaggttgggtaggaattttccatcaaaagcaaactcgtccccatctcgctgtgcaatctgccaagtggatcaagcaccttttgaagatttagtgacagataatggaggtggttgctgttctgccccatcgacaccatgggttggcccttatctttgttcagattgtaggaaaaagaaggatgcaatggaaggcttttgggcatctggtgttccctttaccttctaa

SEQ ID NO: 18169 - protein, 400 aa, Oryza sativa subsp
MESAAGEEGKAAPSLPLATLIGRELRGGGSERPLVRYGHFGFAKRGEDYFLVKPDCLRVPGDPSSAFSVFAVFDGHNGVSAAVFSKEHLLEHVMSAVPQGIGRDDWLQALPRALVAGFVKTDIDFQRKGEASGTTATLVVVDGFTVTVASVGDSRCILDTQGGVISLLTVDHRLEENVEERERVTASGGEVSRLNLCGGQEVGPLRCWPGGLCLSRSIGDTDVGEFIVPIPHVKQVKLSNAGGRLIIASDGIWDALSSEAAAQACRGLPAELAAKLVVKQALKTSGLKDDTTCVVVDIIPSDHSSTPPSLSPKKNQNKLRSLLFGRRLGRNFPSKANSSPSRCAICQVDQAPFEDLVTDNGGGCCSAPSTPWVGPYLCSDCRKKKDAMEGFWASGVPFTF

SEQ ID NO: 18170 - DNA, 1590 bp, Oryza sativa subsp
  CDS (1)..(1590)
atggctggtattgctaaggagaggcggctgccgccggcgctgccactcgccactctcatcggccgcgagctccgcgccgggggctccgagcgcccctccctccgctacggccacgccggcttcgccaagcgcggcgaggactacttcctcgtcaagcccgactgcctccgcgtccccggggacacctccaccgccttctccgtcttcgcggtatccttcctcttccttgatctactactccattttattcattcattcattcactactcctcctcatcatgtcacgcgcttggatccgtccgtctttgcttgcttgcttcgcctcaggtgttcgacggccacaacggggtctcggcggcggtctacagcaaggagcatttgctcgagcacgtcatgagcgcgctgccgccggacatcggccgcgacgactggctacaggcgctgccgcgggcgctcgtcgccggcttcgtcaaggccgacatcgacttccagcgcaagggggaggtgtcggggaccaccgcaacgctggtggtcgtcgatggattcacggtcacggtggcgtcagtcggggactcgcggtgcatcctggacacgcagggtggtgaggtgcagctgctcaccgtcgaccaccgcctggaagagaatgccgaggagcgggagcgggttaccgccagcggtggggaggtcggccgcctcaatctcttcggcggccaggaggttggtcctctccggtgctggccaggtggcctgtgcctttcaagatctatcggggacatggatgtcggggagttcattgtgccgattccacatgtgaagcaagtgaagctctcaaacattggaggaaggttgatcatcgcatcagatggtatatgggatgcactaccctctgaagcagcagcaaaggcatgccgaggtttacctgcagaactggctgcaaagcttgtggttaagcaagctctcaaaaaaagtgggctgaaagatgacaccacttgtgtggtggttgatatcatcccttccgattatcgtttgacatcgccgcagttgtccccaaagagaaaccagagcaagttcaagtctcttcttttcggtagaaggtcacacagttcaattggaaagcttggaggcaagtctgcctcttttggctctgtggaggaattatttgaagaaggctctgcaatgttggaagaaagcaatggcggcactggcggcaacggtcgcccctacaaacgcaagaagcaggctggtcgcgccgacggcacctccggcaactctggcccctccggcaactccagtgcgcccatggcatcctgggtcaacccatggaccggcgttgtccaggcctggcccatcgcgtggttccctctcacctcgtcagctcctggcattctcggctctcgccctggtgccgccccgcagcagtccatggtggtgcagcaggctccggccggcacgcttccgccggcgctctaccaggctctcaccggcctgtctctacagtcgactccgccgagcgccacggattgggttttcgacactggggcctccactcacatggttggcaactccggttgggtaggaatttgtccttga

SEQ ID NO: 18171 - protein, 529 aa, Oryza sativa subsp
MAGIAKERRLPPALPLATLIGRELRAGGSERPSLRYGHAGFAKRGEDYFLVKPDCLRVPGDTSTAFSVFAVSFLFLDLLLHFIHSFIHYSSSSCHALGSVRLCLLASPQVFDGHNGVSAAVYSKEHLLEHVMSALPPDIGRDDWLQALPRALVAGFVKADIDFQRKGEVSGTTATLVVVDGFTVTVASVGDSRCILDTQGGEVQLLTVDHRLEENAEERERVTASGGEVGRLNLFGGQEVGPLRCWPGGLCLSRSIGDMDVGEFIVPIPHVKQVKLSNIGGRLIIASDGIWDALPSEAAAKACRGLPAELAAKLVVKQALKKSGLKDDTTCVVVDIIPSDYRLTSPQLSPKRNQSKFKSLLFGRRSHSSIGKLGGKSASFGSVEELFEEGSAMLEESNGGTGGNGRPYKRKKQAGRADGTSGNSGPSGNSSAPMASWVNPWTGVVQAWPIAWFPLTSSAPGILGSRPGAAPQQSMVVQQAPAGTLPPALYQALTGLSLQSTPPSATDWVFDTGASTHMVGNSGWVGICP

SEQ ID NO: 18172 - DNA, 1374 bp, Oryza sativa
  CDS (1)..(1374)
atggcggcggcggcggcggcggcgacggtggaggcggtgggggtggcgggggggaggaggatgcggagcggtagcgttgcgctcggggacctgctgcggcgtgaggcgtcgtcggagcgcgcttcggcgtcggcgtcggcgggtgcggtcgggcgggagcgggagcggcggcccagcgtcgcggcggggcaggcgtgtagggctaagaagggggaggacttcgcgctgctcaagccggcctgcgagcgcctcccggccggcggcgcccccttctccgccttcgccctgttcgatgggcacaacgggagcggcgccgcggtgtacgccaaggagaatatcctcagcaacgtcatgtgctgcgttcctgccgatctgagcggcgacgagtggctcgcagcgctcccgagggcgctggtggccgggttcgtcaagacggacaaggattttcaaacaagaggaacaaccgtgacgtttgtcataatcgatgggtacgttgtgaccgttgcatccgttggcgattcgcggtgcgtccttgaagctgagggtaccatttaccatttgtccgctgaccatcgcttcgatgctagcgaagaggaggttggacgtgtaacagaatgcggaggtgaagttggaaggctaaatgttgtcggcggagctgagattgggccacttagatgttggcctggtggcttgtgcctatcaagatcaattggtgatcaggatgtaggtgaatttatcattcccgtgccttatgtgaagcagatcaagctatcaagtgctggaggcagaatcattatttcaagtgatggtgtttgggatgccttgactgtggatacggcttttagttgtgcacgagggcttcctccagaagctgcagcggatcaaattgtcaaagaagcaattgcatcaaaaggattgagagatgatacgacttgtattgtcattgacataatacctccagaaaaaataagccccactgtgcaacctgcaaaaaaggcagggaaaggacttttcaaaaatatcttttacaagaaagcaacatcagactcaccatgtcatgcagataaggaccaatgtacccagccagatttggtggaggaagtctttgaggatggatgtccttccctttcaagacggctagattctgaatatccagttcggaatatgttcaagctcttcatatgtgcaatttgtcaagtagagttagagtctggtcagggtatatccatacatgagggtttgtcaaagtcaggaaagctgcgtccatgggatgggcctttcctttgccacagttgccaggaaaagaaagaagcaatggaaggaaaacgtcactcacgagattcctcctcaagaaacagtgggtcaagtgaatag

SEQ ID NO: 18173 - protein, 457 aa, Oryza sativa
MAAAAAAATVEAVGVAGGRRMRSGSVALGDLLRREASSERASASASAGAVGRERERRPSVAAGQACRAKKGEDFALLKPACERLPAGGAPFSAFALFDGHNGSGAAVYAKENILSNVMCCVPADLSGDEWLAALPRALVAGFVKTDKDFQTRGTTVTFVIIDGYVVTVASVGDSRCVLEAEGTIYHLSADHRFDASEEEVGRVTECGGEVGRLNVVGGAEIGPLRCWPGGLCLSRSIGDQDVGEFIIPVPYVKQIKLSSAGGRIIISSDGVWDALTVDTAFSCARGLPPEAAADQIVKEAIASKGLRDDTTCIVIDIIPPEKISPTVQPAKKAGKGLFKNIFYKKATSDSPCHADKDQCTQPDLVEEVFEDGCPSLSRRLDSEYPVRNMFKLFICAICQVELESGQGISIHEGLSKSGKLRPWDGPFLCHSCQEKKEAMEGKRHSRDSSSRNSGSSE

SEQ ID NO: 18174 - DNA, 1287 bp, Medicago truncatula
  CDS (1)..(1287)
atgagtaaacgtgaattgtcaaggatgaagccatcaccagttccattggccactttgattggtcgtgagattcgaaatgagaaagttgaaaaaccttttgtcaagtttggacaagctggattggccaagaaaggagaagattactttttaatcaaaacagattgccacagggttcccggggatccatcaacggcgttttccgtctttgcgatttttgacgggcacaacggtatatcagctgctatttatacaaaagaaaacttgcttaataatgttttgagtgcgataccgcaagatatcagcagggatgcatggctacaggcccttcctcgcgctctagttgttggttttgtgaagactgacacagagtttcagaagaagggggaaacttctggaacaacagctacatttgttatagttgatggatggaccgtcactgttgcatctgttggggattcccgttgcatattagatactcagggaggtgtagtttctctcctgacagttgatcatagactggaagagaatgtagaagagagggagcgtgttactgcgagtggtggtgaagtaggacgactcaatatatttgggggcaatgaggtaggtcctcttcgctgctggcccggtggattgtgcctatctagatcaattggagacacagatgtgggggaatatatcgtaccaataccacatgttaagcaagtgaaactttcaagtgctggtggaaggcttattatagcctctgatggtatttgggacactttatctaatgatatagccgccatgtcatgtcggggtctacctgcagagcttgctgcaaagctggtggttaaggaagctctaagatctagaggcctgaaggatgatacaacctgccttgtcgtagatattattccttctgaccaccctgtattactacctactccaaaaaagaagcataatatgctaaccacgcttttctttggaaagaaatctgagaactccacaaacaaagctactagcaagctttctgcagttggtgttgtggaagaactatttgaagagggttctgcaatgcttatagaaaggcttggtaaggattttccatttgataagaattctgagattttccgctgtgctatttgccaagtggatcaaccccctggtaatggtctatcagtgaactctggacctttcttttctccagcatctaaaccatgggaaggcccatttctctgcacaaactgccggaacaaaaaagatgccatggaaggaaagaggccaagcagacctaccgttacagcatag

SEQ ID NO: 18175 - protein, 428 aa, Medicago truncatula
MSKRELSRMKPSPVPLATLIGREIRNEKVEKPFVKFGQAGLAKKGEDYFLIKTDCHRVPGDPSTAFSVFAIFDGHNGISAAIYTKENLLNNVLSAIPQDISRDAWLQALPRALVVGFVKTDTEFQKKGETSGTTATFVIVDGWTVTVASVGDSRCILDTQGGVVSLLTVDHRLEENVEERERVTASGGEVGRLNIFGGNEVGPLRCWPGGLCLSRSIGDTDVGEYIVPIPHVKQVKLSSAGGRLIIASDGIWDTLSNDIAAMSCRGLPAELAAKLVVKEALRSRGLKDDTTCLVVDIIPSDHPVLLPTPKKKHNMLTTLFFGKKSENSTNKATSKLSAVGVVEELFEEGSAMLIERLGKDFPFDKNSEIFRCAICQVDQPPGNGLSVNSGPFFSPASKPWEGPFLCTNCRNKKDAMEGKRPSRPTVTA

SEQ ID NO: 18176 - DNA, 1323 bp, Medicago truncatula
  CDS (1)..(1323)
atgagtaaggctgaattatcaaggatgaagcaaccacttgttccgttggcaaccttgatcggccgtgagctacgaaatggaaaaacggagaagccttttgtgaagtatggacaggctggtttggcaaaaaaaggagaagattactttctaatcaagacagattgccatagagttcctggcgattcttcaacgtcattctctgtcttcgcgatccttgacgggcataatggtatatccgctgctatttttgcgaaagaaaatataataaacaatgtcatgagtgccataccgcaaggtgtaagcagggaggaatggcttcaagctctgcctcgggctctagttgtcgcttttgtgaaaactgacatggaatttcagaaaaaaggggaaacttctggaacgacagctacgtttgtgattattgatggatggactgtaacagttgcatctgttggggattcccgatgcatattagatactcagggaggcgttgtttctctcttgacagttgatcacagattggaagaaaatgtagaagagagggagcgggttacagccagtggtggtgaagtaggaagactcaatgtattcggaggcaatgaggtggggcctcttcgctgttggcctggtggattgtgcctttctagatcgattggtgacactgatgtgggagagtatatcgttccaataccacacgttaagcaagtgaagctttcaaatgctggcggaagactaattatagcttctgatggaatttgggatactttgtcttctgatatggctgccaagtcatgtcgtggtgtacctgcagaacttgctgccaagctggtggttaaggaagctctaaggtcaagagggctgaaggatgatacaacctgccttgttgtagatattattccttcggactatcctgtgttgccgatgccagcaactcctagaaagaaacataatgtgcttagttcacttctctttggaaagaaatcccaaaacttggcaaacaaaggaactaataagctttctgcagttggcgttgtggaggagttatttgaagagggttctgcaatgcttacagagaggctaggtaataatgttccttccgacacaaattctggtattcaccgctgtgcagtttgcctagcagatcaaccctctggtgatggcttatcagtgaacaacgatcattttatcactccggtatctaagccatgggaaggtccattcctctgcacaaactgtcagaagaagaaagacgccatggaaggaaaaagtgtgagcaatgcttggttctgcatttggatggtgagtgtcataagtgtgtgtgagtga

SEQ ID NO: 18177 - protein, 440 aa, Medicago truncatula
MSKAELSRMKQPLVPLATLIGRELRNGKTEKPFVKYGQAGLAKKGEDYFLIKTDCHRVPGDSSTSFSVFAILDGHNGISAAIFAKENIINNVMSAIPQGVSREEWLQALPRALVVAFVKTDMEFQKKGETSGTTATFVIIDGWTVTVASVGDSRCILDTQGGVVSLLTVDHRLEENVEERERVTASGGEVGRLNVFGGNEVGPLRCWPGGLCLSRSIGDTDVGEYIVPIPHVKQVKLSNAGGRLIIASDGIWDTLSSDMAAKSCRGVPAELAAKLVVKEALRSRGLKDDTTCLVVDIIPSDYPVLPMPATPRKKHNVLSSLLFGKKSQNLANKGTNKLSAVGVVEELFEEGSAMLTERLGNNVPSDTNSGIHRCAVCLADQPSGDGLSVNNDHFITPVSKPWEGPFLCTNCQKKKDAMEGKSVSNAWFCIWMVSVISVCE

SEQ ID NO: 18178 - DNA, 1952 bp, Physcomitrella patens
  CDS (267)..(1388)
gttgcaacgcaagtgagccgtcagtgagctagagccgtgggtttgagtttgttcagagcgaggggagtgaatgaggtggacgcagtgggcgtgattgcgactaagtttgatggatgcagaatctcaaggttgtggacacctgagcgtattttgatttttgattggaatggcgagggggaggtgattgttgttcagggaggggggaggtgaggacggggtttgggtggttagaagcaagatcagcgaggagtgcaccgacgtcgcaaatgaggaagacgttgaaaaaatgctgttgtttcgcgtctttgatggagctctgcgttcgcgcatcagtcgaaggtagacgcgcccatcacttggtcaccttgtcttcactgttcaacaaaggcactcaacccacaatcaaagctaacaagccatccgtctcgtatggtcaagctcttcaagcgaagaaagaagaagacttcgtcatcgtcaagacgaactgccaacgaatccccggagacgggtcctcaacgtatgatgcctttgcggttttggacggtcataatggatccgcagctggagcattcactaaggagaacctgctgaacaacgtagtgaatgcagtcccatctggcctgagcagggacgaatggctggcagctctgccgcgagcaatggtcgcagggtttgtgaagaccgacaaggactggcgatctaaaggaatcttttcgggcacaacggtaaccttggtaatcgtagacggatacatcgtaacatgcgcttgtgttggagactcccggtgcgtgctcgatgcacaaggaattgtgacagccttgacgattgatcacagattcgacacaaacgaagaagagtgtgaacgcgttgtagcaagtgggggccaagtggccaggctgcatccttatggttgcgatattggcccgttgaggtcttggccgggcggtatatgcttgtctaggaccatcggagatgtcgatgcaggtgagcatatcgtgcctgtgccccatgtaaagcaaatcaagctttcacctggaggaggcaggctgatcatcgcctctgacggcgtgtgggacgccttgacctcggagaaggctgccaaagtctgccgtggcgagaagcacccggaggttgccgcaaagaacatcgtcaaggaagtcatcaaggtgcagggcttgcgtgatgataccacatgcctagtggtggacatcgtgcctcctgggcgagcttcgcgctctttcgcaccagcagtcagaaagcaaatgatggtgatgagattcttgcggcgcacacggtccaaaaaaggcagtggttctggagctcctatggaagaactcttcgaagagagttctgcaactttatctgaaaggttgaggccggtgacttgagaacgctaaacacgggcctccgcttcctgtgcaatttttatggcaatattaacttagactgctgcaaaaatttattcgctccatttgaaggcttccgatcggagtgccaacggaattatcatgattcaattctatgcagaaggtcgccgccggcgccgtccgtagctaagagcactagagtcatcgctttccaacgaggagttttcatattcttgagtatcatgcatgtactgtagatgctttccacttgtgactgctcagtaagatgcacaagaataggcactgattacagcacgatattttcgacatttagaagtagtgtaaatatacaggtacagacagagcttgaacattcatggaagcgacttgtgtcactactcacttgactgaacagacgggagtttttcgaaaccctagcataaaaaaggatgatgcacttcacctaacaatcaggaagaagcgattcatttaaccagcttcctttattgaccgcacagacgtggagtactgtgccatgtgcaattctgtgtttttctgcagttaaatttccgtcagtgaatacgt

SEQ ID NO: 18179 - protein, 373 aa, Physcomitrella patens
MRKTLKKCCCFASLMELCVRASVEGRRAHHLVTLSSLFNKGTQPTIKANKPSVSYGQALQAKKEEDFVIVKTNCQRIPGDGSSTYDAFAVLDGHNGSAAGAFTKENLLNNVVNAVPSGLSRDEWLAALPRAMVAGFVKTDKDWRSKGIFSGTTVTLVIVDGYIVTCACVGDSRCVLDAQGIVTALTIDHRFDTNEEECERVVASGGQVARLHPYGCDIGPLRSWPGGICLSRTIGDVDAGEHIVPVPHVKQIKLSPGGGRLIIASDGVWDALTSEKAAKVCRGEKHPEVAAKNIVKEVIKVQGLRDDTTCLVVDIVPPGRASRSFAPAVRKQMMVMRFLRRTRSKKGSGSGAPMEELFEESSATLSERLRPVT

SEQ ID NO: 18180 - DNA, 1374 bp, Oryza sativa subsp
  CDS (1)..(1374)
atggcggcggcggcggcggcggcgacggtggaggcggtgggggtggcgggggggaggaggaggcggagcgggagcgtggcgctcggggacctgctgcggcgtgaggcgtcggcggagcgcgcttcggcgtcggcgtcggcgggtgcgggcgggcgggagcgggagcggcggcccagcgtcgcggcggggcaggcgtgtagggctaagaagggggaggacttcgcgctgctcaagccggcctgcgagcgcctcccggccggcggcgcccccttctccgccttcgccctgttcgatgggcacaacgggagcggcgccgcggtgtacgccaaggagaatatcctcagcaacgtcatgtgctgcgttcctgccgatctgagcggcgacgagtggctcgcagcgctcccgagggcgctggtggccgggttcgtcaagacggacaaggattttcaaacaagaggaacaaccgtgacgtttgtcataatcgatgggtacgttgtgaccgttgcatccgttggcgattcgcggtgcgtccttgaagctgagggtaccatttaccatttgtccgctgaccatcgcttcgatgctagcgaagaggaggttggacgtgtaacagaatgcggaggtgaagttggaaggctaaatgttgtcggcggagctgagattgggccacttagatgttggcctggtggcttgtgcctatcaagatcaattggtgatcaggatgtaggtgaatttatcattcccgtgccttatgtgaagcagatcaagctatcaagtgctggaggcagaatcattatttcaagtgatggtgtttgggatgccttgactgtggatacggcttttagttgtgcacgagggcttcctccagaagctgcagcggatcaaattgtcaaagaagcaattgcatcaaaaggattgagagatgatacgacttgtattgtcattgacataatacctccagaaaaaataagccccactgtgcaacctgcaaaaaaggcagggaaaggacttttcaaaaatatcttttacaagaaagcaacatcagactcaccatgtcatgcagataaggaccaatgtacccagccagatttggtggaggaagtctttgaggatggatgtccttccctttcaagacggctagattctgaatatccagttcggaatatgttcaagctcttcatatgtgcaatttgtcaagtagagttagagtctggtcagggtatatccatacatgagggtttgtcaaagtcaggaaagctgcgtccatgggatgggcctttcctttgccacagttgccaggaaaagaaagaagcaatggaaggaaaacgtcactcacgagattcctcctcaagaaacagtgggtcaagtgaatag

SEQ ID NO: 18181 - protein, 457 aa, Oryza sativa subsp
MAAAAAAATVEAVGVAGGRRRRSGSVALGDLLRREASAERASASASAGAGGRERERRPSVAAGQACRAKKGEDFALLKPACERLPAGGAPFSAFALFDGHNGSGAAVYAKENILSNVMCCVPADLSGDEWLAALPRALVAGFVKTDKDFQTRGTTVTFVIIDGYVVTVASVGDSRCVLEAEGTIYHLSADHRFDASEEEVGRVTECGGEVGRLNVVGGAEIGPLRCWPGGLCLSRSIGDQDVGEFIIPVPYVKQIKLSSAGGRIIISSDGVWDALTVDTAFSCARGLPPEAAADQIVKEAIASKGLRDDTTCIVIDIIPPEKISPTVQPAKKAGKGLFKNIFYKKATSDSPCHADKDQCTQPDLVEEVFEDGCPSLSRRLDSEYPVRNMFKLFICAICQVELESGQGISIHEGLSKSGKLRPWDGPFLCHSCQEKKEAMEGKRHSRDSSSRNSGSSE

SEQ ID NO: 18182 - DNA, 1068 bp, Arabidopsis thaliana
  CDS (1)..(1068)
atgagcgtgtcaaaagcatcgaggacgcaacattcgctcgttcctcttgcgaccctgattggtagggagctgaggagcgagaaagtagagaagccttttgtcaagtatggtcaagcagctctcgctaagaaaggagaggactactttttgatcaaaactgactgtgaaagggtacctggtgatccatcatcggctttttcagttttcgggatatttgacggacacaatggtaattcagctgccatatatactaaggaacatcttctggaaaacgtggtgagtgcaattcctcaaggcgcaagcagggatgagtggcttcaagctcttcctagggctttagttgctggctttgtgaaaactgacattgaatttcagcagaaaggggaaacttcaggaacaaccgtgacttttgttataattgatggttggactattactgttgcttctgttggtgactcgcgctgcatattggacacccaaggtggtgtggtttctctactgactgttgatcacaggctagaagagaatgttgaagaaagagaacgcataactgctagtggaggtgaggtcggaagactcaatgtatttggtggcaatgaggtcggcccactacgatgctggcctggtggtttatgtctttcgaggtccattggtgatacggatgtgggagaatttattgtccctataccacacgttaagcaagtgaaacttcctgatgctggagggagactcatcatagcttcagatggtatatgggatatactgtcttctgatgtggctgccaaagcttgtcgtggtttatctgccgatcttgctgctaaacttgttgttaaggaagcattgcgaacaaaagggttgaaagatgatacgacttgtgtagtcgttgacatagttccatctggtcatctttccttggctccagcacccatgaagaaacagaacccatttacctcatttctttcaaggaaaaaccatatggataccaacaacaaaaatggcaacaagctttctgctgttggagttgtagaagaattgtttgaagaaggttctgctgtgcttgcaagatag

SEQ ID NO: 18183 - protein, 355 aa, Arabidopsis thaliana
MSVSKASRTQHSLVPLATLIGRELRSEKVEKPFVKYGQAALAKKGEDYFLIKTDCERVPGDPSSAFSVFGIFDGHNGNSAAIYTKEHLLENVVSAIPQGASRDEWLQALPRALVAGFVKTDIEFQQKGETSGTTVTFVIIDGWTITVASVGDSRCILDTQGGVVSLLTVDHRLEENVEERERITASGGEVGRLNVFGGNEVGPLRCWPGGLCLSRSIGDTDVGEFIVPIPHVKQVKLPDAGGRLIIASDGIWDILSSDVAAKACRGLSADLAAKLVVKEALRTKGLKDDTTCVVVDIVPSGHLSLAPAPMKKQNPFTSFLSRKNHMDTNNKNGNKLSAVGVVEELFEEGSAVLAR

SEQ ID NO: 18184 - DNA, 1287 bp, Arabidopsis thaliana
  CDS (1)..(1287)
atgtcaacaaagggagaacatcatacagttccactttctgtgttgcttaaacgtgaatcagctaatgaaaagatagacaatcctgaacttatacacggccagcacaaccaaagcaagaaaggagaggattttactcttgttaaaacagagtgtcaacgtgttatgggcgatggtgttaccaccttctccgtttttgggctttttgatggacacaatggttctgcagcagctatctacactaaagagaaccttttgaataatgtattagctgcaataccttctgatcttaacagagatgagtgggttgctgcacttcctagggctttggttgcaggatttgtgaaaactgataaagatttccgggaaagagcaaggacgtctggaacgactgtaacttttgtcatagtagaaggatgggtggtgagtgttgcatctgtaggtgactctcgttgcatacttgagcctgctgagggcggtgtctattatttgtctgctgatcatcggcttgaaataaacgaagaagagcgagatcgagtcactgcaagtggtggtgaagttggtcggttaaatactggtggcggtactgagattggtcctctgagatgttggcctggtggtctgtgtctctcaagatccattggagatctggatgttggcgaatacattgttccagttccttatgtaaagcaagtcaagttgtcttcagctggtggtcgactgatcatctcaagtgatggtgtgtgggatgcaatatctgcagaagaggctcttgattgttgccgggggttgccacctgaatcttctgcggagcatatcgttaaagaagctgtgggtaaaaaaggtattcgtgatgatacaacctgtattgttgttgatatattgccactagaaaaaccggctgcttccgtgccgcctccaaaaaagcaaggaaaaggaatgttaaagtccatgttcaaaaggaaaacatctgactcctcttctaatatcgagaaagagtacgcagaacctgatgtagttgaagaactctttgaagagggctctgctatgctatcagagagattagacacaaagtacccgctttgcaatatgtttaagttgttcatgtgtgctgtgtgtcaagtagaagtgaaacctggagaaggtgtctcgatccatgccgggtcggataattgccgtaagcttcgtccctgggatggtccattcctttgtgcaagttgccaagataagaaagacgcaatggaagggaaaagatcatcgggagatagacatagtagtgaaagcgactag

SEQ ID NO: 18185 - protein, 428 aa, Arabidopsis thaliana
MSTKGEHHTVPLSVLLKRESANEKIDNPELIHGQHNQSKKGEDFTLVKTECQRVMGDGVTTFSVFGLFDGHNGSAAAIYTKENLLNNVLAAIPSDLNRDEWVAALPRALVAGFVKTDKDFRERARTSGTTVTFVIVEGWVVSVASVGDSRCILEPAEGGVYYLSADHRLEINEEERDRVTASGGEVGRLNTGGGTEIGPLRCWPGGLCLSRSIGDLDVGEYIVPVPYVKQVKLSSAGGRLIISSDGVWDAISAEEALDCCRGLPPESSAEHIVKEAVGKKGIRDDTTCIVVDILPLEKPAASVPPPKKQGKGMLKSMFKRKTSDSSSNIEKEYAEPDVVEELFEEGSAMLSERLDTKYPLCNMFKLFMCAVCQVEVKPGEGVSIHAGSDNCRKLRPWDGPFLCASCQDKKDAMEGKRSSGDRHSSESD

SEQ ID NO: 18186 - DNA, 1386 bp, Oryza sativa
  CDS (1)..(1386)
atggcggcggcggcggcggcggcgacggtggaggcggtgggggtggcgggggggaggaggaggcggagcgggagcgtggcgctcggggacctgctgcggcgtgaggcgtcggcggagcgcgcttcggcgtcggcgtcggcgggtgcgggcgggcgggagcgggagcggcggcccagcgtcgcggcggggcaggcgtgtagggctaagaagggggaggacttcgcgctgctcaagccggcctgcgagcgcctcccggccggcggcgcccccttctccgccttcgccctgttcgatgggcacaacgggagcggcgccgcggtgtacgccaaggagaatatcctcagcaacgtcatgtgctgcgttcctgccgatctgagcggcgacgagtggctcgcagcgctcccgagggcgctggtggccgggttcgtcaagacggacaaggattttcaaacaagagcccattcttcaggaacaaccgtgacgtttgtcataatcgatgggtacgttgtgaccgttgcatccgttggcgattcgcggtgcgtccttgaagctgagggtaccatttaccatttgtccgctgaccatcgcttcgatgctagcgaagaggaggttggacgtgtaacagaatgcggaggtgaagttggaaggctaaatgttgtcggcggagctgagattgggccacttagatgttggcctggtggcttgtgcctatcaagatcaattggtgatcaggatgtaggtgaatttatcattcccgtgccttatgtgaagcagatcaagctatcaagtgctggaggcagaatcattatttcaagtgatggtgtttgggatgccttgactgtggatacggcttttagttgtgcacgagggcttcctccagaagctgcagcggatcaaattgtcaaagaagcaattgcatcaaaaggattgagagatgatacgacttgtattgtcattgacataatacctccagaaaaaataagccccactgtgcaacctgcaaaaaaggcagggaaaggacttttcaaaaatatcttttacaagaaagcaacatcagactcaccatgtcatgcagataaggaccaatgtacccagccagatttggtggaggaagtctttgaggatggatgtccttccctttcaagacggctagattctgaatatccagttcggaatatgttcaagctcttcatatgtgcaatttgtcaagtagagttagagtctggtcagggtatatccatacatgagggtttgtcaaagtcaggaaagctgcgtccatgggatgggcctttcctttgccacagttgccaggaaaagaaagaagcaatggaaggaaaacgtcactcacgagattcctcctcaagaaacagtgggtcaagtgaatag

SEQ ID NO: 18187 - protein, 461 aa, Oryza sativa
MAAAAAAATVEAVGVAGGRRRRSGSVALGDLLRREASAERASASASAGAGGRERERRPSVAAGQACRAKKGEDFALLKPACERLPAGGAPFSAFALFDGHNGSGAAVYAKENILSNVMCCVPADLSGDEWLAALPRALVAGFVKTDKDFQTRAHSSGTTVTFVIIDGYVVTVASVGDSRCVLEAEGTIYHLSADHRFDASEEEVGRVTECGGEVGRLNVVGGAEIGPLRCWPGGLCLSRSIGDQDVGEFIIPVPYVKQIKLSSAGGRIIISSDGVWDALTVDTAFSCARGLPPEAAADQIVKEAIASKGLRDDTTCIVIDIIPPEKISPTVQPAKKAGKGLFKNIFYKKATSDSPCHADKDQCTQPDLVEEVFEDGCPSLSRRLDSEYPVRNMFKLFICAICQVELESGQGISIHEGLSKSGKLRPWDGPFLCHSCQEKKEAMEGKRHSRDSSSRNSGSSE

SEQ ID NO: 18188 - DNA, 1296 bp, Oryza sativa; identical to SEQ ID NO: 968
  CDS (1)..(1296)

SEQ ID NO: 18189 - protein, 431 aa, Oryza sativa; identical to SEQ ID NO: 969

SEQ ID NO: 18190 - DNA, 1314 bp, Zea mays; identical to SEQ ID NO: 1470
  CDS (1)..(1314)

SEQ ID NO: 18191 - protein, 437 aa, Zea mays; identical to SEQ ID NO: 1471

SEQ ID NO: 18192 - DNA, 1290 bp, Brassica napus; identical to SEQ ID NO: 992
  CDS (1)..(1290)

SEQ ID NO: 18193 - protein, 429 aa, Brassica napus; identical to SEQ ID NO: 993

SEQ ID NO: 18194 - DNA, 1281 bp, Glycine max
  CDS (1)..(1281)
atgagcacaactgaattatctaatatgaagcaacctcctgttcccctggcaaccctgattggccaggagctacgaaatggaaaaatcgaaaaaccttttgtgaagtatgggcaggctggcctggcaaagaaaggagaagattactttttaatcaaaacagattgccagagagttccaggggattcatcaacactcttttctgtctttgcgatctttgatgggcacaatggtatatctgctgctatttttgcgaaggaaagcatactaagtaatgttttgagtgcaataccacaagatatcagtagggatgagtggcttcaagctctgcctcgtgctctagttgttggttttgtaaaaactgacatagagtttcagaaaaaaggggaaacttctggaacaacagctacatttgttctggttgatggatggactgttactgttgcatctgttggggattcccgttgcatattagatactcagggaggtgttgtttctctcttgacagttgatcacagactggaagagaatgcagaagagagggagcgcgttactgccagcggtggtgaagtaggaagactcaatgtatttggaggcaatgaggttgggcctcttcgctgctggccaggtggattgtgcctatctagatctataggtgacacagacgtgggagaatttattgtgccaataccacatgttaagcaagtgaagctttcaaatgctggtggaaggcttattatagcttctgatggtatttgggatgctttatcatctgatatggctgctaagtcttgtcggggtctacctgcagagcttgctgcaaaactagtggttaaggaagctctaaggtcaagaggcctcaaggatgatacaacttgccttgttgtagatattattccttcggacctccctgtattaccaccaattccaagaaagaaacataatatgctaacttcgcttctattttttggaaagaaatctgagaactctgtgaacaaagctaccaataagctttctgcagttggtgttgtggaggagttatttgaagagggttctgcaatgcttaccgaaaggctaggtaaggattttccgcttaataaaaattctggtattttccgttgtgcggtttgccaagtggaccaaccccctggtgatgatggtttatcagtgaactctgggccttttttctctccagcatctagtccattcctctgcacaaactgtcagaagaagaaagatgccatggaaggaaaaaggcctagcagagcctccattacagcatag

SEQ ID NO: 18195 - protein, 426 aa, Glycine max
MSTTELSNMKQPPVPLATLIGQELRNGKIEKPFVKYGQAGLAKKGEDYFLIKTDCQRVPGDSSTLFSVFAIFDGHNGISAAIFAKESILSNVLSAIPQDISRDEWLQALPRALVVGFVKTDIEFQKKGETSGTTATFVLVDGWTVTVASVGDSRCILDTQGGVVSLLTVDHRLEENAEERERVTASGGEVGRLNVFGGNEVGPLRCWPGGLCLSRSIGDTDVGEFIVPIPHVKQVKLSNAGGRLIIASDGIWDALSSDMAAKSCRGLPAELAAKLVVKEALRSRGLKDDTTCLVVDIIPSDLPVLPPIPRKKHNMLTSLLFFGKKSENSVNKATNKLSAVGVVEELFEEGSAMLTERLGKDFPLNKNSGIFRCAVCQVDQPPGDDGLSVNSGPFFSPASSPFLCTNCQKKKDAMEGKRPSRASITA

SEQ ID NO: 18196 - DNA, 1296 bp, Glycine max; identical to SEQ ID NO: 1016
  CDS (1)..(1296)

SEQ ID NO: 18197 - protein, 431 aa, Glycine max; identical to SEQ ID NO: 1017

SEQ ID NO: 18198 - DNA, 1290 bp, Glycine max
  CDS (1)..(1290)
atgagtaggatagaactatcgagggcgaagtcagcgccggttccattggggactctgattggtcgtgagcttcgaaatggaaaagttgaaaaaccttttgtgaagtatggacaagctggattggccaagaaaggagaagattactttctgatcaagacagattgcctcagggttcccggggatgcatcaacggcgttttctgtctttgcggtctttgatgggcataacggtatatcagctgctatttttgcgaaggaaaacatgctaagtaatgttttgagtgcaatacctcaagatattagcagggatgagtggcttcaggctctgcctcgtgctctagttgttggttttgtaaaaactgacatagagtttcagaaaaaaggggaaacttctggaacaacagctacatttgttctggttgatggatggactatcactgttgcatctgtgggagattcccgttgcatattagatactcaaggaggtgttgtttctctcttgacagttgatcacagactggaagaaaatgcagaagagagggaacgcgttactgccagcggtggtgaagtaggaagactcaatgtatttggaggcaatgaggtagggcctcttcgctgctggccaggtggattgtgcctatctagatcaataggtgacacagacgtgggagaatatattgtcccaataccacatgtcaagcaagtgaagctatcaaatgctggtggaagacttattatagcttctgatggtatttgggatgctttatcatctgatatggctgctaagtcttgtcggggtgtacctgcagagcttgctgcaaaactagtggttaaggaagctctaaggtcaagaggcctcaaggatgatacaacttgccttgttgtagatattattccttcggacctccctgtattaccaccaattccaagaaagaaacataatatgctaacttcgcttctattttttggaaagaaatctgagaactctatgaacaaagctaccaataagctttctgcagttggtgttgtggaggagttatttgaagagggttctgcaatgcttacagaaaggctaggtaaggatttcccgcttaacaagaattctggtattttccgttgtgcggtttgccaaatggaccaaccccctggtgatggtttatcaatgaactctgggccttttttctctcctgcatctaatccatgggaaggcccattcctctgcacaaactgttggaagaagaaggatgccatggaaggaaaaaagcctagcagacccaccgttacagcataa

SEQ ID NO: 18199 - protein, 429 aa, Glycine max
MSRIELSRAKSAPVPLGTLIGRELRNGKVEKPFVKYGQAGLAKKGEDYFLIKTDCLRVPGDASTAFSVFAVFDGHNGISAAIFAKENMLSNVLSAIPQDISRDEWLQALPRALVVGFVKTDIEFQKKGETSGTTATFVLVDGWTITVASVGDSRCILDTQGGVVSLLTVDHRLEENAEERERVTASGGEVGRLNVFGGNEVGPLRCWPGGLCLSRSIGDTDVGEYIVPIPHVKQVKLSNAGGRLIIASDGIWDALSSDMAAKSCRGVPAELAAKLVVKEALRSRGLKDDTTCLVVDIIPSDLPVLPPIPRKKHNMLTSLLFFGKKSENSMNKATNKLSAVGVVEELFEEGSAMLTERLGKDFPLNKNSGIFRCAVCQMDQPPGDGLSMNSGPFFSPASNPWEGPFLCTNCWKKKDAMEGKKPSRPTVTA

SEQ ID NO: 18200 - DNA, 1284 bp, Brassica napus
  CDS (1)..(1284)
atgagtccgtcgaaagcatcgaggacgaaagagtcgcttgtccctcttgcgacccttattggtagggagctgaggagcgagaagctggagaagcctttactcatctatggccaagctgctctcgctaagaaaggagaagacttttttctgattaagactgattgtgagagggttcctggtgatccttcctccgccttctctgttttcgggatatttgatggacataatggtaactcggctgctatatatactaaggaacgtcttttggataatgtggtgagtgctatccctcagggtgcgagtagggaagagtggcttcaagctcttcctagggctcttgttgctgggtttgtcaagaccgacattgagtttcagcagaaaggggagacttctgggacaacggtgacatttgttataattgatggctggacgatcactgtcggctctgttggggactcacgctgcatattagacacccaaggtggtgtggtttctctgctgactgtcgatcacaggctggaagagaacgttgaagagagggaacgtgtaactgccagtgggggtgaggtcggaaggctcaatgtttttggtggcaatgaggtcggcccacttcgatgctggcctggtggtttgtgtctttcgaggtctattggggatactgatgtgggagaatatattgtcccaataccgcatgttaagcaagtgaaactttcagatgctggagggaggctcattatagcttcagatggtatatgggacatactgtcttctgacatggctgccaaagcttgtcgtggtttatccgccgaacttgctgctaaacttgttgttaaggaagcattgcgaacaaaagggttgaaggatgatactacttgtgtagttgttgacatagttccatctgatcatcttacctcagctccaactcctaagaagaaacagaacacattcactgcatttctttctaagaaaaagcatactgataccaacaacaagaacggaaacaagctttcttctgttggagttgaagagttgtttgaagaaggttctgctatgcttgcagatagattgggaaaggatcttccttcgaatacagacactggcctcttaaaatgtgctgtatgccaagtagaccaatctccagctgaagctctatcaagcaacgagggttctatcatctcctcagcatctaagcgatgggaaggtcccttcctgtgcacagtatgcaagaaaaagaaagacgccatggaaggaaaaagaccaagcaaaggttcagtgaccacttga

SEQ ID NO: 18201 - protein, 427 aa, Brassica napus
MSPSKASRTKESLVPLATLIGRELRSEKLEKPLLIYGQAALAKKGEDFFLIKTDCERVPGDPSSAFSVFGIFDGHNGNSAAIYTKERLLDNVVSAIPQGASREEWLQALPRALVAGFVKTDIEFQQKGETSGTTVTFVIIDGWTITVGSVGDSRCILDTQGGVVSLLTVDHRLEENVEERERVTASGGEVGRLNVFGGNEVGPLRCWPGGLCLSRSIGDTDVGEYIVPIPHVKQVKLSDAGGRLIIASDGIWDILSSDMAAKACRGLSAELAAKLVVKEALRTKGLKDDTTCVVVDIVPSDHLTSAPTPKKKQNTFTAFLSKKKHTDTNNKNGNKLSSVGVEELFEEGSAMLADRLGKDLPSNTDTGLLKCAVCQVDQSPAEALSSNEGSIISSASKRWEGPFLCTVCKKKKDAMEGKRPSKGSVTT

SEQ ID NO: 18202 - DNA, 1290 bp, Zea mays
  CDS (1)..(1290)
atgacgaccgccgcgagggagaggcgcctgccgccgacgctgcccctggccacgcttatcggtcgcgagctccgtgcggggggctccgagcgcccggccctgcgctacggccacgccggcttcgccaagcgcggcgaggactacttcctcgtcaagcccgactgcgtccgcgtccccggggaccccgcatcggcgttctcagttttcgccgtgttcgacggccacaacggcgtgtcggcggcggtctatagcaaagagcatctgctcgagcacgtcatgagcgcgctgccgccggacatcgggcgcgacgactggctgcaggcgctgccgcgcgctctcgtcgccggctttgtcaaggccgacattgatttccagcgcaagggggaggtgtcaggaaccacggcgacactggtggtcatcgatgggttcacggtcacagtggcgtcggtgggagactcgcgctgcatcctggacacgcagggcggcgagttgcagctgctaaccgtggaccaccgcctggaggagaatgcagaggagcgggagcgcgtcacggccagcggtggggaagtaggccggctcaatctcttcggtggtcaggaggttggtcctctccggtgctggcctggtggcttgtgcctttcaagatccattggggacatggatgttggggagtacattgtgcccattccacatctcaagcaagtcaagctatcaaacgctggaggaaggctgataatagcatctgatggcatatgggacgcgttatccaatgaagcagctgcaaaagcatgcagaggattgcctgcagaactggcagcgaagcttgtcgttaagcaagctctgaaaacaagcgggctaaaggatgacaccacctgtgttgtagttgacattatcccatccgatcatttgacatcaccacaattgtctccaaagaaaaatcataacaagttgaagtcactttttcgtagaaggtcgcatagttctgttggaaagctcgggggcaagtctgcctccattggttctgtggaggagttatttgaagaaggctctgcaatgttagaagaaaggttgggcaggaatttgtctttgaaagcagtttcagcaccttttcgctgtgcaatctgccaagtggaccaagagcccttcgaagatttgatgagagataatggaggtggttactgctcttccccatgcgctccatggggtggtccatatctctgtttggactgtcggaaaaagaaagatgcaatggaaggtaaaagatctagctgctccacagcatgcaggtga

SEQ ID NO: 18203 - protein, 429 aa, Zea mays
MTTAARERRLPPTLPLATLIGRELRAGGSERPALRYGHAGFAKRGEDYFLVKPDCVRVPGDPASAFSVFAVFDGHNGVSAAVYSKEHLLEHVMSALPPDIGRDDWLQALPRALVAGFVKADIDFQRKGEVSGTTATLVVIDGFTVTVASVGDSRCILDTQGGELQLLTVDHRLEENAEERERVTASGGEVGRLNLFGGQEVGPLRCWPGGLCLSRSIGDMDVGEYIVPIPHLKQVKLSNAGGRLIIASDGIWDALSNEAAAKACRGLPAELAAKLVVKQALKTSGLKDDTTCVVVDIIPSDHLTSPQLSPKKNHNKLKSLFRRRSHSSVGKLGGKSASIGSVEELFEEGSAMLEERLGRNLSLKAVSAPFRCAICQVDQEPFEDLMRDNGGGYCSSPCAPWGGPYLCLDCRKKKDAMEGKRSSCSTACR

SEQ ID NO: 18204 - DNA, 1323 bp, Zea mays
  CDS (1)..(1323)
atggagatgcacgccgacgtcgacgggtgcagcgtgcccctggccgtgctcctcaagcgggagctgtgcaaccagaaggtggagaggccggacatcctgttcggggaggccaacaagagcaagaaaggggaggacttcacgctcctcgtgcccaggtgccaccgcaccccgggcggcagtggcggcggcgagaatgccggcgacgacgacaccatttccgtatttgcgattttcgacggacacaatggctctgcagctgccatatacacccgggagaatctaataagcagtgtgttggctgctattcctccaaatctcacaagtgaggagtggaaagctgcgctgccaagggcactagttgctggttttgtaaaaacagataaaaacttccaaagaaaagctgcacgctcagggaccactgtgacttttgttataatagatggatgggttgtcactgtagcatcagttggcgattcacgatgcattctagaatctgctgagggttcaatatattttttatcagcagatcatcgcctggatgctaatgaagaggaggtggagcgtgtaacagcaagtggtggtgaagttgggagaataaatatcgctgggggtgccgggattggtccactcagatgctggccaggtggattgtgtttatcaaggtcaataggtgatatcgacgtcggggaatttatagttcctgtcccacacgtgaagcaagtaaagttgtccaatgctggtgggcggcttgtcattgccagtgatggtgtgtgggatgcactgcgctttcaagaggctctgaactacaccaggggcctgccagctgaagctgctgctaatcgaattgttaaggaagctgtcacttcgaagggattaagagatgatactacttgcatagtagttgatatactacctccagagaagttaagccccccactaaagagacctggaaaaggagtcatcaaagctctgttccggcggaggccctctgatgaaatgtctgaagatcagatggacagaggatgtttagaaactgatgttgtggaggaaatatacgaggagggctctgcaatgcttgctcgaaggttgaatataaattacccagaaggaaatatgttcaagctgcatgattgtgctgtctgccaattggagatgaaacctggtgagggcacctctgttcatggtaacatgcccaagcattcaagagttgacccctggggtggcccttttctctgttcctcctgtcaattgaaaaaggaggccatggaagggaagctacattcaagaaattcccaatctgctgttcaacctatgcctaagtag

SEQ ID NO: 18205 - protein, 440 aa, Zea mays
MEMHADVDGCSVPLAVLLKRELCNQKVERPDILFGEANKSKKGEDFTLLVPRCHRTPGGSGGGENAGDDDTISVFAIFDGHNGSAAAIYTRENLISSVLAAIPPNLTSEEWKAALPRALVAGFVKTDKNFQRKAARSGTTVTFVIIDGWVVTVASVGDSRCILESAEGSIYFLSADHRLDANEEEVERVTASGGEVGRINIAGGAGIGPLRCWPGGLCLSRSIGDIDVGEFIVPVPHVKQVKLSNAGGRLVIASDGVWDALRFQEALNYTRGLPAEAAANRIVKEAVTSKGLRDDTTCIVVDILPPEKLSPPLKRPGKGVIKALFRRRPSDEMSEDQMDRGCLETDVVEEIYEEGSAMLARRLNINYPEGNMFKLHDCAVCQLEMKPGEGTSVHGNMPKHSRVDPWGGPFLCSSCQLKKEAMEGKLHSRNSQSAVQPMPK

SEQ ID NO: 18206 - DNA, 1455 bp, Zea mays
  CDS (1)..(1455)
atgtcgtcgtcgtctgcgtcatcttcggcggcggcgcaccaccagcagcattaccggcggcagacaggagggagcggtctcgtgccgctcgccgcgctcatcaaggaggaggcccgcacggagcgccaatccatagccggcggcgaaagcaggatctccgcgcgcgacgatgacgcggcaggagtaggaagctccggcgtaggaggggaggcggcggaggcggcggtggagtcgcggctggagcgcccgctgctgcgctatgggtgcgccgctcagtgcaaaaagggcgaggacttctttttgctcagaacggactgtcttcgtcccgccatctccgtctcctcctcggcctccccgcaccccatcttcgccgtattcgctatacttgatggccataatggtaacgcagccgcaatatacacaagggacaatttgctcaaccatgtccttagtgctatgccacgggggctgtccagggaggagtggttgcacatgttgccccgagcactggttgcagggtttgttaagacggacaaggagttccagagcaaagggcaaacttctggcaccaccgctacatttgtgataattgatgggtggactatcactgttgcctctgttggtgattctcgctgtattttagatgctcagggtggggctgtttctttgcttactgtggatcacagactagaagaaaatgttgaggagagggagcgcgttacagcaagtggaggtgaagttggaagactcagtgttgttggtggagcagagattggtccgctacgatgctggcctggaggtctatgcttatcaagatccattggagatatcgatgttggcgaatttattgtccctgttccatatgtgaagcaagtgaagttgtcaaatgctggaggaagacttattattgcttcagatggcatttgggatgcattatcctcagaagccgctgctaagtcttgcagaggtttgcctgctgagcttgccgcaaagcaagttgttaaggaggcactcagcacaagaggcctaaaggatgatacaacttgcattgttgttgacataatcccacctggtcaaacaatacggcctctgtctcctcctaaaaagacgagcaagctgaagtcttttatttttagaaagaaagcgaaggacccttctcagaagttgactaaacagcattcagctgttggtatcgttgaagagatatttgaagaaggttcagcgatgctatcagaaaggttaggtcctgatttggatggcaggagaacctcaagcctgtttacatgtgccatctgccagttagacctggagccaagtgaaggcatttcggtgcatgctggatcgatcttctcttcgacctccaggccatgggaaggcccattcctctgctcggactgccgtgagaagaaggatgccatggaaggcaaacggcccagtggcgtcaaggttctgtag

SEQ ID NO: 18207 - protein, 484 aa, Zea mays
MSSSSASSSAAAHHQQHYRRQTGGSGLVPLAALIKEEARTERQSIAGGESRISARDDDAAGVGSSGVGGEAAEAAVESRLERPLLRYGCAAQCKKGEDFFLLRTDCLRPAISVSSSASPHPIFAVFAILDGHNGNAAAIYTRDNLLNHVLSAMPRGLSREEWLHMLPRALVAGFVKTDKEFQSKGQTSGTTATFVIIDGWTITVASVGDSRCILDAQGGAVSLLTVDHRLEENVEERERVTASGGEVGRLSVVGGAEIGPLRCWPGGLCLSRSIGDIDVGEFIVPVPYVKQVKLSNAGGRLIIASDGIWDALSSEAAAKSCRGLPAELAAKQVVKEALSTRGLKDDTTCIVVDIIPPGQTIRPLSPPKKTSKLKSFIFRKKAKDPSQKLTKQHSAVGIVEEIFEEGSAMLSERLGPDLDGRRTSSLFTCAICQLDLEPSEGISVHAGSIFSSTSRPWEGPFLCSDCREKKDAMEGKRPSGVKVL

SEQ ID NO: 18208 - DNA, 1335 bp, Zea mays
  CDS (1)..(1335)
atgtcggcgtcgcggagcgggaggatcaggcgggccgggagcgtggcgctcggggactttctgcggcgggaggcgtcggcggagcgggccgcgttgggaggcggcgagcggccctcggtcgcggcggggcaggcctgccgggcgaagaagggcgaggacttcgcgctgctcaagcccgcctgcgagcgacgccccggcgcgccgtccacctccttctccgccttcgccctgttcgacgggcataacgggagcgccgcagcggtgtacgccgaggagcacctcctcgccaacgtgctcggctgcgtcccggccgatctgagcagggacgactggctcgccgcgctcccaagggcgctcgtcgccgggttcgtcaagaccgacaaggattttcaaactaaagctcattcctcggggacaaccgtgacacttgccataattgatggctccgttgtaactgttgcgtccgttggtgactcacgttgtgtccttgatgctgcgggatccatctactatttgtcggctgaccaccgctttgacgctaatgaagaggaggttggacgtgtaaccgaatgcggaggtgaagttggaaggctaaatgttgtcggtggtgctgagattggtccccttagatgttggccaggtggtctatgcctctcaagatcgattggtgatcaggacgtaggtgaatttatcattccggttccttatgtgaagcaaattaagctgtctaacgctggaggtcgtcttattatttcaagtgacggtgtttgggatgctttgactgcggaaatggcttttagatgtgcacgggggcttcctcctgaggctgcagccgagcaaattgttaaagaagcagttgaatcaaaaggattgagagatgatacaacttgcattgtcattgacataataccaccagagaaacaaaaatgcactatagaatctccaaaaacgccaggaaaaggccttgtccttctaaaaaatttcttcttaaggaaaacggcatctggttcattgtctctcgctgacaaggataattatcccgagccagatttcgtggaggaggtctttgaggatggatgcccatccctttcgaggaggcttaattctgaatatcctgtccgagatatgttcaagctttttgcatgtgcaatttgtcaaattgacttggagtctggccaaggcatatccatacacgagggttcgtcaaagacagggaagctgcgtccctgggatggccctttcctttgtcacagttgccaggaaaagaaagaggcgatggaggggaagcgtcactcgcgagactcctcgtcaagaaatagcgggtcaagtgaatag

SEQ ID NO: 18209 - protein, 444 aa, Zea mays
MSASRSGRIRRAGSVALGDFLRREASAERAALGGGERPSVAAGQACRAKKGEDFALLKPACERRPGAPSTSFSAFALFDGHNGSAAAVYAEEHLLANVLGCVPADLSRDDWLAALPRALVAGFVKTDKDFQTKAHSSGTTVTLAIIDGSVVTVASVGDSRCVLDAAGSIYYLSADHRFDANEEEVGRVTECGGEVGRLNVVGGAEIGPLRCWPGGLCLSRSIGDQDVGEFIIPVPYVKQIKLSNAGGRLIISSDGVWDALTAEMAFRCARGLPPEAAAEQIVKEAVESKGLRDDTTCIVIDIIPPEKQKCTIESPKTPGKGLVLLKNFFLRKTASGSLSLADKDNYPEPDFVEEVFEDGCPSLSRRLNSEYPVRDMFKLFACAICQIDLESGQGISIHEGSSKTGKLRPWDGPFLCHSCQEKKEAMEGKRHSRDSSSRNSGSSE

SEQ ID NO: 18210 - DNA, 1290 bp, Zea mays
  CDS (1)..(1290)
atggcgaccgccgcgagggagaggcgcctgccgccggcgctgcccctggcgactctcatcggccggaagctccgcacggggggctccgagcgcccggccctgcgctacggacacgccggctttgccaagcgtggagaggactacttcctcgtcaagcccgactgcctccgcgtccccggggaccccgcatccgcgttctccgtctttgccgtgttcgacggccacaacggcgtgtcggcggcggtctacagcaaggagcatctgctcgagcacgtcatgagcgcgctgtcgccggacatcggccgcgaagactggctgcaggcgctgccgcgcgcgctcgtcgccggcttcgtcaaggccgacatcgatttccagcgcaagggggaggtgtccggaaccacggcgacactggtggtcatcgatgggttcacggtcacggtggcgtcggtgggtgactcgcgctgcatcctggacacgcagggcggcgagttgcagctgctaaccgtggaccaccgcctggaggagaatgcagaggagcgggagcgcgtcacggccagcggtggggaagtaggccggctcaatctctttggcggccaggaggtcggccctctccggtgctggcctggtggcttgtgcctctcaagatccatcggggacatggatgttggagagttcattgtgcccattccacatgtcaagcaagtcaagctatcaaacaccggaggaagactgataatagcatctgatggcatatgggacgcgttgtccaatgaagcagctgcaaaagcatgcagaggattgcctgcagaactggcagcgaagcttgtcgttaagcaagctctgaaaacaagcgggctaaaggatgacaccacctgtgtcgtagttgacattatcccgtccgatcatctgacatcgccacaattgtctccaaagaaaaatcagaacaagttgaagtcactttttcgtagaaggtcgcatagttcagttagaaagcttggaggcaagtctgcctccattggttccgtggaggagttatttgaagaagggtctgcaatgctagaagaaaggttgggtaggaatctgtccttgaaagcagcttcaccacctttccgctgtgcaatctgccaagtggaccaagagcccttccaagatttgatggcagataatggaggtggttactgctcttcccagtacgctccatggggtggcccatgtctctgtttggactgtcggaaaaagaaagatgcaatggaaggaaaaagatgtagccgctctacagcatgcaggtga

SEQ ID NO: 18211 - protein, 429 aa, Zea mays
MATAARERRLPPALPLATLIGRKLRTGGSERPALRYGHAGFAKRGEDYFLVKPDCLRVPGDPASAFSVFAVFDGHNGVSAAVYSKEHLLEHVMSALSPDIGREDWLQALPRALVAGFVKADIDFQRKGEVSGTTATLVVIDGFTVTVASVGDSRCILDTQGGELQLLTVDHRLEENAEERERVTASGGEVGRLNLFGGQEVGPLRCWPGGLCLSRSIGDMDVGEFIVPIPHVKQVKLSNTGGRLIIASDGIWDALSNEAAAKACRGLPAELAAKLVVKQALKTSGLKDDTTCVVVDIIPSDHLTSPQLSPKKNQNKLKSLFRRRSHSSVRKLGGKSASIGSVEELFEEGSAMLEERLGRNLSLKAASPPFRCAICQVDQEPFQDLMADNGGGYCSSQYAPWGGPCLCLDCRKKKDAMEGKRCSRSTACR

SEQ ID NO: 18212 - DNA, 1290 bp, Zea mays
  CDS (1)..(1290)
atggcgaccgccgcgagggagaggcgcctgccgccggcgctgcccctggcgactctcatcggccgggagctccgcgcggggggctccgagcgcccggccctgcgctacggccacgccggctttgccaagcgtggcgaggactacttcctcgtcaagcccgactgcctccgcgtccccggggaccccgcatccgcgttctccgtctttgccgtgttcgacggccacaacggcgtgtcggcggcggtctacagcaaggagcatctgctcgagcacgtcatgagcgcgctgtcgccggacatcggccgcgaagactggctgcaggcgctgccgcgcgcgctcgtcgccggcttcgtcaaggccgacatcgatttccagcgcaagggggaggtgtccggaaccacggcgacactggtggtcatcgatgggttcacggtcacggtggcgtcggtgggtgactcgcgctgcatcctggacacgcagggcggcgagttgcagctgctaaccgtggaccaccgcctggaggagaatgcagaggagcgggagcgcgtcacggccagcggtggggaagtaggccggctcaatctctttggcggccaggaggtcggccctctccggtgctggcctggtggcttgtgcctctcaagatccatcggggacatggatgttggagagttcattgtgcccattccacatgtcaagcaagtcaagctatcaaacaccggaggaagactgataatagcatctgatggcatatgggacgcgttgtccaatgaagcagctgcaaaagcatgcagaggattgcctgcagaactggcagcgaagcttgtcgttaagcaagctctgaaaacaagcgggctaaaggatgacaccacctgtgtcgtagttgacattatcccgtccgatcatctgacatcgccacaattgtctccaaagaaaaatcagaacaagttgaagtcactttttcgtagaaggtcgcatagttcagttagaaagcttggaggcaagtctgcctccattggttccgtggaggagttatttgaagaagggtctgcaatgctagaagaaaggttgggtaggaatctgtccttgaaagcagcttcaccacctttccgctgtgcaatctgccaagtggaccaagagcccttccaagatttgatggcagataatggaggtggttactgctcttcccagtacgctccatggggtggcccatgtctctgtttggactgtcggaaaaagaaagatgcaatggaaggaaaaagatgtagccgctctacagcatgcaggtga

SEQ ID NO: 18213 - protein, 429 aa, Zea mays
MATAARERRLPPALPLATLIGRELRAGGSERPALRYGHAGFAKRGEDYFLVKPDCLRVPGDPASAFSVFAVFDGHNGVSAAVYSKEHLLEHVMSALSPDIGREDWLQALPRALVAGFVKADIDFQRKGEVSGTTATLVVIDGFTVTVASVGDSRCILDTQGGELQLLTVDHRLEENAEERERVTASGGEVGRLNLFGGQEVGPLRCWPGGLCLSRSIGDMDVGEFIVPIPHVKQVKLSNTGGRLIIASDGIWDALSNEAAAKACRGLPAELAAKLVVKQALKTSGLKDDTTCVVVDIIPSDHLTSPQLSPKKNQNKLKSLFRRRSHSSVRKLGGKSASIGSVEELFEEGSAMLEERLGRNLSLKAASPPFRCAICQVDQEPFQDLMADNGGGYCSSQYAPWGGPCLCLDCRKKKDAMEGKRCSRSTACR

SEQ ID NO: 18214 - DNA, 1455 bp, Zea mays
  CDS (1)..(1455)
atgtcgtcgtcgtctgcgtcatcttcggcggcggcgcaccaccagcagcattaccggcggcagacaggagggagcggtctcgtgccgctcgccgcgctcatcaaggaggaggcccgcacggagcgccaatccatagccggcggcgaaagcaggatctccgcgcgcgacgatgacgcggcaggagtaggaagctccggcgtaggaggggaggcggcggaggcggcggtggagtcgcggctggagcgcccgctgctgcgctatgggtgcgccgctcagtgcaaaaagggcgaggacttctttttgctcagaacggactgtcttcgtcccgccatctccgtctcctcctcggcctccccgcaccccatcttcgccgtattcgctatacttgatggccataatggtaacgcagccgcaatatacacaagggacaatttgctcaaccatgtccttagtgctatgccacgggggctgtccagggaggagtggttgcacatgttgccccgagcactggttgcagggtttgttaagacggacaaggagttccagagcaaagggcaaacttctggcaccaccgctacatttgtgataattgatgggtggactatcactgttgcctctgttggtgattctcgctgtattttagatgctcagggtggggctgtttctttgcttactgtggatcacagactagaagaaaatgttgaggagagggagcgcgttacagcaagtggaggtgaagttggaagactcagtgttgttggtggagcagagattggtccgctacgatgctggcctggaggtctatgcttatcaagatccattggagatatcgatgttggcgaatttattgtccctgttccatatgtgaagcaagtgaagttgtcaaatgctggaggaagacttattattgcttcagatggcatttgggatgcattatcctcagaagccgctgctaagtcttgcagaggtttgcctgctgagcttgccgcaaagcaagttgttaaggaggcactcaggacaagagggctaaaggatgatacaacttgcattgttgttgacataatcccacctggtcaaacaatacggcctctgtctcctcctaaaaagacgagcaagctgaagtcttttatttttagaaagaaagcgaaggacccttctcagaagttgactaaacagcattcagctgttggtatcgttgaagagatatttgaagaaggttcagcgatgctatcagaaaggttaggtcctgatttggatggcaggagaacctcaagcctgtttacatgtgccatctgccagttagacctggagccaagtgaaggcatttcggtgcatgctggatcgatcttctcttcgacctccaggccatgggaaggcccattcctctgctcggactgccgtgagaagaaggatgccatggaaggcaaacggcccagtggcgtcaaggttctgtag

SEQ ID NO: 18215 - protein, 484 aa, Zea mays
MSSSSASSSAAAHHQQHYRRQTGGSGLVPLAALIKEEARTERQSIAGGESRISARDDDAAGVGSSGVGGEAAEAAVESRLERPLLRYGCAAQCKKGEDFFLLRTDCLRPAISVSSSASPHPIFAVFAILDGHNGNAAAIYTRDNLLNHVLSAMPRGLSREEWLHMLPRALVAGFVKTDKEFQSKGQTSGTTATFVIIDGWTITVASVGDSRCILDAQGGAVSLLTVDHRLEENVEERERVTASGGEVGRLSVVGGAEIGPLRCWPGGLCLSRSIGDIDVGEFIVPVPYVKQVKLSNAGGRLIIASDGIWDALSSEAAAKSCRGLPAELAAKQVVKEALRTRGLKDDTTCIVVDIIPPGQTIRPLSPPKKTSKLKSFIFRKKAKDPSQKLTKQHSAVGIVEEIFEEGSAMLSERLGPDLDGRRTSSLFTCAICQLDLEPSEGISVHAGSIFSSTSRPWEGPFLCSDCREKKDAMEGKRPSGVKVL

SEQ ID NO: 18216 - DNA, 1341 bp, Zea mays
  CDS (1)..(1341)
atgtcttcacgctcggggtctacgagcggcgggagcaccggtggcggcagcagcgcagggggaggcgccgcggtgccgctggccttgctgctgaggcgggaggtggccagcgagcgcaccgcatcggagcgaccggagctgcactcgggcctcttcagccaggccaagaaaggcgaggacttcacattcctcaagctcgaatgcgagcgcgtccccggcgtcccgtcctcctccttctccgccttcggcctgtttgatgggcacaatgggaacggggccgcaatttacaccaaagagaatctcttgaacaacatcttgaacgcggtccctgctgatctcaacagggaagactggcttgctgcactcccaagagcgctggttgctgcattcgttaaaacggataaagatttccagactaaagcacgttcttcagggacaaccgtgacatttgtcataatagatggattgttcatcactgttgcatcagttggcgattcccgttgtgtactacaagctgaaggttcaatttaccatttatcctctgatcatcgatttgatgcaagtaaagaggaggttgatcgtgtaacaaaatgtggaggtgatgttggaaggctaaatgttgttggtggcgctgagattggtcctcttaggtgttggcctggaggtttgtgcctatctaggtcaataggagatcaagatgttggtgaatttattgttccagttcctcttgtgaagcaagtaaagctgtctactgcgggaggccgacttattattgcaagtgatggtgtttgggatgcattatctccagaagtagcttttaactgttcacgtgaacttcctccagtgcctgcagctgagcaaatcgttaaaactgctgtgcaatcaaaaggactgagggatgataccacctgtattgttgttgatataatagcagaaaaaaccaacccttccatgccacttcctaaaaggcaaccgggaattggtgtcttcaaaaatatgttcggcaagaaaaaatcatcggattcatcatcccattcccattcagatagagaatatatggatccagataacgtggaggaaatatttgaggatgggtgtgcgcttctttctagacggctggattctgaataccctgttcgaaatatgttcaaactgttcatatgtgccatttgtcaagtagagttaaagccaaaccaaggtatatctgtacatgaagattcatcacaacctgggagcttgcgtcgctgggatggtccattcctttgccagagctgtcaggaaaagaaagaagcaatggagggaaagcgtcgttcacgagattcatcaagaaacagtgggtaa

SEQ ID NO: 18217 - protein, 446 aa, Zea mays
MSSRSGSTSGGSTGGGSSAGGGAAVPLALLLRREVASERTASERPELHSGLFSQAKKGEDFTFLKLECERVPGVPSSSFSAFGLFDGHNGNGAAIYTKENLLNNILNAVPADLNREDWLAALPRALVAAFVKTDKDFQTKARSSGTTVTFVIIDGLFITVASVGDSRCVLQAEGSIYHLSSDHRFDASKEEVDRVTKCGGDVGRLNVVGGAEIGPLRCWPGGLCLSRSIGDQDVGEFIVPVPLVKQVKLSTAGGRLIIASDGVWDALSPEVAFNCSRELPPVPAAEQIVKTAVQSKGLRDDTTCIVVDIIAEKTNPSMPLPKRQPGIGVFKNMFGKKKSSDSSSHSHSDREYMDPDNVEEIFEDGCALLSRRLDSEYPVRNMFKLFICAICQVELKPNQGISVHEDSSQPGSLRRWDGPFLCQSCQEKKEAMEGKRRSRDSSRNSG

SEQ ID NO: 18218 - DNA, 1341 bp, Zea mays; identical to SEQ ID NO: 1604
  CDS (1)..(1341)

SEQ ID NO: 18219 - protein, 446 aa, Zea mays; identical to SEQ ID NO: 1605

SEQ ID NO: 18220 - DNA, 1332 bp, Zea mays
  CDS (1)..(1332)
atgtcggcgtcgcggagcgggaggcggcggaccggtagcgtggcgctcggagaccttctgcagcgggaggcgtcggcggagcgggccgcgttgggatgcggcgagcggccctcggtcgcggcggggcaggcctgccgggcgaagaaaggcgaggacttcgcgctgctcaagcccgcctgcgagcgacgccccggcgcgccgtccacctccttctccgccttcgccctgttcgatgggcacaacgggagcgccgccgcggtgtacgccaaggagcacctcctcggcaacgtgctcagctgcgtcccgaccgatctgacctgggacgactggctcgccgcgctgccgagggccctcgtcgctgggttcgtcaagaccgacaaggatttccagactaaagctcattgctcggggacaaccgtgacgcttgccataattgatggctccgttgtaactgttgcatctgttggtgattcacgttgtgtccttgaagctgagggatccatctactatttgtcggctgaccatcgcttcgacgctaatgaagaggaggttggacgtgtaaccgaatgtggaggtgaagttggaaggctaaatgtcgtcggtggtgctgagattggtccccttagatgttggccaggtggtttatgcctctcaagatcgattggtgatcaggatgtaggtgaatttattattccggttccttatgtgaagcaaattaagctgtctaatgctggaggccgtcttattatttcaagcgacggtgtttgggatgctttgactgcagaaatggcttttaaatgtgcacgagggcttcctcctgaggccgcagctgagcaaattgttaaagaagcagttgaagcaaaaggattgagagatgatacaacttgcattgtcattgacataatatcaccagagaaaccaaaacgaactatacaatctcaaagaacgccaggaaaaggccttgtgcttctaaaaaaattctttttaaggaaaacagcatctgactcgttgtctctccctgataaggataattatcctgagccagatttagaggaggtctttgaggacggatgcccatccctttcaaggaggcttaattctgagtatcctgtccgagacatgttcaaactttttgcgtgtgcaatttgtcaaattgacttggaatctggccaaggcatatccatacacgagggtttgtcaaggccagggaagctgcgtccctgggatggccctttcctttgtcacagctgccaggaaaagaaagaggcgatggaggggaagcgccattcacgagattcctcgtcgagaaatagcgggtcaagtgaatcgtga

SEQ ID NO: 18221 - protein, 443 aa, Zea mays
MSASRSGRRRTGSVALGDLLQREASAERAALGCGERPSVAAGQACRAKKGEDFALLKPACERRPGAPSTSFSAFALFDGHNGSAAAVYAKEHLLGNVLSCVPTDLTWDDWLAALPRALVAGFVKTDKDFQTKAHCSGTTVTLAIIDGSVVTVASVGDSRCVLEAEGSIYYLSADHRFDANEEEVGRVTECGGEVGRLNVVGGAEIGPLRCWPGGLCLSRSIGDQDVGEFIIPVPYVKQIKLSNAGGRLIISSDGVWDALTAEMAFKCARGLPPEAAAEQIVKEAVEAKGLRDDTTCIVIDIISPEKPKRTIQSQRTPGKGLVLLKKFFLRKTASDSLSLPDKDNYPEPDLEEVFEDGCPSLSRRLNSEYPVRDMFKLFACAICQIDLESGQGISIHEGLSRPGKLRPWDGPFLCHSCQEKKEAMEGKRHSRDSSSRNSGSSES

SEQ ID NO: 18222 - DNA, 1314 bp, Zea mays; identical to SEQ ID NO: 1612
  CDS (1)..(1314)

SEQ ID NO: 18223 - protein, 437 aa, Zea mays; identical to SEQ ID NO: 1613

SEQ ID NO: 18224 - DNA, 22 bp, Artificial sequence
  primer
atgtcaacaaagggagaacatc

SEQ ID NO: 18225 - DNA, 21 bp, Artificial sequence
  primer
ctagtcgctttcactactatg

SEQ ID NO: 18226 - protein, 572 aa, Artificial sequence
  consensus sequence
  Variant (2)..(10): Xaa in position 2 to 10 is any amino acid
  Variant (11)..(33): Xaa in position 11 to 33 is any or no amino acid
  Variant (36)..(37): Xaa in position 36 to 37 is any amino acid
  Variant (39)..(40): Xaa in position 39 to 40 is any amino acid
  Variant (43)..(50): Xaa in position 43 to 50 is any amino acid
  Variant (51)..(87): Xaa in position 51 to 87 is any or no amino acid
  Variant (89)..(92): Xaa in position 89 to 92 is any amino acid
  Variant (94)..(98): Xaa in position 94 to 98 is any amino acid
  Variant (104)..(105): Xaa in position 104 to 105 is any amino acid
  Variant (107)..(110): Xaa in position 107 to 110 is any amino acid
  Variant (112)..(112): Xaa in position 112 is any amino acid
  Variant (113)..(113): Xaa in position 113 is any or no amino acid
  Variant (115)..(116): Xaa in position 115 to 116 is any amino acid
  Variant (118)..(122): Xaa in position 118 to 122 is any amino acid
  Variant (123)..(136): Xaa in position 123 to 136 is any or no amino acid
  Variant (139)..(139): Xaa in position 139 is any amino acid
  Variant (141)..(142): Xaa in position 141 to 142 is any amino acid
  Variant (143)..(181): Xaa in position 143 to 181 is any or no amino acid
  Variant (188)..(189): Xaa in position 188 to 189 is any amino acid
  Variant (192)..(195): Xaa in position 192 to 195 is any amino acid
  Variant (197)..(197): Xaa in position 197 is any amino acid
  Variant (200)..(201): Xaa in position 200 to 201 is any amino acid
  Variant (203)..(204): Xaa in position 203 to 204 is any amino acid
  Variant (206)..(206): Xaa in position 206 is any amino acid
  Variant (208)..(214): Xaa in position 208 to 214 is any amino acid
  Variant (217)..(217): Xaa in position 217 is any amino acid
  Variant (226)..(226): Xaa in position 226 is any amino acid
  Variant (232)..(233): Xaa in position 232 to 233 is any amino acid
  Variant (236)..(237): Xaa in position 236 to 237 is any amino acid
  Variant (238)..(240): Xaa in position 238 to 240 is any or no amino acid
  Variant (245)..(245): Xaa in position 245 is any amino acid
  Variant (247)..(247): Xaa in position 247 is any amino acid
  Variant (249)..(250): Xaa in position 249 to 250 is any amino acid
  Variant (253)..(255): Xaa in position 253 to 255 is any amino acid
  Variant (266)..(266): Xaa in position 266 is any amino acid
  Variant (268)..(270): Xaa in position 268 to 270 is any amino acid
  Variant (271)..(271): Xaa in position 271 is any or no amino acid
  Variant (273)..(276): Xaa in position 273 to 276 is any amino acid
  Variant (278)..(279): Xaa in position 278 to 279 is any amino acid
  Variant (283)..(285): Xaa in position 283 to 285 is any amino acid
  Variant (287)..(287): Xaa in position 287 is any amino acid
  Variant (290)..(291): Xaa in position 290 to 291 is any amino acid
  Variant (295)..(296): Xaa in position 295 to 296 is any amino acid
  Variant (299)..(299): Xaa in position 299 is any amino acid
  Variant (305)..(306): Xaa in position 305 to 306 is any amino acid
  Variant (309)..(309): Xaa in position 309 is any amino acid
  Variant (311)..(311): Xaa in position 311 is any amino acid
  Variant (330)..(330): Xaa in position 330 is any amino acid
  Variant (335)..(335): Xaa in position 335 is any amino acid
  Variant (337)..(337): Xaa in position 337 is any amino acid
  Variant (339)..(339): Xaa in position 339 is any amino acid
  Variant (341)..(341): Xaa in position 341 is any amino acid
  Variant (349)..(349): Xaa in position 349 is any amino acid
  Variant (357)..(357): Xaa in position 357 is any amino acid
  Variant (361)..(361): Xaa in position 361 is any amino acid
  Variant (364)..(364): Xaa in position 364 is any amino acid
  Variant (366)..(369): Xaa in position 366 to 369 is any amino acid
  Variant (371)..(374): Xaa in position 371 to 374 is any amino acid
  Variant (377)..(377): Xaa in position 377 is any amino acid
  Variant (380)..(380): Xaa in position 380 is any amino acid
  Variant (382)..(382): Xaa in position 382 is any amino acid
  Variant (385)..(387): Xaa in position 385 to 387 is any amino acid
  Variant (390)..(390): Xaa in position 390 is any amino acid
  Variant (392)..(395): Xaa in position 392 to 395 is any amino acid
  Variant (398)..(398): Xaa in position 398 is any amino acid
  Variant (404)..(404): Xaa in position 404 is any amino acid
  Variant (409)..(409): Xaa in position 409 is any amino acid
  Variant (411)..(429): Xaa in position 411 to 429 is any amino acid
  Variant (430)..(434): Xaa in position 430 to 434 is any or no amino acid
  Variant (436)..(438): Xaa in position 436 to 438 is any amino acid
  Variant (439)..(458): Xaa in position 439 to 458 is any or no amino acid
  Variant (462)..(462): Xaa in position 462 is any amino acid
  Variant (465)..(465): Xaa in position 465 is any amino acid
  Variant (467)..(467): Xaa in position 467 is any amino acid
  Variant (469)..(469): Xaa in position 469 is any amino acid
  Variant (471)..(472): Xaa in position 471 to 472 is any amino acid
  Variant (475)..(475): Xaa in position 475 is any amino acid
  Variant (476)..(517): Xaa in position 476 to 517 is any or no amino acid
  Variant (520)..(520): Xaa in position 520 is any amino acid
  Variant (523)..(525): Xaa in position 523 to 525 is any amino acid
  Variant (526)..(546): Xaa in position 526 to 546 is any or no amino acid
  Variant (548)..(548): Xaa in position 548 is any amino acid
  Variant (551)..(551): Xaa in position 551 is any amino acid
  Variant (554)..(555): Xaa in position 554 to 555 is any amino acid
  Variant (557)..(558): Xaa in position 557 to 558 is any amino acid
  Variant (559)..(564): Xaa in position 559 to 564 is any or no amino acid
  Variant (567)..(567): Xaa in position 567 is any amino acid
MXXXXXXXXXXXXXXXXXXXXXXXXXXXXXXXXPLXXLXXREXXXXXXXXXXXXXXXXXXXXXXXXXXXXXXXXXXXXXXXXXXXXXPXXXXGXXXXXKKGEDXXLXXXXCXXRXXGXXXXXXXXXXXXXXXXXXXFSXFXXXXXXXXXXXXXXXXXXXXXXXXXXXXXXXXXXXXXXXXXFDGHNGXXAAXXXXEXLLXXVXXAXPXXXXXXXWLXALPRALVAXFVKTDXXFQXXXXXSGTTXTXVXXDGXXXTVASVGDSRCXLXXXXGXXXXLXXDHRXXXNXEEXXRVTXXGGXVGRLNXXGGXEXGPLRCWPGGLCLSRSIGDXDVGEXIXPXPXVKQVKLSXAGGRLIIXSDGXWDXLXXXXAXXXXRGXLPXEXAAXXXVKXAXXXXGLXDDTTCXVVDIXPXXXXXXXXXXXXXXXXXXXXXXXXFXXXXXXXXXXXXXXXXXXXXXXXVEEXFEXGXAXLXXRLXXXXXXXXXXXXXXXXXXXXXXXXXXXXXXXXXXXXXXXXXXXCAXCQXXXXXXXXXXXXXXXXXXXXXXXXWXGPXLCXXCXXXXXXXXKKXAMEGK

SEQ ID NO: 18227 - protein, 59 aa, Artificial sequence
  protein pattern
  Variant (3)..(3): Xaa in position 3 is any amino acid
  Variant (5)..(5): Xaa in position 5 is Ile or Val
  Variant (24)..(24): Xaa in position 24 is any amino acid
  Variant (28)..(28): Xaa in position 28 is Glu or Gln
  Variant (29)..(29): Xaa in position 29 is any amino acid
  Variant (31)..(32): Xaa in position 31 to 32 is any or no amino acid
  Variant (35)..(35): Xaa in position 35 is any amino acid
  Variant (36)..(37): Xaa in position 36 to 37 is any or no amino acid
  Variant (41)..(41): Xaa in position 41 is Ile or Val
  Variant (44)..(44): Xaa in position 44 is Pro or Ser
  Variant (45)..(46): Xaa in position 45 to 46 is any amino acid
  Variant (50)..(50): Xaa in position 50 is Ile or Leu
  Variant (53)..(53): Xaa in position 53 is Ala or Ser
  Variant (57)..(57): Xaa in position 57 is Ile or Val
GGXEXGPLRCWPGGLCLSRSIGDXDVGXXIXXVPXXXVKQXKLXXXGGRXIIXSDGXWD

SEQ ID NO: 18228 - protein, 45 aa, Artificial sequence
  protein pattern
  Variant (2)..(2): Xaa in position 2 is any amino acid
  Variant (4)..(4): Xaa in position 4 is Ala or Gly
  Variant (5)..(5): Xaa in position 5 is Ile, Leu or Val
  Variant (12)..(13): Xaa in position 12 to 13 is any amino acid
  Variant (16)..(16): Xaa in position 16 is Ile or Val
  Variant (17)..(17): Xaa in position 17 is Phe or Tyr
  Variant (18)..(18): Xaa in position 18 is Ala, Ser or Thr
  Variant (19)..(19): Xaa in position 19 is Glu, Lys or Arg
  Variant (21)..(21): Xaa in position 21 is any amino acid
  Variant (22)..(22): Xaa in position 22 is Ile, Leu or Met
  Variant (23)..(23): Xaa in position 23 is Ile or Leu
  Variant (24)..(25): Xaa in position 24 to 25 is any amino acid
  Variant (26)..(26): Xaa in position 26 is Ile or Val
  Variant (27)..(27): Xaa in position 27 is Ile, Leu, Met or Val
  Variant (28)..(28): Xaa in position 28 is any amino acid
  Variant (29)..(29): Xaa in position 29 is Ala or Cys
  Variant (30)..(30): Xaa in position 30 is Ile, Leu or Val
  Variant (31)..(31): Xaa in position 31 is Pro or Ser
  Variant (32)..(32): Xaa in position 32 is any amino acid
  Variant (33)..(33): Xaa in position 33 is Cys, Asp, Gly or Asn
  Variant (34)..(34): Xaa in position 34 is any amino acid
  Variant (35)..(35): Xaa in position 35 is Cys, Gly, Asn, Ser or Thr
  Variant (36)..(36): Xaa in position 36 is any amino acid
  Variant (37)..(37): Xaa in position 37 is Asp or Glu
  Variant (38)..(38): Xaa in position 38 is Ala, Asp or Glu
  Variant (40)..(41): Xaa in position 40 to 41 is any amino acid
  Variant (42)..(42): Xaa in position 42 is Ala or Val
SXFXXFDGHNGXXAAXXXXEXXXXXXXXXXXXXXXXXXWXXXLPR

SEQ ID NO: 18229 - protein, 28 aa, Artificial sequence
  protein pattern
  Variant (2)..(2): Xaa in position 2 is Ser or Thr
  Variant (3)..(3): Xaa in position 3 is Ala or Val
  Variant (7)..(7): Xaa in position 7 is Phe or Leu
  Variant (8)..(8): Xaa in position 8 is Asp or Glu
  Variant (9)..(9): Xaa in position 9 is any amino acid
  Variant (10)..(10): Xaa in position 10 is Asn or Ser
  Variant (11)..(11): Xaa in position 11 is any amino acid
  Variant (14)..(15): Xaa in position 14 to 15 is any or no amino acid
  Variant (17)..(18): Xaa in position 17 to 18 is any or no amino acid
  Variant (21)..(21): Xaa in position 21 is Ala, Glu or Ser
  Variant (22)..(22): Xaa in position 22 is Cys or Ser
  Variant (25)..(25): Xaa in position 25 is Asp or Glu
  Variant (27)..(27): Xaa in position 27 is Gly or Ser
LXXDHRXXXXXEEXXRXXVTXXGGXVXR

SEQ ID NO: 18230 - protein, 28 aa, Artificial sequence
  protein pattern
  Variant (2)..(2): Xaa in position 2 is any amino acid
  Variant (3)..(3): Xaa in position 3 is Ile, Leu, Met or Val
  Variant (4)..(5): Xaa in position 4 to 5 is any amino acid
  Variant (7)..(8): Xaa in position 7 to 8 is any amino acid
  Variant (9)..(9): Xaa in position 9 is Ala, Cys, Gly, Asn or Ser
  Variant (10)..(10): Xaa in position 10 is any amino acid
  Variant (11)..(11): Xaa in position 11 is Ala, Cys or Ser
  Variant (12)..(13): Xaa in position 12 to 13 is Lys or Arg
  Variant (17)..(17): Xaa in position 17 is any or no amino acid
  Variant (19)..(20): Xaa in position 19 to 20 is any or no amino acid
  Variant (22)..(25): Xaa in position 22 to 25 is any amino acid
  Variant (26)..(26): Xaa in position 26 is Cys, Gly or Ser
  Variant (27)..(27): Xaa in position 27 is any amino acid
PXXXXGXXXXXXXGEDXFXXLXXXXXXR

SEQ ID NO: 18231 - protein, 15 aa, Artificial sequence
  protein pattern
  Variant (3)..(4): Xaa in position 3 to 4 is any amino acid
  Variant (6)..(7): Xaa in position 6 to 7 is any amino acid
  Variant (9)..(9): Xaa in position 9 is any amino acid
  Variant (10)..(10): Xaa in position 10 is Asp or Glu
LCXXCXXKXXAMEGK

SEQ ID NO: 18232 - protein, 16 aa, Artificial sequence
  protein pattern
  Variant (4)..(4): Xaa in position 4 is Ile, Leu or Val
  Variant (5)..(5): Xaa in position 5 is Phe or Tyr
  Variant (7)..(7): Xaa in position 7 is Asp or Glu
  Variant (9)..(12): Xaa in position 9 to 12 is any or no amino acid
  Variant (14)..(15): Xaa in position 14 to 15 is any amino acid
VEEXXEXGXXXXSXXL

SEQ ID NO: 18233 - protein, 11 aa, Artificial sequence
  protein pattern
  Variant (2)..(2): Xaa in position 2 is Ala or Gly
  Variant (6)..(6): Xaa in position 6 is Ala or Thr
  Variant (8)..(8): Xaa in position 8 is any amino acid
  Variant (9)..(9): Xaa in position 9 is Asp, Glu or Asn
AXFVKXDXXFQ

SEQ ID NO: 18234 - protein, 13 aa, Artificial sequence
  protein pattern
  Variant (3)..(3): Xaa in position 3 is Ile or Val
  Variant (6)..(6): Xaa in position 6 is Ile, Leu, Met or Val
  Variant (7)..(9): Xaa in position 7 to 9 is any amino acid
  Variant (10)..(10): Xaa in position 10 is Ala, Pro or Ser
  Variant (11)..(11): Xaa in position 11 is any amino acid
  Variant (12)..(12): Xaa in position 12 is Asp, Glu, Asn or Gln
  Variant (13)..(13): Xaa in position 13 is Ala, Asp, Gly or Ser
CAXCQXXXXXXXX

SEQ ID NO: 18235 - DNA, 1299 bp, Arabidopsis thaliana; identical to SEQ ID NO: 1835
  CDS (1)..(1299)

SEQ ID NO: 18236 - protein, 432 aa, Arabidopsis thaliana; identical to SEQ ID NO: 1836

SEQ ID NO: 18237 - DNA, 2282 bp, Glycine max
  CDS (251)..(1597)
ttgacccattgcctcaaccggataaataatgaccgagtttcataaatttgatgggcgtgtttcctcatcttcatccattcctaatccttgcttggccactttgcgcatttcaattcttctttcggttttttcctgttttgggaaattgcataatattctccttctgttctttcatttcatctactgtgccacgcgttatacgtaaacgaaatacgggggaacgagtgaaagaagaagaagaagaagaaaaatggtgattataaaccttgtgaagaagaagaagaagagcgagagagaaggaatgcgacttgggaaatacgagttgggtaggactcttggtgagggcaattttggcaaagtcaagttcgctaggaacactgattctggccaagcttttgctgttaagatcattgagaagaataagatcgttgatctcaacatcaccaatcagataaagagggaaatagcgaccttaaagctcctccggcatcccaacgttgttagattatatgaggtcttggctagcaaaacaaaaatttatatggtacttgagtacgtgaatggaggggagttatttgacataattgcatccaaaggtaaacacatcgaaggagaatgtagaaagctgttccaacagttaattgatggggtgagctactgccacactaaaggtgtcttccacagggatctcaagcttgagaatgtactagtggataacaaagggaacatcaaaataactgattttggtcttagtgctttaccccagcatcttagggaagatggattgctgcatacaacttgtggaagtcccaattatgttgcaccagaggtacttgctaataagggctatgacggtgcaacatcagatacatggtcatgtggtgttatattgtatgtgatcctaacaggacacttaccttttgacgatagaaatcttgtagttctctatcagaagatttttaaaggagatgttcagataccaaaatggctaacaccgggtgcacaaaatatgataaggagaattcttgatcctaaccccgaaacacggataacaatggctgggattaaagaagacccatggttcaagaagggttatattccagcaaatcctgaggatgaggatgtacatgttgacaatgaagccttttcctcccatgaagaaccaaatgaagcagaacagaggaattcaggatcaccaaccctaatcaatgcatttcaattgatagggatgtcttcatgcttagacctctctggcttttttgagaaagaggatgtttctgagagaaagataagatttgcatcaattctttcggttaaagatctgatcgataggattgaagatactgtgacagaaatggaatttagagtcgagaagaaaaatggcaaattgaaagtgatgcgagagaacaaggtgcacaaaactctcggctgcctctcagtggtagtagaggtgtttgaaataagtccatcattgtatgtagtagaattaaggaagtcgtatggagatggttctgtgtataaacagttatgcaagaaattattgaatgatttgggtgttccccccaagcaagggctagtgagatcagcagcaaattagaagccacattatgtgtaggctattttctgtttttttgctcaggtggatagctacgcagatgatataaaaaccaattgtaaatgcattatagttaaagagtagagaaatgcacacatgttagacaatgatggcaccaattttgaattgaggaatccatcatctcgaagatggcttctccatgtctagtgaactgtgaacctgaaaggcagtttgtcttgcttggcttcagttttttccagggccttgtaacatgtcatggaagtttacctctgaaccgaaccatcaaaatgggaatgaataaaaaaatttcgtaccccattgcccggaggctcttcgctatgcgaaggtataggggagagatattgtacgcagccttacccttgcatatgcaaagaggctgttttcggattcgaacccatgaccaacaagtcaccaaggcacaactttatcgctgcaccagggctcgccctcaaaatgggaatgaataaaactggataattgataaacttgtttaggttatggggatttaagtattgacaaaggagaaggatagaatagaaactagattttctcaaattgatattgactaagaggtaagtttgaataaactttttaataaattgttatagaagaagaaaattaaatgaattaaaagggtaaaatgaatgaaatttctctcaaatta

SEQ ID NO: 18238 - protein, 448 aa, Glycine max
MVIINLVKKKKKSEREGMRLGKYELGRTLGEGNFGKVKFARNTDSGQAFAVKIIEKNKIVDLNITNQIKREIATLKLLRHPNVVRLYEVLASKTKIYMVLEYVNGGELFDIIASKGKHIEGECRKLFQQLIDGVSYCHTKGVFHRDLKLENVLVDNKGNIKITDFGLSALPQHLREDGLLHTTCGSPNYVAPEVLANKGYDGATSDTWSCGVILYVILTGHLPFDDRNLVVLYQKIFKGDVQIPKWLTPGAQNMIRRILDPNPETRITMAGIKEDPWFKKGYIPANPEDEDVHVDNEAFSSHEEPNEAEQRNSGSPTLINAFQLIGMSSCLDLSGFFEKEDVSERKIRFASILSVKDLIDRIEDTVTEMEFRVEKKNGKLKVMRENKVHKTLGCLSVVVEVFEISPSLYVVELRKSYGDGSVYKQLCKKLLNDLGVPPKQGLVRSAAN

SEQ ID NO: 18239 - DNA, 1869 bp, Glycine max
  CDS (250)..(1575)
gcacgaggtctggttgcatagcattggttggtagttgtctcaaaaatctcttcttgccctttggccataatcaaaagccaagacactgttcatacagctgctcaattatcaagccaaccttgctcggttccactgcagaatttcagtttattcttatctagctcaattctggttgtgggtttatctcttactggaagacagactttgaggtagactccttataagtgcgcagaagttcaagtgtagagaatgagtcagcctaagattaaacgccgagttggtaaatacgaggtggggaggaccattggtgaaggtacatttgcaaaggtgaaatttgcaaggaactctgagacaggagagcccgtggctcttaaaattcttgacaaggagaaggtgctaaagcacaagatggctgagcagatcaggagagaagtagctacaatgaaactaatcaagcatccaaatgttgttcgattgtatgaggtcatgggaagcaagaccaaaatatatattgttttggagtttgtaactgggggggaactctttgacaaaattgtaaaccatggaaggatgagtgaaaatgaagcacgtagatatttccagcagcttataaatgctgttgattattgccatagcaggggtgtctaccacagagacctgaagccagaaaatttgctattagatacttatgggaaccttaaagtttctgattttggtttgagtgccctctcccagcaagttagggatgatggacttcttcatactacatgtggcactccaaattatgttgctcctgaggtccttaacgatagaggctatgatggggcaactgcagacttgtggtcatgtggggttattctctttgtattggttgcaggttacttgcctttcgacgaccctaatcttatgaacctgtataaaaagatctcagctgctgaatttacttgccccccatggctttctttcactgccaggaaattgattacacgaatcttggatccagatcccaccactcgtatcactatacctgagattttggatgatgaatggtttaagaaagaatataagcctcccatttttgaggagaatggggaaatcaacctcgatgatgttgaagctgtctttaaagactctgaagagcaccatgtgacagagaaaaaagaagagcagcctacagccatgaatgcatttgagttaatctccatgtccaaaggactgaaccttgaaaacttgtttgatactgagcagggatttaaaagggaaacaagattcacctcaaaatcccctgcggatgagataatcaacaagattgaggaagccgcaaaacctcttggctttgatgtgcagaagaaaaattacaagatgaggcttgcaaatgtgaaagctggaaggaagggaaaccttaatgttgccacagagatatttcaagtggcaccttctcttcacatggtagaggtacggaaggcaaaaggagatacattggagttccataagttctacaagaaactttcaacaagcctggatgatgttgtttggaaaacagaagatgatatgcaaatgcgagaaacaaagtgatgtggatattattatcattgtctattaagtgtaattttcttcgtgtctgaggttttactattttccaatttcttcattcgttatattcctcccccgtaggtttgtttggacattaattacatagtactcatttattgcataccatgctattattttttgaaagcatgcagagttcatgtaagaattttactcatccaacagtcgcggttatgttcatgaaacaaaaaattgtaagaaatttgtatattgtatatatctatctatttatatcttttcaaaaaaaaaaaaaaaaaa

SEQ ID NO: 18240 - protein, 441 aa, Glycine max; identical to SEQ ID NO: 2198

SEQ ID NO: 18241 - DNA, 1485 bp, Zea mays
  CDS (1)..(1485)
atgtcaccaccactcttggcgagcgaaatccaccgtacaccgctgcctccctctccctgtctcgtctcgtcgaaccagccgaggaagccaacgcagacccagcgatcctcgtcgcgcgccctcctcccccacggagggaaggatggcggacgcaaagcggcggcggcggcgaggaagacgcgggtgggcccgtacgaggtcggcaagaccatcggcgagggcagcttcgccaaggtcaagcacgcgcgcgactcccgcaccggcgccgtccgcgccatcaaggtgctcgaccgcaaccacgtcctccgccacaggatggtcgagcagatcaagcgggagatttcgactatgaagctgatcaaacatcccaatgtggtccagctgcatgaggttatggcgagcagaacgaagatatacatggttcttgaatttgttgatggaggcgagctattcgataagatcgtcaattctggaaggctaggagaggatgaagctaggatatactttcatcaacttataaatgcggttgattattgtcatagccgaggagtgtaccatagagatctgaagccagagaatctacttctggactcacatggaacccttaaagtttcagactttggcctaagtgcatttgcaccacaaacaaaagaggatgggcttctgcatactgcctgtggaactccaaactatgtagcgcctgaggtgctcgctgataaaggctatgatggtatggctgcagatgtatggtcctgtggcataatcttgtttgttcttatggccggatacttaccctttgatgatgtcaatctgatgagactgtacaaactgatctgccatgcaactttttcttgcccaccatggttttcttctggagcaaggaagtttattaagcgcattctcgatcctaaccctgatactaggataaaaattgcagaaatgttggaagatgaatggttcaaaaaaggctataaaccaccacattttgaacaaggcgaagatgttaaccttgacgacattgatgctgcattcaatgattcagaggaccgtcttgtggcagagaaaagagagaagccagaatccatgaacgcatttgctcttatttcgaggtcgcagggtttcaaccttggaaatttgtttgagaaggagatgatgggaatggtaaagagggaaacatctttcacgtctcaatgtacagcacaggagatcatgtcaaaaatagaggatgcatgtgggccactcggtttcaacgtgcggaaacaaaattacaagatgaaattgaaaggtgacaaatctggaagaaaaggtcacttatctgttgcaactgaggtttttgaggttgccccatcacttcacatggttgagcttcgtaaaaccggaggagacacattggagttccacagcttctacaagaacttctcatcggagctgaaagatatcgtgtggaaagctgaatctgatgcaaataataaacagacgaagtga

SEQ ID NO: 18242 - protein, 494 aa, Zea mays
MSPPLLASEIHRTPLPPSPCLVSSNQPRKPTQTQRSSSRALLPHGGKDGGRKAAAAARKTRVGPYEVGKTIGEGSFAKVKHARDSRTGAVRAIKVLDRNHVLRHRMVEQIKREISTMKLIKHPNVVQLHEVMASRTKIYMVLEFVDGGELFDKIVNSGRLGEDEARIYFHQLINAVDYCHSRGVYHRDLKPENLLLDSHGTLKVSDFGLSAFAPQTKEDGLLHTACGTPNYVAPEVLADKGYDGMAADVWSCGIILFVLMAGYLPFDDVNLMRLYKLICHATFSCPPWFSSGARKFIKRILDPNPDTRIKIAEMLEDEWFKKGYKPPHFEQGEDVNLDDIDAAFNDSEDRLVAEKREKPESMNAFALISRSQGFNLGNLFEKEMMGMVKRETSFTSQCTAQEIMSKIEDACGPLGFNVRKQNYKMKLKGDKSGRKGHLSVATEVFEVAPSLHMVELRKTGGDTLEFHSFYKNFSSELKDIVWKAESDANNKQTK

SEQ ID NO: 18243 - DNA, 1452 bp, Zea mays
  CDS (1)..(1452)
atggcacgagggagcagctcccctgcccctcgcagcggctactctacaggtctagcgactctttcgccatccatagagggaggaggcgcggcggagatggtgggcggtggcggcggcgggccgctgcggcgggtgggcaagtacgaggtgggacgcaccatcggggaaggcaccttcgccaaggtcaagttcgcgcagaacaccgagaccggggagagcgtcgccatgaaggtgctcgaccgctcctccatcctcaagaacaagatggccgaacagattaagagagaaatatccataatgaagcttgtcaggcatcccaatgtcgttaggctacacgaggttttggcaagccggaagaagatatttataattctggagttcatcactggcggcgagctattcgataaaattattcgtcatgggagactcagtgaagcagatgcccgcagatactttcagcagcttattgatggtgttgatttttgtcacaagaaaggagtctaccatcgagacttaaagcctgaaaatctcctccttgattcccaaggcaatcttaaaatttcagactttggactgagtgcatggcctgctcagggatctttccttctacgtacaacctgtgggactccgaactatgttgccccagaggttctcagtcataagggatataatggcgcacttgctgatacatggtcatgtggagtaattttatatgtattgttagcaggttatcttccatttgatgaagtggacctgactaccctttatggaaagattgagagtgcagaatattcattcccagcctggttttcaggtggtgcaaaatcactgattcgtagaattcttgacccaaatccagagacacgaatcaggatagaagagatcagaagcgatgaatggtttcagaaaaattatgaacctatcaaagaaatagaaaatgaggaagtcaatctcgatgatgtcaatgcagcttttgatgatcctgaggacgataatgaggatgctttcgaagatgaaacaggtcctctaacacttaatgcattcgacctaatcattctttcgcaaggattgaatcttgcagcgctctttgaccgcagacaggactgtgacaagcttcaaaatagattcttatcacgcaatccagcaaaggttatcttgtcaagcatggaggttgttgcgcaatcaatgggatttaagacacacattcgcaattataagatgagggtggaaggtctaaatgccgacaagactagtcatctctcagttatggttgaagttttcgaagttgctccatcaatcttcatggtagaactacaaagagcagcaggagatacttcagagtataacacgttcgtaaataactactgcggcaaattagatgatatcatctggaaatttccaactgagaagggaaaatcaaggataccccggttatcaaagtctcattcatga

SEQ ID NO: 18244 - protein, 483 aa, Zea mays
MARGSSSPAPRSGYSTGLATLSPSIEGGGAAEMVGGGGGGPLRRVGKYEVGRTIGEGTFAKVKFAQNTETGESVAMKVLDRSSILKNKMAEQIKREISIMKLVRHPNVVRLHEVLASRKKIFIILEFITGGELFDKIIRHGRLSEADARRYFQQLIDGVDFCHKKGVYHRDLKPENLLLDSQGNLKISDFGLSAWPAQGSFLLRTTCGTPNYVAPEVLSHKGYNGALADTWSCGVILYVLLAGYLPFDEVDLTTLYGKIESAEYSFPAWFSGGAKSLIRRILDPNPETRIRIEEIRSDEWFQKNYEPIKEIENEEVNLDDVNAAFDDPEDDNEDAFEDETGPLTLNAFDLIILSQGLNLAALFDRRQDCDKLQNRFLSRNPAKVILSSMEVVAQSMGFKTHIRNYKMRVEGLNADKTSHLSVMVEVFEVAPSIFMVELQRAAGDTSEYNTFVNNYCGKLDDIIWKFPTEKGKSRIPRLSKSHS

SEQ ID NO: 18245 - DNA, 1350 bp, Zea mays; identical to SEQ ID NO: 2327
  CDS (1)..(1350)

SEQ ID NO: 18246 - protein, 449 aa, Zea mays; identical to SEQ ID NO: 2328

SEQ ID NO: 18247 - DNA, 1323 bp, Zea mays
  CDS (1)..(1323)
atgagtacaaccaaggtgaagagacgtgtgggcaagtatgagctcggccggaccataggcgagggcaccttcgcgaaggtcaggttcgcgagggacacggtcaccggcgaggccgtggccattaagatcctggacaaggagaaggtcctcaggcacaagatggttgagcagatcaagcgggagatctcgacgatgaagctgatcaagcaccctaacgtcgtccgcatatacgaggtgatgggaagtaaaacaaagatctacattgtgttagaattcgctaccggtggcgagctctttgatacaattgttaaccatggtcgaatgagggaagacgaggcaaggaggtacttccaacagttaatcaatgcagttgattattgtcatagcaggggtgtgtaccaccgggatttaaaacctgaaaatttgctgcttgattcatatggtaacctgaaggtctctgactttgggctcagcgcgctatctcagcaaatcaaggatgatggactgctgcacacaacttgtgggactccaaactatgttgcaccagaggtccttgaagatcaaggctacgatggagcaatggctgatctgtggtcatgtggagttatcctgtttgttctgctagcagggtatttgccgtttgaggattctaatctcatgactttgtataagaaaatatcaaatgcagaatttacatttccaccatggacatcttttcctgccaagaggttgttaacaagaatccttgatccaaatccaatgacgagaataacaatcccagaaatattagaggatgagtggttcaaaaagggctacaagcgcccagaatttgatgaacaatatgacaccacattggatgatgtggatgccgtcttcaatgattcagaagagcaccatgtgacagaaaagaaagaagaagaaccagtagctctgaacgcattcgaactgatttcgatgtcagcgggcctaaaccttggaaacttatttgactcagagcaggagttcaaaagagaaacaaggtttacatcaaaatgtccccccaaagaaattgtccgcaagatcgaggaagctgcaaaacctctaggatttgatgttcagaagaaaaattacaagttgaggctcgaaaaggtaaaggcagggaggaagggaaacctcaacgttgctactgagatactgcaagttgcgccctctctccacatggtagaagtccgaaaagcaaagggtgacactctggaatttcataagttctacaagaacctttccaagaccttgaaggacgtcgtctggaaatccgacgatcttcaaacgcaacatgcttcttga

SEQ ID NO: 18248 - protein, 440 aa, Zea mays; identical to SEQ ID NO: 2346

SEQ ID NO: 18249 - DNA, 1350 bp, Zea mays
  CDS (1)..(1350)
atgagcgcatccgtgggccggacccgcgtggggcggtacgagctcggccggaccctcggcgaaggcaccttcgccaaggtcaagttcgcccggaacgtcgagaccggagagaatgtcgccatcaagatcctcgacaaggagaaggtcctcaagcacaagatgatcgcccagatcaagcgagagatctcgaccatgaagctcatcaggcaccccaacgtcatccggatgtatgaggtgatggccagcaagacaaagatatacatcgtcatggagctcgtcaccggtggcgaactcttcgacaaaatcgcctcgcgtggaaggctgaaagaggatgacgcaaggaagtacttccagcagctgatcaacgctgtcgattactgccatagccgaggcgtctaccaccgcgatctcaagcctgaaaatctcctgcttgatgctagcggcacgctcaaggtttcggattttggactgagcgcactatctcaacaagtccgagaggatggtctgctgcacacaacctgtggaactcccaactatgttgctcccgaggttataaacaataagggctatgatggagctaaggctgatctgtggtcatgtggagtgattctctttgtcctcatggcggggtacctcccatttgaagattcgaacctgatgtcgctctacaagaagatcttcaaagcggatttcagttgcccgtcctggttctccacaagcgcaaagaagctcatcaagaagatacttgaacctaatgctaacaatagaataactattgcagagctcattaacaacgagtggttcaagaaggggtatcagcctcccagatttgaaacagcagatgttaatctggatgacgtgaactccatcttcgatgaatccggggagccagcacagcttgttgttgagaggagagaagaaaggccatcagtgatgaacgctttcgagttaatctctacgtctcagggcctcaatctcgggacgctcttcgagaagcaaacgggttctgttaagcgagaaacaaggtttgcgtcaaggcttcctgcaaatgagatactgtcgaagatcgaagcagcagcaggacccatgggcttcaacgttcagaagcgcaactataagctgaagctgcaaggggagaaccctggaaggaaaggtcagctggccatcgcaacagaggttttcgaggtcacgccttccctgtacatggttgagctgcgcaagtccaacggcgacacccttgaattccacaagttctaccacaacatctcaaatggactgaaggacgtgatgtggaagccggagagcggcatcgtggaaggcgacgaggcgcggcaaaggaggtccccgtga

SEQ ID NO: 18250 - protein, 449 aa, Zea mays; identical to SEQ ID NO: 2340

SEQ ID NO: 18251 - DNA, 1590 bp, Zea mays
  CDS (1)..(1590)
atgagcagctgcctgcctgctccgaggcgccacccagctcttcctcgccccagcagccgcttcccgagatccttttcactttcaccaccagggtacatagaccgcatctgcgggctctgcgctcctcggactcgatttgttggttcatccatccagctgccgccggacgtcgatcagctacctatcttgaaaccacaggaccgagcgtggaaactcccggaccggacattccattttccattccgaaggggggtgagaaggcggggaatgagtacaaccaaggtgaagagacgtgtgggcaagtatgagctcggccggaccataggcgagggcaccttcgcgaaggtcaggttcgcgagggacacggtcaccggcgaggccgtggccattaagatcctggacaaggagaaggtcctcaggcacaagatggttgagcagatcaagcgggagatctcgacgatgaagctgatcaagcaccctaacgtcgtccgcatatacgaggtgatgggaagtaaaacaaagatctacattgtgttagaattcgctaccggtggcgagctctttgatacaattgttaaccatggtcgaatgagggaagacgaggcaaggaggtacttccaacagttaatcaatgcagttgattattgtcatagcaggggtgtgtaccaccgggatttaaaacctgaaaatttgctgcttgattcatatggtaacctgaaggtctctgactttgggctcagcgcgctatctcagcaaatcaaggatgatggactgctgcacacaacttgtgggactccaaactatgttgcaccagaggtccttgaagatcaaggctacgatggagcaatggctgatctgtggtcatgtggagttatcctgtttgttctgctagcagggtatttgccgtttgaggaatctaatctcatgactttgtataagaaaatatcaaatgcagaatttacatttccaccatggacatcttttcctgccaagaggttgttaacaagaatccttgatccaaatccaatgacgagaataacaatcccagaaatattagaggatgagtggttcaaaaagggctacaagcgcccagaatttgatgaacaatatgacaccacattggatgatgtggatgccgtcttcaatgattcagaagagcaccatgtgacagaaaagaaagaagaagaaccagtagctctgaacgcattcgaactgatttcgatgtcagcgggcctaaaccttggaaacttatttgactcagagcaggagttcaaaagagaaacaaggtttacatcaaaatgtccccccaaagaaattgtccgcaagatcgaggaagctgcaaaacctctaggatttgatgttcagaagaaaaattacaagttgaggctcgaaaaggtaaaggcagggaggaagggaaacctcaacgttgctactgagatactgcaagttgcgccctctctccacatggtagaagtccgaaaagcaaagggtgacactctggaatttcataagttctacaagaacctttccaagaccttgaaggacgtcgtctggaaatccgacgatcttcaaacgcaacatgcttcttga

SEQ ID NO: 18252 - protein, 529 aa, Zea mays
MSSCLPAPRRHPALPRPSSRFPRSFSLSPPGYIDRICGLCAPRTRFVGSSIQLPPDVDQLPILKPQDRAWKLPDRTFHFPFRRGVRRRGMSTTKVKRRVGKYELGRTIGEGTFAKVRFARDTVTGEAVAIKILDKEKVLRHKMVEQIKREISTMKLIKHPNVVRIYEVMGSKTKIYIVLEFATGGELFDTIVNHGRMREDEARRYFQQLINAVDYCHSRGVYHRDLKPENLLLDSYGNLKVSDFGLSALSQQIKDDGLLHTTCGTPNYVAPEVLEDQGYDGAMADLWSCGVILFVLLAGYLPFEESNLMTLYKKISNAEFTFPPWTSFPAKRLLTRILDPNPMTRITIPEILEDEWFKKGYKRPEFDEQYDTTLDDVDAVFNDSEEHHVTEKKEEEPVALNAFELISMSAGLNLGNLFDSEQEFKRETRFTSKCPPKEIVRKIEEAAKPLGFDVQKKNYKLRLEKVKAGRKGNLNVATEILQVAPSLHMVEVRKAKGDTLEFHKFYKNLSKTLKDVVWKSDDLQTQHAS

SEQ ID NO: 18253 - DNA, 1395 bp, Zea mays; identical to SEQ ID NO: 2193
  CDS (1)..(1395)

SEQ ID NO: 18254 - protein, 464 aa, Zea mays; identical to SEQ ID NO: 2194

SEQ ID NO: 18255 - DNA, 1416 bp, Brassica napus; identical to SEQ ID NO: 2187
  CDS (1)..(1416)

SEQ ID NO: 18256 - protein, 471 aa, Brassica napus; identical to SEQ ID NO: 2188

SEQ ID NO: 18257 - DNA, 1392 bp, Brassica napus; identical to SEQ ID NO: 2217
  CDS (1)..(1392)

SEQ ID NO: 18258 - protein, 463 aa, Brassica napus; identical to SEQ ID NO: 2218

SEQ ID NO: 18259 - DNA, 1449 bp, Arabidopsis thaliana; identical to SEQ ID NO: 1821
  CDS (1)..(1449)

SEQ ID NO: 18260 - protein, 482 aa, Arabidopsis thaliana; identical to SEQ ID NO: 1822

SEQ ID NO: 18261 - DNA, 1278 bp, Arabidopsis thaliana; identical to SEQ ID NO: 1823
  CDS (1)..(1278)

SEQ ID NO: 18262 - protein, 425 aa, Arabidopsis thaliana; identical to SEQ ID NO: 1824

SEQ ID NO: 18263 - DNA, 1536 bp, Oryza sativa (japonica cultivar-group); identical to SEQ ID NO: 2091
  CDS (1)..(1536)

SEQ ID NO: 18264 - protein, 511 aa, Oryza sativa (japonica cultivar-group); identical to SEQ ID NO: 2092

SEQ ID NO: 18265 - DNA, 1386 bp, Oryza sativa (japonica cultivar-group); identical to SEQ ID NO: 2093
  CDS (1)..(1386)

SEQ ID NO: 18266 - protein, 461 aa, Oryza sativa (japonica cultivar-group); identical to SEQ ID NO: 2094

SEQ ID NO: 18267 - DNA, 1386 bp, Oryza sativa (japonica cultivar-group); identical to SEQ ID NO: 2095
  CDS (1)..(1386)

SEQ ID NO: 18268 - protein, 461 aa, Oryza sativa (japonica cultivar-group); identical to SEQ ID NO: 2096

SEQ ID NO: 18269 - DNA, 1341 bp, Oryza sativa (japonica cultivar-group); identical to SEQ ID NO: 2101
  CDS (1)..(1341)

SEQ ID NO: 18270 - protein, 446 aa, Oryza sativa (japonica cultivar-group); identical to SEQ ID NO: 2102

SEQ ID NO: 18271 - DNA, 1431 bp, Oryza sativa (japonica cultivar-group); identical to SEQ ID NO: 2103
  CDS (1)..(1431)

SEQ ID NO: 18272 - protein, 476 aa, Oryza sativa (japonica cultivar-group); identical to SEQ ID NO: 2104

SEQ ID NO: 18273 - DNA, 1623 bp, Oryza sativa (japonica cultivar-group); identical to SEQ ID NO: 2105
  CDS (1)..(1623)

SEQ ID NO: 18274 - protein, 540 aa, Oryza sativa (japonica cultivar-group); identical to SEQ ID NO: 2106

SEQ ID NO: 18275 - DNA, 1509 bp, Oryza sativa (japonica cultivar-group); identical to SEQ ID NO: 2107
  CDS (1)..(1509)

SEQ ID NO: 18276 - protein, 502 aa, Oryza sativa (japonica cultivar-group); identical to SEQ ID NO: 2108

SEQ ID NO: 18277 - DNA, 1569 bp, Oryza sativa (japonica cultivar-group); identical to SEQ ID NO: 4702
  CDS (1)..(1569)

SEQ ID NO: 18278 - protein, 522 aa, Oryza sativa (japonica cultivar-group); identical to SEQ ID NO: 4703

SEQ ID NO: 18279 - DNA, 1482 bp, Oryza sativa (japonica cultivar-group); identical to SEQ ID NO: 2109
  CDS (1)..(1482)

SEQ ID NO: 18280 - protein, 493 aa, Oryza sativa (japonica cultivar-group); identical to SEQ ID NO: 2110

SEQ ID NO: 18281 - DNA, 1311 bp, Oryza sativa (japonica cultivar-group); identical to SEQ ID NO: 2111
  CDS (1)..(1311)

SEQ ID NO: 18282 - protein, 436 aa, Oryza sativa (japonica cultivar-group); identical to SEQ ID NO: 2112

SEQ ID NO: 18283 - DNA, 1629 bp, Oryza sativa (japonica cultivar-group); identical to SEQ ID NO: 1825
  CDS (1)..(1629)

SEQ ID NO: 18284 - protein, 542 aa, Oryza sativa (japonica cultivar-group); identical to SEQ ID NO: 1826

SEQ ID NO: 18285 - DNA, 1356 bp, Oryza sativa (japonica cultivar-group); identical to SEQ ID NO: 2121
  CDS (1)..(1356)

SEQ ID NO: 18286 - protein, 451 aa, Oryza sativa (japonica cultivar-group); identical to SEQ ID NO: 2122

SEQ ID NO: 18287 - DNA, 1344 bp, Oryza sativa (japonica cultivar-group); identical to SEQ ID NO: 2125
  CDS (1)..(1344)

SEQ ID NO: 18288 - protein, 447 aa, Oryza sativa (japonica cultivar-group); identical to SEQ ID NO: 2126

SEQ ID NO: 18289 - DNA, 1617 bp, Oryza sativa (japonica cultivar-group); identical to SEQ ID NO: 4720
  CDS (1)..(1617)

SEQ ID NO: 18290 - protein, 538 aa, Oryza sativa (japonica cultivar-group); identical to SEQ ID NO: 4721

SEQ ID NO: 18291 - DNA, 1365 bp, Oryza sativa (japonica cultivar-group); identical to SEQ ID NO: 2129
  CDS (1)..(1365)

SEQ ID NO: 18292 - protein, 454 aa, Oryza sativa (japonica cultivar-group); identical to SEQ ID NO: 2130

SEQ ID NO: 18293 - DNA, 1401 bp, Oryza sativa (japonica cultivar-group); identical to SEQ ID NO: 2131
  CDS (1)..(1401)

SEQ ID NO: 18294 - protein, 466 aa, Oryza sativa (japonica cultivar-group); identical to SEQ ID NO: 2132

SEQ ID NO: 18295 - DNA, 1374 bp, Oryza sativa (japonica cultivar-group); identical to SEQ ID NO: 2133
  CDS (1)..(1374)

SEQ ID NO: 18296 - protein, 457 aa, Oryza sativa (japonica cultivar-group); identical to SEQ ID NO: 2134

SEQ ID NO: 18297 - DNA, 1527 bp, Oryza sativa (japonica cultivar-group); identical to SEQ ID NO: 2139
  CDS (1)..(1527)

SEQ ID NO: 18298 - protein, 508 aa, Oryza sativa (japonica cultivar-group); identical to SEQ ID NO: 2140

SEQ ID NO: 18299 - DNA, 1545 bp, Oryza sativa (japonica cultivar-group); identical to SEQ ID NO: 2143
  CDS (1)..(1545)

SEQ ID NO: 18300 - protein, 514 aa, Oryza sativa (japonica cultivar-group); identical to SEQ ID NO: 2144

SEQ ID NO: 18301 - DNA, 1362 bp, Oryza sativa (japonica cultivar-group); identical to SEQ ID NO: 2145
  CDS (1)..(1362)

SEQ ID NO: 18302 - protein, 453 aa, Oryza sativa (japonica cultivar-group); identical to SEQ ID NO: 2146

SEQ ID NO: 18303 - DNA, 1353 bp, Oryza sativa (japonica cultivar-group); identical to SEQ ID NO: 2147
  CDS (1)..(1353)

SEQ ID NO: 18304 - protein, 450 aa, Oryza sativa (japonica cultivar-group); identical to SEQ ID NO: 2148

SEQ ID NO: 18305 - DNA, 1332 bp, Oryza sativa (japonica cultivar-group); identical to SEQ ID NO: 2157
  CDS (1)..(1332)

SEQ ID NO: 18306 - protein, 443 aa, Oryza sativa (japonica cultivar-group); identical to SEQ ID NO: 2158

SEQ ID NO: 18307 - DNA, 1338 bp, Oryza sativa (japonica cultivar-group); identical to SEQ ID NO: 2159
  CDS (1)..(1338)

SEQ ID NO: 18308 - protein, 445 aa, Oryza sativa (japonica cultivar-group); identical to SEQ ID NO: 2160

SEQ ID NO: 18309 - DNA, 1215 bp, Oryza sativa (japonica cultivar-group); identical to SEQ ID NO: 2165
  CDS (1)..(1215)

SEQ ID NO: 18310 - protein, 404 aa, Oryza sativa (japonica cultivar-group); identical to SEQ ID NO: 2166

SEQ ID NO: 18311 - DNA, 1305 bp, Oryza sativa (japonica cultivar-group); identical to SEQ ID NO: 2167
  CDS (1)..(1305)

SEQ ID NO: 18312 - protein, 434 aa, Oryza sativa (japonica cultivar-group); identical to SEQ ID NO: 2168

SEQ ID NO: 18313 - DNA, 1320 bp, Oryza sativa (japonica cultivar-group); identical to SEQ ID NO: 2171
  CDS (1)..(1320)

SEQ ID NO: 18314 - protein, 439 aa, Oryza sativa (japonica cultivar-group); identical to SEQ ID NO: 2172

SEQ ID NO: 18315 - DNA, 1317 bp, Oryza sativa (japonica cultivar-group); identical to SEQ ID NO: 2173
  CDS (1)..(1317)

SEQ ID NO: 18316 - protein, 438 aa, Oryza sativa (japonica cultivar-group); identical to SEQ ID NO: 2174

SEQ ID NO: 18317 - DNA, 1344 bp, Oryza sativa (japonica cultivar-group); identical to SEQ ID NO: 1827
  CDS (1)..(1344)

SEQ ID NO: 18318 - protein, 447 aa, Oryza sativa (japonica cultivar-group); identical to SEQ ID NO: 1828

SEQ ID NO: 18319 - DNA, 1251 bp, Arabidopsis thaliana; identical to SEQ ID NO: 1829
  CDS (1)..(1251)

SEQ ID NO: 18320 - protein, 416 aa, Arabidopsis thaliana; identical to SEQ ID NO: 1830

SEQ ID NO: 18321 - DNA, 1407 bp, Strongylocentrotus purpuratus
  CDS (1)..(1407)
atggtaactccttttgtagatggttgggactttgtacagacgttaggcgaaggagcatatggagaggtcaagttagccgttaaccggtcaactcaggaggcagtagcggtcaagattctacatctagataaacaacaaggggcagctgatagtgttaggaaagaggtatgcattcatcgaatgttaggagatccgcatatcatccgtttctatggtcatcgtaaagagggcagcatccagtatttgttcgtggagtacgctagcggaggagagctctttgatagaatagagcctgatgttggcatgcaagtcaccgaagctcatcgtttcttctcacaactcattggcggtgtggagtacctgcataagaaaggggtcacacatcgcgacctcaaaccagaaaatctgctcctagatgaacatgataacctgaaggtttcagactttgggctagcgaccgtcttccggcaccagggcaaggagcgtctcctgggcaagtgctgcgggacgccgccttacgttgccccggaggtactcaagaggaaggagtaccatgcggaaccggccgacgtttggtcttgtgggattatactggtcgccatgctggctggggaactgccgtgggatgagccgacatacagctgtaaggagtactgtgattggttggataagaagatgcatctttcaccttggaaaaagatcgataccacaccccttgcccttctgaggaagatcctgacggagactcccgccaagaggattaccatctcacaaatcaagaaagatcgctggtacaggtcaaaaggtaccatcggaagagtacccactagctccccgaatacaggcagtatgaagcgagtgtgtacaggcaatgatctatcaccgctcgcagctggaaataacaaagtctcgtcctcccaacccacctaccactccaatgccccatcgacgccaggcgagggcagtatacccagctcagtggaggaacttgtgaacgcgttcagtttctcccaacctatacattcagacaacatgcttttgagcagtcagctgcagtgtactcctggggcttcacagacccccatgcagagacttgtgagacgcatgactaggttcttcacaagctgcggctgtgaaaaaacactgaaggtccttacaactacattggataaactccccatctactcatggaagaagagctgtcgaaatcaggtgacaatatctactctagataagcgtaagaaccaacttactttcaaggccagcctgcttgaaatggatcagaaagtactagtagacttccgactgtcaaagggtgatggtctggagttcaagaagcacttcgtgaagatcaaggataagcttccacccatcattgtcaaggggcctcctctgatgccactatga

SEQ ID NO: 18322 - protein, 468 aa, Strongylocentrotus purpuratus
MVTPFVDGWDFVQTLGEGAYGEVKLAVNRSTQEAVAVKILHLDKQQGAADSVRKEVCIHRMLGDPHIIRFYGHRKEGSIQYLFVEYASGGELFDRIEPDVGMQVTEAHRFFSQLIGGVEYLHKKGVTHRDLKPENLLLDEHDNLKVSDFGLATVFRHQGKERLLGKCCGTPPYVAPEVLKRKEYHAEPADVWSCGIILVAMLAGELPWDEPTYSCKEYCDWLDKKMHLSPWKKIDTTPLALLRKILTETPAKRITISQIKKDRWYRSKGTIGRVPTSSPNTGSMKRVCTGNDLSPLAAGNNKVSSSQPTYHSNAPSTPGEGSIPSSVEELVNAFSFSQPIHSDNMLLSSQLQCTPGASQTPMQRLVRRMTRFFTSCGCEKTLKVLTTTLDKLPIYSWKKSCRNQVTISTLDKRKNQLTFKASLLEMDQKVLVDFRLSKGDGLEFKKHFVKIKDKLPPIIVKGPPLMPL

SEQ ID NO: 18323 - DNA, 1560 bp, Bombyx mori
  CDS (1)..(1560)
atggcagagaagcctgataaaccagttccagcaagtgcgaactgccagccaattgtaaaaatagggcactacacactcgggacgaccctaggagtaggtacatttggaaaagttaaaataggagagcaccaactaaccaagcacaaagttgctattaaaatccttaacagacagaagattaaatctctagatgtcgtgggaaagataagacgtgagatccaaaacctcaagttgttcagacatccgcatatcatcaagctatatcaggtgatatcaactccaactgatatatttatgattatggaatatgtttctggaggagaactctttgattacattgtaaagcgaggaaagctccaagaacatgaagcacgaaggttctttcaacaaattatatcaggtgtagattattgtcacaggcatatgattgtacatagagacttgaagccagagaatctgttgttagatcacaatatgcatgtgaaaatagcagactttggactgtctaacatgatgatggatggagagtttctgaggacttcttgtggatcaccaaactatgcagcgcctgaggtaatatcaggcaaattgtatgcaggtcctgaagtcgatgtatggtcttgtggtgttattctctatgcactcttatgtggtactctaccatttgacgatgaacacgtcccaacattattcagaaaaataaagtctggaatattccccatccccgagtacttaaacaaaagtgttgttagtttattgtgtatgatgctccaagtggacccaatgaagagagccactatagaagatgtaaagaaacacgattggttcctgaaagatctgcctgagtatctatttccgtcgcctgtggaacaggatagtagtgtaatagacacagaagcgattgccgaggtgtgcgacaagtttggtgttaaagagcacgaagtacacaacgctctgctcagcggagatccgcacgaccaactggcgatagcctatcatctcatcatagacaacaagaggatcgctgatgaagctgcgaaagctgaaatcaaagatttttatgtggccagcaactctccgcctgccgtcactgagaccaaccgtcctcacccggaacgtatcgctccgctgcgcgactccaccgtgcctccgccgcaagacaaggctagaggcacccctgtcaaacgagcgaaatggcacttgggtataaggtcacagagcaaacccaacgacataatgctggaagtgttccgagccatgaaagccctggactacgagtggaaggtcatcaacccgtaccacgtcagagtacgaaccttaaacaaaatgaccgagaaatacgtaaagatgtcgctacagctgtaccaagtggactacaagtcgtacctgctggactttaagtctttgtcgggcgaacgagaggagtccgacgaggagggcgggtcggtgaccccggtgccgccgcccccgcccccgccgccctccccgcacccccacgggcaccacaccatggagttcttcgagatgtgcgccgcgctcatcatacaactggcccggtaa

SEQ ID NO: 18324 - protein, 519 aa, Bombyx mori
MAEKPDKPVPASANCQPIVKIGHYTLGTTLGVGTFGKVKIGEHQLTKHKVAIKILNRQKIKSLDVVGKIRREIQNLKLFRHPHIIKLYQVISTPTDIFMIMEYVSGGELFDYIVKRGKLQEHEARRFFQQIISGVDYCHRHMIVHRDLKPENLLLDHNMHVKIADFGLSNMMMDGEFLRTSCGSPNYAAPEVISGKLYAGPEVDVWSCGVILYALLCGTLPFDDEHVPTLFRKIKSGIFPIPEYLNKSVVSLLCMMLQVDPMKRATIEDVKKHDWFLKDLPEYLFPSPVEQDSSVIDTEAIAEVCDKFGVKEHEVHNALLSGDPHDQLAIAYHLIIDNKRIADEAAKAEIKDFYVASNSPPAVTETNRPHPERIAPLRDSTVPPPQDKARGTPVKRAKWHLGIRSQSKPNDIMLEVFRAMKALDYEWKVINPYHVRVRTLNKMTEKYVKMSLQLYQVDYKSYLLDFKSLSGEREESDEEGGSVTPVPPPPPPPPSPHPHGHHTMEFFEMCAALIIQLAR

SEQ ID NO: 18325 - DNA, 1344 bp, Arabidopsis thaliana; identical to SEQ ID NO: 1831
  CDS (1)..(1344)

SEQ ID NO: 18326 - protein, 447 aa, Arabidopsis thaliana; identical to SEQ ID NO: 1832

SEQ ID NO: 18327 - DNA, 1563 bp, Arabidopsis thaliana; identical to SEQ ID NO: 1833
  CDS (1)..(1563)

SEQ ID NO: 18328 - protein, 520 aa, Arabidopsis thaliana; identical to SEQ ID NO: 1834

SEQ ID NO: 18329 - DNA, 1656 bp, Arabidopsis thaliana; identical to SEQ ID NO: 4380
  CDS (1)..(1656)

SEQ ID NO: 18330 - protein, 551 aa, Arabidopsis thaliana; identical to SEQ ID NO: 4381

SEQ ID NO: 18331 - DNA, 1410 bp, Arabidopsis thaliana; identical to SEQ ID NO: 1839
  CDS (1)..(1410)

SEQ ID NO: 18332 - protein, 469 aa, Arabidopsis thaliana; identical to SEQ ID NO: 1840

SEQ ID NO: 18333 - DNA, 1509 bp, Arabidopsis thaliana; identical to SEQ ID NO: 1841
  CDS (1)..(1509)

SEQ ID NO: 18334 - protein, 502 aa, Arabidopsis thaliana; identical to SEQ ID NO: 1842

SEQ ID NO: 18335 - DNA, 1368 bp, Arabidopsis thaliana; identical to SEQ ID NO: 1843
  CDS (1)..(1368)

SEQ ID NO: 18336 - protein, 455 aa, Arabidopsis thaliana; identical to SEQ ID NO: 1844

SEQ ID NO: 18337 - DNA, 1290 bp, Arabidopsis thaliana; identical to SEQ ID NO: 1815
  CDS (1)..(1290)

SEQ ID NO: 18338 - protein, 429 aa, Arabidopsis thaliana; identical to SEQ ID NO: 1816

SEQ ID NO: 18339 - DNA, 1458 bp, Arabidopsis thaliana; identical to SEQ ID NO: 4412
  CDS (1)..(1458)

SEQ ID NO: 18340 - protein, 485 aa, Arabidopsis thaliana; identical to SEQ ID NO: 4413

SEQ ID NO: 18341 - DNA, 1563 bp, Arabidopsis thaliana; identical to SEQ ID NO: 4416
  CDS (1)..(1563)

SEQ ID NO: 18342 - protein, 520 aa, Arabidopsis thaliana; identical to SEQ ID NO: 4417

SEQ ID NO: 18343 - DNA, 1281 bp, Arabidopsis thaliana; identical to SEQ ID NO: 1845
  CDS (1)..(1281)

SEQ ID NO: 18344 - protein, 426 aa, Arabidopsis thaliana; identical to SEQ ID NO: 1846

SEQ ID NO: 18345 - DNA, 1470 bp, Arabidopsis thaliana; identical to SEQ ID NO: 1847
  CDS (1)..(1470)

SEQ ID NO: 18346 - protein, 489 aa, Arabidopsis thaliana; identical to SEQ ID NO: 1848

SEQ ID NO: 18347 - DNA, 1338 bp, Arabidopsis thaliana; identical to SEQ ID NO: 1849
  CDS (1)..(1338)

SEQ ID NO: 18348 - protein, 445 aa, Arabidopsis thaliana; identical to SEQ ID NO: 1850

SEQ ID NO: 18349 - DNA, 1326 bp, Arabidopsis thaliana; identical to SEQ ID NO: 1851
  CDS (1)..(1326)

SEQ ID NO: 18350 - protein, 441 aa, Arabidopsis thaliana [sequence omitted]

SEQ ID NO: 18351 - DNA, 1329 bp, Arabidopsis thaliana; identical to SEQ ID NO: 1853
  CDS (1)..(1329)

SEQ ID NO: 18352 - protein, 442 aa, Arabidopsis thaliana; identical to SEQ ID NO: 1854

SEQ ID NO: 18353 - DNA, 1371 bp, Arabidopsis thaliana; identical to SEQ ID NO: 1855
  CDS (1)..(1371)

SEQ ID NO: 18354 - protein, 456 aa, Arabidopsis thaliana; identical to SEQ ID NO: 1856

SEQ ID NO: 18355 - DNA, 1452 bp, Arabidopsis thaliana; identical to SEQ ID NO: 1857
  CDS (1)..(1452)

SEQ ID NO: 18356 - protein, 483 aa, Arabidopsis thaliana; identical to SEQ ID NO: 1858

SEQ ID NO: 18357 - DNA, 1320 bp, Arabidopsis thaliana; identical to SEQ ID NO: 1859
  CDS (1)..(1320)

SEQ ID NO: 18358 - protein, 439 aa, Arabidopsis thaliana; identical to SEQ ID NO: 1860

SEQ ID NO: 18359 - DNA, 1539 bp, Arabidopsis thaliana
  CDS (1)..(1539)
atggatggatcaggcacaggcagtagaagtggggtagaatcgattctaccaaattacaagcttgggagaactcttggtattggttcctttggtagggtgaagatagctgagcatgcattgacaggacataaggttgctatcaagatcctcaatcgtcgcaaaatcaagaacatggagatggaggagaaagtgaggagagagatcaaaatcttgagactatttatgcatcctcacatcatccgtctctatgaggttatagagactcccacagatatttatcttgtcatggagtatgtgaactctggtgagctatttgactatattgttgagaagggtagattgcaggaggatgaggcgaggaacttttttcagcagataatatcaggagtggaatactgccatcgaaacatggtggttcacagagacctcaagcctgaaaacttgcttttggactctaaatgcaatgtaaagattgctgattttggcctgagcaacataatgcgagatggtcattttttgaagacaagttgtggaagtccaaattatgccgctccagaggtaatttcgggcaagttatatgctggccctgaagtagatgtctggagctgtggtgtgatactctacgctcttctctgtgggacgcttccatttgatgatgaaaacattcccaacctttttaagaagataaagggagggatatacacattacctagccatttatctcctggtgctagagatttgatcccccggatgcttgtagttgaccccatgaaacgagtaaccatccctgagatccggcaacacccttggttccaagctcatcttccgaggtatttagctgttcctcctccagatactgtgcaacaggcaaaaaagattgacgaggagattctccaagaagttatcaatatgggatttgacagaaaccacctcatcgaatcgctccgcaaccgaacccagaatgatggcactgtgacgtactatctgatactggacaatcgtttccgtgcctctagtggttatctcggggctgagtttcaagagaccatggaaggtactccccgtatgcatccagcagaaagcgttgcttcacctgttagccatcggcttccaggactgatggaatatcaaggagttggcttgagatctcaataccctgttgagagaaaatgggctcttggacttcagtctcgggctcatccccgtgaaataatgacggaagtcctgaaagccctgcaagatttgaatgtatgttggaagaagatagggcactacaacatgaagtgcagatgggttcctaacagcagcgcagatggtatgctcagtaactcgatgcacgataacaactactttggagacgagtccagcataatagagaacgaagcagctgttaagtcgcccaatgttgtcaagtttgaaattcagttgtataaaactcgggacgacaagtatctactggatttgcagagagtacaaggtcctcagttcttgttcttggatctgtgtgctgcttttcttgctcagctccgagtcctctga

SEQ ID NO: 18360 - protein, 512 aa, Arabidopsis thaliana
MDGSGTGSRSGVESILPNYKLGRTLGIGSFGRVKIAEHALTGHKVAIKILNRRKIKNMEMEEKVRREIKILRLFMHPHIIRLYEVIETPTDIYLVMEYVNSGELFDYIVEKGRLQEDEARNFFQQIISGVEYCHRNMVVHRDLKPENLLLDSKCNVKIADFGLSNIMRDGHFLKTSCGSPNYAAPEVISGKLYAGPEVDVWSCGVILYALLCGTLPFDDENIPNLFKKIKGGIYTLPSHLSPGARDLIPRMLVVDPMKRVTIPEIRQHPWFQAHLPRYLAVPPPDTVQQAKKIDEEILQEVINMGFDRNHLIESLRNRTQNDGTVTYYLILDNRFRASSGYLGAEFQETMEGTPRMHPAESVASPVSHRLPGLMEYQGVGLRSQYPVERKWALGLQSRAHPREIMTEVLKALQDLNVCWKKIGHYNMKCRWVPNSSADGMLSNSMHDNNYFGDESSIIENEAAVKSPNVVKFEIQLYKTRDDKYLLDLQRVQGPQFLFLDLCAAFLAQLRVL

SEQ ID NO: 18361 - DNA, 1338 bp, Arabidopsis thaliana; identical to SEQ ID NO: 1861
  CDS (1)..(1338)

SEQ ID NO: 18362 - protein, 445 aa, Arabidopsis thaliana; identical to SEQ ID NO: 1862

SEQ ID NO: 18363 - DNA, 1467 bp, Arabidopsis thaliana; identical to SEQ ID NO: 1863
  CDS (1)..(1467)

SEQ ID NO: 18364 - protein, 488 aa, Arabidopsis thaliana; identical to SEQ ID NO: 1864

SEQ ID NO: 18365 - DNA, 1251 bp, Arabidopsis thaliana; identical to SEQ ID NO: 1865
  CDS (1)..(1251)

SEQ ID NO: 18366 - protein, 416 aa, Arabidopsis thaliana; identical to SEQ ID NO: 1866

SEQ ID NO: 18367 - DNA, 1440 bp, Arabidopsis thaliana; identical to SEQ ID NO: 1867
  CDS (1)..(1440)

SEQ ID NO: 18368 - protein, 479 aa, Arabidopsis thaliana; identical to SEQ ID NO: 1868

SEQ ID NO: 18369 - DNA, 1749 bp, Drosophila melanogaster
  CDS (1)..(1749)
atgccccagatgagggctgcggccgctgaggcggtggccgccggcagcgccaatggccagccgctggtcaagattgggcactacctactgggcgcaaccctgggaacgggaaccttcggcaaggtgaagatcggcgagcaccagatcacacgcgtcaaggtggccgtcaagatactcaatcgtcagaagatcaaaagcctggacgtcgtgggcaagatccggcgtgagatccagaacctaaagctcttccgccatccgcacatcatcaagttgtaccaggtcatatcgacgccgtcggacatcttcatgatcatggagtacgtgagcggcggggagctgttcgactatattgtgaagcacggcaagctgcaggagcaccaagcgcgccgcttttttcagcagattatctctggcgtggactattgccaccggcacatgatcgtgcatcgagacctgaagccagagaacctgctgctcgaccacaacatgcacgtgaagatcgccgactttgggctctcgaacatgatgctggacggcgagttcctgcgcacctcgtgcggctcgcccaactacgcggcgcccgaggtgatttccggcaagctgtacgccggtcccgaggtggacatctggtcgtgcggcgtcatcctgtacgccctgctgtgcgggacgctgccctttgacgacgagcatgtgcctacgctgtttcgcaagatcaagtcgggcattttccccattcccgagtacctcaacaaacaagtggtcaatctggtctgtcagatgctgcaagtggacccgctcaagcgggccaacatcgaggaaatcaagaagcacgagtggttccaaaaggacctcccggcctacctcttcccctcgtccatcgagcaggactccaatgtgatcgacacctacgctgtggcagaggtctgcaccaagttcggcgtcaaggagaccgaggtgcacaactcgctgctcagcggcgatccgcacgatcagctggccatcgcttaccatctgatcatcgacaacaaacgcttcgccgacgacgcggccaaccaaataaacgagatcaacaacttctttgtggccggctctccaccaccgccgccgcctccgcccgttccccaatcatcgatggaccaccaagcccctctggccaccgtgaccgttggcggaggtacctcagccagctcgggcaccgccacaccagtgccaccagtggctggaggcacgcctagcagcaccatacccattcgaccgcatccggagcggattgcgccgatgcgggaccgtcaactggccatgtccgtgcagacatctggcggcggagccttcccggagaaaaccgcacgtggcggcactcccatcaagcgcgccaagtggcatctgggcatccggtcgcagagcaagcccaacgacataatgctcgaggtataccgagcgatgaaggcactcagctacgagtggaagatcatcaatccgtaccacgttcgggtgcgcaggcagaacgtgaagaccggcaagttctcgaagatgtcactgcagctgtaccaggtggacgccaagagctatctgctcgacttcaagtcgctgaccaacgacgaggtcgagcagggcgacgacgtcatcatggagagccttactccgccgccgcttagcgtgtccggggtgatgccgctgcagccgaccggccaccacaccatggagtttttcgaaatgtgcgccgccctgatcattcaactggctcgctaa

SEQ ID NO: 18370 - protein, 582 aa, Drosophila melanogaster
MPQMRAAAAEAVAAGSANGQPLVKIGHYLLGATLGTGTFGKVKIGEHQITRVKVAVKILNRQKIKSLDVVGKIRREIQNLKLFRHPHIIKLYQVISTPSDIFMIMEYVSGGELFDYIVKHGKLQEHQARRFFQQIISGVDYCHRHMIVHRDLKPENLLLDHNMHVKIADFGLSNMMLDGEFLRTSCGSPNYAAPEVISGKLYAGPEVDIWSCGVILYALLCGTLPFDDEHVPTLFRKIKSGIFPIPEYLNKQVVNLVCQMLQVDPLKRANIEEIKKHEWFQKDLPAYLFPSSIEQDSNVIDTYAVAEVCTKFGVKETEVHNSLLSGDPHDQLAIAYHLIIDNKRFADDAANQINEINNFFVAGSPPPPPPPPVPQSSMDHQAPLATVTVGGGTSASSGTATPVPPVAGGTPSSTIPIRPHPERIAPMRDRQLAMSVQTSGGGAFPEKTARGGTPIKRAKWHLGIRSQSKPNDIMLEVYRAMKALSYEWKIINPYHVRVRRQNVKTGKFSKMSLQLYQVDAKSYLLDFKSLTNDEVEQGDDVIMESLTPPPLSVSGVMPLQPTGHHTMEFFEMCAALIIQLAR

SEQ ID NO: 18371 - DNA, 1350 bp, Arabidopsis thaliana; identical to SEQ ID NO: 1869
  CDS (1)..(1350)

SEQ ID NO: 18372 - protein, 449 aa, Arabidopsis thaliana; identical to SEQ ID NO: 1870

SEQ ID NO: 18373 - DNA, 1356 bp, Arabidopsis thaliana; identical to SEQ ID NO: 1871
  CDS (1)..(1356)

SEQ ID NO: 18374 - protein, 451 aa, Arabidopsis thaliana; identical to SEQ ID NO: 1872

SEQ ID NO: 18375 - DNA, 1149 bp, Arabidopsis thaliana; identical to SEQ ID NO: 1873
  CDS (1)..(1149)

SEQ ID NO: 18376 - protein, 382 aa, Arabidopsis thaliana; identical to SEQ ID NO: 1874

SEQ ID NO: 18377 - DNA, 1128 bp, Arabidopsis thaliana; identical to SEQ ID NO: 1875
  CDS (1)..(1128)

SEQ ID NO: 18378 - protein, 375 aa, Arabidopsis thaliana; identical to SEQ ID NO: 1876

SEQ ID NO: 18379 - DNA, 1326 bp, Arabidopsis thaliana; identical to SEQ ID NO: 1877
  CDS (1)..(1326)

SEQ ID NO: 18380 - protein, 441 aa, Arabidopsis thaliana; identical to SEQ ID NO: 1878

SEQ ID NO: 18381 - DNA, 1356 bp, Arabidopsis thaliana; identical to SEQ ID NO: 1879
  CDS (1)..(1356)

SEQ ID NO: 18382 - protein, 451 aa, Arabidopsis thaliana; identical to SEQ ID NO: 1880

SEQ ID NO: 18383 - DNA, 1320 bp, Arabidopsis thaliana; identical to SEQ ID NO: 1881
  CDS (1)..(1320)

SEQ ID NO: 18384 - protein, 439 aa, Arabidopsis thaliana; identical to SEQ ID NO: 1882

SEQ ID NO: 18385 - DNA, 1560 bp, Nasonia vitripennis
  CDS (1)..(1560)
atgacggacaaactggcgaataatcaggcacagcccattgtcaagataggacattacacattgggagccactctaggtgttggaacgtttggaaaagtgaaaattggtgaacatgtgctgaccaagcacaaggtggctgtcaaaatcttgaatcgacaaaagatcaagagcctcgacgttgttggcaagattcgcagggagattcaaaatctcaagctctttcggcatccgcacatcatcaaattgtaccaagtcataagcactccaacggatatattcatgattatggaatacgtctctggcggagaactgtttgactatattgtcaaacatggcaagctcaaggagtacgaagctcgaaggttctttcaacagataatttctggcgtggactactgccatagacacatgattgttcaccgcgacttgaagcctgaaaatttgctgctggatcacaatctccatgtaaaaattgcagattttggcctatccaacatgatgatggatggagagtttctgaggacttcgtgtggatcgccaaattatgctgcgcccgaagtaatctctggaaagctgtacgcaggacccgaggtggacatttggtcttgcggagtcattttatatgccttgctttgtggaacgctgcccttcgacgatgagcatgtaccaaccttgtttcgaaagatcaaatcgggagtctttccaattcctgaatatctcaataagagtgtggtgaatctcttgtgccacatgctccaagttgatccaatgaagagggccaccatagaagatatcaagaagcacgaatggtttcaaaaagaactgccaacgtacttgtttccttctcctgtagagcaagattcttcgataatcgatgtagatgccgtgaacgaagtctgtgaaaaattcaacgtcaaggaagccgaagttcatgccgccttgctcaatggcgatccgcatgatcaattagccattgcttaccatttaattatagacaataagcgaatcgccgatgaagcagcaaaagcagagataaaagatttttatgtagcttccagtccgccaccggttgctttcagtcctagcaatgaggccagtggtagtggaagtccgttaaggccgcatcctgaaagaatcgccccactccgagacaggcagggctctctgagcactactcctacccaaatgcaaggtaatcgaggcacgcctgttaaaagggccaagtggcatttgggaatcaggtctcaatccaagccaaatgatatcatgaatgaagtctatcgtgccatgaaagcgcttggattcgaatggaaaataatcaacgcgtacagcgttagggtgaggcataaaaatccagtgactgataggtatagcaagatgtcgctgcagctttatcaagtagattacaagagctaccttctagatttcaaatcgttatcgagcgaagagtccgaggacattactagagatatcactctacctccaccgcaagcaacaggccatcataccatggaattttttgaaatgtgcgctgcgttaataacgcaattggcgcgataa

SEQ ID NO: 18386 - protein, 519 aa, Nasonia vitripennis
MTDKLANNQAQPIVKIGHYTLGATLGVGTFGKVKIGEHVLTKHKVAVKILNRQKIKSLDVVGKIRREIQNLKLFRHPHIIKLYQVISTPTDIFMIMEYVSGGELFDYIVKHGKLKEYEARRFFQQIISGVDYCHRHMIVHRDLKPENLLLDHNLHVKIADFGLSNMMMDGEFLRTSCGSPNYAAPEVISGKLYAGPEVDIWSCGVILYALLCGTLPFDDEHVPTLFRKIKSGVFPIPEYLNKSVVNLLCHMLQVDPMKRATIEDIKKHEWFQKELPTYLFPSPVEQDSSIIDVDAVNEVCEKFNVKEAEVHAALLNGDPHDQLAIAYHLIIDNKRIADEAAKAEIKDFYVASSPPPVAFSPSNEASGSGSPLRPHPERIAPLRDRQGSLSTTPTQMQGNRGTPVKRAKWHLGIRSQSKPNDIMNEVYRAMKALGFEWKIINAYSVRVRHKNPVTDRYSKMSLQLYQVDYKSYLLDFKSLSSEESEDITRDITLPPPQATGHHTMEFFEMCAALITQLAR

SEQ ID NO: 18387 - DNA, 2835 bp, Candida glabrata CBS 138
  CDS (1)..(2835)
atgtatggagctgttttaatggattcagatactagaaacaatgaaggcaagagtggcaggaggcgggactctgtgtccacgacgcccaggatgttcagcaccaatacggagcagactggagcgcagatcgacactgcccgggagaagcattccaagagctcgcagcccagggtgttccacaggaagtcgctgagtggttgggacttcatggagactgtaggggctggctctatgggtaaagtgaagctggctaagaataagaacagcaacgaggtttgtgctataaagatagttcaccgcgctacaaaagcgtatatgcacaaggcgcagcagttaccaccaccagcagatgagaatgaggcaaaggaaaggcagaagcggctgaataaagagatatccagggataagaggaccgttagagaagcttcattgggtcaaatactgtttcatcccaatgtttgtaagctatacgaaatgcaaacgctatctaatcattactatatgttttttgaattcatatctggaggacaactactggattatattattcagcatggctccttgaaggagaatcatgccaggaaagtttctagaggaatattaagcgctcttcagtacttgcatgctaataacattgtgcatcgggacttgaagatagaaaatatcatgctctccaagacgggtgaaattaaattgattgactttgggctctctaatatgtatgatcctaggaaaagtctgcagacattctgtggctcactttattttgcagctcccgagttattgaaagcacatccctatttgggaccagaggttgatgtttggtcttttggggtagtattatatgtcttagtatgcgggaaagttccattcgatgacgaaaattcaagtgcacttcatgaaaagatcaaaaaggggaaagtcacatatcctcagtttctatcaattgatgtaatctcattactttcaaaaatattggtggttgatccacagaagagggctactttgcaacaggttgtaaatcaccagtggatgttgaaaggatatgatttcccaccacagtcttacctaccaagaagggttcctttaacagtggatgatattaacattgatgtaattaaggaaatgtacagatttgaatttgttgagagtattgacgcagcatacaaaactattattgatataataaccgagcccgaatacaaacaattggctgatcaatattgggaattggcagacaagtcatctttctctgaagattcaaagttttttacagatgacttcaaagaccctacacaggcatatcatccattgatttccttatattacttaaccttcgagaagatgcaacgtgatgcaaagaaagagaataaagattggctatctaccaagagttctgagataacaaattctgatgttgggttaaacaaagaatataaatttactcccaagaagatggaaagcattcagaaagagcctagcccttcggaacttttagaggaacagggcaacgttacaccagaagacatatctcctcagatatcaaatgataaagaacagtctcccattgcaggtcaaagtggctcaaaggctcctaggtcaagtattaaggctttaacaaacagagcagatcaatcagcgcaagttggaaaaaatgcaggtattagtccaaaaccttcggtagaaaacacagaaaaatcaggatttacaaacatattcaggagattttcccaacggcaccaacgtccatctaatattaataatagcattgccagcaagaacaataatattcgcacacacactagagctgtatcagattatatgtcagttgctccaaatgaacttcaaaagccagtggaaattgtcagtcaaaacttaccagatctacctacagatgcaaaattgattatagaaaagactaggaatagctcaaagaataagagcgacgaaaatgaaaccttacaaccagtgccacacgccaaggggaaaaaactgcatccaactgcaagagctaaatctgttggtcatgctagaagagaatctctaaatttcacaaggcccgctgtggttccaccaaatatggctgatatagaagaagtggttgatacaggatttctgcaaacgccagatgaagaaaaattggttaaagataaagcatttggagaagctttatctaatacaatcgttgaagatctaacagatgatgagattttaaaggaggcatcaaaggctccaccggggagcatgccatctattgattatccacgtaccttatttttgaaaggattcttttctgtccaaactacttcctctaaaccactcccaattgtacgttataagattatttcagtacttaaaaaacacaacatagaattcgttgaagttaagggcggttttgtatgttctaaatcccctacagttaccattttgaataccaaaacagctcctgaaaaggttgatgtttacagcggatatgataatgatgatacacctgactggtcttctcaacagtcacctaaaagtatgaatgacgctcggttagtattttctgacttggataagagttctaatcctcatttgactgagggacattcaaactcttctttgaatgactttgaaaatgataatttatcagttggaggaaaaggtgattatttagataatattcagggtccgagggcgaaggttatggatagggcgcctattaaatttgaaattcatattgtgcgtgtcagaattgtgggcttggctggtatacattttaaaaaactctcaggtaatacatggatgtataaggaactggctactagaattttacatgatttgaaactctga

SEQ ID NO: 18388 - protein, 944 aa, Candida glabrata CBS 138
MYGAVLMDSDTRNNEGKSGRRRDSVSTTPRMFSTNTEQTGAQIDTAREKHSKSSQPRVFHRKSLSGWDFMETVGAGSMGKVKLAKNKNSNEVCAIKIVHRATKAYMHKAQQLPPPADENEAKERQKRLNKEISRDKRTVREASLGQILFHPNVCKLYEMQTLSNHYYMFFEFISGGQLLDYIIQHGSLKENHARKVSRGILSALQYLHANNIVHRDLKIENIMLSKTGEIKLIDFGLSNMYDPRKSLQTFCGSLYFAAPELLKAHPYLGPEVDVWSFGVVLYVLVCGKVPFDDENSSALHEKIKKGKVTYPQFLSIDVISLLSKILVVDPQKRATLQQVVNHQWMLKGYDFPPQSYLPRRVPLTVDDINIDVIKEMYRFEFVESIDAAYKTIIDIITEPEYKQLADQYWELADKSSFSEDSKFFTDDFKDPTQAYHPLISLYYLTFEKMQRDAKKENKDWLSTKSSEITNSDVGLNKEYKFTPKKMESIQKEPSPSELLEEQGNVTPEDISPQISNDKEQSPIAGQSGSKAPRSSIKALTNRADQSAQVGKNAGISPKPSVENTEKSGFTNIFRRFSQRHQRPSNINNSIASKNNNIRTHTRAVSDYMSVAPNELQKPVEIVSQNLPDLPTDAKLIIEKTRNSSKNKSDENETLQPVPHAKGKKLHPTARAKSVGHARRESLNFTRPAVVPPNMADIEEVVDTGFLQTPDEEKLVKDKAFGEALSNTIVEDLTDDEILKEASKAPPGSMPSIDYPRTLFLKGFFSVQTTSSKPLPIVRYKIISVLKKHNIEFVEVKGGFVCSKSPTVTILNTKTAPEKVDVYSGYDNDDTPDWSSQQSPKSMNDARLVFSDLDKSSNPHLTEGHSNSSLNDFENDNLSVGGKGDYLDNIQGPRAKVMDRAPIKFEIHIVRVRIVGLAGIHFKKLSGNTWMYKELATRILHDLKL

SEQ ID NO: 18389 - DNA, 1869 bp, Debaryomyces hansenii CBS767; identical to SEQ ID NO: 1891
  CDS (1)..(1869)

SEQ ID NO: 18390 - protein, 622 aa, Debaryomyces hansenii CBS767; identical to SEQ ID NO: 1892

SEQ ID NO: 18391 - DNA, 1740 bp, Yarrowia lipolytica CLIB122; identical to SEQ ID NO: 1893
  CDS (1)..(1740)

SEQ ID NO: 18392 - protein, 579 aa, Yarrowia lipolytica CLIB122; identical to SEQ ID NO: 1894

SEQ ID NO: 18393 - DNA, 2079 bp, Clostridium perfringens ATCC 13124
  CDS (1)..(2079): transl_table=11
atgataggtaaaatcttagggaataggtacgagttacttcagtgcgtaggcgaaggtggcatgtcctttgtttataaagctagatgtagaaaattaaatagattcgtagctgttaaaatactaaaagatgaatttaaaaacaatgaagaaattgttagaagatttaaaaaagaagctacagctattgctaacttatccaatccaaatgtagtaaatgtattagatgttggaactcaagatgatattaattatattgttatggaatacgttgaaggtaaaactttaaaagatataattaaggaaaaaggtgctttaccttatgaggttgccataagtataggaataaaggttgctaaagctttagaatgtgcccataaaagcggaattatacatagagatgttaaaccacaaaatatattagttacagaagaaggggttgttaaagtaactgacttcggaatagctaaatctatggattcctctactatagcgcacactaatagtgttatgggatctgcacattatttttcaccagagcaagctaaaggaacttatactgattatagaactgacttatattctttaggtatagtattgtatgaaatggttactggagttgttccttttaatggtgattcacctgttactgtagctgtaaaacatatacaggagaaagcaatacctcctaagaatataaatcaaaatattccaaatagtttaaatgatttaataatgaaagctatggaaaaggatcctgttaatagatatcaaacagctaaggaaataataggtgacttagaaaagataaagaaggatccaaatgttacaatatcatcaaaatctgcagaagatgaagatcaatttacaagagttatgtctccagttgttgttccaaatactgaaactaataactcagaacctgatgaagatgatgaggatgatgatgaatattatgaagatgatgaggatgaagatgaagaagaaaataatattcaaactaagcctcaaaaagctattaataaaaagaaaaagaaatcaccaatattaattataattgcaactattttagttgtagcattaggaataactcttggattccttggtatgaagaaatttatggaaggtggaaaagatgttaaaatacctaatgttgtaggagaaaaggtagaagatgctaagagtaagttagaaggcttaggattaaaggtattagaagttacagaagaaagtgatcaagaaaaaggaatagttttaaaagttgatccaaatgtagattctactgttaagaccggtagcgaagtaaaacttactgttagtggtggagaaggacaaataaaagttccaaatttagcagatatgagttcagatgaggttaggagaacattaaaaagtctaggattagagcttgttgaggatgagaaatatagtgataaagttccaagtggaaaagttatttctcaaagtcctaatgctaatgagttagtagataaaggttctaaagtaaaggttgtttttagtaaaggtaaagagataaaaaaagtaagtgttccaagcttagtaaatatgaatatagattctgttaaaaataatttaaatgatataggtttaaaacttggtgaggtaaaatatgaatacagtgatagtgttcaacaaggtcaagttatttctcaaagtcctaatgctaatgaacctgtagatgagggttctaaagtaagcattactataagtaaaggtaaagaaataaaaactacaactttaaatattccggatgtttcaggaaaaagtgtagatgaagctaaatcaatattagctaatgctggtgttgaagctaatgctgttaagggtgaagcagctaaaagtgaagaagaagcagggaaggtttatagtcaaagtcaatcaggatctattactcttaaagaaggagaaaagataactataacaataaattactatggtgattatattaaaccagtacaaccttcacaatcagataagactaatcaatcagaacaacaaacacaatcaccagatcaatcaacggagaaaccaaaagacccagcgcatcctggtaataattaa

SEQ ID NO: 18394 - protein, 692 aa, Clostridium perfringens ATCC 13124
MIGKILGNRYELLQCVGEGGMSFVYKARCRKLNRFVAVKILKDEFKNNEEIVRRFKKEATAIANLSNPNVVNVLDVGTQDDINYIVMEYVEGKTLKDIIKEKGALPYEVAISIGIKVAKALECAHKSGIIHRDVKPQNILVTEEGVVKVTDFGIAKSMDSSTIAHTNSVMGSAHYFSPEQAKGTYTDYRTDLYSLGIVLYEMVTGVVPFNGDSPVTVAVKHIQEKAIPPKNINQNIPNSLNDLIMKAMEKDPVNRYQTAKEIIGDLEKIKKDPNVTISSKSAEDEDQFTRVMSPVVVPNTETNNSEPDEDDEDDDEYYEDDEDEDEEENNIQTKPQKAINKKKKKSPILIIIATILVVALGITLGFLGMKKFMEGGKDVKIPNVVGEKVEDAKSKLEGLGLKVLEVTEESDQEKGIVLKVDPNVDSTVKTGSEVKLTVSGGEGQIKVPNLADMSSDEVRRTLKSLGLELVEDEKYSDKVPSGKVISQSPNANELVDKGSKVKVVFSKGKEIKKVSVPSLVNMNIDSVKNNLNDIGLKLGEVKYEYSDSVQQGQVISQSPNANEPVDEGSKVSITISKGKEIKTTTLNIPDVSGKSVDEAKSILANAGVEANAVKGEAAKSEEEAGKVYSQSQSGSITLKEGEKITITINYYGDYIKPVQPSQSDKTNQSEQQTQSPDQSTEKPKDPAHPGNN

SEQ ID NO: 18395 - DNA, 1425 bp, Populus trichocarpa; identical to SEQ ID NO: 1903
  CDS (1)..(1425)

SEQ ID NO: 18396 - protein, 474 aa, Populus trichocarpa; identical to SEQ ID NO: 1904

SEQ ID NO: 18397 - DNA, 1586 bp, Populus trichocarpa
  CDS (13)..(1407)
ttttagcttggaatggaaaataaacctagtgtgttgacacaaaagtatgaagtggggagattgcttggccaaggcacctttgccaaggtgtattttgcaaggaacatcaaaacaaaccagagtgtagccattaaattaattgagaaagagaaggtcttgagggttgggcttgttgatcagatcaagagagaaatatatgtaatgagacttgttagacaccctaatatcataaaactttacgaggtgttggccaccaaaagtaagatttactttgtaatggaatatgctaaaggtggtgaactctttaacaaggtctctaaaggaaggttaaaggaggatgttgcctggaaatattttcaacagctgatcaatgcagttgatttctgccacagcagggatgtttatcatcgtgatataaagccagagaatctgttgttggatgagaatgagaatctaaagattagtgattttgggttgagtgccctcgctgaatccaagcgacaagatggattactccacacaacttgtgggacacctgcatatgttgctcctgaagtgatcaaaaggaaaggttatgatggtgctaaggctgatatttggtcctgtggcgtggttttgttcgtgttattggctggttatctcccatttcatgatacaaatttgatggagatgtacagaaaaattgacaaagcagagttcaaatgccctaattggtttccaacagatgctcgtaagttgctgcgtaagatcctggatccaaaccccaatacaaggatctccattgctgagattaaggaaagttcttggtttagaaaagggttgcccagacaaagtaaaactgaaacagtaggcagggaggcagctgctctgggtaggaatggttctggtccttctgagaatagcagtgtggcctgtgaggcaaagcaagaatcagccaaacctccatacttaaatgcttttgatatcatttccctttctgctggatttgatctatcaggattatttgacgataagtatccgaacagagaagcaagatttacatctgcacaaccggcctcagtcgtcatctccaaactggaagatatttctaagtgtctaaagctgaaggtaatgaagaaagatgcaggtttgttgaaaatggaaggaatgaaggaaggtagaaaggggctgttggccattgatgctgagatctttgaactgactccaaatttccatttggtggagctgaagaaaactaatggagatacactggaatatcagaagatgttgaacgaagatataaggcctgctctcaaagatattgtttggttgtggcagggtagcaagaaccacaacagcagcagctgcagctgcagcaatgacattgaccaaactattagtaacagtttgcttgagatattctcttaatgccattttttccgctataggctgtgtttgtacaatttcttaaacttctcgttttttctactttcgtgcttgtacttgtgagtgttacattcctctgacctccctcaataaacttgctcgtatttgctatgtgataaatgatgacttcactttcaatgcacataactctttaattcttg

SEQ ID NO: 18398 - protein, 464 aa, Populus trichocarpa; identical to SEQ ID NO: 1906

SEQ ID NO: 18399 - DNA, 1929 bp, Populus trichocarpa
  CDS (254)..(1576)
aggccaggaggtgatcgtcatcaacaaggttacttactataaatcatcaaaaccagtctcactcattgccgtttcctttgccttatccttgccttttcagtcatctcaaaagccgattctaaagcaataatttccagcctttcttgcttatctctctgcctctctcagtccccatatttaaaaagtcttgctcaagaagagttagaagtttgcataactgcaagaataagagtgttgaacccataaacaaagcatgagtcaacctaaaatcaagcgtagagtgggtaaatatgaagtgggaaggacaattggtgaaggaacgtttgcaaaagtaaagtttgcgaggaattctgagacaggggaacctgtggccctgaagatccttgataaagagaaggttctcaaacacaagatggctgaacagatcaagcgggagattgagacaatgaagcttatcaagcatccaaatgttgttcgattatatgaggtgatgggaagtaagacaaagatatttattgttttggagtttgtcaccgggggagagctttttgacaaaattgtaaaccatggacggatgagagaagatgaagctcggagatatttccagcagcttatcaatgtagtggactattgccacagcaggggtgtttttcacagagaccttaagccagaaaatttgttgttggatgcttatgggaacctcaaagtttcagattttgggttgagtgcgctgtcccaacaagtcagggatgatggcctgcttcatacaacttgtggaactccaaattatgttgctcctgaggttcttaatgatagaggttacgatgggactactgcagatttgtggtcatgtggagtgatactttttgtattgctagcagggtatttgcctttcgatgattcaaatgttatgaacctgtataaaaaaatctcagcagctgaatttacttgccccccttggctctcttttggtgccatgaaattgataactcgaattttggatcccaaccctatgactcgcatcaccatacctgaaatcctggtagatgaatggtttaagaaaggttataagcctcctgtgtttgaagagaaagaggacaccaacttggatgatgttgaagctgtttttaaggactcagaagaacaccatgtaacagagaagaaggaagaggagcaaccaacagctatgaatgcattcgagttaatttctatgtctaaaggactaaatcttgggaatttgtttgatggagaacaggaatttaagagggaaacgaggttcacgtctagatgccctgccaatgaaataattcacaagattgaagaagctgccaagccccttggttttgatgtccacaagaaaaattacaagatgaggcttgagaatgtgaaggctgggagaaagggaaacctgaatgttgctaccgagatatttcaagtggcaccttcccttcatatggttgaagtgcgtaaagcaaagggagacactttggagttccataagttctataaaagcctttcaacctgccttgatgatgttgtctggaaaactgaggaggacatgcaagaaacgaagtaaaagttgtgccaattttgaagtgtacaagtacatgcattaacggcaccgatgcaaatgtgccctacatctttgttccttttgtttttttttcatccctttccctggaaatattttctcattcccatagaattaggcggacatggcttttccatttgttttccttgttattaatgttgggaaacatggatgcttctcatagtcctgtttgtttttcttattttcatggggtggtttgttttcctcttctataggaagatttcaaattgatgaaagtactgtaattcctgttgctcctttttctcggaaacttttctcagaagaagattgtgtttactgttgtttcctttctccat

SEQ ID NO: 18400 - protein, 440 aa, Populus trichocarpa; identical to SEQ ID NO: 1908

SEQ ID NO: 18401 - DNA, 1754 bp, Populus trichocarpa
  CDS (166)..(1488)
cctttgcttttctctgcactttctttcagtcatcttaagagaaagaattgccagcctttcttgctgatctctctgtctctcaatcaccatatacaaaaccttgctcaagaagagttaaaagttcgcaaatttcaaggataagaacattgaacccataaacgaagcatgagtcaacctaaaattaagcgtagagtgggtaagtatgaaatgggaagaacaattggtgaaggaacatttgcaaaagtaaagtttgcaaggaattctgagacaggggaacctgtggctctgaagatcctcgataaagagaaggttctcaaacacaaaatggctgaacagatcaagcgggaggtagcgacaatgaagcgtatcaagcatccaaatgttgttcgattatatgaggtgatgggaagcaagacaaagatatttattgttttggaatttgttaccgggggagagctttttgacaaaattgtaaaccatggacggatgagagaagatgaagctcggggatatttccaccagcttatcaatgcagtcgattattgccacagtaggggtgtttttcacagagaccttaagccagaaaatttgttgttggatgcttatgggaacctcaaagtttcagattttggattgagtgcgctgtcccaacaagtcagggatgatggcttgcttcatacaacttgtggaactccaaattatgttgctcctgaggttcttaatgatagaggttatgatggggctcctgcagatttgtggtcatgtggagtgatactttttgtattgctagcagggtacttgccttttgatgattctaatcttatgaacctgtataaaaaaatttcagcagctgaatttacttgccccccttggctctcttttggtgccatgaaattgataactcgaattttggatcccaaccctatgactcgtatcaccgtatctgaaatcctggtagatgaatggttcaaaaaaggttataagactcctgtgtttgaagagaaagaggacaccaacttggatgacgttgaagctgtttttaaggactcagaagaaaaccatgtaacagagaaaaaggaagaagagcaaccaacagctatgaatgcgtttgagttaatttcgatgtctagagggctaaatcttgggaatttgtttgatggagaacaggaatttaagagggaaacacggttcacgtctaaatgccctgccaatgaaataattcacaagatcgaagaagctgcaaagccccttggttttgatgtccacaagaaaaactacaagatgaggcttgagaatgtgaaggctgggagaaagggaaaccttaatgtcgctaccgagatatttcaaatggcaccctcgcttcatatggttgaagtgcgtaaagcaaaaggagacactttggagttccataagttctataaaagcctttcaacctgccttgacgatgtcgtctggaaaactgaggaggacatgcaagaaacaaagtaaaagttgtgcaaattttgacgtgtggtagtaatgcaaatgtgccatacttgttctgcatcttctttccccttgtttttttactgttttcctggaaatattttctcatttccttagaattaggcggacatggcttctccagttgtttccttgttattaatgttgggaaacacggatgatcctcgtagtcttgtttatttctcttcaataggattttcatggggtggtttgttttcctcttcgataggaagatttctagtaaatgaaag

SEQ ID NO: 18402 - protein, 440 aa, Populus trichocarpa; identical to SEQ ID NO: 1910

SEQ ID NO: 18403 - DNA, 1299 bp, Populus trichocarpa; identical to SEQ ID NO: 1911
  CDS (1)..(1299)

SEQ ID NO: 18404 - protein, 432 aa, Populus trichocarpa; identical to SEQ ID NO: 1912

SEQ ID NO: 18405 - DNA, 1694 bp, Populus trichocarpa
  CDS (245)..(1564)
gaaaaaagagaaggaaaaaggaaagaaaaaaatctccttcgtttcttcttctattgaagcttcaaaatctctgccaaaaaccaaaataacccttgtcaaaagagtgttagggaatgcagagagatgagaggagtgttgttaactaagtctgagttttcttcccgtgccaagaagtgcatcggcggcagaaactgccaccgaaaacacgttgaagacgggtgattttagaaaaatctttctttcgatggcagaaacaacaagtgatggtcacccgaccttgcttcatgggaaatatgaactgggtcggttactaggccatggcaccttcgctaaagtctaccacgcgcgtaacttgcagagtggaaaaagtgtggccatgaaggtggttggtaaagagaaggtgataaaggtggggatgatggagcaaatcaagagagaaatttcagttatgaagatggtgaagcaccccaatattgttgagttacatgaagtcatggctagcaagtccaagatctatttcgccatggaacttgttcgaggtggcgagttgttctccaagattgagaaaggtcggttaagagaagatgtggctagagtttattttcagcagttaatatctgcgatcgatttttgtcacagtcgcggtgtttatcatcgtgatttgaagcctgagaacttgctgcttgacgaaaatgggaagttgaaggttacagattttgggctgagtgctttcactgagcatttgaagcaagatgggttgttgcatacaacttgtgggacaccagcttatgttgcacctgaagtaattgggaagcaagggtatgatggtgccaaagcagatctctggtcttgtggtgttattctctatgtgcttcttgctgggttcttgccgtttcaagatgataatattgtggctatgtatagaaagatttatagaggtgacttcaaatgccctccatggttctcctctgaagctcgacggctgattaccaagcttcttgatccaaatccaagcactcgaatcacgatatccaaggtcatggattcaacctggttcaagaaatcagtgccaaagaccgtaaaaagcaaagaagagatggaatttgaagctttcaatggagatgaagatgccaatggagacaaatcaaagcaactcgaaacgttgaacgcgtttcacataatatctttatcccagggatttgatttgtcaccactctttgaggagaggaagagggaggaaaaagaggagctgagatttgccacaacaaggccagcaagcagtgtcatttcaagactcgaggaggtgggcaaggcagggaatttcagtgtcaagaagagcgattccaaagtgagattgcaagggcaggagaggggtaggaaagggaagttggctattgcagctgatatttttgctgtcacaccatcgtttttggtggtggaggtgaagaaagataacggagacacgttggagtttaaccaattctgcagtaaagcgctgagaccagcccttaaggacattgtgtggatatctcctgctgagaattcaactcttgctagaatatgagagattgggacatggaggcggaggtgcaaattgaaagctatttgattagatcgattgttcttgttattgttgttattgtttgtattggtattttaaattgaagttggaattgtaagtaatcagaaaaaaa

SEQ ID NO: 18406 - protein, 439 aa, Populus trichocarpa; identical to SEQ ID NO: 1914

SEQ ID NO: 18407 - DNA, 1314 bp, Populus trichocarpa; identical to SEQ ID NO: 1915
  CDS (1)..(1314)

SEQ ID NO: 18408 - protein, 437 aa, Populus trichocarpa; identical to SEQ ID NO: 1916

SEQ ID NO: 18409 - DNA, 1308 bp, Populus trichocarpa; identical to SEQ ID NO: 1917
  CDS (1)..(1308)

SEQ ID NO: 18410 - protein, 435 aa, Populus trichocarpa; identical to SEQ ID NO: 1918

SEQ ID NO: 18411 - DNA, 1356 bp, Populus trichocarpa; identical to SEQ ID NO: 1919
  CDS (1)..(1356)

SEQ ID NO: 18412 - protein, 451 aa, Populus trichocarpa; identical to SEQ ID NO: 1920

SEQ ID NO: 18413 - DNA, 1326 bp, Populus trichocarpa; identical to SEQ ID NO: 1921
  CDS (1)..(1326)

SEQ ID NO: 18414 - protein, 441 aa, Populus trichocarpa; identical to SEQ ID NO: 1922

SEQ ID NO: 18415 - DNA, 2088 bp, Populus trichocarpa
  CDS (1)..(1329)
atgagtgctaagggacaggggacgagaacacgagtaggtaagtacgagttagggaagaccataggtgaaggaagctttgccaaggtgaaggtcgctaaaaatgttgaaaccggtgatgttgttgccattaaaattctcgatcgtgagcaagtcctccgtcacaagatggtcgaacagttaaaaagagaaatatcaacaatgaagctgattaaacatcccaatgtcatcaagatttttgaggtcatggcaagcaaaactaagatttacattgttatcgagtttgttgacggaggagagctctttgacaagattgctaagcatgggagacttagagaggatgaagccaggaggtatttccagcagcttattaatgccgtggattactgccacagtagaggcgttttccatagagatctgaagcctgagaaccttcttcttgattcacacggtgttcttaaagtctcggattttggattgagtgcactgtcacaacaattgcagggtgatgggctgcttcacactgcatgtggaacaccaaattatgtcgcacctgaggttctcaaagacaaaggttatgatggcacagcatctgatgtatggtcttgtggggtcattctctatgtacttatggctggatacttgccttttgatgagacaagtcttatggccttatacttaaaaatctgcagtgctgatttcacatttccatcttggttttcatctggtgcaaagaaactgataaagcgtattcttgacccggagcctcttacaaggataacagttgctgagattatagaagatgaatggttcaagaaaggatacaggccaccacaattcgagcaggaagagcatgtaaatgtagatgatgttgatgctgtttttaatgatttgaaggaacatcttgttacagaaaagaagaagaaacctgcgtcgatgaatgcattcgagcttatttctaagacacagggatttagccttgagaatttgttcgggaagcaggcaggttttgtgaaacgagaaacccgtattgcttctcatagccccgcaaatgaaattatgtctagaattgaggaagctgcaaagcctctggggtttaatgtcgacaaacgaaactacaagatgaagctgaaaggagacaaaggtgggaggaagggccaactctctgtagcaactgaggtgtttgaggtagctccctctttgcacatggtggagctccggaaaattggtggtgatacgctggagtttcacaatttctacaagagtttctcgtcaggtttaaaggatgtagtctggaaatctgatcaaactatagaaggattaaggtcatagcagaacctttcctgctgggtccagtcctttactcattcttggtatttgttttagctcattgcgcattatatttgagagtgtatgcaatgtaaaagttttgatcggttggcgtggtggtagggagaattggaattggagctcccaaaatatggacccttgttcctgcaacgcccccccgcccccaccggcaattcatccttttccctcttctttttcgctcactctgcattcatttcctgacctgaataaatcgaggtttttgaacttgatgatggtccattcaatgggagaaaccctccatttggaacggaagaatttaaaagatggctcttgtgagttccaagaggttctatttaatggaatttattgaaatctctcatcggacctgttaccactgaaccagtggttttccttccctcttcctcccgtgttttttctccgtggtggttcataaatccaagattagagaactgaaagtaaaatcccacaaggatttcaatccccagttgaagaaatccgaaaatagacgatgaaaagaagagagcatgttttatatgatttggctaaggaaatttgtaaaatatatgatgctcgggcttatgagtgccataagaattacttgtaaaatatacgatgcttgggcttatgagtgcatattgtttcccgggaatcggaaacatcaacgtaattgtgaagcctggtatgctgagttgcatgtgcaaggtatctgaaagtgtttcgtctatgaattagacatca

SEQ ID NO: 18416 - protein, 442 aa, Populus trichocarpa; identical to SEQ ID NO: 1924

SEQ ID NO: 18417 - DNA, 1317 bp, Populus trichocarpa; identical to SEQ ID NO: 1925
  CDS (1)..(1317)

SEQ ID NO: 18418 - protein, 438 aa, Populus trichocarpa; identical to SEQ ID NO: 1926

SEQ ID NO: 18419 - DNA, 1792 bp, Populus trichocarpa
  CDS (252)..(1535)
gtagtcaatagacactgtaaccacctccacatacagccccatcacataaaaaaataaaagaaaataaaaaattgttccatcatcaaatctccttcactcaaactttctcctccaagtttttccaacatccctaaatttgcctctcttcctcgccttctttcagccattatccagttattgttatcgctgttgctgttcctttattgggtcgagcaggtaccagacgggctcgatctctaggtgagaacggtatgccagagatcgaacaagtttccgaaaatgccttatttggcaagtatgacgttggaaagcttcttggatgtggagcctttgcgaaggtctaccatgcacgagatgttcaaacaggaaaaagtgttgctataaagattatcaacaagaagaagatctctagccctagcttgattgctaacataaagcgggagatctccatcatgcgaaagctaaaccatccatatattgtgaaactcatcgaagtcttggcttccaagacgaagatttattgcgtcatggagtatgttaaaggtggagaattgtttactaaaattgctaaaggaagatttagcgaagatcttagcaggaaatacttccgacagttgatatcagcggtcggttattgtcatcttcggggggtttttcaccgggatttgaaacctgaaaacttgcttcttgatgaaaatgggaacctgaaggtttcagattttggtctgagtgctgtcagagatcagacccaacttgatgggcttttgcacacgctttgtggaactccagcttatgttgccccggagattcttgcaaagaaaggttatgatggtgctaagattgatgtctggtcttgtggtgttattctctttgtcttagcagctgggtatttgcccttcaatgatccaaacctgatggccatgtataaaaagatttacaaaggtgaattccgatgccctaagtggatgtccaccgatttgaaacgattcttgtctcggcttcttgatacgaatccggagacaagaatcaccattgatgagatcttgaaggatccttggttcaagaaagggaagcataaggaaattaacttctacgacgaggagttcaacaaggatgatgggagaaaagacgaggaattggcttctacaagcttgaatgccttcgatatcatatctttctcctccggtttgaacttatcagggatgtttgatgattcatataacgtggttgacgacggagagagatttgtctcgaccgaatcaccggaggatttggtgaagagagttgaggagtttgccaaggaggagaggttgagggtgaggagaaggaaagaatgggggctggagatggaagggcaagatggtaatttgatgctgtcggtcgagattcgcaggttgactgatactttgtttgttgtggaggctaagaggaatggtggtgatgctggatgttacaaggagatttggaagaataagcttaagcctgtgatatttaatggcttaattagtactaatagtgttgttaatgatgattaatcaacaagaaagccaggtttctgctaattggaatttggtgatcctttgtttgccagaaaaacgaattctggccatgtatgttgtaatctattatttttcctataaaaaaagaagaaaaaaaactacgaaagctatatattaaatctatttacttgtacttgtaatctctgttcataatataagagttccgaggtacttaagtttggattcgggtatggataatacccgaaacttaattcatggatatttattttcat

SEQ ID NO: 18420 - protein, 427 aa, Populus trichocarpa; identical to SEQ ID NO: 1928

SEQ ID NO: 18421 - DNA, 1257 bp, Populus trichocarpa; identical to SEQ ID NO: 1929
  CDS (1)..(1257)

SEQ ID NO: 18422 - protein, 418 aa, Populus trichocarpa; identical to SEQ ID NO: 1930

SEQ ID NO: 18423 - DNA, 1656 bp, Populus trichocarpa
  CDS (58)..(1431)
aaacctaaaaaacaaaataaaaatctcaccatctcatttctcatctctccaatttccatggcaaccaacaaaaccccaaacaacattagcaaccaaagccaaagtcctctgctcggtcggtacgagatcggcaaacttcttggacatggtacttttgctaaagtataccatgctagaaacgttaaaaccaacgaaagtgttgccatcaaagttattgacaaagaaaagatcctcaaggttggtcttatggctcatatcaaacgtgaaatctccattcttcgccgtgttcgccaccccaatattgtccagctttttgaagtcatggctacaaaggccaagatttactttgtcatggaatatgttcgaggcggtgaattgttcaataaagttgccaaaggtaggttaaaagaagaggttgccaggagatatttccagcaattgatatctgctgtgtctttctgtcatgccagaggtgtgtttcatcgcgatttgaagccagagaatttgttgcttgatgagaatgggaacttgaaagtttcggatttcggattgagtgcagtgcctgatcagattagacaagatggtttgttccatactttttgtgggactcctgcttacgttgctcctgaagttcttgcgaaaaaagggtatgatgctgctaaggttgatatttggtcttgtgggattgttttgtttgtgttaatggctggttatttaccatttcaagatcaaaatattatggttatgtataaaaagatctataagggtgagtttagatgtcctagatggttttcttctgaactagttaggcttctttctaaacttcttgatactaaccccgtcacaagaattacaatccccgagattatggagaataggtggttcaaaaaggggtttaaacatattaaattttatattgaagatgataaagtttgtagtgttcaagacgaggatgatgtgggttcatcttctgatcaatcattatctgaatcggaatcggaattcgaaactagaagaagggttaccactttgcctagacctgcaagtttgaatgcttttgatattatatcgttttcgcctgggtttgatttatctgggttgtttgaggagggtggggagggagcaaggtttgtttctggggctcctgtgacgaagattatatctaaattggaggagattgctaaagttgtaagctttacagttaggaaaaaggattgtagagtgagtttggaagggtctagagaaggtgtgaaaggcccattaacaattgcagctgagatatttgagttgacaccgaaattggttgtggtggaggttaagaagaagggaggggataaaggagagtacgaggagttttgtaacagggaattgaaacctggattgcagaaatccctttcctatcgatgtttcaaatataccatcggattctgaatattagagaaagagagagaaaagaaaagggtatgcttttctctttacttctacttgcataagcttttgtatgacatacataaatgtattttcgatttctttgatgttctgttgtgtcagttaggggattagatgctaatacatgttgtatgttcttttcttctgctgagagatagtagattaatcgaagaatgaagtacttatttctgctgatcttggcaattc

SEQ ID NO: 18424 - protein, 457 aa, Populus trichocarpa; identical to SEQ ID NO: 1932

SEQ ID NO: 18425 - DNA, 1374 bp, Populus trichocarpa; identical to SEQ ID NO: 1933
  CDS (1)..(1374)

SEQ ID NO: 18426 - protein, 457 aa, Populus trichocarpa; identical to SEQ ID NO: 1934

SEQ ID NO: 18427 - DNA, 1839 bp, Populus trichocarpa
  CDS (1)..(1581)
atggcaaccaacaaaaaattaggaaacaagagcaataatagccaaagccaaagccctcttctgggtcggtacgagatcggcaaacttcttggacatggtacttttgctaaggtataccttgctagaaacattaaaaccaacgaaagtgttgccatcaaagtcattgacaaagaaaaagtcctcaagggtggtctaattgctcatatcaaacgtgaaatctccattcttcgccttgttcgccacccctatattgtccagctttttgaagtcatggctacgaaagccaagatttactttgtcatggaatatgttcgtggtggtgagttgttcaataaggttgctaaaggcaggttaaaagaagaggttgccaggaagtatttccagcaattgatttcagccgtttccttttgtcacgccagaggtgtttttcatcgcgatttgaagccggagaacttgttgcttgatgagaatggtaacttgaaagtctccgattttggattgagcgcagtgtctgatcagattagacaagatggtttgttccatactttttgtgggacaccggcttatgttgctcctgaagttcttgcaagaaaagggtacgatgctgctaaggttgatatctggtcttgtgggattgttctgtttgtgttaatggctggttacttaccatttcatgatcaaaatgtcatggttatgtataaaaagatttacaagggggagtttagatgtcctaggtggttctcttctgagctagtcaggcttcttcataaacttcttgatactaaccctgttacaagaattacaatccctgagattatggagaacaggtggttcaaaaaggggtttaagaatattaaattttatatcgaagatgataaagtttgtagcgttgaagaggaggaagatgtgggttcatcttctgatcaatcattatctgaatcggaatcggaattcgaaactagaagaagggttacctctttgcctagacctgcaagtttgaatgcttttgacattatatcgttttcgcctggatttgatttatctgggttgttcgaggaaggtggagagggagcaaggtttgtttcgggggcccctgtgtcgaagattatatctaaactggaggagattgcgaaagttgttagctttacagtgaggaaaaaggactgtagagtgagtttggaagggtctagagaaggtgtgagaggtccattaacaattgcagctgagatatttgagttgacaccgaaattggttgtggtggaggttaaaaagaaaggaggggatagaggagagtacgaggagttttgtaataaggaattgaaacctggattgcagaagttgatgcaggaggaatccgaggctgctgctgctcctaaagttattactactgttcctgtgccatcgggatctccacaattcaccatcgatccttttcctactgattcttcacaattacccgttgatccttttcctaccgattccacacaattacctattaatccttttcctaccgattctacacaattacctattgatccttttcctatcctttcttcacatttaccttcggattccgaatagagaaaaagagagaaaggagaagggtatgctttactctttccgtttgtttaaataagtttttgcatgctatattttgttttttggggcttttaaatttctttgatgttctgctgtgtcatttaggagattagatgctaaaacacatgttgtatgttcttttcttctgccgaggagaaaaaaagtagattaattgaagagaatgacatacttatttctgctggtcttggcaatttagtggtgacttgtgtgttctgttaa

SEQ ID NO: 18428 - protein, 526 aa, Populus trichocarpa; identical to SEQ ID NO: 1936

SEQ ID NO: 18429 - DNA, 1872 bp, Populus trichocarpa
  CDS (1)..(1293)
atggaggtggtcggagagacaccgccggcgtcagcgggggaggtgaacttgttcgggaagtacgagctagggaagcttctgggctacggcgcttttgccaaggtgtaccacgcgagaaacgtgagcacgggtcaaagcgtagccatcaaagcagtcagcaaggcgaaggtgatgaaagagggcttcgtggcgcacgttaagagggagatctctatcatgagccggttgcggcatgcgcacatagtcaggctccatgaagttttggccacgaagggtaaggtttatttcgtgatggagtatgccaaaggaggcgagttgttttccaagatttcgaaagggaggtttagtgaagatctcagccgtcggtattttcagcagttgatcacagccgtcggttactgtcacgcgaggggtgttttccaccgtgacttgaaacctgagaatctcttgctcgatgagaattttaacttgaaaatcacggatttcggtctcagtgcggttacggaacaggtccgacccgacgggctgttgcatactttgtgcggcacacctgcttacgtggcacctgaactcttggctaagaaaggttacgatggagctaaggtggatatttggtcatgcggtgtcgttttgtttgtcctgattgctggctatttgccttttaatgacactaatttgatggcaatgtaccggaagatttacaaaggacaatatcggtgcccgaaatggacctctcctgatttgaagaggctgctgtctcggcttttggacgcgaaccccgagacaaggatcaccattgatatgattattaatgatccatggtttaaaaagggtttcaaagaggagaaaaaactttatttagatgaatttgatttcgacaaagggttcgaggaagaggaggacgagaagtccttgaatgcattcgatataatttcgttctcgtccggttacgatctgtccaggatgttcaatgaatccgatacaatgatattaacagagaggtttgtgtcggccgagaagccggagaaagtcatggagagaatagaggaggttgctagaaaggagggactagaaattgcgaagaggaagaattggggggctaaattggaagggtgcaatggtaattttataatgatcattgaggttcaccggttaacggatcatctggttatgattgaagtgaaggaaaagaaatttaaaataggacctggacaggaaacatgggaagataaactgaaaccacaacttcgaagcctgatttatcaaccggaacaggctgtttccggcaactaacggtgacttaccatttgctgtcactgtggttagttattaatcaccaaatacgggtaattctttcttaattactcgtgatttaattatgtgtaaaatatcaaggtgggggtaaacaattaccgggttctgtgtatttcttcttttttcccggaatttatcatcaatttgatatggaaaatcctcaagttgtttgtgtcttgcttttgcttaaatattctcataaaactagaaggttggaaatcacagcatctgcttcagtgatttctaaattttcttgcagtgttgaggacgacaattccttcattgccttccaagtttcaattagtgcccttgttctctcgacaagaatctattttagaacaaagcaatcgtcatttggtcaccatccttcgatggctacaaactttgctttgttgatacgtcacgtcaacagtccttcagatttagaattgtgattcattttgtttgctcaagtgtttgaaaaaataataacttccctaaacagaagaatttaatttctaattagttgcaccgaaataatcttaatttaagcaaaataattttttgtttattaacaac

SEQ ID NO: 18430 - protein, 430 aa, Populus trichocarpa; identical to SEQ ID NO: 1938

SEQ ID NO: 18431 - DNA, 1774 bp, Populus trichocarpa
  CDS (143)..(1555)
catatcattttaaagcatgatgtctgtgaagatggttgagctattccagtttgtgaaagctcctgtctcataattaccatatagcatctattgccgtagaaggtgtatttttgtttattttgttagaagcttgcagcttgaaatggagaacaaagggaatgtgttgatgcaaaaatatgagatagggagattgttggggcaaggaacttttgccaaggtccaccatgcaagggatctcaaaactggcatgagtgtggcaatcaagatgatcgacaaggagaaggtattcaaggttggaatgatggaccagattaagcgagaaatttctgtcatgagactgattaggcatcccaatgtggtggaactttatgaggtcatggccaccaaaactaagatttactttgttatggaatacgttaaaggtggtgagttgttcaacaaggttgccaagggaaagctcaaagaggatgttgccaggaaatattttcaacagctgatcagtgcagttgattactgtcacagtagaggagtctctcatcgtgatctgaaaccagaaaacctgctgttggatgagaatgagaatctaaaggtttctgattttggattaagtgcacttgctgaatcgaagcggcaagatggtttactacatacaacctgtggaacccctgcatatgttgctccagaagtgattaacagaaaaggctacgatggagctaaagctgatatttggtcctgtggagttatcttatatgttctactggccggctatctcccattccgtgatccaaatctgatggagatgtataggaagattgcgaagggagaatttaaatgccccaattggtttgcacccgaagttcgcaagcttctgtcaaagatactggatccgaacccaaacacaaggatatcaatggccaaaataatggaaaattcttgggttcggaaggatttgcaatccagaccctgtgttcttgaagccgaagtgaaagaaccagctcctttggactctgaggctgtttttggcataaatgagattagctgcgctgctgtggaaccaaagcaagaagtggcgaagccttgcaacttaaatgctttcgatattatctccttttctgcgggctttgacctgtctggcttatttgaggagaaagagcagaagaaagaagtgaggtttacatcaaacaagcctgcctccaccatcatctctaagctcgaagacatcgccaagcgtttgaggctgaaaataaagaaaaacgatggaggtttactgaaaatagaaggttcaaaggaaggccggaaaggagtcatgggcatcgatgcagaaatttttgagatcactccttttttccatttggtggagatgaaaaagtccagtggagataccgtggagtatcagaaggtagtgaaacaagacattcgacctgcactcaaggacattgtttggagctggcaaggagaacagcaaagggaacaactacaactacaagaacagcaggagctacagccttctcatgcatccacaacgcaggttgtctcaactcagaattcatcatgactataatgatcgtgctgttgaatatactttctaccgggtctctttgctgaggatgatcatctttgtgggttagcactatgttctaattttctatttttcaatgtttcgtggaattgtacgcattgacaatctgtgaaggtactgtttcaggttctcatcatgtaattagaatcagagccaacaaatgagctctaatgcatatttttctgcctgtttatc

SEQ ID NO: 18432 - protein, 470 aa, Populus trichocarpa; identical to SEQ ID NO: 1940

SEQ ID NO: 18433 - DNA, 1383 bp, Populus trichocarpa; identical to SEQ ID NO: 1941
  CDS (1)..(1383)

SEQ ID NO: 18434 - protein, 460 aa, Populus trichocarpa; identical to SEQ ID NO: 1942

SEQ ID NO: 18435 - DNA, 1374 bp, Populus trichocarpa; identical to SEQ ID NO: 1943
  CDS (1)..(1374)

SEQ ID NO: 18436 - protein, 457 aa, Populus trichocarpa; identical to SEQ ID NO: 1944

SEQ ID NO: 18437 - DNA, 1645 bp, Populus trichocarpa
  CDS (95)..(1495)
ggtatggcagccatgcaagaagaagagatcttgatcgatcaaaaacaggattttcagttttagagagagaaatttaactggttctagttagagaatgtcgtcttctagaagtggtggtggtggtggtggtggaggaggaggaagcggaagcaagacacgtgtggggagatacgaactcggaaggaccctcggagaaggaaattttgctaaggtgaaattcgctaggaacgttgagacgaaagagaatgttgccatcaaaattctcgataaagagaatgttcttaagcacaaaatgatcggtcagattaaacgggagatttcaacaatgaagttaatcagacaccctaatgtcgtccgcatgtatgaggtgatggcgagcaagaccaaaatttacattgttttacaatttgtgacgggtggtgaacttttcgacaaaattgcaagtaaggggaggttgaaagaggatgaagcgagaaagtattttcaacaacttatctgtgctgtagattactgccacagcagaggtgtataccatagggatctgaagcctgaaaatctgctaatggatgctaatgggattcttaaagtttcggattttggattgagtgcactacctcagcaagttagagaagatgggttacttcacacaacgtgtggaacaccaaattatgttgctccggaggtgatcaacaataagggctatgatggtgccaaggcagatttatggtcatgtggcgtgattctttttgtcttgatggctggctacttaccttttgaagaagccaacctgatggcactatacaaaaagatattcaaggctgacttcacgtgtcctccatggttctcctcaagtgcaaagaaactaatcaaaaggattcttgaccctaatccctcgacacgtatcaccattgccgagcttattgaaaatgaatggtttaagaaaggatataagccacctgcttttgaacaagctaatgttagcctcgacgatgtgaactctatcttcaacgaatcagtggattctcgaaacctagttgtggagaggcgagaagaagggtttatagggcctatggctcctgtaaccatgaatgcatttgaactcatctctacctctcagggtcttaaccttagtagtctttttgagaaacaaatggggcttgttaaacgggaatcaagattcacatccaaacattctgctagtgagataatctcaaaaattgaagcagcagcagcgcctttgggttttgatgttaagaaaaataacttcaagatgaagcttcaaggggacaaggatgggcgtaagggtcgtctatctgtagcaacagagatctttgaagtggccccttctctttatatggtcgaggttcgcaagtctggtggagataccctggaatttcacaagttttacaagaacctctcaactggactgaaagacatcgtatggaaaacaattgatgaagaaaaggaggaagaagaggcagcgacaaatggttagtattcattacttgtatgttaagtgcagtctttcagggcatgtaatattgagtctctgaaattttttattccctggagactctgtatacagaacaaattttctggaaaaaaattgacctgtgcacagcattctgtaaaatgattggaaaac

SEQ ID NO: 18438 - protein, 466 aa, Populus trichocarpa; identical to SEQ ID NO: 1946

SEQ ID NO: 18439 - DNA, 1730 bp, Populus trichocarpa
  CDS (194)..(1528)
aatcaaatcaaaccaaacgaacccaacccaacctccctctcagagctccatccatctttaaaaaaaatccccaaaaaacactccgcacgatccggcggttccatttcccgaaattgatccatgctgttttgaatattcgataattgagagcgaaagaaaagaaagaatgagctgatcgtaattataatttataatgatgaagaaagtaacgagaaaggtaggaaaatatgaagttggccgtacaattggtgaaggaaccttcgccaaggtcaaatttgctcaaaatagagaaacaggagagagtgtcgccatgaagattctttctaaatccgccattcttaagcacagaatggttgatcagataaaaagagagatatcgatcatgaagcttgtcagacatccttacatagttatgctgcatgaggttttggcgagccggacgaagatatatataattctagagtttgttactggaggagaattatttgataaaattgttcatcaaagaagacttgaggagaacgagtcgagacggtattttcagcagcttattgatgcagttgctcattgtcattgcaagggggtgtaccacagagacctgaagcctgaaaatcttcttcttgatgcatttggaaatttgaaggtttctgactttggattgagtgcgttgccgcagaaaggggttggacttcttcatacgacatgtggaaccccgaattatgttgcacctgaggtgcttggtcaccaaggttatgatggggctgctgctgatgtgtggtcatgtggagtcatcctctttgttctaatggctggatatcttccatttgaggagacagaccttccaaccttgtaccgaaagataaatgctgcggaatattcgtgtccattttggttttcccctggggcgaaagcattgatagataagatactcaatcccaatcctaaaactcgtatagggattgagggaattaaaaaacatccatggtttcagaaaaactatgagcctgttggacatagggaagatgaggaagtgaatttggatgatgttcatgctgtttttgatgacattgaggatcaatatgtagcagagcaattggagaacagtgaagatggtcctctggtaatgaatgcatttgagatgattaccctgtctcaagggttgaatctatcagcgttgttcgacagacgtcaggattatataaaacgacaaactcgttttgtatcacgcaaacctgcaaaagatataatttcagcaattgaagcagttgcagaatcaatgaatctcaaggtccatacacgaaattacaagacaagacttgaaggagtatctgaaaacaaggctggacaatttgcagttgttctggaggtttatgaagttgctccatcacttttcatggtagatgctcggaaggcttctggggaaactcttgaatatcacaagttctacaagaatttctgcactaagctagaaaatatcatctggaaaccaccagagggtgcaaaacttcctgcctgcttcgaacaatgacttgctgatccagtcttttgggtgtgaagcaaatcagtgagaagaaagggcaaaaaggaagataatcctgccgacagaactgccagaaatacgcactgatggcatgccagtgtacttgttcctggttcatatattataataatgtttgtaaattacaaatgacttgtctgatgtgaaatctattgtattttagaacttgaag

SEQ ID NO: 18440 - protein, 444 aa, Populus trichocarpa; identical to SEQ ID NO: 1948

SEQ ID NO: 18441 - DNA, 1460 bp, Populus trichocarpa
  CDS (1)..(1296)
atgatgaagaaagtaacgagaatggtaggaaaatatgaagttggccgtacaattggcgaaggaaacttcgccaaggtcaaatttgctcaaaatagagaaactggagagagtgtagccatgaaaattctcgctaaatcaaccattctcaagcacaaaatggttgatcagataaaaagagagatatcaatcatgaagattgtgagacatcctaacatagttaggctgcatgaggttttgtcgagccggacgaagatatatataattcttgagtttgttactggaggagaattatttgataaaattgttcatcaaggaagactttccgaaaatgaatcgaggcggtattttcagcagcttatagatgctgttgctcactgtcaccggaagggtgtgtaccacagagacctgaagcctgaaaaccttcttcttgatgcttttgggaatttgaaggtttcagactttggattgagcgcgttgcgccagaaaggggttggacttcttcatacaacgtgtggaaccccaaattatgttgcacctgaggtacttggtcaccagggttatgatggagctgctgctgatgtgtggtcatgtggagtcatcctctttgttctaatggctggatatcttccatttgaggagatagaccttccaaccttgtgccgaaagtattcttgtccattttggttttctcctgtggcaaaagcattgatagataagatactcgatcccaatcctaaaactcgtatagggattgagggaattaaaaaacatccatggtttcggaaaagctatgagcctgttggacatagtgaagaagaggaagtgaatttggatgatgttcatgcagtttttgatgacatcgaggatcattatgtagcagagcaattggagaacagtgagggcggtcctttggtaatgaatgcatttgagatgattgccctatctcaagggctgaatctatcagcattgtttgatagacgtcaggattatgtaaaaaaacaaactcgttttgtatcccacaaaccagcaaaagttataatttcagcatttgaagctgttgcggaatcaatgaatctcaagttccatacacataattacaagacaagactcgaaggaatatctgaaaataaggctggacaatttgcagttgttctggaggtttatgaagttggtccatcacttttcatggtagatgcacggaaggcatctggggaaactcttgaatatcacgagttctacaagaacttctgcgctcagctagaaaatatcatctggaaacctccagaagggtgctaaaattccagcctgcttcacacaatgacttcctgatccagttttttgggtgcgaagcaaatcagtgaccaaaagggcaaaaaggaaggtattcttcccgataagaatttctagaaataggcattgatggcatggcagtgttacttgtttctggttcatatattgta

SEQ ID NO: 18442 - protein, 431 aa, Populus trichocarpa; identical to SEQ ID NO: 1950

SEQ ID NO: 18443 - DNA, 1798 bp, Populus trichocarpa
  CDS (269)..(1624)
atataaaaataatactaggtgctctccaatggctgcaaaaccatcaacagcgttccttttctcttctatattttaaagaaaaaacaccttctttcaacaaccttttgatggattccatcagaattagcatctcttcaatcctttcttggattcccttagaacatgttctttgatagccaaatcaccaaagttgaacaaaaagagaaaatcttgttgagttcttgagctaaacgagaggaggaggagaattgtttttcgtttttcaaatatggaggagaggcatgttatttttgggaagtatgaaatgggtaggcttttagggaagggaacttttgctaaagtttactatgggaaacacttggtgacaggagagagtgtggcaatcaaagtcataagcaaagatcaagtcaagaaagaagggatgatggagcaaatccagagagaaatctcagtcatgcgtcttgttcgtcatcccaacattgtagagctcaaggaagtcatggctaccaagacaaaaatcttcttcatcatggagtatgttcgaggaggagagttgtttgccaaagtagccaaaggaaggctgaaagaagaagctgctcgaaaatatttccagcaactaatcagcgcaattgattattgtcatagcagaggtgtttatcatagagatttgaagccagagaatatgttgcttgatgaagatgaaaacttgaaaatctctgattttggcttgtcagccttgcctgaacaatttcggcaagatgggcttttgcatactcagtgtggaactcctgcttatgttgccccagaagtcttgagaaagaaaggctatgatggatcaaaagctgatatatggtcatgtggggtgattctttatgtgcttcttgcaggattcttgccatttcaagatgagaatgttatgaagatgtacaggaaagtcttcaaggctgaatatcagtttccgccttggttttcaacagattctaagaggttgatttcaagacttcttgttgctgatcctgaaaagagaatcacaattcctgccataatgagaaatcattggtttcttaaagggttttcaagaccagtggccttttctatccaagaatcaagcatggatcaaacaggacaagaacaagatcttgattcttgttctgttgtcaacaccaaggtatcatcaccagaattcttcaatgcattcgagtttatttcctcaatgtcatccggctttgatctgtctagtctttttgagactaagaggaaatcaggctctatgttcacttcaaaattttcagcgagtgctatcatggaaaaaattgaaggggttgcaaaagggctgagttataaggtggcaaaagtcaaagatttcaaagtgacgttacaaggtccatgcgagggtagaaaggggaagctggcagtgacggcggaggtgttcgaggtggcaccggaggttgcggtggtggagttctccaagtcttccggagataccttggagtatactaagttctgtgaggaagatgttaggcctgcactaaaagacatcgtttggacatggcaaggagacaatgtttgtaataaagataacaacaatagtcatgtagaagatcgtgaaattcaaatgttgtagaaattaaggctttgatcttaatttggtgagttaattttaggattttatataatctgtaaataagttttcgttatttaattaatgcatcaagttgagtgtttttgttaagctagcacagtgtgtgtctatatatatatatatatatatatattattaagcttgaattcaagatta

SEQ ID NO: 18444 - protein, 451 aa, Populus trichocarpa; identical to SEQ ID NO: 1952

SEQ ID NO: 18445 - DNA, 1625 bp, Populus trichocarpa
  CDS (270)..(1625)
aattcttgcagcccccgaggggaaaaaaataaattccttggtgctcctctgttggcctcaaaacaatcaacaaatatcccttcttcttctcgattttatacgaccatctccttcttttgacaacccctttaatgggatccatcaaaattagcatctcttccatcctttcttggattcccttacatcatgttgtatagccaaatcactaaagtctcaaattaaaccaagaaagaaaatctcgatgacaagttgttgagctttattcagtcatggaggagaggcatgttctttttgggaagtatgagatggggaggctactggggaaggggacttttgctaaagtttactatgggaaacactcggtaaccggagacagtgtggctatcaaagttataaacacagatcaagtcaagaaagaaggcatgatggaacaaatccagacagagatctcagtgatgcatcttgttcgtcatcccaacattgttgagctcaaggaagtcatggctacaaagactaagatcttcttcatcatggagtatgttcgaggtggagagttgtttgccaaagtagccaaaggaaggctcaaagaagaagttgctcgaaaatatttccagcaactaatcagcgcgattgattattgtcacagcagaggtgtttatcatcgagacttgaagccagagaatatattgcttgatgaagacgaaaacttgaaaatctctgattttggcttgtcagccttacctgaacaattgctgcaagatggacttttgcatactctgtgcgggactcctgcttatgttgccccagaagttttgagaaagaaaggctatgatggatcaaaagcagatacatggtcatgtggggtgattctctacgtgcttcttgcaggattcttgccatttcaagatgaaaatgttatgaagatgtacaagaaaatcttcaaggctgaatatgagtttcagccttggttttcaacagatgctaagaggttgatttcaagacttcttgttgctgatcctgaaaggagaatcacaattcctgccataatgagaaatcattggtttctgaaagggtttttaagaccaatggccttttcaattcaagaatcaatcatggataaaacagaagaagatcaagatcttgattcttgttctgttgtcaagcctaaagtatcatcaccaagattcttcaatgcattcgagttcatctcttcaatgtcatctgggtttgatctgtccagtctttttgagactaagaagaaaccagggtcgatgttcacttcaaaagtgtcagcaagtgctatcatggaaaagattgaaggagttgcagaagggctgaattttaaggtagcaaaagttaaagatttcaaagtgaggttacaaagtccatgtgagggaagaaaggggaagctggcagtgacaacagaggtgttcgaggtggcaccggaggttgcggtggtggagttctccaagtcttccggagataccttggagtatgccacgttctgcaaggaagatgtcaggcctgcactaaaagacattgtttggacatggcaaggagacaatgtttttcttatcggtgagattcaaagattttttaataataaaatcaataattttaaataa

SEQ ID NO: 18446 - protein, 451 aa, Populus trichocarpa; identical to SEQ ID NO: 1954

SEQ ID NO: 18447 - DNA, 1038 bp, Solanum lycopersicum
  CDS (1)..(1038)
atggaaagatatgaaattcagaaagacattggttctgggaattttggtgttgctaagcttgtgaaagataaatggagtggtgaactttttgctgtcaaatatattgaaagaggcaaaaagattgatgagcatgttcaaagggagataatgaatcacagatctttgaggcatccgaatatcattagatttaaggaggtatttctcacaccagctcatctagcaatagtgatggaatatgcttccggaggagagctttttgaacgaatatgcagtgctggaagattcagtgaagatgaggcaaggtttttctttcaacaacttatatcaggagtgagttattgtcattcaatgcaaatttgccacagagatcttaagcttgaaaacacattgttagacgggagctctacacaatgtctaaaaatatgcgattttggctattctaagtcagcagcattgcattcacaaccaaaatctacagttggaactccggcctatatcgcaccagaagtcttatcaagaaaagaatatgatggaaagatagcagatgtttggtcttgtggggtcacattatatgtgatgctggtcggcgcgtatccgtttgaagatcctgatgatccaagaaacttcaagaagacaataactaggatattaagcgtacaatattcgattccttactatgtccgagtctccaaggagtgtaatcacctcttatctcggatattcgtagctgatccagagaagaggataacgatcgaagaaataaagaagcatccatggttcttaaagaacttgcctaaagaatttatgaaaaaaggagaggaagctagtttagtacaaatgaatagtgaagaaaaaccattacaaagtattgaagaagcattggctataattcaagaagcaagaaaaccaggagagggatctaaagcaagtgattattttgttaacagcagcattagtatggatcttgatgattttgatactgatgctgatttagatgatgaaattgacacaagtggtgattttgtatgtgcattatga

SEQ ID NO: 18448 - protein, 345 aa, Solanum lycopersicum
MERYEIQKDIGSGNFGVAKLVKDKWSGELFAVKYIERGKKIDEHVQREIMNHRSLRHPNIIRFKEVFLTPAHLAIVMEYASGGELFERICSAGRFSEDEARFFFQQLISGVSYCHSMQICHRDLKLENTLLDGSSTQCLKICDFGYSKSAALHSQPKSTVGTPAYIAPEVLSRKEYDGKIADVWSCGVTLYVMLVGAYPFEDPDDPRNFKKTITRILSVQYSIPYYVRVSKECNHLLSRIFVADPEKRITIEEIKKHPWFLKNLPKEFMKKGEEASLVQMNSEEKPLQSIEEALAIIQEARKPGEGSKASDYFVNSSISMDLDDFDTDADLDDEIDTSGDFVCAL

SEQ ID NO: 18449 - DNA, 1362 bp, Zea mays; identical to SEQ ID NO: 1955
  CDS (1)..(1362)

SEQ ID NO: 18450 - protein, 453 aa, Zea mays; identical to SEQ ID NO: 1956

SEQ ID NO: 18451 - DNA, 1395 bp, Zea mays; identical to SEQ ID NO: 1957
  CDS (1)..(1395)

SEQ ID NO: 18452 - protein, 464 aa, Zea mays; identical to SEQ ID NO: 1958

SEQ ID NO: 18453 - DNA, 1338 bp, Brassica juncea; identical to SEQ ID NO: 1959
  CDS (1)..(1338)

SEQ ID NO: 18454 - protein, 445 aa, Brassica juncea; identical to SEQ ID NO: 1960

SEQ ID NO: 18455 - DNA, 1536 bp, Oryza sativa subsp
  CDS (1)..(1536)
atggcgcggatggggatcagcaagggaggcagcggcaaggaggcgaagaagccgccgctgctgctggggcgattcgaggtcgggaagctgctggggcagggcaacttcgccaaggtgtaccacgcgcgcaacgtggccaccggcgaggaggtggcgatcaaggtgatggagaaggagaagatcttcaagtcggggctcacggcgcacatcaagcgggagatcgccgtgctccggcgcgtccgccacccgcacatcgtgcagctgtacgaggtgatggccaccaagctccggatctacttcgtcatggagtacgtccgcggcggcgagctgttcgcgcgcgtggcgcgggggcggctgcccgaggccgacgcgcggcgctacttccagcagctggtgtccgccgtcgcgttctgccacgcgcgcggggtgttccaccgcgacatcaagccggagaacctcctcgtcgacgacgccggcgacctcaaggtgtccgacttcgggctctccgcggtggcggacgggatgcggcgcgacgggctgttccacacgttctgcggcacgccggcgtacgtcgcgccggaggtgctgtcgcgccgcgggtacgacgccgccggggccgacctctggtcctgcggcgtcgtgctcttcgtcctcatggccggctacctccccttccaggaccgcaacctcgccggcatgtaccgcaagatccacaagggcgacttccgctgccccaagtggttctcgccggagctcatccgactcctccgcggcgtcctcgtcaccaaaccgcagcgccgcgccaccgccgaggggatcatggagaacgagtggttcaagatcggcttccgccgcttctccttccgcgtcgaggacgaccgcaccttcacctgcttcgaacttgacgacgacgccgccgtcgacgcgcccacctcgccgccggacacgccgcggacagtggacagcggcgacgtcggcgctgctccgacgcgaccaagaaaagccgggagcctgacgtcgtgcgactcggcgccgtcgttgctggaagggagattcgggctgggagggagctcgcggcggcggtcgagcctgaacgcgttcgacatcatctccttctccccggggttcgacctctcaggactgttcgatcaggacgacggcggcggcgccggcgccggcagcatcccggagcagcagaaacacacggcgaggttcgtgtcggcggcgccggtggaggtgatcgtggcgacgctggaggcggccgcggcggcggcgggcatggcggtgcgggagagggaggacgggtcgatcagcatggaggggacacgcgagggcgagcacggcgcgctggcggtggccgcggagatctacgagctcacgccggagctggtggtggtggaggtgcggcggaaggccggcggcgccgccgagtacgaggagttcttccgggcgcggctcaagccaagcctccgcgagctcgtctgcgacgaccggccatgcccggaggactccggcgagctctcccggagcctttga

SEQ ID NO: 18456 - protein, 511 aa, Oryza sativa subsp
MARMGISKGGSGKEAKKPPLLLGRFEVGKLLGQGNFAKVYHARNVATGEEVAIKVMEKEKIFKSGLTAHIKREIAVLRRVRHPHIVQLYEVMATKLRIYFVMEYVRGGELFARVARGRLPEADARRYFQQLVSAVAFCHARGVFHRDIKPENLLVDDAGDLKVSDFGLSAVADGMRRDGLFHTFCGTPAYVAPEVLSRRGYDAAGADLWSCGVVLFVLMAGYLPFQDRNLAGMYRKIHKGDFRCPKWFSPELIRLLRGVLVTKPQRRATAEGIMENEWFKIGFRRFSFRVEDDRTFTCFELDDDAAVDAPTSPPDTPRTVDSGDVGAAPTRPRKAGSLTSCDSAPSLLEGRFGLGGSSRRRSSLNAFDIISFSPGFDLSGLFDQDDGGGAGAGSIPEQQKHTARFVSAAPVEVIVATLEAAAAAAGMAVREREDGSISMEGTREGEHGALAVAAEIYELTPELVVVEVRRKAGGAAEYEEFFRARLKPSLRELVCDDRPCPEDSGELSRSL

SEQ ID NO: 18457 - DNA, 1395 bp, Oryza sativa subsp; identical to SEQ ID NO: 1961
  CDS (1)..(1395)

SEQ ID NO: 18458 - protein, 464 aa, Oryza sativa subsp; identical to SEQ ID NO: 1962

SEQ ID NO: 18459 - DNA, 1437 bp, Oryza sativa subsp; identical to SEQ ID NO: 1963
  CDS (1)..(1437)

SEQ ID NO: 18460 - protein, 478 aa, Oryza sativa subsp; identical to SEQ ID NO: 1964

SEQ ID NO: 18461 - DNA, 2769 bp, Oryza sativa subsp
  CDS (1)..(2769)
atggatgggaggtcaatcttgatgggccgttatgaggttgggaagcaattaggacaaggaacatttgcaaaggtgtattatgcacgaaatcttactaccggccaagctgttgccataaagatgatcaacaaggataaggtcatgaaagttgggctaatggagcaaataaagagggagatttcaattatgagattggtgaaacatccaaatgttcttcagttatttgaggttatggctagcaagagcaagatttattttgttctggagtatgctaaaggtggtgagcttttcaacaaaattgctaaggagggaaagctcagtgaggattctgcgaggagatatttccaccaattgatcaatgcagttgactattgccatagtcgaggtgtttatcatcgtgacttaaagcctgaaaatctgctcctggatgagaatgaaaaccttaaagtctcagattttggtttaagtgccctggctgagtccaagaggcaagatggtctcctgcatactacatgtggaactccagcttatgttgctcctgaagttcttagcaggaaaggctatgatggtgcaaaggcagatgtatggtcttgtggagtaattttgtttgtgcttgtggctggttaccttcctttccatgatccaaatttgatagagatgtacagaaagatttgcagagcagacttcagatgccctcgttacttttctgctgagctgaaggatcttatacataaaatccttgattcagatccaagtactaggatttctatcccaaggataaagagaagtacttggtacagaaaaccagttgaaataaatgctaaaaacagtgaggcagccacaacaaacagcatctcttcaggtgtagctacaacctcaggttctgcagagtgcagcacttctgaggaaaatcaagggtccttaagcctcccaaacctgaatgcatttgacataatttctctctcaacagggtttaatctatctgggttttttgaggatacgcatggtcaccaggaagaacggtttaccactaggcagcctgtgacaacagtacttggaaagctgaaggaattggccaaacgcctgaaactaaaagttaagaagaaggataatggagttttgagattggcagcaccaaaggaaggaaagaagggctttcttgaacttgatgcagagatttttgaggtcaccccttcattcctcttagttgagttgaaaaagaccaacggggatactatggagtatcgaaagctggtcaaagaagatataaggccagcactcaaggatattgtttgggtgtggcaaggtgatgagcacctgaactcacaatctatcctgcaaggagagcagcagcagtccccattgccaccagagctaccacaggatcagttgcaaccatcattgccacaacaggagaagcaggacatgcctgaaccaccgttgttgccacaagtcaacgcctcaactgggaatcacaatgaccattggttggtccattggttgatgatgaaaccttacaggtttcctgccccagattctgtaccaagtacaggaagagacgaggaagaagggtcgtcgcaccatggaaatggctcaggcgcagccagagagaacccagagaacccattgccggacctggcgctggcgaaatccgagtcagaccggataaaagccttttaccagacggtcctctcggccattgtcgtgttcatcgtggcggcgctgtcaggatacaaggacatgaagccgctctactcgaccacaaatcacaagaaagttcacctcagcaacctccttgtcatcgaggggttctgcatgattgctaccttcatatgcgcggctgttttgatgatgtacgagttctacacgtgcagggacctcaccgtcctcatcgcggtcgccggagcgatgctggttgcgacggacacgatcctcgtcgtcatcgccaacagggacaacgcggtgttcgccgttcttttcgtgccggtgctgctgttagtcggcatggctgtgtacaccggagcatcgatggaggagcagccgccgaactcgccgcacgacggcgggtacgatgaggcaaccaaaagcacctttgatctggccaccgttagtacaatggctgcattgggtttgctggggaccatcgtcttcggctacctgaaaacgcccgagaagaagagcgaacatgatgaccctccactggacctcgccgtctgctacatcgcctcgacggtctgcctgaccgtcatggcgcggaaggctctggtcggaatcatcggcagcctcaggcacgtcctgctcgcctctctggcgctgatggcggcggttgtctccgtcgagttcttggacggcttcgtcgtgctctccgtctggccggaggccgtcgcgctggtgctgtactacgcggcacagctctgctcggggcggcagcccgggggaggagtcgggagccggccatggatcgaatttgtcttccggattgtcgccaccgccgggttcacgctcatggccgggctgtacgcggcgttcctcgggaccaaccactacagcgtgtacctcaaggccgccatgctcgtgctcctgatggcagttctctcgagcctcagccgtctggcgaacccggtttacatgcccgagatcgacggagctctccttgagttctgcgtcgccggcgtggcgctcgccttccccgccgtgtcgcttctggttgcttgtcccttggtgtttaaggtcttcgttgacctatatattcatcatagttctctttga

SEQ ID NO: 18462 - protein, 922 aa, Oryza sativa subsp
MDGRSILMGRYEVGKQLGQGTFAKVYYARNLTTGQAVAIKMINKDKVMKVGLMEQIKREISIMRLVKHPNVLQLFEVMASKSKIYFVLEYAKGGELFNKIAKEGKLSEDSARRYFHQLINAVDYCHSRGVYHRDLKPENLLLDENENLKVSDFGLSALAESKRQDGLLHTTCGTPAYVAPEVLSRKGYDGAKADVWSCGVILFVLVAGYLPFHDPNLIEMYRKICRADFRCPRYFSAELKDLIHKILDSDPSTRISIPRIKRSTWYRKPVEINAKNSEAATTNSISSGVATTSGSAECSTSEENQGSLSLPNLNAFDIISLSTGFNLSGFFEDTHGHQEERFTTRQPVTTVLGKLKELAKRLKLKVKKKDNGVLRLAAPKEGKKGFLELDAEIFEVTPSFLLVELKKTNGDTMEYRKLVKEDIRPALKDIVWVWQGDEHLNSQSILQGEQQQSPLPPELPQDQLQPSLPQQEKQDMPEPPLLPQVNASTGNHNDHWLVHWLMMKPYRFPAPDSVPSTGRDEEEGSSHHGNGSGAARENPENPLPDLALAKSESDRIKAFYQTVLSAIVVFIVAALSGYKDMKPLYSTTNHKKVHLSNLLVIEGFCMIATFICAAVLMMYEFYTCRDLTVLIAVAGAMLVATDTILVVIANRDNAVFAVLFVPVLLLVGMAVYTGASMEEQPPNSPHDGGYDEATKSTFDLATVSTMAALGLLGTIVFGYLKTPEKKSEHDDPPLDLAVCYIASTVCLTVMARKALVGIIGSLRHVLLASLALMAAVVSVEFLDGFVVLSVWPEAVALVLYYAAQLCSGRQPGGGVGSRPWIEFVFRIVATAGFTLMAGLYAAFLGTNHYSVYLKAAMLVLLMAVLSSLSRLANPVYMPEIDGALLEFCVAGVALAFPAVSLLVACPLVFKVFVDLYIHHSSL

SEQ ID NO: 18463 - DNA, 1482 bp, Oryza sativa subsp
  CDS (1)..(1482)
atggatgagagaaggacaattttgatggatcgctatgaaataggtaggcagttaggacagggaaattttgccaaggtatattatgctcggaatctcacaagcggacaggccgttgcaataaagatgattgataaggagaaggtaacaagggttgggctaatggtgcagataaagagggagatttcaataatgagattagtaaagcatccaaacattcttcagctttttgaggtgatggcaagcaagagcaaaatttactttgttttggagtatgctaaaggcggtgaacttttcaagaaaatatccaagggaaagttcagtgaagatgttgcgaggcggtatttccatcagttgatcagtggtatagactactgccacagccggggtgtttatcaccgtgatttgaagccagaaaacctacttctagatgagaatgagagcttaaaagtctcggattttggtttaagtgccctttccgagtccaagagacatgatggcctccttcataccacctgtggaactccagcttatgttgctcctgaagttcttagtaggagaggctacgacggtgcgaaggctgatatatggtcttgtggagtaattctgtttgtgcttgtatctggctaccttcctttccatgacacaaatcttatagagatgtatagaaagattgccaaagctgaatacaaatgccctcgttccttttctgctgagttgaaggatctgctatataagatacttgatccagatccaagtactagaatttctatcccgaagataaagagaagcgcttggtacagaaaatccagtgatgtaaatgcactgaagagcaaacatgaaacaggagacaaggtgtataagggtgaagccacaacctctgacacaacagaatgcagtatttttgagggaaatcgtgcgtcatcaagagacaaagtgtacactaatggtgaagccacaacctctgactcaccagaatgtagtaattccgatggaaagcaagcttcattaagcctcccgaacttgaacgcgtttgacatcatttctctgtctaccgggtttgacttatccaatttgtttgaagaaagatatggccggagggaagagagatttaccactaggcaaccggcggcagctatatttgctaagctaaatgaattggccagacgcttcaagctcaaaattaagaaaaaagaaaatggggttctgaggttggtagcaccaaaggaaggaataaaaggattacttgagcttgatgctgaggtttttgagcttgctccatctttccatttagttgaatttaaaaagtccaatggggacactatagaatatcaaaagctcatgaaggaagatataaggcctgcacttaaggatatagtttgggcatggcaaggaggtcagcaccagcaacctgagcaatctatgcaaggaatgcaaggagagcagcagccgtcacgtttaccatcacagcagccacagggctaa

SEQ ID NO: 18464 - protein, 493 aa, Oryza sativa subsp
MDERRTILMDRYEIGRQLGQGNFAKVYYARNLTSGQAVAIKMIDKEKVTRVGLMVQIKREISIMRLVKHPNILQLFEVMASKSKIYFVLEYAKGGELFKKISKGKFSEDVARRYFHQLISGIDYCHSRGVYHRDLKPENLLLDENESLKVSDFGLSALSESKRHDGLLHTTCGTPAYVAPEVLSRRGYDGAKADIWSCGVILFVLVSGYLPFHDTNLIEMYRKIAKAEYKCPRSFSAELKDLLYKILDPDPSTRISIPKIKRSAWYRKSSDVNALKSKHETGDKVYKGEATTSDTTECSIFEGNRASSRDKVYTNGEATTSDSPECSNSDGKQASLSLPNLNAFDIISLSTGFDLSNLFEERYGRREERFTTRQPAAAIFAKLNELARRFKLKIKKKENGVLRLVAPKEGIKGLLELDAEVFELAPSFHLVEFKKSNGDTIEYQKLMKEDIRPALKDIVWAWQGGQHQQPEQSMQGMQGEQQPSRLPSQQPQG

SEQ ID NO: 18465 - DNA, 1338 bp, Oryza sativa subsp; identical to SEQ ID NO: 1965
  CDS (1)..(1338)

SEQ ID NO: 18466 - protein, 445 aa, Oryza sativa subsp; identical to SEQ ID NO: 1966

SEQ ID NO: 18467 - DNA, 1392 bp, Oryza sativa subsp
  CDS (1)..(1392)
atggcggaggcggaggcggaggcggcgggggcgggggcgggggcgggggcggggccggcgaggaggacgacgagggtggggcgctacgagctcggcaagacgatcggggaggggagcttcgccaaggtcaaggtcgcccgcgacacgcgcaccggcgacaccctcgccatcaaggtgctcgaccgcaaccatgtgcttcgccacaagatggtcgagcagatcaaacgggagatttccacaatgaagctaataaaacatccaaatgtggtccagttgcatgaggtcatggctagcaaatcaaagatatacatggttcttgaatatgttgatggaggcgagctttttgataagattgtcaattctgggagactaggagaagatgaagcaagaagatacttccatcaacttataaatgcagtagattattgccacagcagaggagtgtaccatagagatctgaagccagagaatctgcttcttgattcacatggagctcttaaagtttcagattttggccttagtgcgtttgctccacaaacaaaagaggatggacttctgcatactgcttgcggaacaccaaattatgttgcacctgaggtgcttgctgataaaggttatgatggtatggctgctgatgtatggtcctgcggcataatcttatttgtcctcatggctggatatttacctttcgatgaccccaacctaatgaccctttacaaactgatctgcaaggcaaaagtttcttgtccacactggttttcttcaggtgcgaagaagttcattaagcgcatacttgatcctaatccctgcacaagaataacaattgcacaaattttggaagatgattggttcaaaaaggattacaaaccaccactttttgagcaaggtgaagatgtgagccttgatgatgttgatgctgcattcgattgttcagaggagaatctcgtggcagagaagagagagaagcctgaatccatgaatgcgtttgctctaatttcaaggtcacagggattcaaccttggaaatttatttgagaaggaaatgatgggaatggtgaagcgggaaacttccttcacatctcaatgtacaccacaggagatcatgtctaaaatagaggaagcttgtggacctcttggtttcaatgtgcggaaacaaaattataagatgaagttaaaaggtgataagactggaagaaaaggccatttatctgtagcaacggaggttttcgaggttgctccatcactccacatggttgagcttcgtaaaactggaggggacacgctggagtttcacaatttctacaacaatttctcgtcagagttaaaagacatagtgtggaaatctgaatctgacgcaaaagcagcaaagaagaggctccttgggagaggataa

SEQ ID NO: 18468 - protein, 463 aa, Oryza sativa subsp
MAEAEAEAAGAGAGAGAGPARRTTRVGRYELGKTIGEGSFAKVKVARDTRTGDTLAIKVLDRNHVLRHKMVEQIKREISTMKLIKHPNVVQLHEVMASKSKIYMVLEYVDGGELFDKIVNSGRLGEDEARRYFHQLINAVDYCHSRGVYHRDLKPENLLLDSHGALKVSDFGLSAFAPQTKEDGLLHTACGTPNYVAPEVLADKGYDGMAADVWSCGIILFVLMAGYLPFDDPNLMTLYKLICKAKVSCPHWFSSGAKKFIKRILDPNPCTRITIAQILEDDWFKKDYKPPLFEQGEDVSLDDVDAAFDCSEENLVAEKREKPESMNAFALISRSQGFNLGNLFEKEMMGMVKRETSFTSQCTPQEIMSKIEEACGPLGFNVRKQNYKMKLKGDKTGRKGHLSVATEVFEVAPSLHMVELRKTGGDTLEFHNFYNNFSSELKDIVWKSESDAKAAKKRLLGRG

SEQ ID NO: 18469 - DNA, 1530 bp, Oryza sativa subsp
  CDS (1)..(1530)
atgtatagggctaagagggctgcattatctccaaaggtgaagcgccgtgtagggaagtatgagctcgggcgcaccattggagaaggaacctttgcaaaggtccggtttgcgaagaacactgaaaatgacgaaccagttgctatcaaaatccttgacaaggagaaggttcagaagcacagattggttgaacagattaggcgtgaaatttgtactatgaagttagtaaagcatcctaatgttgttcggctgttcgaggtcatgggaagtaaagcaagaattttcattgttctggaatatgttactggaggagagctctttgaaatcattgcaactaatggaaggttgaaggaggaggaagcacgaaaatactttcaacaacttatcaatgcagttgactactgccacagtaggggtgtgtaccacagagacttgaagttagaaaatttgctgcttgatgcttctggaaacctgaaagtatctgactttggtttgagtgctttaaccgagcaagtgaaggctgacggtttgctgcacacgacatgtggaactcctaattatgttgctccagaggtgattgaggacagaggctatgatggggcagctgcagatatctggtcttgtggggtaatcctttatgttctgcttgctgggtttttaccatttgaggatgacaacatcactgctctttataaaaagatctctgaagctcagtttacctgtccctcttggttttctactggagctaagaagctgatcaccagaattctggatcccaaccctacaactaggatcaccatttctcaaatactggaagatccttggttcaaaaagggttacaaaccgcctgtatttgacgagaaatatgaaactagttttgacgatgtcgatgctgcttttggagactccgaagaccggcatgtcaaagaagaaactgaagatcagcctacctctatgaacgcgtttgaactcatttcactgaatcaggcgctgaatctggacaatttgttcgaggcaaaaaaggagtataaaagagagacaagattcacatcacaatgtcctccaaaagaaattatcaccaagattgaagaagctgcaaagccacttggatttgatattcaaaagaaaaattacaagatgcgtatggagaacctgaaagcaggtagaaaaggcaatctcaatgttgcaactgaggttttccaagtagctccatccttacatgtggttgagctcaagaaggcaaagggggacactctggagttccaaaaggtgccattctttgacaccggaaagttcgctatttccaacttgctatttactgccaagtttaaccaaaatcaattctgctgtgaaacaacagttctacagaaccctgtcgacccagctcaaggacgtggtctggaagtgcgacggcgaggtcgaaggcaacggcgccgcggcgtgaacgtggtttttgccatggctttcggggcaccggttcttcgtgtacatagctgctctgccatcatcaatggggtgttcgccgtagagtag

SEQ ID NO: 18470 - protein, 509 aa, Oryza sativa subsp
MYRAKRAALSPKVKRRVGKYELGRTIGEGTFAKVRFAKNTENDEPVAIKILDKEKVQKHRLVEQIRREICTMKLVKHPNVVRLFEVMGSKARIFIVLEYVTGGELFEIIATNGRLKEEEARKYFQQLINAVDYCHSRGVYHRDLKLENLLLDASGNLKVSDFGLSALTEQVKADGLLHTTCGTPNYVAPEVIEDRGYDGAAADIWSCGVILYVLLAGFLPFEDDNITALYKKISEAQFTCPSWFSTGAKKLITRILDPNPTTRITISQILEDPWFKKGYKPPVFDEKYETSFDDVDAAFGDSEDRHVKEETEDQPTSMNAFELISLNQALNLDNLFEAKKEYKRETRFTSQCPPKEIITKIEEAAKPLGFDIQKKNYKMRMENLKAGRKGNLNVATEVFQVAPSLHVVELKKAKGDTLEFQKVPFFDTGKFAISNLLFTAKFNQNQFCCETTVLQNPVDPAQGRGLEVRRRGRRQRRRGVNVVFAMAFGAPVLRVHSCSAIINGVFAVE

SEQ ID NO: 18471 - DNA, 1299 bp, Oryza sativa subsp
  CDS (1)..(1299)
atggccgccaccaagagcaaggcggccaagaagggcgctccgctcctcggcaagtacgagctcggccgcctcctcggccgcggcaccttcgccaaggtctaccacgcccgctccctcgcccccggcgccgaccccgtcgccgtcaaggtgctcgacaagcccgacctcgccgccgccggcgccggcatggccacccgcgtcctccgcgaggtcgccgccatgcgccgcctccgccaccccaacgtcctccgcctccacgaggtgctcgccacgcgctccaaggtgtacctcgtcatggagctcgcccccggcggcgacctcctctccaggctcgcctcgctgccgtcgcgccgcctccccgagcacgccgcgcagcgggtgttcctccagctggtgtccgcgctcatctactgccacgcgcggggcgtgtcccaccgcgacgtcaagccgcagaacgtgctcctcgacgcacacggcaacctcaaggtctccgacttcggcctcgccgcgctcccggactcgctccgcgacgacgggcgcctgcacaccgcgtgcggcaccccggcgttcgcggcgcccgaggtgctccgccgcaaggcctacgacggcgccaaggccgacgcgtggtcctgcggcgtcatcctcttcgtcctcctcgccggccacctgccgttcgacgactccaacatcgccgacatgtgccggaaggcgcaccgccgcgagtacgcgctcccgcggtgggtgtcgcagccggcgcgccgcctcgtgtcgcgcctcctcgacccgaacccggccacccgcctcgccgtcgccgagctcgccacccacccgtggttcaagcgctcgctcagcctcgactcgcagctcggcagcctcctcggcggccagccggagcgggagctggcgttccaggcgccgccgccactgaacgcgttcgacatcatatccatgtcgccggggctcgacctgtccgggctgttcggcgagagcaagcgccgccgggagaagcggttcgtgacgacggcgtcgccggagcggacggtggagcggctcggccaggcgggcgccaagctcggctacttcatggtgggcaagaagggcgtcgaacgcctgcccctgggcggcctctcgggcctcgtcgccatgtccatggagatgtcggaggtgtcgccgtcgatgatgctcgtcgagctgaggctggagggaggcgacgacggcgacggcggcgccgaggagttcgggtgggaggagctcagggcggagctcggcgacgacgtggtgatggcatggcatggctga

SEQ ID NO: 18472 - protein, 432 aa, Oryza sativa subsp
MAATKSKAAKKGAPLLGKYELGRLLGRGTFAKVYHARSLAPGADPVAVKVLDKPDLAAAGAGMATRVLREVAAMRRLRHPNVLRLHEVLATRSKVYLVMELAPGGDLLSRLASLPSRRLPEHAAQRVFLQLVSALIYCHARGVSHRDVKPQNVLLDAHGNLKVSDFGLAALPDSLRDDGRLHTACGTPAFAAPEVLRRKAYDGAKADAWSCGVILFVLLAGHLPFDDSNIADMCRKAHRREYALPRWVSQPARRLVSRLLDPNPATRLAVAELATHPWFKRSLSLDSQLGSLLGGQPERELAFQAPPPLNAFDIISMSPGLDLSGLFGESKRRREKRFVTTASPERTVERLGQAGAKLGYFMVGKKGVERLPLGGLSGLVAMSMEMSEVSPSMMLVELRLEGGDDGDGGAEEFGWEELRAELGDDVVMAWHG

SEQ ID NO: 18473 - DNA, 1470 bp, Oryza sativa subsp
  CDS (1)..(1470)
atggtgaaggaagggagggaggcgctgctgggcgggtacgagatggggaggacgctcggggagggcaacttcggcaaggtgaagtacgcgcgccacctcgccaccggcggccacttcgccgtcaagatcctcgaccgcggccgcgtcgtctccctccgcgccggcgaccagattcgccgcgagatcgccacgctcaagctcctcaggcacccccacgtcgtccgcctccacgaggttgctgctagcaaaacgaagatttacatggtgcttgagtttgtcaatggaggtgaactgtttcagagaattgtaagcccttgtttcaatgatcttttacgctatttcctcgctgcaaaaattttcatgccagctactatggcagtaaagggaaaactatcagagaaagaaggaaggaggctttttcagcagttaattgatggtgttagctattgccatgataggggagtctaccacagagacctcaagcctgagaacgttcttgtggaccaaaaaggcaacatcaagatctctgattttggtcttagtgctttacctcaacacctcgggaatgatggattgctgcatactacctgtggtagccccaactatattgctcctgaggttctgcagaataaaggatatgatggatccttgtcagatatctggtcttgcggagtaatcctttatgtaatgcttataggatatcttccgttcgatgaccgaaatattgttgttctgtatcagaagattttcaagggtgacactcagatcccaaagtggctttcacacagtgcacaaaatcttcttcggaggattcttgaacccaatccgatgaagaggatcgacatggcagggatcaaatcacacgaatggtttcagaaggactatattcctattcttccatatgatgatgacgatgaagatgtacagtttggggcacgtctccctgccaaagagcaaatcaatgatgagcctggagataagaattctcatcagatcaacgctttccagttgattggaatggcatcatcccttgatctttcagggtttttcgaggatgaggaagtgtcccaaaggaggattagattcacatcaacgcatccacccaaggatgccttcgacaagattgaaagctcagcgacggagttgggattccaagttcagagggggcacagcaagctcaaattaatgcgcaattgcaagggatcaaagaaccctgagtcatttatggtgtccgccgaggtttttgagcttggcccttctgtaaatgttgtagaacttaggaagtccaacggagaccctgcactgtatagacagctctgtgagaggatctccagtgacatgggggcgcgcaacacggagcagatcttcgcaacggcatcgcttgaggatgatcttcagaacagcaatgcagggacgcccgctgttcgctttgtaacgaatgctgtgttctgcaaaactgcaatgttgtag

SEQ ID NO: 18474 - protein, 489 aa, Oryza sativa subsp
MVKEGREALLGGYEMGRTLGEGNFGKVKYARHLATGGHFAVKILDRGRVVSLRAGDQIRREIATLKLLRHPHVVRLHEVAASKTKIYMVLEFVNGGELFQRIVSPCFNDLLRYFLAAKIFMPATMAVKGKLSEKEGRRLFQQLIDGVSYCHDRGVYHRDLKPENVLVDQKGNIKISDFGLSALPQHLGNDGLLHTTCGSPNYIAPEVLQNKGYDGSLSDIWSCGVILYVMLIGYLPFDDRNIVVLYQKIFKGDTQIPKWLSHSAQNLLRRILEPNPMKRIDMAGIKSHEWFQKDYIPILPYDDDDEDVQFGARLPAKEQINDEPGDKNSHQINAFQLIGMASSLDLSGFFEDEEVSQRRIRFTSTHPPKDAFDKIESSATELGFQVQRGHSKLKLMRNCKGSKNPESFMVSAEVFELGPSVNVVELRKSNGDPALYRQLCERISSDMGARNTEQIFATASLEDDLQNSNAGTPAVRFVTNAVFCKTAML

SEQ ID NO: 18475 - DNA, 1371 bp, Oryza sativa subsp
  CDS (1)..(1371)
atggaacttgagaagaatggaaacattctactgcgaaggtatgagattggaaaattattggggcaaggaacttttgccaaggtttatcatggtaggaacatcgtgacttcacaaagtgtggctatcaaggtgatcgacaaggacaaaatttttaaggttggcctaatggatcagattaaacgagagatatctgtgatgaaattagtgaggcaccccaacattgtacagctgtatgaggtcatggctaccaaatcgaagatatactttgtgctagaatatgtcaagggcggtgagttgtttaacaaagtagctaaaggtaggttgaaagaagatgctgcaaggaaatacttccagcaattagtaagtgctgttgatttctgccacagtagaggcgtttatcatcgcgatctgaagccagagaacctacttgttgatgaaaatggaaacctgaaaattaccgattttggattgagcgctcttgctgaatcaagacgacaagatggccttctacacacaacttgtggaactcccgcatatgtggcgcctgaggtgatcagccgaaaagggtatgacggtgtcaaggttgacacatggtcttgtggtgtgatcctgtttgttctgatggctggttatctgccttttcaagattcaaatttgatggagatgtacagaaagattgggaaagcagagttcaaatgcccagcttggttttcgtctgatgtacgaaaattagtttcgagaattcttgatccaaacccaagaagtagaatgccaattacaaaaataatggaaacttactggttcaagaaaggacttgatagcaagctaatccttaagaacgtggagacaaatgaaccagttacagctcttgctgatgttaatgttgttttctcctccatgggtagcagtagtagcaaaaagactgaggagaaacaggatgcaggaaagctaaccaaccttaacgctttcgatattatttctctttcggaaggctttgatctttctggcttgtttgaggagactgataaaaagaaagaagcaaggtttacgtcaagtcaatcagcttcagctattatctcaaaactagaggatgttgcctcatgttcgaagttgacagtgaaaaagaaagaaggtggtgtgctgaaaatggaaggtgcaagtgaaggaaggaaaggtgtattggcaatcgatgcagagatcttcgaggtgactccttcatttcatttggtagaaatcaagaagaacaatggagatacactagaataccaacatttgtggaaggaggacatgaaaccagctcttaaggacattgtttgggcttggcaaggtgaacgccaggatcagcaacctgaagatcatggccagccatag

SEQ ID NO: 18476 - protein, 456 aa, Oryza sativa subsp
MELEKNGNILLRRYEIGKLLGQGTFAKVYHGRNIVTSQSVAIKVIDKDKIFKVGLMDQIKREISVMKLVRHPNIVQLYEVMATKSKIYFVLEYVKGGELFNKVAKGRLKEDAARKYFQQLVSAVDFCHSRGVYHRDLKPENLLVDENGNLKITDFGLSALAESRRQDGLLHTTCGTPAYVAPEVISRKGYDGVKVDTWSCGVILFVLMAGYLPFQDSNLMEMYRKIGKAEFKCPAWFSSDVRKLVSRILDPNPRSRMPITKIMETYWFKKGLDSKLILKNVETNEPVTALADVNVVFSSMGSSSSKKTEEKQDAGKLTNLNAFDIISLSEGFDLSGLFEETDKKKEARFTSSQSASAIISKLEDVASCSKLTVKKKEGGVLKMEGASEGRKGVLAIDAEIFEVTPSFHLVEIKKNNGDTLEYQHLWKEDMKPALKDIVWAWQGERQDQQPEDHGQP

SEQ ID NO: 18477 - DNA, 1356 bp, Oryza sativa subsp
  CDS (1)..(1356)
atgccaccggccggcgacgacgagtcgccggcggccaccggcgacggctactcgaagaaggtcctgcagggccggtacgagctcggccgcgtgctcggccagggcgcctcctccaaggtgtaccgcgcgcgcgacgcccgcacgggcgcccacgtcgccgtcaaggccatccgcaagcagcagcagccgcaccaccacccgtcgtgccgctcgcccgaggcggccgccgcggcgcggaggtgcgtggaggtggagcgggaggtcgccgcgctccgccgcgtgcgcggccacccgcacgtggtggcgctcctcgacgtgctcgccacccgctccaccgtctacctcgtcctcgagctcgccagcggcggcagcgtcctgtccgcgctcgacggccgcggcggcggccactacgacgagcccgcggcgcgccgcctgttcgcgcagctggcctccgcggtggcgcacgcgcactccctcggcgtgttccatcgcgacgtcaagccggagaacctcctcctcgacgaacgcggcgacctccggctcacggacttcgggctcagcgcgttcgccgacgccgaccagcacctcggcgccacagacggcctcgccgccacgcactgcggctccccggcctacgtcgcgccggagatcctcctgaagcggcggtacgacgccggcaaggcggacgtgtggtcctgcggcgtcgtgctcttcgtgctcaccgccggctacctgccgttcaacgacagcaacctcatggccatgtaccggaagatctgcaccgctaagttccggtgtccgaaatggtgctcgccggagctccgctcccttatcgggcggatgcttgacccggaacccgatacccgcatcaagattggtgaaatcttcgatcacccttggctccaacaagatgggagttcatcatcattcggtatgatccaagctacgtcctctcattctaaaccagaggtagagaaatgggaggctgaattggagcaagcaatggagctaaatgctttcgacataatcgggttcgcctcgggatgcgatctaagcgggttgatcggtccattgccagatcgagttcgattcgtcgtgccgggtggggattccaagtcagttctggacaaagttgagaagctagggcgagaggaagggcttgtagtgaggaggaaagaggaagaatggtgtggaggagttcatgtagaggcaactagtgggaaattcactgcatatgtgagggttaatctattgcccaagaaaatgctgatgatagaggctgaaagggttattggaagcgagattcctaaattttggcatcaacttcagattggtaatctattagtaagaaaatga

SEQ ID NO: 18478 - protein, 451 aa, Oryza sativa subsp
MPPAGDDESPAATGDGYSKKVLQGRYELGRVLGQGASSKVYRARDARTGAHVAVKAIRKQQQPHHHPSCRSPEAAAAARRCVEVEREVAALRRVRGHPHVVALLDVLATRSTVYLVLELASGGSVLSALDGRGGGHYDEPAARRLFAQLASAVAHAHSLGVFHRDVKPENLLLDERGDLRLTDFGLSAFADADQHLGATDGLAATHCGSPAYVAPEILLKRRYDAGKADVWSCGVVLFVLTAGYLPFNDSNLMAMYRKICTAKFRCPKWCSPELRSLIGRMLDPEPDTRIKIGEIFDHPWLQQDGSSSSFGMIQATSSHSKPEVEKWEAELEQAMELNAFDIIGFASGCDLSGLIGPLPDRVRFVVPGGDSKSVLDKVEKLGREEGLVVRRKEEEWCGGVHVEATSGKFTAYVRVNLLPKKMLMIEAERVIGSEIPKFWHQLQIGNLLVRK

SEQ ID NO: 18479 - DNA, 1944 bp, Oryza sativa subsp; identical to SEQ ID NO: 2137
  CDS (1)..(1944)

SEQ ID NO: 18480 - protein, 647 aa, Oryza sativa subsp; identical to SEQ ID NO: 2138

SEQ ID NO: 18481 - DNA, 1533 bp, Oryza sativa subsp
  CDS (1)..(1533)
atggccgcgaccccgccgtcgtcgcgggacccgtcgccgcagcaccggcggccgctgtcctcctccgcctccctcgctggcaagccgcgggggggcgggctcctgctcgggcggtacgagctcggccgcctcctcggccacggcaccttcgccaaggtgtaccaggcgcggagcgcggattccggggagccggtcgcgatcaaggtgctcgacaaggagaaggcgatgcggcacggcctcgtcccgcacatcaagcgggagatcgccatcctccgccgcgtccgccaccccaacatcgtgaggctgttcgaggtgatggccaccaagtccaagatctacttcgtgatggagctcgtccgcggcggggagctgttcggccgcgtcgccaaggggcggctcaaggaggacaccgcgcggcgctacttccagcagctcgtctccgccgtcgggttctgccacgcgcgcggcgtgttccaccgcgacctcaagcccgagaacctcctcgtcgacgagcacggcgacctcaaggtctccgacttcggcctctccgccgtcgccgaccagttccaccccgacggcctcctccacaccttctgcggcacgccctcctacgtcgcgcccgaggtgctcgcgcgccgcggctacgacggcgccaaggcggacatatggtcctgcggcatcatcctcttcgtgctcatggctggctaccttccgttccatgaccagaatctcatggccatgtaccgaaagatttacaggggggaattccggtgcccgagatggttctccaaggatctttccagtctactgaatcgcatccttgacacgaacccagagacaaggatcactgtcaaagaggtcatggagagcaggtggttccagaagggattccggccggtcagattctatgttgaggatgatcaggttcacagcttggcagatggtgataatgatatgccggagttggaacctagtgagcctcctcctcctcctccgtttccgccgccgccgccgcagcaagatgatgacggtgaggagtcgggatgggagtcggactcatccgtggcatcatgtcctgccacattgtcatctgaggagcgtcggcaaagacctctcgggtctctcacacggccagcaagtcttaatgcgttcgatatcatatcgttctcaaagggatttgatttgtcggggttgtttgaggagcgagggagtgaagtgaggttcatatcggcagagcctatgcaaacaatcatcacaaaattggaggagatcgcaaaggtgaagagcttcttcgttcggcgaaaagactggcgagtgagcatagaaggcacgagggaaggtttgaagggtccattgacaatcagcgctgagatatttgagctcacaccaagcctggtggtagtggaggtgaagaagaaggcaggggataaggaagaatatgatgacttctgtaacagggagttgaaacctgggatgcagcatctcgtacaccatatgggatcagttccaaatataccttctgatacggagtag

SEQ ID NO: 18482 - protein, 510 aa, Oryza sativa subsp
MAATPPSSRDPSPQHRRPLSSSASLAGKPRGGGLLLGRYELGRLLGHGTFAKVYQARSADSGEPVAIKVLDKEKAMRHGLVPHIKREIAILRRVRHPNIVRLFEVMATKSKIYFVMELVRGGELFGRVAKGRLKEDTARRYFQQLVSAVGFCHARGVFHRDLKPENLLVDEHGDLKVSDFGLSAVADQFHPDGLLHTFCGTPSYVAPEVLARRGYDGAKADIWSCGIILFVLMAGYLPFHDQNLMAMYRKIYRGEFRCPRWFSKDLSSLLNRILDTNPETRITVKEVMESRWFQKGFRPVRFYVEDDQVHSLADGDNDMPELEPSEPPPPPPFPPPPPQQDDDGEESGWESDSSVASCPATLSSEERRQRPLGSLTRPASLNAFDIISFSKGFDLSGLFEERGSEVRFISAEPMQTIITKLEEIAKVKSFFVRRKDWRVSIEGTREGLKGPLTISAEIFELTPSLVVVEVKKKAGDKEEYDDFCNRELKPGMQHLVHHMGSVPNIPSDTE

SEQ ID NO: 18483 - DNA, 1506 bp, Oryza sativa subsp
  CDS (1)..(1506)
atgacgacggagcggtacgagttcgggccgctcgtcggcgagggcaacttcgccaaggtgtacctcggccggcacagggccaccggcgaggaggtcgccatcaaggtgatggacaaggagaagctcgtcaggctcggcgccacggagctgatcaagcgggagatcgccgtcatgcagcggctgcgccacccgaacgtcgtccgcatccacgaggtcatggccaacaagcgccgcatctgcgtcgtcatggagtacgtccgcggcggcgcgctctaccgctacttccgcaggggccccagcggcggcgccgccggcctccgggagcacgaggcgcgccggttcttccagcagctcgtctccgccgtcgcctactgccactcccgcggcgtgttccaccgcgacatcaagctggacaacctcctcgtcgacgagcaggggaacctcaaggtcgccgacttcggcctctccgcgctcgccgacatggagcggcgagaggcccacctccagaccgtctgcgggacgccgctgttcctcgcgcccgaggtgttcaagcgccggggctacgacggcgccaaggccgacgtctgggcatgcggcgtcgtcctctacgtgctcctcaccggccgcaagcctttccccgacgagcacgtctccaggctctaccgcctgatcgggcagaaccagttccagtgcccgccgtctttcagccccgacctcgcccgtctcgtgcgccgcctcctccagcccgaccccgaccgccgcatcaccataccagagatcatggagatgaggtggttcaagaggggattcaaggaggtcacctactacatcgacagcaacgaccgcctccgcagcctcgatggcctcgacggcgagccggagctgtacgactccgacaccgacacgatcgagtcctcgtcgtcgtcggaatctcccaccccggtggccggaacgccccgcggcatgcacacctcggtgtcggcgccggctctgtccgagctcgaccgcatggaggacagcgcgtccctcccgctcacgctcccgctcccgctcccgccccggccgcgcatgccgcggcccaagagcctgaacgcgttcgacatcatcgcgtcgtctccgagcttcgacctgtcggggctgttcgaggagcgcggcgagaggatgcgcttcgtgtccggcgcgccggtggccgacattatcgccaagctgcaggagatcgccgggatggtgagcttcacggcgcggaccaaggactgccaggtgagcatcgaggcgacgcggaacgggcagaagggcgcgctcgccatctccgccaaggtgttcgagctcacgcgggagctcgtcatggtccaggtgtgcaagaaggccggcgacaccgccgagtaccgcaggttctgcgacaacgagctcaaggccggcctgcgcggcctcgtcgtcgacgccctgccgcctccggtggagggcggcggccatggcggcgcggctgctgcggctgaagccgaatga

SEQ ID NO: 18484 - protein, 501 aa, Oryza sativa subsp
MTTERYEFGPLVGEGNFAKVYLGRHRATGEEVAIKVMDKEKLVRLGATELIKREIAVMQRLRHPNVVRIHEVMANKRRICVVMEYVRGGALYRYFRRGPSGGAAGLREHEARRFFQQLVSAVAYCHSRGVFHRDIKLDNLLVDEQGNLKVADFGLSALADMERREAHLQTVCGTPLFLAPEVFKRRGYDGAKADVWACGVVLYVLLTGRKPFPDEHVSRLYRLIGQNQFQCPPSFSPDLARLVRRLLQPDPDRRITIPEIMEMRWFKRGFKEVTYYIDSNDRLRSLDGLDGEPELYDSDTDTIESSSSSESPTPVAGTPRGMHTSVSAPALSELDRMEDSASLPLTLPLPLPPRPRMPRPKSLNAFDIIASSPSFDLSGLFEERGERMRFVSGAPVADIIAKLQEIAGMVSFTARTKDCQVSIEATRNGQKGALAISAKVFELTRELVMVQVCKKAGDTAEYRRFCDNELKAGLRGLVVDALPPPVEGGGHGGAAAAAEAE

SEQ ID NO: 18485 - DNA, 1383 bp, Oryza sativa subsp
  CDS (1)..(1383)
atggcggcggggaggaagaagcgggtggggaggtacgaggttgggcggaccatcgggcaggggacgttcgccaaggtcaagttcgccgtggacgccgacaccggcgccgccgtcgccatgaaggtgctcgacaaggacaccatcctcaaccaccgcatgctccaccagatcaaaagggagatatcaataatgaagattgtaagacaccccaatatagttagactaaacgaggttctagctggaaagacgaagatatacataatcttggagcttatcactggaggcgaattgttcgataaaatagctcgccaagggaagcttcgtgaaaatgaagcaaggaagtacttccagcagcttattgatgccatcgattattgccatagcaaaggagtctatcatagagatttgaagcctgaaaacctgcttcttgactcacgtggaaacttgaaagtttctgattttggacttagcactttggcccagaaaaagtgttctgattgggatttcttttttgagggatttcagggagtaggccttcttcacacaacttgtggaacaccaaattatgttgctcctgaggtgcttagcaacaatggttatgatggatctgcagcagatgtttggtcatgtggtgttattctctatgttttgatggctggataccttccttttgaggaagatgatcttccaacactgtatgataagattactgcaggtcagttttcatgcccttattggttctctccaggtgctacatcgcttatccacagaatactcgacccaaatccaaaaactcgtatcactattgaacagataagggaagacacatggtttaagaagacttatgtagccattaaacgtggtgaagatgaaaatgttgatctggatgatgtacaggctgtttttgacaatattgaggacaagtacgtttctgagcaagtgactcataatgatggtggccctcttgtgatgaatgccttcgagatgattacattatctcaaggtttggatctttcagcattatttgatagacagcaggagtttgtcaaacgtcaaactcgttttgtctcaaggaaaccagcaaagactatagtagctacaattgaagttgttgccgagactatgggtcttaaggtccactctcagaattacaagttgcgtcttgaaggtgtatcttcaaacagaatgagcccgtttgctgttgttctacaggttttcgaagttgctccttctctgttcatggttgatgttcgaaaggttgctggtgacacactggaataccacaggttctacaagaacttgtgcaacaagatggaaagcataatctggagaccgattgaagtttcagcgaaatccgcactgctgaggacagccacatgctag

SEQ ID NO: 18486 - protein, 460 aa, Oryza sativa subsp
MAAGRKKRVGRYEVGRTIGQGTFAKVKFAVDADTGAAVAMKVLDKDTILNHRMLHQIKREISIMKIVRHPNIVRLNEVLAGKTKIYIILELITGGELFDKIARQGKLRENEARKYFQQLIDAIDYCHSKGVYHRDLKPENLLLDSRGNLKVSDFGLSTLAQKKCSDWDFFFEGFQGVGLLHTTCGTPNYVAPEVLSNNGYDGSAADVWSCGVILYVLMAGYLPFEEDDLPTLYDKITAGQFSCPYWFSPGATSLIHRILDPNPKTRITIEQIREDTWFKKTYVAIKRGEDENVDLDDVQAVFDNIEDKYVSEQVTHNDGGPLVMNAFEMITLSQGLDLSALFDRQQEFVKRQTRFVSRKPAKTIVATIEVVAETMGLKVHSQNYKLRLEGVSSNRMSPFAVVLQVFEVAPSLFMVDVRKVAGDTLEYHRFYKNLCNKMESIIWRPIEVSAKSALLRTATC

SEQ ID NO: 18487 - DNA, 1353 bp, Oryza sativa subsp
  CDS (1)..(1353)
atggcggcggcggcggaggagggggaggggaagaagggcggcggcgcggtgctgcaggggaggtacgagatggggcgggtgctcggccacggcaacttcgggcgggtgcacgtggcgcgggacctgaggaccgggaggagcgtggcggtgaaggtggtggcgaaggagaaggtggtgcgcgccgggatgatggagcagatcaagcgggagatcgccgtcatgaagcgcgtctcccaccccaacatcgtcgagctccacgaggtgatggccacgcgctccaagatctacctcgcgctcgagctcgtccgcggcggggagctcttcggccgcatcgtccgcctcggccgcgtcagggaggacgccgcgcggcactacttccggcagctcgtctccgccgtcgacttctgccactcccgcggcgtctaccaccgcgacctcaagccggagaacctgctgctcgacgaggccgggaacctcaaggtggtcgacttcggcctcagcgcgctcgccgaccacgcccgcgccgacggcctcctccacacgctctgcggcacgccggggtacgccgcgcccgaggtgctccgcgacaagggctacgacggcgccaaggccgacctctggtcctgcggcgtcatcctctacgtgctcctcgccgggtccctcccgttccccgacgacaacatcgtcaccctgtaccggaaggcccagcgcggcgactaccggtgcccggcgtggctgtccaccgacgcgcgccgcctcatccccaggctgctcgaccccaacccgaccacccgcatcagcgtcgcgcagctcgtcgagacgccgtggttcaagaagacgtccatctccaggcctgtgagcatagagcttcctccggcctttgccgatcctgctccggctaaggaggaggccgagaaggacgagccggagacgctgaacgcgttccacctgatatcactctcggaggggttcgacctctcgccgctgttcgagggggactcggccaaggggaggcgggacggtggcatgctgttcgcgacgcgggagccagcgagcggcgtgatctcccgcctcgagggggtggcggcgcgcggcggcggccggatgcgggtgaccaagagcggcgcccgcggcgtgcgcctggagggcgcggagcgcggcggggccaagggccgcctcgccgtggccgccgacatcttcagcgtggcgccctccgtcctcgtcgtcgacgtcaagaaggacggcggcgacacgctcgagtaccgctcattctgcagcgaggagctccggccggcgctccaggacatcgtctggggcgccgccgccgacccaacgccgaccgccgccgtctga

SEQ ID NO: 18488 - protein, 450 aa, Oryza sativa subsp
MAAAAEEGEGKKGGGAVLQGRYEMGRVLGHGNFGRVHVARDLRTGRSVAVKVVAKEKVVRAGMMEQIKREIAVMKRVSHPNIVELHEVMATRSKIYLALELVRGGELFGRIVRLGRVREDAARHYFRQLVSAVDFCHSRGVYHRDLKPENLLLDEAGNLKVVDFGLSALADHARADGLLHTLCGTPGYAAPEVLRDKGYDGAKADLWSCGVILYVLLAGSLPFPDDNIVTLYRKAQRGDYRCPAWLSTDARRLIPRLLDPNPTTRISVAQLVETPWFKKTSISRPVSIELPPAFADPAPAKEEAEKDEPETLNAFHLISLSEGFDLSPLFEGDSAKGRRDGGMLFATREPASGVISRLEGVAARGGGRMRVTKSGARGVRLEGAERGGAKGRLAVAADIFSVAPSVLVVDVKKDGGDTLEYRSFCSEELRPALQDIVWGAAADPTPTAAV

SEQ ID NO: 18489 - DNA, 1371 bp, Oryza sativa subsp
  CDS (1)..(1371)
atggcgaggagagcgcgggaagaggaagcggatcaggtggagaggaagctggtgctggggcggtacgagctcgggaggctgctggggcagggcacgttcgccaaggtgtactacggccgtgacctccggtccggtgagagcgtggcgatcaaggtgatcgacaaggcgcggctccgtcgcacggaagggatggtggagcagctgcggcgtgagatctccatcatgcggatggtgcgccaccccaacgtggtggggatccgcgaggtgctcgccagccgcgcccgcgtgttcgtcgtcatggagtacgcccgcggcggggagctgttcgccaaggtggcgcgcgggcggctcaccgaggagcacgcgaggaggtacttccagcagctcgtcgccgccgtcgggttctgccacggccgcggcgtcgcgcaccgggacctcaagcccgagaacctgctgctcgacgaggaggggcggctcaaggtcaccgacttcggcctcgccgcgctgcccgagcagctgcgacaggacggcctcctccacacgcagtgcggcaccccggcgtacgtcgcgcccgaggtgctccggaagcgcggctatgacggcgcccgcgccgacctctggtcctgcggcgtcgtgctctacgtgctcctctgcggcttcctcccgttccagcacgagaactacgccaagatgtaccagaagatcttcaaggcggagtaccaggtgccgccgtgggtgtccggcgacgcgcgccgcctcatcgtccgcctgctcgtcgtcgacccggccaagcgcatctccatcccggagatcatgcgcacgccatggttcaagaagggcttcgtgccgcccgtccccacctcccctgtctcccccaagaaatgggaagaagacgatgtcctcctcgacggcggcgactccggcgccatgtcgccccagacgtgcaacgcgttccagctcatatcctccatgtcctccgggttcgacctgtcggggatgttcgagagcgagcagaaggccgccacggtgttcacgtcgcgcgcgccggcggccaccgtcatccagaagctggaggccgtggggcgatcgctgggttacagcgccacgagagggaaagggtggaagctgaggttggaggcgacggcggacggagcaaacgggcggctcgcggtcaccgtcgaggcgctcgaggtggccgccgacgtcgcggtggtcgagttcgcgcacgacgccggcgacgagctcgagttcaacaagttctgcgccgtcgacgtgcggccggggctcgccgacattgtctgggcgtggcagggcgaccggccggcggcgcccgacgttgccgccgccaccgtcgagtgctcgccggcgtga

SEQ ID NO: 18490 - protein, 456 aa, Oryza sativa subsp
MARRAREEEADQVERKLVLGRYELGRLLGQGTFAKVYYGRDLRSGESVAIKVIDKARLRRTEGMVEQLRREISIMRMVRHPNVVGIREVLASRARVFVVMEYARGGELFAKVARGRLTEEHARRYFQQLVAAVGFCHGRGVAHRDLKPENLLLDEEGRLKVTDFGLAALPEQLRQDGLLHTQCGTPAYVAPEVLRKRGYDGARADLWSCGVVLYVLLCGFLPFQHENYAKMYQKIFKAEYQVPPWVSGDARRLIVRLLVVDPAKRISIPEIMRTPWFKKGFVPPVPTSPVSPKKWEEDDVLLDGGDSGAMSPQTCNAFQLISSMSSGFDLSGMFESEQKAATVFTSRAPAATVIQKLEAVGRSLGYSATRGKGWKLRLEATADGANGRLAVTVEALEVAADVAVVEFAHDAGDELEFNKFCAVDVRPGLADIVWAWQGDRPAAPDVAAATVECSPA

SEQ ID NO: 18491 - DNA, 1278 bp, Oryza sativa subsp
  CDS (1)..(1278)
atgagtacaaccaaagtgaagagacgtgtgggaaagtatgagctaggaagaacaatcggagagggcacattcgcgaaggtcaagttcgcgagggataccgagaccggtgatccagtagccatcaagatcctagacaaggagaaagttctcaagcataagatggtcgaacagattaaaagggaaatttcgacgatgaagttgattaagcacccaaatgttgtccgtatatatgaggtgatgggaagcaagacaaatatctacattgttttagaatatgttaccggtggtgagctctttgatacaattgttaaccatggtcgtatgagggaagatgaggcaagaaggtacttccaacaattaattaatgctgttgattattgtcatagcaggggtgtgtaccacagggacttaaaagtctctgattttgggctgagtgcactatctcagcaaattaaggatgatggtttgctgcacacaacctgtgggacaccaaattatgttgcaccggaggtccttgaagatcaaggatatgatggagcaatggcagatttgtggtcatgtggagttatcctgttcgttctgctagcagggtatttgccttttgaggactctaatcttatgacgttgtataagaaaatatcaaatgcagagtttacgtttccaccttggacgtcttttcctgccaagaggttgttaacaagaatccttgatccaaacccaatgacgagaataacaattccagaaatattagaggatgaatggttcaaaaagggctacaaacgcccagagtttgacgaaaaatatgacacgacattggatgatgttgatgctgtcttcaatgactctgaagagcaccatgtgacagaaaagaaagaagaaccagaagctctcaatgcatttgaactgatttcaatgtcagcaggcctcaatcttggaaatttgtttgactcagagcaggaattcaaaagggaaacaaggttcacatcaaaatgtccaccaaaagaaattgtccgcaagattgaggaagccgcaaaacctctaggatttgatgttcagaagaaaaattacaagttaaggctagaaaaagtgaaagcagggagaaaaggaaatctcaatgttgctactgagatactgcaggttgcaccctctcttcatatggttgaagtacgaaaagcaaaaggcgacaccctcgaatttcacaagttctacaagaacctctccagaaccttaaaggatgttgtttggaaatcagatgatcttcaaaatcaactttcctag

SEQ ID NO: 18492 - protein, 425 aa, Oryza sativa subsp
MSTTKVKRRVGKYELGRTIGEGTFAKVKFARDTETGDPVAIKILDKEKVLKHKMVEQIKREISTMKLIKHPNVVRIYEVMGSKTNIYIVLEYVTGGELFDTIVNHGRMREDEARRYFQQLINAVDYCHSRGVYHRDLKVSDFGLSALSQQIKDDGLLHTTCGTPNYVAPEVLEDQGYDGAMADLWSCGVILFVLLAGYLPFEDSNLMTLYKKISNAEFTFPPWTSFPAKRLLTRILDPNPMTRITIPEILEDEWFKKGYKRPEFDEKYDTTLDDVDAVFNDSEEHHVTEKKEEPEALNAFELISMSAGLNLGNLFDSEQEFKRETRFTSKCPPKEIVRKIEEAAKPLGFDVQKKNYKLRLEKVKAGRKGNLNVATEILQVAPSLHMVEVRKAKGDTLEFHKFYKNLSRTLKDVVWKSDDLQNQLS

SEQ ID NO: 18493 - DNA, 1317 bp, Oryza sativa subsp
  CDS (1)..(1317)
atgagtacaaccaaagtgaagagacgtgtgggaaagtatgagctaggaagaacaattggagagggcacattcgcgaaggtcaagttcgcgagggataccgagaccggtgatccagtagccatcaagatcctagataaggagaaagtcctcaagcataagatggtcgaacagattaaaagggaaatctcgacaatgaagttgattaagcacccaaatgttgtccgtatatatgaggtgatgggaagcaagacaaagatctacattgttttagaatatgttaccggtggtgagctctttgatacaattgttaaccatggtcgtatgagggaagatgaggcaagaaggtacttccaacaattaattaatgctgttgattattgtcatagcaggggtgtgtaccacagggacttaaaaccagaaaatttactactagattcatatgggaatctgaaggtctctgattttgggctgagtgcactttctcagcaaattaaggatgatggtttgctgcacacaacctgcgggacaccaaattatgttgcaccggaggtccttgaagatcaaggatatgatggagcaatggcagatttgtggtcatgtggagttatcctgttcgttctgctagcagggtatttgccttttgaggactctaatcttatgacgttgtataagaaaatatcaaatgcagagtttacgtttccaccttggacgtcttttcctgccaagaggttgttaacaagaatccttgatccaaacccaatgacgagagtaacaattccagaaatattagaggatgagtggttcaaaaagggctacaaacgcccagagtttgacgaaaaatatgacacaacattggatgatgttgatgctgtcttcaatgactctgaagagcaccatgtgacagaaaagaaagaagaaccagaagctctcaatgcatttgaactgatttcaatgtcagcaggcctcaatcttgggaatttgtttgattcagagcaggaattcaaaagagaaacaaggttcacatcaaaatgtccaccaaaagaaattgtccgcaagattgaggaagccgcaaaacctctaggatttgatgttcagaagaaaaattacaagttaaggttggaaaaggtaaaagcagggagaaaaggaaatctcaatgttgctactgagatactgcaggttgcaccctctcttcatatggttgaagtacgaaaagcaaaaggcgacaccctcgaatttcataagttctacaagaacctctccagaaccttaaaggatgttgtttggaaatcagatgatcttcaaaatcaactttcctag

SEQ ID NO: 18494 - protein, 438 aa, Oryza sativa subsp
MSTTKVKRRVGKYELGRTIGEGTFAKVKFARDTETGDPVAIKILDKEKVLKHKMVEQIKREISTMKLIKHPNVVRIYEVMGSKTKIYIVLEYVTGGELFDTIVNHGRMREDEARRYFQQLINAVDYCHSRGVYHRDLKPENLLLDSYGNLKVSDFGLSALSQQIKDDGLLHTTCGTPNYVAPEVLEDQGYDGAMADLWSCGVILFVLLAGYLPFEDSNLMTLYKKISNAEFTFPPWTSFPAKRLLTRILDPNPMTRVTIPEILEDEWFKKGYKRPEFDEKYDTTLDDVDAVFNDSEEHHVTEKKEEPEALNAFELISMSAGLNLGNLFDSEQEFKRETRFTSKCPPKEIVRKIEEAAKPLGFDVQKKNYKLRLEKVKAGRKGNLNVATEILQVAPSLHMVEVRKAKGDTLEFHKFYKNLSRTLKDVVWKSDDLQNQLS

SEQ ID NO: 18495 - DNA, 1119 bp, Oryza sativa subsp
  CDS (1)..(1119)
atggaggggaagggggtgctggaggggaggtacgagatggggcgggtgctgggccacggcaacttcggtcgtgtgcacgcggcgcgggacgtgcgcacggggcgcgccgtggcgatgaaggtggtgtccaaggacaaggtggagcgcgccgggatggcggagcagatcaagcgggagatcgccgtgatgaagatggtgtcccacccgagcgtcgtggagctccacgaggtgatggccacgcgcaccaaggtgtacctggcgctcgagctcgtccggggcggcgagctgttcgaccggatcgcccgccacggccgcgtcggggagggcgtcgcgcggaggtacttccgccagctcgtctccgccgtcgacttctgccacggccgcggggtgtaccaccgcgacctgaagcccgagaacctgctgctcgacgaggccgggaacctcaaggtgctcgccggcaacggctacgacggcgccaaggccgacctctggtcctgcggcgtcatcctctacgtgctgctcgccggcgcgctgccgttccaggacgacaacctcgtgtgcatgtaccgcaagatgcggcggggtgacttctgctgcccgccgtgggtgacgacggacgcccggaagctcatcaagtcgctgctcgaccccaacccgggcacccgcatcaccgtcgccggcctcctcgagacgccgtggttccggaagacggcgcccgtcccgcgccccatcatcgccgaccccgcggcggcgccggtggacacgcgtggcaatgccggcgacgacaaggacgagccgcccgaggtgctgaacgccttccacctgatctccctgtccgagggcttcgacctgtcgccgctgttcgagcacgaccccgccgcgtcgccggggcgggccacggcgcgcgcgggcggcacgcggttcgcgacgcgggaggcggcgagcggcgtggtcgcgcggctggaggcgctcgcgatgggcggcgcacgcgtggcgccgtcgttgctcatggtggacgtcaagaaggatggcggcgacgccatggagtaccggccgttcttcagcgaggagctccggccggcgctcaaggacatcgtctggtcgccggcggcgacctga

SEQ ID NO: 18496 - protein, 372 aa, Oryza sativa subsp
MEGKGVLEGRYEMGRVLGHGNFGRVHAARDVRTGRAVAMKVVSKDKVERAGMAEQIKREIAVMKMVSHPSVVELHEVMATRTKVYLALELVRGGELFDRIARHGRVGEGVARRYFRQLVSAVDFCHGRGVYHRDLKPENLLLDEAGNLKVLAGNGYDGAKADLWSCGVILYVLLAGALPFQDDNLVCMYRKMRRGDFCCPPWVTTDARKLIKSLLDPNPGTRITVAGLLETPWFRKTAPVPRPIIADPAAAPVDTRGNAGDDKDEPPEVLNAFHLISLSEGFDLSPLFEHDPAASPGRATARAGGTRFATREAASGVVARLEALAMGGARVAPSLLMVDVKKDGGDAMEYRPFFSEELRPALKDIVWSPAAT

SEQ ID NO: 18497 - DNA, 1326 bp, Oryza sativa subsp
  CDS (1)..(1326)
atgagtacaaccaaagtgaagagacgtgtgggaaagtatgagctaggaagaacaatcggagagggcacattcgcgaaggtcaagttcgcgagggataccgagaccggtgatccagtagccatcaagatcctagacaaggagaaagttctcaagcataagatggtcgaacagattaaaagggaaatttcgacgatgaagttgattaagcacccaaatgttgtccgtatatatgaggtgatgggaagcaagacaaatatctacattgttttagaatatgttaccggtggtgagctctttgatacaattgttaaccatggtcgtatgagggaagatgaggcaagaaggtacttccaacaattaattaatgctgttgattattgtcatagcaggggtgtgtaccacagggacttaaaagtctctgattttgggctgagtgcactatctcagcaaattaaggatgatggtttgctgcacacaacctgtgggacaccaaattatgttgcaccggaggtccttgaagatcaaggatatgatggagcaatggcagatttgtggtcatgtggagttatcctgttcgttctgctagcagggtatttgccttttgaggactctaatcttatgacgttgtataagaaaatatcaaatgcagagtttacgtttccaccttggacgtcttttcctgccaagaggttgttaacaagaatccttgatccaaacccaatgacgagaataacaattccagaaatattagaggatgaatggttcaaaaagggctacaaacgcccagagtttgacgaaaaatatgacacgacattggatgatgttgatgctgtcttcaatgactctgaagagcaccatgtgacagaaaagaaagaagaaccagaagctctcaatgcatttgaactgatttcaatgtcagcaggcctcaatcttggaaatttgtttgactcagagcaggaattcaaaagggaaacaaggttcacatcaaaatgtccaccaaaagaaattgtccgcaagattgaggaagccgcaaaacctctaggatttgatgttcagaagaaaaattacaagatctgctccccttgcctaacaactatctgcatgaatatcccttttaaattaaggctagaaaaagtaaaagcagggagaaaaggaaatctcaatgttgctactgagatactgcaggttgcaccctctcttcatatggttgaagtacgaaaagcaaaaggcgacaccctcgaatttcacaagttctacaagaacctctccagaaccttaaaggatgttgtttggaaatcagatgatcttcaaaatcaactttcctag

SEQ ID NO: 18498 - protein, 441 aa, Oryza sativa subsp
MSTTKVKRRVGKYELGRTIGEGTFAKVKFARDTETGDPVAIKILDKEKVLKHKMVEQIKREISTMKLIKHPNVVRIYEVMGSKTNIYIVLEYVTGGELFDTIVNHGRMREDEARRYFQQLINAVDYCHSRGVYHRDLKVSDFGLSALSQQIKDDGLLHTTCGTPNYVAPEVLEDQGYDGAMADLWSCGVILFVLLAGYLPFEDSNLMTLYKKISNAEFTFPPWTSFPAKRLLTRILDPNPMTRITIPEILEDEWFKKGYKRPEFDEKYDTTLDDVDAVFNDSEEHHVTEKKEEPEALNAFELISMSAGLNLGNLFDSEQEFKRETRFTSKCPPKEIVRKIEEAAKPLGFDVQKKNYKICSPCLTTICMNIPFKLRLEKVKAGRKGNLNVATEILQVAPSLHMVEVRKAKGDTLEFHKFYKNLSRTLKDVVWKSDDLQNQLS

SEQ ID NO: 18499 - DNA, 1365 bp, Oryza sativa subsp
  CDS (1)..(1365)
atgagtacaaccaaagtgaagagacgtgtgggaaagtatgagctaggaagaacaatcggagagggcacattcgcgaaggtcaagttcgcgagggataccgagaccggtgatccagtagccatcaagatcctagataaggagaaagttctcaagcataagatggtcgaacagattaaaagggaaatttcgacaatgaagttgattaagcacccaaatgttgtccgtatatatgaggtgatgggaagcaagacaaaaatctacattgttttagaatatgttaccggtggtgagctctttgatacaattgttaaccatggtcgtatgagggaagatgaggcaagaaggtacttccaacaattaattaatgctgttgattattgtcatagcaggggtgtgtaccacagggacttaaaaccagaaaatttactactagattcatatgggaatctgaaggtctctgattttgggctgagtgcactttctcagcaaattaaggatgatggtttgctgcacacaacctgtgggacaccaaattatgttgcaccggaggtccttgaagatcaaggatatgatggagcaatggcagatttgtggtcatgtggagttatcctgttcgttctgctagcagggtatttgccttttgaggactctaatcttatgacgttgtataagaaaatatcaaatgcagagtttacgtttccaccttggacgtcttttcctgccaagaggttgttaacaagaatccttgatccaaacccaatgacgagaataacaattccagaaatattagaggatgaatggttcaaaaagggctacaaacgcccagagtttgacgaaaaatatgacacgacattggatgatgttgatgctgtcttcaatgactctgaagagcaccatgtgacagaaaagaaagaagaaccagaagctctcaatgcatttgaactgatttcaatgtcagcaggcctcaatcttggaaatttgtttgactcagagcaggaattcaaaagggaaacaaggttcacatcaaaatgtccaccaaaagaaattgtccgcaagattgaggaagccgcaaaacctctaggatttgatgttcagaagaaaaattacaagatctgctccccttgcctaacaactatctgcatgaatatcccttttaaattaaggctagaaaaagtaaaagcagggagaaaaggaaatctcaatgttgctactgagatactgcaggttgcaccctctcttcatatggttgaagtacgaaaagcaaaaggcgacaccctcgaatttcataagttctacaagaacctctccagaaccttaaaggatgttgtttggaaatcagatgatcttcaaaatcaactttcctag

SEQ ID NO: 18500 - protein, 454 aa, Oryza sativa subsp
MSTTKVKRRVGKYELGRTIGEGTFAKVKFARDTETGDPVAIKILDKEKVLKHKMVEQIKREISTMKLIKHPNVVRIYEVMGSKTKIYIVLEYVTGGELFDTIVNHGRMREDEARRYFQQLINAVDYCHSRGVYHRDLKPENLLLDSYGNLKVSDFGLSALSQQIKDDGLLHTTCGTPNYVAPEVLEDQGYDGAMADLWSCGVILFVLLAGYLPFEDSNLMTLYKKISNAEFTFPPWTSFPAKRLLTRILDPNPMTRITIPEILEDEWFKKGYKRPEFDEKYDTTLDDVDAVFNDSEEHHVTEKKEEPEALNAFELISMSAGLNLGNLFDSEQEFKRETRFTSKCPPKEIVRKIEEAAKPLGFDVQKKNYKICSPCLTTICMNIPFKLRLEKVKAGRKGNLNVATEILQVAPSLHMVEVRKAKGDTLEFHKFYKNLSRTLKDVVWKSDDLQNQLS

SEQ ID NO: 18501 - DNA, 999 bp, Medicago truncatula
  CDS (1)..(999)
atggtgtctcccaaaaacataggaaaatatagacttggcaggacaataggagaaggtacattctctaaggtaaagattgctttaaatagcaacaatggtgagaaggtagcaatcaaggtcattgacaaacaaatggtcttgaaaaacaatctaaaacatcaggtacaaagtgagattagaacaatgaaacttctacatcatccaaatatagttagaattcatgaggttattggcacaaaaacaaaaatatacattgtgatggaatatgtatcaggaggtcaactattggacaaaatatcctattgcaacaagttgaatgaatgtgaggcaagaaaactattccaacaacttattgacgccgtcgactactgccataacaagggagtttatcaccgcgatctcaagccagaaaacttgctcctagacagcaagggaaatctaaaagtgtctgattttggattaagtgcactgaataagcctaataatgtcctaaacacaaagtgtggatccccgtgttacgtggctcctgagctgctgatgagcaaagggtatgatggagcatctgctgatgtttggtcatgtggggtgattctttttgagttacttgccggttttctaccatttgatgaccagaacttgataaatttataccataagatatgcagagcggaatacgtatgtgccccttggtttactcaaagtcaaaagaaactaattgcgaaaatacttgaaccgcatcctggaaagcggataactatttcgggtattattgatgatgagtggtttcaaacagattataagcctatttgtgcgtatgaatttgatccgatcattaacttggatgatgatagttgtgctttcaattcaattgaggagaaaactacaaagccaaggataaccaagtcttcaagcttcattaacgcgtttcaactgatagccatgtttcaggactttgatttattcaccctttttgaagaacaggcaagtctacaaatctga

SEQ ID NO: 18502 - protein, 332 aa, Medicago truncatula
MVSPKNIGKYRLGRTIGEGTFSKVKIALNSNNGEKVAIKVIDKQMVLKNNLKHQVQSEIRTMKLLHHPNIVRIHEVIGTKTKIYIVMEYVSGGQLLDKISYCNKLNECEARKLFQQLIDAVDYCHNKGVYHRDLKPENLLLDSKGNLKVSDFGLSALNKPNNVLNTKCGSPCYVAPELLMSKGYDGASADVWSCGVILFELLAGFLPFDDQNLINLYHKICRAEYVCAPWFTQSQKKLIAKILEPHPGKRITISGIIDDEWFQTDYKPICAYEFDPIINLDDDSCAFNSIEEKTTKPRITKSSSFINAFQLIAMFQDFDLFTLFEEQASLQI

SEQ ID NO: 18503 - DNA, 1281 bp, Medicago truncatula; identical to SEQ ID NO: 1967
  CDS (1)..(1281)

SEQ ID NO: 18504 - protein, 426 aa, Medicago truncatula; identical to SEQ ID NO: 1968

SEQ ID NO: 18505 - DNA, 1341 bp, Medicago truncatula; identical to SEQ ID NO: 1969
  CDS (1)..(1341)

SEQ ID NO: 18506 - protein, 446 aa, Medicago truncatula; identical to SEQ ID NO: 1970

SEQ ID NO: 18507 - DNA, 1545 bp, Solanum tuberosum
  CDS (1)..(1545)
atggacggaacagcagtgcaaggcaccagcagtgttgactcatttttgcggaactataagcttgggaaaacacttggcattggatcgtttggcaaagttaaaatagctgaacataccttaatagggcacaaagttgctgtcaagattcttaatcgtcgaaaaatcaggaatatggacatggaggagaaagtcagtagagaaatcaaaatattgagattgttcatgcatggtcatattagtcggctttatgaggtcatagagacaccatcagatatatatgttgtgatggagtatgtgaaatctggcgagctatttgattacattgtcgagaagggcagattgcaggaggatgaagctcgtaacttttttcagcagataatttctggtgtggagtactgccatataaacatggtggttcatagagaccttaagcctgaaaacctccttctggactccaaatggaatgtgaagatcgcagattttggtttgagcaatatcatgcgcgatggtcattttctgaagacaagttgcggaagcccaaactatgctgccccagaggttatatcaggtaaattgtatgctggccctgaggtagatgtatggagctgtggtgttattctttatgctcttctctgtggcacccttccatttgacgatgaaaacatacccaatctttttaagaaaataaagggtggatatattactctgcccagccatttatcagctggtgcgagggatttgattccaaggatgcttatagtcgacccaatgaagcgaatgactattcctgagattcgcctgcacccttggttccaagctcatttgccacgttatttggccgtacctccaccagatacaatgcaacaagccaagaagatcgatgaagagattcttcaagaggtggttaagatgggatttgacaggaacaaccttactgagtctcttcgcaatagagttcaaaatgagggcactgttccgtactatctgctcctggacaatcgccatcgtgtttccactggctatcttggagctgaatttcaggagtccatggaatatggttacaaccggatcaattctaatgaaaccgctgcttcccctgttggtcaacgcttcccaggaataatggattatcagcaagctggtgcaagacagttccccattgaaagaaaatgggctcttggcctccagtctcgagcgcatccacgtgaaataatgactgaagttctgaaagctctgcaagaactgaatgtatgttggaaaaagattggtcagtataacatgaaatgtcgatgggttcctagcgtacctggtcatcatgaaggcatgggtgttaattccatgcacgggaatcagttctttggagatgattcatccatcattgagaatgatggggacacaaaattaacaaatgtggtcaagtttgaagttcagctttacaaaaccagggaggagaagtacttacttgaccttcagaggattcagggtccacagttcctcttcctggatctctgtgctgcttttcttgctcagcttcgcgtactttga

SEQ ID NO: 18508 - protein, 514 aa, Solanum tuberosum
MDGTAVQGTSSVDSFLRNYKLGKTLGIGSFGKVKIAEHTLIGHKVAVKILNRRKIRNMDMEEKVSREIKILRLFMHGHISRLYEVIETPSDIYVVMEYVKSGELFDYIVEKGRLQEDEARNFFQQIISGVEYCHINMVVHRDLKPENLLLDSKWNVKIADFGLSNIMRDGHFLKTSCGSPNYAAPEVISGKLYAGPEVDVWSCGVILYALLCGTLPFDDENIPNLFKKIKGGYITLPSHLSAGARDLIPRMLIVDPMKRMTIPEIRLHPWFQAHLPRYLAVPPPDTMQQAKKIDEEILQEVVKMGFDRNNLTESLRNRVQNEGTVPYYLLLDNRHRVSTGYLGAEFQESMEYGYNRINSNETAASPVGQRFPGIMDYQQAGARQFPIERKWALGLQSRAHPREIMTEVLKALQELNVCWKKIGQYNMKCRWVPSVPGHHEGMGVNSMHGNQFFGDDSSIIENDGDTKLTNVVKFEVQLYKTREEKYLLDLQRIQGPQFLFLDLCAAFLAQLRVL

SEQ ID NO: 18509 - DNA, 2055 bp, Oryza sativa
  CDS (474)..(1793)
ctcgtgccgaattcggcacgagcatactaccactcaaaaactctctctctctacccaaacaggttttgagaaagaagtggaggacagatccaaaaagttcaccttttgattatccaaacaagtttggagtttgttacctgaatctcctcttcttcctgtcaccggaagggaaattgataaaaaaaaagcagtgaaagcctcaaggaatgctgaaagatttgcttgcataaaaaaaattttccgtgtgagataaaacaaattgctggttcactagtgctactgatctgctcaagtcttgatgtgagtgatcaactttcctgcactaattctaccccatttagactccgaaacgacgatgatataagaatgttgttctccattcatgatcatgaccttggggaggatggctaaagaattgcagtccatctgattggtggtcaaaacatagtgctgagatttatatctttgtgggcatggagagtaaagggaaaatactaatggaaaggtatgagttgggcaaattgttggggaaaggaacatttggcaaggtgcactatgcagggaatctggagtcaaaccagagtgtggccataaagatgatggacaaacagcaggtgttgaagttcgggctttcggagcagatcagacgtgagatcacaaccatgcggttggtggctcataagaacattgttcagcttcatgaggtcatggcaacacggaacaagatctactttgtgatggagtatgtgaaaggtggtgagctatttgaaaaggttgcaaagcgtggaaagcttacagaggttgttgccataagtacttccagcaactcattaagtgcagtggattactgccacagtcgaggtgtgtatcaccgggacttgaagcctgaaaacctgctgttggatgagaatgagaacctgaaagtctcagactttggactgagtgcgctttcagagtcgaagaggcaagatggcttactccataccacctgtggaacacctgcatatgtagctccagaggtgatcagcaagataggatatgatggtgcaaagtcagatatttggtcttgtggtgttatcctgtttgttcttgttggtggttaccttcctttccagggcccaaacttgatggaaatgtatcggaagatacaacatggtgaattcaggtgccccggttggttttcacgcaaacttcagaatttgttgtacaagatcatggaccccaacccaagcacaaggatttcaatccagaagataaaggagtctacctggttccggaaaggtcctgaggaaaatcgtattttgaaggaaagaactttgaatgaaaacccccccaaaaatgttgctctggtgcttggtgtgagacccaagaaaaatgctcatgaagatgtgaagcccatgtcagtgacaaacttaaatgcctttgaaattatctctttctccaaggggtttgatctctctggcatgttcattgtaaaggaatggagaaatgaggcaaggttcacttcaaataaatctgcctcaaccataatctcaaagctagaagatgttgcaaaggcgctaaatctcagggtaaggaaaaaagacaatggtgtagtgaaaatgcaagggaggaaggaaggaaggaatggtgttcttcagtttgacataaaaatatttgaggttaccacttcctatcatatcatcgagatgaaacaaacaagtggcgattcattggagtaccgacagctactggaggagggcatccggccagctctgaaggacattgtcttggcctggcatggagatgaatagcagcagtcgcaagagtagattttgatgtctcaagcatttagtttccgctcctcaaattcattaggttttagctcaaatgaatttatttgtcttgcctatgttctttttagcatctatgtttttgtatctggagagttcatgttgaggcaatctatgcacaatttagatggagtctgtcgagagtaattttatgagaagttgagctgcaatataaaagttggctttgagcctttcaagctttcttcaaaaaaaaaaaaaaaaa

SEQ ID NO: 18510 - protein, 439 aa, Oryza sativa; identical to SEQ ID NO: 1992

SEQ ID NO: 18511 - DNA, 2129 bp, Sorghum bicolor
  CDS (418)..(1740)
ttcattcattctttcccttccggccgtccttcgtcttcgtcccctacctctctctccatctccatctccatctccctccctgctttctcctcctgctgctgacactaccactattagaggccaggccatccaagctgcctctcctcccgtgacagcagctagctacctgcctgctgctcctgatcgaggcgccacccagctcttcgtcgcccctagcagccgcttcccgagatccttttcagtcttcaccaccaccaggtccagaacagagcgcaatctgcctcggacttgacttggttcgtccagtccagctgccggagctccatcagctacacctgcctgacagtgaaaccacacgcatagaagattcctgatctcctggtgttccattccacagggggggtgagaaggcagggaatgagtacaaccaaggtgaagagacgtgtgggcaagtatgagctcggccgcaccataggtgagggcacattcgcaaaggtcaggttcgcgagggacacggtgaccggcgaggccgtagccatcaagatcctagataaggataaggtactcaagcacaagatggtcgagcagattaagcgggaaatctcgacgatgaagttaatcaagcaccctaatgttgtccgcatatacgaggtgatgggaagtaaaacaaagatctacatagtgttagaatttgctactggtggcgagctctttcagagaattgttaaccacggtcggatgagggaagatgaggcaaggaggtacttccaacaattaatcaatgcagttgattattgtcatagcaggggtgtgtaccaccgggatttaaaacctgaaaatttactgcttgattcatatggaaacctgaaagtctctgactttgggctcagtgcgctatctcagcagatgaaggatgatggactgctgcacacaacttgtgggactccaaactatgttgcaccagaggtccttgaagatcaaggctatgacggtgcaatggctgatctgtggtcatgtggagttatcctgtttgttctgctagcagggtatttgccatttgaggactctaatctcatgactttgtataagaaaatatcaaatgcagaatttacatttccaccatggacatcttttcctgccaagaggttgttaacaagaatccttgatccaaatccaatgacgagaataacaatcccagaaatattagaggatgaatggttcaaaaagggctacaagcgcccagagtttgatgaaaaatatgacaccacgttggatgatgtggatgctgtcttcaatgattcagaagagcaccatgtgacagaaaagaaagaagaagaaccagtagctctgaacgcatttgaactgatctcaatgtcagcaggcctaaaccttggaaacttattcgactcagagcaggagttcaaaagagaaacaaggtttacatcaaaatgtccacccaaagaaattgtccgcaagattgaggaagctgcaaaacctctaggatttgatgttcagaagaaaaattacaagttgaggctcgaaaaggttaaggcagggaggaaggggaacctcaatgttgctactgagatactgcaagttgcaccctcccttcatatggtagaagtccgaaaagcaaaaggtgacactctggaatttcataagttctacaagaacctttccaagaccttaaaggacgtcgtctggaaatccgacgatactcaaatgctacatgctgcttagcagaacctcggagaggaagaatggcaaactattttgtgtaccatccttccaagcagattccgattctgtagtctgtactcagcactgcattctgcatgtaatagtggatgacccaggaaattgcgctggtactccaccattgttgtaaatgctgcatcttgagttgcttgctgtagttgaagggaagttcattcagtaggttttgagtatgagttttgtatatcggtatatgcctatgagtcatgttgaaacactatgatcagaatctgcaaaaatgaagcccagaatgttcttgccatcttgacccagttctcaggactgaacagaagggcttaatctgccttccattttcaagaaaaagaaaaagagacactttaattgggaactca

SEQ ID NO: 18512 - protein, 440 aa, Sorghum bicolor; identical to SEQ ID NO: 1994

SEQ ID NO: 18513 - DNA, 2054 bp, Sorghum bicolor
  CDS (355)..(1677)
gaattcggcacgaggacatctcacccagcagaagcagaagcagaagcagagccgagccaaagggcacgggtccgtttcccaacctcccaactccagcgtccagccgcctcttcctctccccaacggccgtttccagagatctttttcagtgccagccatcagcgaaggaggaggtcgagatcgaacgaggcaagagatcgacgccagcggactgctgcctgcatttcccaactgctgggaggttgcggccgagagcagagagctacagctacagctacctgacactgaaatcactgggctagctgcgtgtagaatcctcctgagatcgacttcaaaaaggcagtaaggcagggaatgagtgcaaccaaggtgaagagacgtgtgggcaagtatgagctcggccgaaccataggtgaaggcacattcgcaaaggtcaggttcgccaagaacactgagaccggagaacccgtagccatcaagatcctagataaggaaaaagtcctcaggcacaagatggtcgagcagattaagcgggaaatttcgaccatgaagttgattaagcatcctaatgttgttcggatatatgaggtgatgggaagtaaaacaaagatctacattgtgttggagtatgttactggtggcgagctttttgacacaattgctaaccatggtcgaatgagggaagatgaggcaaggagatacttccaacagttaatcaatgcagttgattattgtcatagcaggggtgtgtaccaccgggatttaaaaccagagaatttactgcttgactcatatggaaatctgaaggtctctgactttggactgagtgcgctctctcagcaaatcaaggatgatggattgctgcatacaacttgtgggactccaaactacgttgcaccagaggtcctagaagaccaaggctatgatggtgcaatggctgatttgtggtcatgtggagttatcctgtttgttctgctagctgggtatttaccttttgaggactctaatcttatgacgctgtataagaaaatatcgaatgcagaatatacatttccaccatggacgtctttccctgccaagaggttgttaacaagattccttgatccaaatccaatgacgagaataacaatccctgaaatactggaggatgaatggttcaaaaagggctacaagcgcccggagtttgacgagaaatatgacacaccattggatgatgtggatgctgtcttcaatgattcagaagagcatcacgtgacagagaagaaagaagaagaaccagtagttctcaatgcatttgaactgatttcaaggtcagcaggcctaaatcttgggaacctatttgactcagagcaggaattcaaaagagaaacaaggttcacatcaaaatgtccaccaaaagaaattgtgcgcaagattgaggaagctgcaaaacctctaggatttggtgttcagaagaaaaattacaagttgaggcttgagaaagtaaaagcagggaggaagggaaacctcaatgttgctactgagatactgcaagttgcaccctcacttcatatggtagaagtcaggaaagcaaaaggtgacactctggaattccaaaagttctacaagaacctttccaagaccttaaaggacgttgtctggaaatctgaagatctgcaaatgcaacctgcttcttagcatccactagggaaggaagatggcaaactatttgtcccatcttccaagcagattccgatttcgtagtctgggtcagcagttatgttaactgcgctctgtatgtagtatgtaccgtggttggcttggcattttgagagattgcagtgctcgttgtagccgggatgaagcctatgctatccagtaggttactaggttttgtgaatatggtgagttctgtaaatctatatgcctatgagtcatgttgtaagctgtaatactatgatcagaaaactgtgaagtgtagaagccaagtatgttctttctatgctgccccagtttctggcacttcccatgcattttgaatgaggaaaaaaaataggggcgaacccattgatatt

SEQ ID NO: 18514 - protein, 440 aa, Sorghum bicolor; identical to SEQ ID NO: 1996

SEQ ID NO: 18515 - DNA, 1170 bp, Triticum aestivum
  CDS (1)..(1170)
atggatcggtacgaggtggtgagggacatcgggtccgggaacttcggggtggcgaagctggtgcgggacgtcaggaccaaggagcacttcgccgtcaagttcatcgagcgaggccacaagattgatgaacatgttcaaagggagattatgaaccaccggtcactcaagcatccaaatattattcgattcaaggaggtcgtgctaactcccacacatttggcaatagttatggaatatgcctctggcggcgagctatttcaaaggatttgcaacgcagggagatttagcgaggatgagggaaggttcttcttccaacaattgatttctggagtgagctattgtcactctatgcaagtatgtcatagagatttgaaactagaaaatactctcttggatggtagtgttgcgcctcgactcaagatttgtgacttcggttactccaagtcttctgtcttgcactctcaaccgaagtcaactgtcggcacgccggcatacatcgccccggaggtcctctccagaagggagtatgatggaaaggtcgccgatgtttggtcttgcggagtaacgctctatgtgatgcttgtcggggcatatcctttcgaggaccctgatgagccgaggaacttccggaaaacaatctctaggatactcagcgtacagtactctgttccggactacgttcgagtctcgatggactgcatgcatttgctgtcccgcattttcattggaaatcctcagcagcgaataaccatgccggagatcaagaaccatccatggttcctcaaacaactgcccgttgagatgaccgatgagtaccaaaggagcatgcagttggcagacatgaacacgccgtcacagagcatggaagaagccatggcgatcatccacgaggcacagaaaccgggtgataacgccctaggaattgctgggcaggttgcctgcctggggagcatggatctagatgacattgatttcgacgacatcgacgacatcgaattgagaacagcggggatttcgtgtgcccgttgtgatgctcttgagtggttcaaaatttttggtgatcgtttgcctgtggatggatccctgttttgtcatgcttgggttggattttcttctggatcacatattttctgtagacagtatatgcttatatcgaaatccgttagttaa

SEQ ID NO: 18516 - protein, 389 aa, Triticum aestivum
MDRYEVVRDIGSGNFGVAKLVRDVRTKEHFAVKFIERGHKIDEHVQREIMNHRSLKHPNIIRFKEVVLTPTHLAIVMEYASGGELFQRICNAGRFSEDEGRFFFQQLISGVSYCHSMQVCHRDLKLENTLLDGSVAPRLKICDFGYSKSSVLHSQPKSTVGTPAYIAPEVLSRREYDGKVADVWSCGVTLYVMLVGAYPFEDPDEPRNFRKTISRILSVQYSVPDYVRVSMDCMHLLSRIFIGNPQQRITMPEIKNHPWFLKQLPVEMTDEYQRSMQLADMNTPSQSMEEAMAIIHEAQKPGDNALGIAGQVACLGSMDLDDIDFDDIDDIELRTAGISCARCDALEWFKIFGDRLPVDGSLFCHAWVGFSSGSHIFCRQYMLISKSVS

SEQ ID NO: 18517 - DNA, 1296 bp, Arabidopsis thaliana; identical to SEQ ID NO: 1999
  CDS (1)..(1296)

SEQ ID NO: 18518 - protein, 431 aa, Arabidopsis thaliana; identical to SEQ ID NO: 2000

SEQ ID NO: 18519 - DNA, 2303 bp, Sorghum bicolor
  CDS (454)..(1839)
gaattcggcacgagccgccgccgcccgccggttcgatcctttacgcgagatcgagcttccccgggttggggttgaggctgccgtggcgatatctgggatccgtcgtctcgtcctcgtgttcttgagcagttttacacttgccctggcagagaacatttgacttggaagagcaaattgggtaactggacacacaggaagctttgtggtttgtcctaactgatcctatcaagttctcataggctgcatacgggtacaacatttttcctgagttttgggctgcagaagagggggagtcaaggattttctatcttgtaagacagtaaaccacgaccttggtggtcaaggtctgtgcccacttaccatagtctataaggtggacattgtaaaggcagggtgcatcttgctttgtatagcctatctgtttctctctcactgtatatagagatccatataatggacgagaggaggactattttgatggaccgttatgaaatcgggaggcaattaggacaaggaaactttgctaaggtatattttgctcgaaacctgactgatgggcagtctgttgcaataaagatgattgataaggacaagatcacgagggttgggctaatagtgcagataaagagggagatctctataatgagactggtaaagcatccgaatgttctgcaactgtttgaggtaatggctagcaagagcaagatttactttgtattggagtatgctaaaggtggtgagctgttcaacaaaatatcaaagggaaagttcagtgaggatgttgcaaggaggtatttccaccaactgattagtgccgtggactactgccacagccgaggtgtttaccatcgcgacttgaagccggaaaacctacttcttgatgagaatgagaaccttaaagtctcggattttggtctaagtgccctagctgaatccaaaaggcacgatggcctcctacataccacctgtggaactcctgcctatgttgctcctgaagtgcttagtaggagaggctacgatggcacaaaggcggatatatggtcttgtggagtaattctttttgtgctagtggctggttacctacctttccatgacccaaatcttattgagatgtacaggaagatctccaaagctgaatacagatgtcctcgttccttttccggtgaattgaaggacctgctttttagaatgcttgatccagatccaagtactagaatatcaatttcaaggataaagagaagcacttggtacagaaaacctattgaggtaaattcagcaaagatcaagcatgacacaacaagagacaaggtgtgcaacggtgaagccacaacctctaactcaatagaatgcagtaattcagaggaaactcgagggtcatcgagcctccctaacctgaatgcatttgacatcatttctctttcaactggatttgacctatcaaatttgtttgaagaaaaatatggccggagggaagagaggttcaccactaggcagccagcaggaacagtatttgctaagctaaatgaactggctgagcggttaaagctcaaaattaagaagaaagaaaacggggtcttgaaactggcttcaccaaaggaaggaataaagggatttctcgagcttgatgcagagatttttgagcttgctccttctttccttctagtcgagttgaagaagaccaatggtgacaccatagagtatcaaaggctcgtgaaagaagaaataaggcctgcactgaaggatatggtctgggcatggcagagcgaccggcaccagcagcgcaacgagtctgtgcaaggagagcagcagctgtcatcacctttgccaccacagcagtagtcactgttgttgttgcggcaccacatgactgattgccaacatacttgatagcacagtggccagagcagaggacaagccccagctaccgctgcactgccaaggtgaccgtgccctccaacaattgttggagccacatgattcccacaaccagttgcaactgccattatcaaatcacatcattgcaactgcatcaggcctgcatgactaactccacagcctgacagccagactatagtccatcatgcatatctcattgcgaaattgggatgttcaggttaccctgtggtaggtaggatctaaagcacctaccatttggtgttttctatactgtacattagatatacttgacttttcaatttttgattgaaacatgtgttttcgatatgatttgtaacatttaatccatggatgattgatgtatgtacattttttttttgaaatgaatgtatgtacaatgtttacca

SEQ ID NO: 18520 - protein, 461 aa, Sorghum bicolor; identical to SEQ ID NO: 2002

SEQ ID NO: 18521 - DNA, 1266 bp, Arabidopsis thaliana; identical to SEQ ID NO: 2003
  CDS (1)..(1266)

SEQ ID NO: 18522 - protein, 421 aa, Arabidopsis thaliana; identical to SEQ ID NO: 2004

SEQ ID NO: 18523 - DNA, 1146 bp, Oryza sativa subsp; identical to SEQ ID NO: 2119
  CDS (1)..(1146)

SEQ ID NO: 18524 - protein, 381 aa, Oryza sativa subsp; identical to SEQ ID NO: 2120

SEQ ID NO: 18525 - DNA, 1647 bp, Oryza sativa subsp
  CDS (1)..(1647)
atgttaactcgaacaattacatattgcatggtttctgtgacacaccgtatacatcatcctagtattatgaacaagctgtttagcacagcttggatcttgcgtcatgttttgcgttggttcaaagtgaaaatggatggaaatgctaaaggcggtgggcattctgaggcactgaagaactacaatcttggaagaactttaggtattggctcatttggaaaagtgaagattgcagagcataagcttacaggacacagagttgctataaagatcctgaaccgccgccaaatgagaaatatggaaatggaggagaaagcaaagagagaaatcaagatactgagattgttcattcatccccatatcattcgcctttatgaggttatatacactcctacggatatatatgttgtgatggagtactgcaagtttggagaactgtttgattacattgttgagaaaggcaggttgcaggaagatgaggctcgccgaatcttccagcagattatatctggggttgaatactgccacagaaacatggtggttcatcgtgatctgaagccagaaaacttgctactggattcaaagtataatgtaaagcttgctgactttggtttgagtaacgtcatgcatgatggccattttttgaagacaagctgtgggagtccaaactatgctgctccagaggtgatctctggtaaattatatgctggacctgaggttgatgtatggagctgtggagtgatcctttatgctctcctttgtggtactcttccatttgatgatgagaatatccccaacctattcaaaaagataaagggtggtatatatactctcccaagtcatttatctgctctggccagagatttgatcccaaggatgcttgttgttgatccaatgaagagaatcacaattcgtgaaattcgagagcatcagtggtttcagattcgccttcctcgttacttagcagtgcctccaccagacacagcacagcaagccaaaatgattgatgaagatacccttcaagatgtcgtaaacttgggttatggaaaggaccatgtgtgtgaatctctgcgcaatagactgcagaatgaggcaactgttgcatattatttactcttggacaatcgattccgagctaccagtggctatttgggagcagactatcaagaatctttggagaggaattttaatcgctttgcttcatcggaatcagcaagttcaaatacaaggcattatcttccaggaagcagtgatcctcatgccagtggtttgcgcccacattatcctgttgaaagaaaatgggctcttggacttcagtcacgagctcaacctcgcgagataatgattgaggtcctaaaggcacttcaagacttaaatgtctcctggaagaagaatggacagtacaacatgaaatgcagatggagcgttgggactcaggccactgatatgttagatgttaacaacagctttgttgatgactcaatcataatggataacggtgatgtaaatgggaggctacctgctgtgatcaagtttgaaatccagaccagagacgagaagtatctgctggatatgcagagagttacggggcctcagctccttttcctggacttctgtgcagacttccttaccaagctgagggttctatag

SEQ ID NO: 18526 - protein, 548 aa, Oryza sativa subsp
MLTRTITYCMVSVTHRIHHPSIMNKLFSTAWILRHVLRWFKVKMDGNAKGGGHSEALKNYNLGRTLGIGSFGKVKIAEHKLTGHRVAIKILNRRQMRNMEMEEKAKREIKILRLFIHPHIIRLYEVIYTPTDIYVVMEYCKFGELFDYIVEKGRLQEDEARRIFQQIISGVEYCHRNMVVHRDLKPENLLLDSKYNVKLADFGLSNVMHDGHFLKTSCGSPNYAAPEVISGKLYAGPEVDVWSCGVILYALLCGTLPFDDENIPNLFKKIKGGIYTLPSHLSALARDLIPRMLVVDPMKRITIREIREHQWFQIRLPRYLAVPPPDTAQQAKMIDEDTLQDVVNLGYGKDHVCESLRNRLQNEATVAYYLLLDNRFRATSGYLGADYQESLERNFNRFASSESASSNTRHYLPGSSDPHASGLRPHYPVERKWALGLQSRAQPREIMIEVLKALQDLNVSWKKNGQYNMKCRWSVGTQATDMLDVNNSFVDDSIIMDNGDVNGRLPAVIKFEIQTRDEKYLLDMQRVTGPQLLFLDFCADFLTKLRVL

SEQ ID NO: 18527 - DNA, 1371 bp, Oryza sativa subsp; identical to SEQ ID NO: 2113
  CDS (1)..(1371)

SEQ ID NO: 18528 - protein, 456 aa, Oryza sativa subsp; identical to SEQ ID NO: 2114

SEQ ID NO: 18529 - DNA, 1533 bp, Medicago truncatula; identical to SEQ ID NO: 2005
  CDS (1)..(1533)

SEQ ID NO: 18530 - protein, 510 aa, Medicago truncatula; identical to SEQ ID NO: 2006

SEQ ID NO: 18531 - DNA, 1398 bp, Medicago truncatula; identical to SEQ ID NO: 2007
  CDS (1)..(1398)

SEQ ID NO: 18532 - protein, 465 aa, Medicago truncatula; identical to SEQ ID NO: 2008

SEQ ID NO: 18533 - DNA, 1308 bp, Medicago truncatula; identical to SEQ ID NO: 2009
  CDS (1)..(1308)

SEQ ID NO: 18534 - protein, 435 aa, Medicago truncatula; identical to SEQ ID NO: 2010

SEQ ID NO: 18535 - DNA, 1916 bp, Nicotiana tabacum
  CDS (133)..(1572)
ccccttttgatcttttccctatttttcgcaaatcttgaactaccctttggttgcaaatttggaaacccctatttgataatattttgggcataatttgaagtataccatttttggttaaagtttggagaatccatggccggtaccactaccgccggcgacaccagcaccagcagtagaagcaacctagcgccgacaaaaagtctgagcaaaaaggaaaatcaaggacttttatcgggtaggtacgaaattgggaaattacttgggcatggtacgtttgctaaggtgtaccacgctaggaatgtgaagacaaatgagagcgttgccataaaagttattgataaagaaaagatcttgaaagttggtcttattgatcacataaaacgcgagatctcaattttaaggagagttaggcacccaaacatagtccaattgtacgaagttatggccacaaaggccaaaatctactttgtcatggagtatgttaaaggcggtgagctttttaacaaagttgctaaaggcaggcttaaggaggaagttgctagaaaatatttccagcagttaatctctgctgtagccttttgtcatgctcgtggtgtttaccatagggacctaaagcctgaaaatatactgttagatgaagatgggaatgttaaagtttctgactttggccttagtgccatttcagagcagataaaacaagatggtttgtttcataccttttgtggtaccccggcttacgtggcgccggaggtgttagctagaaagggttatgatgcagccaaagttgatatttggccatgtggggtgatactctttgtgctaatggcagggtatttgccatttcatgatcagaatattatggctatgtataagaagatatacaagggtgaatttagatgtcctagatggttttcacccgaattgactaagtttttaaggcaacttcttgatactaatcctgaaactaggatcactattcaggaggttatgaacaataggtggtttaagaagggttttaaacatgtcaagttttatattgaggatgacaagttgcgtagtgttaatgatgatgattatgatggcggggttgattattcgtctgatagatcggagtctgaatctgaaatggagatgagaaggaagcctgctactttgcctaggccagctagcttgaatgcatttgatatcatatcgttttctcgtggttttgatttatctggtttgtttgaagaaggaggagatggggcaaggtttgtatccggggctcctgtgcccaagatcattagtaagttggaggaaattgctaaagttgtgagctttgcggtgaggaagaaggattgtagagtgagtttagaggggtctaaagagggtgaaaagggaccattgacaattgcagctgagatattcgagttgacaccatctttgagagttgttgaggtgaaaaaaaaagcgggagacagagtggagtacgaggagttttaccataaggaattgaagcctgggttacaaaatctgacgcttgaagttgatggacctgtcgattcatcgcatttgccttcagatactgagtagaaagaaaaagaagggaaaaagggttgttagttgtgaacctttaacaactggccaggcagaactcctaaattccaaaaaatgaccattggcaacctggatcgcaaagccaacaagccgtaggcctctagcacttcatcaccattgatattctgggatcaagatttaccaggttcaactctggccactgagattctggttccttgtctaattgtatgtagtccatgtactggtagttgttgcataagcttgttttgttctctgttcatgatctagttacttgattttttacttgtagacgaggaaagaaataaaagcgaaaaatgaatagttctcaaaaaaaaaaa

SEQ ID NO: 18536 - protein, 479 aa, Nicotiana tabacum; identical to SEQ ID NO: 2012

SEQ ID NO: 18537 - DNA, 1987 bp, Trifolium pratense
  CDS (472)..(1848)
gaatctctttgcttcactttcaacatgaaacacactccttcctcgctcattccttttataattatagtctctccatcacctaatctttttcataattactactaattcatatcacaaacataccaattctctcatccccttatcaatttcatttatcatcaaaaaaatttcttcaaaataatcacacatcattagtatttattatcatcatatcatataagcaaccatgaaaattttcagcccttctaattcctttcttacgaatgttgtgtgtccatccgacaccatattccttaaagtccacaataatatttcctatctttcccagcacaacaaaattacatacatataatttaatatctttctcgtcctaatatcgaactctgaattatctgaatctattttttctagaatcttagagggtgatacatcaaaaaaaattctcaatcgctatttccctttcccttttctatggatcaacaaaacaaacaaagtttccaaaaccccaaacacataattttcgacaaatacgaaatgggaaaagtcttgggtcaaggaaactttgcaaaggtttaccattgtagaagcctttcaacaaacgagagtgtagccaccaaggtgataaagaaagagaagctaagaaaagagaggttagtgaagcaaatcaagcgtgaagtttcggttatgcgtctcgttcgccatcctcatatagttgacctcaaagaagttatggcaacaaagggaaaaatatttctagtaatggaatatgtaaaaggaggtgaactttttgccaaagttgcaaaaggaaaattgaaagaagatgttgctagaaaatactttcaacagctcatcagcgccgttgatttttgtcatagtcgcggtgtcacacaccgtgatttgaaaccagagaatctcctcttagacgaaaacgaagacctaaaggtctccgattttggactctcagcattgccagagcaacatcgagaggatgggatgcttttaactccatgtgggacccctgcttatgtggcacccgaggttttgaagaagaaagggtatgatggttctaaggctgatctatggtcttgtggtgttatcctctatgccttggtttgtggatatcttccttttcaaggtgagaatgttatgaggatttataaaaaggcttttaaaggtgaatatgaatttcctgaatggatttctccgcaagctaaaatattaatttcgaatcttcttgtcgcggatcctaaaaaaaggtattcaattgttgatattatgaatgatccttggtttcgaattgggtttgttagacccattgcgttttctatgaatggttcgagtattgaagataacgacaaagacatcaatattgatttcaatgaggttggtgaagataatgttgatgttcctgaattgataatggtgaagccatctcgtcctttttataatgcatttgagataatttcgtcgttgtcacatggttttgatcttaggaatttgtttgagacgaggaaaaagttgccatcaatgtttatatcaaaattttcggcttcaacagtcttggagaaacttgaggtgatggcgaagaagttgaactttaggatgacagggaagaaggagttcgtggtgagatttgaggggacaaaagatgggagaaaggggaaggtggcggtgacgatggaggtgtttggggtggcaccggacgtggcggtggttgagttttctaagtgtggtggagacacattggagtatgttaagttgtgtgatgaacaattaagaccttcactcaaagatattgtttggagctggcaaggtgatgacaatcataacgataacaactctcaatagtatagtaattagtacttttttttaaataccatttatgtagtcaataattcgacaaaggctgatcttgatcgaatatttcaaatttttaggaaacttttttaaatttgatttatcgaacttataaaatatgagttatcat

SEQ ID NO: 18538 - protein, 458 aa, Trifolium pratense; identical to SEQ ID NO: 2014

SEQ ID NO: 18539 - DNA, 1365 bp, Oryza sativa subsp; identical to SEQ ID NO: 2177
  CDS (1)..(1365)

SEQ ID NO: 18540 - protein, 454 aa, Oryza sativa subsp; identical to SEQ ID NO: 2178

SEQ ID NO: 18541 - DNA, 1080 bp, Brassica napus
  CDS (1)..(1080)
atggagaagtacgagctggtgaaagacataggagctgggaatttcggagtggcgaggctcatgaaggtcaaagactctaaggagctcgttgccatgaagtacatcgagcgtggtcccaagattgatgagaacgtggcaagagagatttataatcacagatcgcttcgccatcctaatattatccgctttaaggaggtggtgttgactccgactcatcttgctattgccatggagtatgctgctggtggtgaacttttcgagcgtatatgcggtgctggaagattcagtgaggatgaggcgagatacttcttccagcagcttatatcaggtgttagctattgccatgctatgcaaatatgccatagagatctgaagctcgagaatacactccttgatggaagtcctgctccacgtctcaaaatctgtgattttggttattccaagtcctctctactgcactcgaggcctaaatcaactgttggaactccagcatatattgcacctgaggtcctctctcggagagaatatgatggcaagatggctgatgtatggtcctgtggtgttactctttatgtcatgcttgttggagcatacccttttgaagaccaggaagaccccaaaaacttcaggaaaacaatacaaaaaatcatggctgttcagtacaagatcccggactacgtccacatctcacaagattgcaaacatctcctttcccgtatatttgtggccaactcactcaagaggataaccattgcggaaatcaagaaacacccatggttcacgaagaacttgccaagggagctcacagagacagctcaagctgcatatttcaagaaagagaatccaaccttctccgcccagaccgctgaagagatcatgaagatagtggatgacgccaaaacgcctccgcctgtttcccgttccattggaggttttggctggggaggagagggagatttagaggggaaagaggaagaggaggtggatgaagaggaggttgaggaagaggaagacgaagaagatgaatatgataagactgtaaaggaagtacacgcaagcggagaagtgagaatcagttga

SEQ ID NO: 18542 - protein, 359 aa, Brassica napus
MEKYELVKDIGAGNFGVARLMKVKDSKELVAMKYIERGPKIDENVAREIYNHRSLRHPNIIRFKEVVLTPTHLAIAMEYAAGGELFERICGAGRFSEDEARYFFQQLISGVSYCHAMQICHRDLKLENTLLDGSPAPRLKICDFGYSKSSLLHSRPKSTVGTPAYIAPEVLSRREYDGKMADVWSCGVTLYVMLVGAYPFEDQEDPKNFRKTIQKIMAVQYKIPDYVHISQDCKHLLSRIFVANSLKRITIAEIKKHPWFTKNLPRELTETAQAAYFKKENPTFSAQTAEEIMKIVDDAKTPPPVSRSIGGFGWGGEGDLEGKEEEEVDEEEVEEEEDEEDEYDKTVKEVHASGEVRIS

SEQ ID NO: 18543 - DNA, 1050 bp, Glycine max
  CDS (1)..(1050)
atggataagtacgaggctgttaaggatttgggagctggcaattttggggtggctaggctcatgaggaacaaggtcaccaaggagcttgtagccatgaaatacatcgagcgtggccccaagattgatgagaacgtggcaagggagattatgaaccacaggtcccttcggcatcccaatataattcgttacaaggaggtggttttgactcccacacatttagcaatagtgatggagtatgcagcaggaggagagctctttgagaggatatgcagtgctggcaggttcagtgaagatgaggctagatatttctttcagcagctgatttccggtgttcatttctgtcataccatgcaaatatgccacagagatttgaagctagaaaatacccttctagatggaagtcctgcacctcggttgaaaatttgtgacttcggttattccaagtcatctttgctgcactcacgacccaaatcaacagttggaacaccagcttacatagcaccggaagttctttctaggcgagagtatgacggaaagttggctgatgtatggtcatgtgcggtgactctttatgtcatgctggttggagcatatccctttgaggaccaggatgaccctaggaattttaggaaaacaattcagcgtataatggctgttcaatacaaaatccctgattatgttcacatatctcaagattgtaggcacctcctctctcgtatatttgttgcaaatccattgaggagaattactattaaggaaattaagaatcacccatggtttttgaggaatcttccaagggagctaactgaatctgctcaagctatctattaccagagagacagcccaaactttcaccttcaaagtgtggatgagataatgaaaattgtaggagaggcaagaaatccacctccagtatctagggctctcaaaggttttggctgggaaggtgaagaagatttggatgaagaagtggaggaagaagaggatgaagatgagtatgataagagggtcaaagaggttcatgcaagtggcgaatttcaaattagttaa

SEQ ID NO: 18544 - protein, 349 aa, Glycine max
MDKYEAVKDLGAGNFGVARLMRNKVTKELVAMKYIERGPKIDENVAREIMNHRSLRHPNIIRYKEVVLTPTHLAIVMEYAAGGELFERICSAGRFSEDEARYFFQQLISGVHFCHTMQICHRDLKLENTLLDGSPAPRLKICDFGYSKSSLLHSRPKSTVGTPAYIAPEVLSRREYDGKLADVWSCAVTLYVMLVGAYPFEDQDDPRNFRKTIQRIMAVQYKIPDYVHISQDCRHLLSRIFVANPLRRITIKEIKNHPWFLRNLPRELTESAQAIYYQRDSPNFHLQSVDEIMKIVGEARNPPPVSRALKGFGWEGEEDLDEEVEEEEDEDEYDKRVKEVHASGEFQIS

SEQ ID NO: 18545 - DNA, 1515 bp, Solanum tuberosum
  CDS (1)..(1515)
atgagttccagaggtggtggaattgctgaatctccttatttaaggaactacagggttggaaaaactcttggacatggatcctttggtaaagttaaaattgctgagcatttgctcactgggcataaagtggcgatcaaaatccttaaccgtcggaaaatgaagactccagacatggaagaaaaactgagaagagaaataaaaatatgtagattatttgttcatccacatgtcatacgactctatgaagtgatagagacgccaacagatatatatgttgtgatggagtatgtcaagtctggtgagctctttgattatattgtagaaaaaggcaggttacaggaagatgaagctcggaaaatttttcagcagattattgctggtgtggagtactgccataagaatatggtggttcatcgggaccttaagcctgagaatctgcttttggatgcaagacgcaatgtaaagatagcagattttggcttgggcaacatcatgcgagatggccattttctgaagactagttgtggaagtccaaattatgcagctcctgaggttgtctctgggaaactatatgctggtcctgaggtagatgtttggagttgtggcgttatcttatatgctcttctttgtggtacacttcctttcgatgacgaaaatatccccaaccttttcaagaaaataaagagtggagtctacacccttccaagtcatctgtcacctttagctagggatttgataccaaggatgctaattgttgaccctatgaagcgcatatcggtacctgatattcgtcagcaccagtggttcaaaattcatcttcctcggtatttggcggttcctccacctgatgctaggcaacatcttaaaaagcttgatgaggaaattctccagcaagtaagtaggatggggcttgatagagaccagttgcttgattctttgcaaaagagaatacaggatgatgctactgttgcatattatctgctgtacgacaaccgttccatggcttccagtgggtatctaggagctgagtttcaggaatctgtggattgttattcccctggattgtttccaaatcttgacctacagctgtctactgggaacggagtttctgaagagagtttgagacgcccatttcgcaaagagaaaatgtggctagttggacttcagtctcctgcaaatccaaaggagatcatgaatcaggttcttgggactctgctggaactaaatgttcgatggaaaaaaattgggcactataatatgaagtgtttatggtgtcatgatcttcatcttcatagtatggccaacaatcatatgaatgatgatgatcattttattagcaatgcaactgccataagtacacatttacagccacaacctactgtgaagtttgaaatgcagctgtacaaaactgaggatgaaaaatacctacttgatctccaaagaattagcggtccgcagttcctcttcctggatttctgtgctggtttcattaggcagctagagggaccacaatga

SEQ ID NO: 18546 - protein, 504 aa, Solanum tuberosum
MSSRGGGIAESPYLRNYRVGKTLGHGSFGKVKIAEHLLTGHKVAIKILNRRKMKTPDMEEKLRREIKICRLFVHPHVIRLYEVIETPTDIYVVMEYVKSGELFDYIVEKGRLQEDEARKIFQQIIAGVEYCHKNMVVHRDLKPENLLLDARRNVKIADFGLGNIMRDGHFLKTSCGSPNYAAPEVVSGKLYAGPEVDVWSCGVILYALLCGTLPFDDENIPNLFKKIKSGVYTLPSHLSPLARDLIPRMLIVDPMKRISVPDIRQHQWFKIHLPRYLAVPPPDARQHLKKLDEEILQQVSRMGLDRDQLLDSLQKRIQDDATVAYYLLYDNRSMASSGYLGAEFQESVDCYSPGLFPNLDLQLSTGNGVSEESLRRPFRKEKMWLVGLQSPANPKEIMNQVLGTLLELNVRWKKIGHYNMKCLWCHDLHLHSMANNHMNDDDHFISNATAISTHLQPQPTVKFEMQLYKTEDEKYLLDLQRISGPQFLFLDFCAGFIRQLEGPQ

SEQ ID NO: 18547 - DNA, 1922 bp, Triticum aestivum
  CDS (8)..(1588)
cccgtcgatgtcggccatcaagccgccgccgcctgaccggccgccgcaggccgcgcggctgccgtccccttcctcctcctcctcggcggcggcggcggccaagcaaggcggcacaggctcccgcgggctgctcatggggcgctacgagctgggccgcgtcctgggcaaaggcaccttcgccaaggtgtaccacgcgcggcacgtgcagaccggggagagcgtggccatcaaggtgctcgaccgggagaaggccgtgcggagcggcctcgtctcgcacatcaagcgcgagatcgccgtgctccgccgcgtgcgccaccccaacatcgtgcacctcttcgaggtcatggccaccaagaccaagatctacttcgtcatggagctcctcgtccgcggcggcgagctcttctcccgcgtctccaagggccgcctcaaggaggacattgctcgccgctacttccagcacctcatctccgccgtcggattctgccacacccgcggggtcttccaccgggacctcaagccggagaacctcctcgtcgacgaggcgggcaacctcaaggtttccgacttcggcctctccgccgtcgccgagccgttccagccagagggtctcctccacaccttctgcggcacgccggcctatgtcgcccccgaagttctcgcccgccgtggatacgaaggcgccaaggccgacatatggtcctgcggcgtcatcctctttgttctcatggccggatacctccctttccatgaccagaacctcatggccatgtaccgtaaggtttacaagggagagttccgatgtccaaggtggttctccaaggaccttactagcctgatcatgcgttttcttgacacaaacccaagcaccaggatcaccttgccggaggtcatggagagccggtggttcaagaaaggtttccggccagtcaagttctatattgaagacgaccagctgtacaacgtgatagatgccgagaatgatatgctcgacctgggcctcccagaccctcttcctcaaccattgccgcctccacctccatctccatctccacaacaagttgatggagacgactcagggtcagagtcggacgcatcagtcgtgtcctgccctgccacatcgtcatttgaagagcgccacaggctccgcgggccactcccacgccccgcaagccttaatgcgttcgacatcatatcattctcaaggggattcaacttgtcggggctgtttgaggaaaaaggggacgaggtgagattcatctcgggtgaacctatgccagacattataacgaaattggaggagatcgcaaatgtgaagagcttcgcggtgcggaagaaggattggcgggtgagcctagagggcacaagggaaggggttaaggggccactaacaatctgcgcggagatatttgaactcacgccctcccttgtagtagtggaggtaaaaaagaaggcgggggataaggaagagtatgatgatttctgtaacaaggaactgaagccaggaatgcagcatcttgtgcaccagatggtcccagttccaaatacacctaccatttctgagttggccgaaaggccttcaaggtaacaggcgccaccgcccctagagctaacggggatagggggagcgactctccaagctagaaagaaacaggagtcgggtgcaactgacaggaacaagagttcttgtagtctcgggcactgacggtgatgagcgcggttacttggttaactctggagagcatacataatgttatccgagacgggagctagattgtggctgtatatggtgtcgccctagctgctgttcaaatgttatactttctctacttaattagctgatgattgtgtatgtactcctgcttatcagcagaaccgaataattttgggtaatcgttaattcaaggatcgaactgattgag

SEQ ID NO: 18548 - protein, 526 aa, Triticum aestivum; identical to SEQ ID NO: 2016

SEQ ID NO: 18549 - DNA, 1530 bp, Pisum sativum
  CDS (1)..(1530)
atggatggatcagctggccctggtggtggaaatgtgaacgcatttctacggaattataaaatgggaaaaacacttggcattgggtcctttggcaaagtgaagattgcagagcatgtattgaccggtcataaagtcgccataaagattcttaaccgtcgcaagataaagaacatggaaatggaagagaaagtgagaagagaaatccaaattttacgattgttcatgcatcatcacattatacgtctttacgaggttgtggaaaccccaacagacatatatgtggtgatggaatatgtgaaatctggagagctcttcgattacatcgtagaaaagggtaggttgcaagaagatgaagcccgcagtttcttccagcagataatctctggtgtggagtactgtcacaggaatatggtagtccatagagacctgaaacctgagaatgtacttttggactcaaaatggagtgtcaagattgctgattttggcttgagcaacatcatgcgtgatggccactttctcaaaacaagttgtggaagccctaactatgctgctccagaggttatctctggaaaattatatgctggacctgaagtagatgtttggagctgcggtgtaattttatacgcacttctctgtggcactctaccttttgatgatgaaaatattcccaacctcttcaaaaaaataaagggtgggatatatactcttcccagtcatctatctcctggtgccagagatttgataccaaggctgcttgtggtggatcccatgaaaaggattaccataccagagatacgccaacaccaatggttccaacttcgtctgccgcgttatttggcggtgccaccaccggatacacttcaacaagccaaaaagattgatgaggagattcttcaggaggtggttaataggggatttgacagggatcaattggttgagtcccttagcaacagggtgcaaaatgagggtactgtaacctactatttgttattggacaatcgttatcgtgtttccactggctatcttggagctgagtttcaagagacaatggatcctggtttgaaccgtatcaactccggtgaagttgtttctccagctggtgggcaccactttttagggtatcagggagtaggaatgaggcaacagttccctgctgagagaaaatgggcccttgggcttcagtctcgagcccaacctcgagaaataatggttgaggtccttaaagctctccaaggattgaatgtctgttggaaaaaaattggacactataatatgaagtgcagatgggtcgttggcatccctggtcatcaaggaggaatggtgaacaattctgtgcttaataataatttccttggaaatgtcggcattattgagagtgaagctgttccaaaatcaagtgtagtcaagtttgaactgcagctgtacaaaactcaggagaaatatctccttgatcttcaaagggtcgagggtccgcagtttcttttcttggacctttgtgctgccttccttgcgcagcttcgtgttctttaa

SEQ ID NO: 18550 - protein, 509 aa, Pisum sativum
MDGSAGPGGGNVNAFLRNYKMGKTLGIGSFGKVKIAEHVLTGHKVAIKILNRRKIKNMEMEEKVRREIQILRLFMHHHIIRLYEVVETPTDIYVVMEYVKSGELFDYIVEKGRLQEDEARSFFQQIISGVEYCHRNMVVHRDLKPENVLLDSKWSVKIADFGLSNIMRDGHFLKTSCGSPNYAAPEVISGKLYAGPEVDVWSCGVILYALLCGTLPFDDENIPNLFKKIKGGIYTLPSHLSPGARDLIPRLLVVDPMKRITIPEIRQHQWFQLRLPRYLAVPPPDTLQQAKKIDEEILQEVVNRGFDRDQLVESLSNRVQNEGTVTYYLLLDNRYRVSTGYLGAEFQETMDPGLNRINSGEVVSPAGGHHFLGYQGVGMRQQFPAERKWALGLQSRAQPREIMVEVLKALQGLNVCWKKIGHYNMKCRWVVGIPGHQGGMVNNSVLNNNFLGNVGIIESEAVPKSSVVKFELQLYKTQEKYLLDLQRVEGPQFLFLDLCAAFLAQLRVL

SEQ ID NO: 18551 - DNA, 1747 bp, Solanum lycopersicum
  CDS (137)..(1477)
ccagaatcgatcagatttctccgttgctcaatttcccggcgacttctccaccggaatttctccatttccggtttttgatgagctatagttgaggttgctttgcttttggtgatctgtgggaaatgagtgttcagtgatgaagaaagtgaagagaaagcttgggaagtatgaagttggcagaactattggtgaagggacatttgccaaggttaagtttgcacgaaacaccgagactggagagaatgttgccattaaagtcttggccaaaagtaccattcttaagcatagaatggttgaacagatcaaaagagagatatctataatgaagattgtcagacatccttgcatagttcgacttcatgaggttttagctagccagacaaaaatatatatcgttcaggagtttgtcactggaggagagctttttgataaaattgttcatctaggtaggctttctgaggatgaagcaaggagatacttccaagaactcatagatgcaattgctcactgtcacagcaagggtgtttaccacagagatttgaagcctgaaaatttgcttcttgatttccaagggaacttaaaaatttctgactttgggcttagtgcattgcctcaacaaggagtcgagctcctctataccacttgtgggactccaaattatgttgcacctgaggtgttaggtaaccgaggttatgatggtgctgctgcggatgtgtggtcatgtggtatcatcctttatgttctgatggcaggatatcttccatttgatgagacagaccttcctaccttgtatacaaagatcaaggctgctgaattttcctgtccattttggttttctcctggtgcaacatcgttgattcaaaaaatcattgatccaaatcctcaaactaggatcaagattgatggaataaaacgagacccttggttccggaaaaactacagagctgttaaagctaaagcagatgaagtagtgaatcttgatgatatccatgctgtgttcgacgacattgaggatgcatttgtcagtgaaaaatcagaagatagtgagagtggtcccttggtaatgaatgcatttgagatgataacactatctcagggattaaatctatccgctttgtttgacagacgtcaggattatgtcaagcgtcaaactcgatttatttcccgccaacctgctaaagtcgtcattgaaactattgaagcagctgcagagtcgttgggtcttaaggtccacacacgcgattacaagacaagaattgagggggtaacggcaaatagggctggtcaatttgctgttgtgctggaggttttccaagtagccccttccctttttatggttgatgttagaaaggctgctggggacactcttgaatatcacaagttctacaaaaccttctgcacgaaaattgacgacgtcatttggaaaccgaaggaaggcatgtcaaatgctgttctgcttaggacaaggactcgctgaaccagatttctgggaatgaagtgaatcacttatcaatttgatgtgctccgaagacgttcgttgtgttaggtatagtgtgtgtaactgcatgttgttaatcttttgttcactacatatcttaagtgataaatcatgggctcaaaagcaatacaagtagggttgtaaatgagacggttcgatcagttgtaaccaatttttcggatattatataatgtataaccaaaacctagacttttcaaaaccatcccaataatatcggtttctctttgg

SEQ ID NO: 18552 - protein, 446 aa, Solanum lycopersicum; identical to SEQ ID NO: 2018

SEQ ID NO: 18553 - DNA, 2214 bp, Lotus japonicus
  CDS (341)..(1681)
taatgttagaaatttaatttaattatagtaaaatccctaccaagcttaatcgcaaacgtcgtgttcttaaaaaggacgctttctaaactactttctgctatctgtctcttgttcatattccaaattcgtaaacttgaacgaccgaactcgtgcttccactttggagaatcgggttccagaatattatattccttcctcttcttcaccaactgcgcgacttgaattcattgatttctaagaattcttgtttgtttcgattttcacgactcagctcgtgcttcaattctaggtcaatttctgaattggggaatttgaagctgtgaatgagtgttgaggaagaatgaagaaggtgaggagaaggatcgggaaatatgaagtgggtagaacaatcggtgaaggtacattcgccaaggttaaattcgctaaaaattctgagactggggaaagtgttgctattaaaatcatggataaaaccaccattctcaagcacagaatggttgaacagattaaaagagagatatccattatgaagattgtcagacatcctaatatagtaaggctgcatgaggttttgtccagccagaccaagatctacataatcctcgagtttgtaatgggaggagaattgtatgatagaattgttcagcggggaaagctttctgaagatgaatctaggcgctactttcaacaacttatagatgctgttgctcattgtcataaaaagggtgtgtaccatagagacttgaagcctgaaaaccttctccttgatgcttttggaaatttgaaggtttctgactttggattgagtgcattgactaagcagggtgttgacctgcttcacaccacatgtggaaccccaagttatgttgctcctgaggtgctcagtaatcaaggttatgatggtgcagctgctgatgtttggtcatgtggagtcatcctatatgttctaaaggccggatatcttccttttgaggaggcagacctttcaacattgtaccgaaggaccagtgctgctgaatttgtttgtccatcctggttttccactggcactacgacattgatacataaaattctggatcctaatcctaaaacacgggtgaaaataggagaaataaggaaagatccttggtttcaaagaaactatttgcccctcaagctcaatgaagatgaacaagtgaatttggatgatgttcaggctgtgtttgatgatattgaggaccaatatgttcctgtacagtcagaaatcaccgagggaggtcctttggtaatgaatgcatttgagatgattaccttatcacaagggttgaatctttcaccattatttgacaggcatcaggattatgtaaagcggcaaactcgtttcgtttcccgcaaaccagcaaaagttataatctcatctattaaagttgttgcagagtcaatgggtctaaaactccagagtcgcaattacaagatgaggattgaaggactttctgcgaataaggctggacaatttgcagtggtcttggaggtgtatgaagtcgcaccgtgcctttacatggtagatgttagaaaggcagctggggatactcttgactatcacaagttttacaagaatctttgtgccaaactagaaaatatcatttggaggccgacagagactatgccagattctgggttgcttcgacaaatgaccttgtgatcaagctcttgcggctgtggctgtgatgcatatctaaaatcaacacgactgaaagccttcgagcttacaaaatactggcatgctttccagccatcatactgcaatgtgcattttgtatgaaacgcgttgagaacgtggcttgatgtcttaggggaagtaagcataaaacatatcgcaatgcatcctacaacgaacctatgccgcaatggcttgcaaaatcaatagacattttgttagggcagaaatagtgtagtgtataaatgtaaacaacggatcgatcccttcctgagctctgtcttgtaaggtgaataagaaaactgtggagttgaactgtgattgagcatttttctttttttgttcagagtagcttgataaaaaattgtaaagagaagtcgtttacatccaaaagagtactagactccaaagagaataatatagttatgcatcttcagataagtatgagattacaagatacctctactcagattgaaatatattactttctattagattttaaaaaaaaaaaaaaaaaa

SEQ ID NO: 18554 - protein, 446 aa, Lotus japonicus; identical to SEQ ID NO: 2020

SEQ ID NO: 18555 - DNA, 1530 bp, Lotus japonicus
  CDS (39)..(1136)
gagaatggtggttttatccatgattttaatagcacagaatggttgaacagattaaaagagagatatccattatgaagattgtcagacatcctaatatagtaaggctgcatgaggttttgtccagccagaccaagatctacataatcctcgagtttgtaatgggaggagaattgtatgatagaattgttcagcggggaaagctttctgaagatgaatctaggcgctactttcaacaacttatagatgctgttgctcattgtcataaaaagggtgtgtaccatagagacttgaagcctgaaaaccttctccttgatgcttttggaaatttgaaggtttctgactttggattgagtgcattgactaagcagggtgttgacctgcttcacaccacatgtggaaccccaagttatgttgctcctgaggtgctcagtaatcaaggttatgatggtgcagctgctgatgtttggtcatgtggagtcatcctatatgttctaaaggccggatatcttccttttgaggaggcagacctttcaacattgtaccgaaggcgggtgaaaataggagaaataaggaaagatccttggtttcaaagaaactatttgcccctcaagctcaatgaagatgaacaagtgaatttggatgatgttcaggctgtgtttgatgatattgaggaccaatatgttcctgtacagtcagaaatcaccgagggaggtcctttggtaatgaatgcatttgagatgattaccttatcacaagggttgaatctttcaccattatttgacaggcatcaggattatgtaaagcggcaaactcgtttcgtttcccgcaaaccagcaaaagttataatctcatctattaaagttgttgcagagtcaatgggtctaaaactccagagtcgcaattacaagatgaggattgaaggactttctgcgaataaggctggacaatttgcagtggtcttggaggtgtatgaagtcgcaccgtgcctttacatggtagatgttagaaaggcagctggggatactcttgactatcacaagttttacaagaatctttgtgccaaactagaaaatatcatttggaggccgacagagactatgccagattctgggttgcttcgacaaatgaccttgtgatcaagctcttgcggctgtggctgtgatgcatatctaaaatcaacacgactgaaagccttcgagcttacaaaatactggcatgctttccagccatcatactgcaatgtgcattttgtatgaaacgcgttgagaacgtggcttgatgtcttaggggaagtaagcataaaacatatcgcaatgcatcctacaacgaacctatgccgcaatggcttgcaaaatcaatagacattttgttagggcagaaatagtgtagtgtataaatgtaaacaacggatcgatcccttcctgagctctgtcttgtaaggtgaataagaaaactgtggagttgaactgtgattgagcatttttcttttaaaaaaaaaaaaaaaaaaaaaaaaaaaaaaaaaaaaaaaaa

SEQ ID NO: 18556 - protein, 365 aa, Lotus japonicus
MVEQIKREISIMKIVRHPNIVRLHEVLSSQTKIYIILEFVMGGELYDRIVQRGKLSEDESRRYFQQLIDAVAHCHKKGVYHRDLKPENLLLDAFGNLKVSDFGLSALTKQGVDLLHTTCGTPSYVAPEVLSNQGYDGAAADVWSCGVILYVLKAGYLPFEEADLSTLYRRRVKIGEIRKDPWFQRNYLPLKLNEDEQVNLDDVQAVFDDIEDQYVPVQSEITEGGPLVMNAFEMITLSQGLNLSPLFDRHQDYVKRQTRFVSRKPAKVIISSIKVVAESMGLKLQSRNYKMRIEGLSANKAGQFAVVLEVYEVAPCLYMVDVRKAAGDTLDYHKFYKNLCAKLENIIWRPTETMPDSGLLRQMTL

SEQ ID NO: 18557 - DNA, 1959 bp, Lotus japonicus
  CDS (350)..(1615)
tgttctttcagtttttccaattcccagcatccatttcataccaaaaaccaaaacaagtcaacaacaaatcacacttgaaacttgtcagtgaagcttgattcgtgttatgcttctgggtttgcaagggaatggtggaagagtgagagatagagaaagagagaagaacgatggtgctgaggaaagtgggcaagtacgaaattgggagaaccattggggaaggaaccttcgcgaaggtgaagttcgctcagaacactgaaactggcgagagtgtcgccatgaaggtgcttgatcgcaacaccatcatcaagcacaacatggtcgaccaggtagtgaaacataaaccttaaacatgaatcactgtgttgtgttatgtataattgtagttggtttttttttttttttttttctttctcaatttgttatgcagatcaaaagggagatttccattatgaagctagttagacatccttatgttgttcgtctctatgaggttcttgcgagccgaacgaaaatttatatcatattggagttcattactggtggtgaattgtttgataaaattatacgtcatgggcgtcttagtgaagctgagtctagaagatatttccagcagttgattgatggtgtagattattgccacagtaagggagtttatcatagagatttgaagccggaaaatcttttacttgattcacttggaaatataaagatttccgattttggattgagcgcattgcctgaacagggagtgagtatccttcggacaacttgtgggactccaaactatgtagctcctgaggtactcagtcacaagggttacaatggtgctgttgcagatgtttggtcctgtggggttatcctctatgtcctattggttggatatcttccctttgatgagctcgatctaacctccttatacagtaagattgagaaagcagagtattcatgccctcctgggtttcccgtgggtgcaaaaacattgatacataaaattttggacccaaatcctgaaactcgtataaccattgaacaaatacgaaatgatgaatggtttcagagaggctatgttcctgtcagtcttctcgagtatgaggatgtaaatctggatgatgtaaatgctgtttttgatgatgccgaggaacagagggctaatcaacagtgtgatcatgaggacatgggtcctttaatgctaaatgcatttgacttgataattctatctcaaggcttaaaccttgcagcaatctttgaccgtggacaggactctatgaagtaccaaacccgctttatcactcaaaagccagcaaaggtggttttgtctagtatggaagttgtggcacaatcaatgggatttaagacgcatattcgcaactacaagatgagggtagagggtctttcagcgaaaaaaacttctcatttctcggttatgcttgaaatttttgaagtggctcccacattttacatggtggacattcagaaagcagctggagatgcaggtgaatacctcaagttttacaagaacttttgtggcaatctggaggatataatctggaaaccgcctcatgaatcaaccaaatcaaaggtctccaagactagaagcaaaaggcgctcaagatagcttctgcttcttagcatattgaaagagtaaaaaaggaaacaaaaatacacacttaaggaacattgccctggccccaaccttcatcgtaccttcaaacccgcccaagtccaaattcaaaagagggtaaagtgagtatatgtttatacatatatatcatcttgtatgtttgttgtatgtaattctatagctttggtttgtcaattcttccactaaaatttatcctgcatctcttagtgtgtgtttgaatgttagttgagtgcaatgagaattgactttcatcccaatcaataggaagacttccattcactttttctaagtgagtgctaaaaaaaaaaaaaaaaaaa

SEQ ID NO: 18558 - protein, 421 aa, Lotus japonicus
MNHCVVLCIIVVGFFFFFFLSQFVMQIKREISIMKLVRHPYVVRLYEVLASRTKIYIILEFITGGELFDKIIRHGRLSEAESRRYFQQLIDGVDYCHSKGVYHRDLKPENLLLDSLGNIKISDFGLSALPEQGVSILRTTCGTPNYVAPEVLSHKGYNGAVADVWSCGVILYVLLVGYLPFDELDLTSLYSKIEKAEYSCPPGFPVGAKTLIHKILDPNPETRITIEQIRNDEWFQRGYVPVSLLEYEDVNLDDVNAVFDDAEEQRANQQCDHEDMGPLMLNAFDLIILSQGLNLAAIFDRGQDSMKYQTRFITQKPAKVVLSSMEVVAQSMGFKTHIRNYKMRVEGLSAKKTSHFSVMLEIFEVAPTFYMVDIQKAAGDAGEYLKFYKNFCGNLEDIIWKPPHESTKSKVSKTRSKRRSR

SEQ ID NO: 18559 - DNA, 1763 bp, Lotus japonicus
  CDS (81)..(1427)
gtgaagcttgattcgtgttatgcttctgggtttgcaagggaatggtggaagagtgagagatagagaaagagagaagaacgatggtgctgaggaaagtgggcaagtacgaaattgggagaaccattggggaaggaaccttcgcgaaggtgaagttcgctcagaacactgaaactggcgagagtgtcgccatgaaggtgcttgatcgcaacaccatcatcaagcacaacatggtcgaccagatcaaaagggagatttccattatgaagctagttagacatccttatgttgttcgtctctatgaggttcttgcgagccgaacgaaaatttatatcatattggagttcattactggtggtgaattgtttgataaaattatacgtcatgggcgtcttagtgaagctgagtctagaagatatttccagcagttgattgatggtgtagattattgccacagtaagggagtttatcatagagatttgaagccggaaaatcttttacttgattcacttggaaatataaagatttccgattttggattgagcgcattacctgaacagggagtgagtatccttcggacaacttgtgggactccaaactatgtagctcctgaggtactcagtcacaagggttacaatggtgctgttgcagatgtttggtcctgtggggttatcctctatgtcctattggttggatatcttccctttgatgagctcgatctaacctccttatacagtaagattgagaaagcagagtattcatgccctcctgggtttcccgtgggtgcaaaaacattgatacataaaattttggacccaaatcctgaaactcgtataaccattgaacaaatacgaaatgatgaatggtttcagagaggctatgttcctgtcagtcttctcgagtatgaggatgtaaatctggatgatgtaaatgctgtttttgatgatgccgaggaacagagggctaatcaacagtgtgatcatgaggacatgggtcctttaatgctaaatgcatttgacttgataattctatctcaaggcttaaaccttgcagcaatctttgaccgtggacaggactctatgaagtaccaaacccgctttatcactcaaaagccagcaaaggtggttttgtctagtatggaagttgtggcacaatcaatgggatttaagacgcatattcgcaactacaagatgagggtagagggtctttcagcgaaaaaaacttctcatttctcggttatgcttgaaatttttgaagtggctcccacattttacatggtggacattcagaaagcagctggagatgcaggtgaatacctcaagttttacaagaacttttgtggcaatctggaggatataatctggaaaccgcctcatgaatcaaccaaatcaaaggtctccaagactagaagcaaaaggcgctcaagatagcttctgcttcttagcatattgaaagagtaaaaaaggaaacaaaaatacacacttaaggaacattgccctggccccaaccttcatcgtaccttcaaacccgcccaagtccaaattcaaaagagggtaaagtgagtatatgtttatacatatatatcatcttgtatgtttgttgtatgtaattctatagctttggtttgtcaattcttccactaaaatttatcctgcatctcttagtgtgtgtttgaatgttagttgagtgcaatgagaattgactttcatcccaaaaaaaaaaaaaaaaaaaaaaaaaaaaaaaaaaaaaaaaaaaaaaaaaaaaaa

SEQ ID NO: 18560 - protein, 448 aa, Lotus japonicus; identical to SEQ ID NO: 2022

SEQ ID NO: 18561 - DNA, 1892 bp, Lotus japonicus
  CDS (296)..(1621)
gagagacatatagagattatatatggtggctggctacaacaaccaaaatcccagaaaaaattctcttgttttttctttgccccacatatatttatattaattttatcattattattattagacacatacatttgaatttgattgaagcagataagtattgagaagtaactgtccaagtttctgccagaattctatgcacagaaaatgcaaatatcaggcacatgagttttgtctagttgcagagcagtcgttggtatattccttataagtgtgtagaagttcaagtttatagagaatgaatcagcctaagattaagcgccgtgtgggtaaatatgaggttgggaggaccattggtgagggaacatttgcaaaggtgaaatttgcaaggaactctgagacaggggaagctgtggctctcaaaattcttgacaaagagaaggtcctcaagcacaagatggctgaacagattaagcgggaagtagctacaatgaagttaatcaagcatccaaatgtggttcagctgtatgaggtcttgggaagcaagacgaaaatatatatggttttggagtttgtgactgggggagagctcttcgacaaaattgtaaaccatggacggatgtgtgaagatgaagcacgtagatatttccagcaactgataaatacagttgattattgccatagcaggggtgtctaccacagagatcttaagccagaaaatttgctattagatgcttgcgggaatcttaaagtttctgattttgggttgagtgcactctcccagcaaattaaggatgatggactactacatactacatgtggaactccaaattatgttgctccagaggtccttaatgataaaggctatgatggagcaactgcagatttgtggtcatgtggggtgattctctttgtattggttgcgggttacttgccttttgatgaccctaatcttatggaattgtataaaaaaatctcagcagcagaatttacttgccccccatggctttctttcagtgcccggaaattgataactcgaatcttggatcccaatcccatgactcgtatcactatagctgagattctggaagatgaatggtttaagaaagattataagcctccaattttccaggagaatggggaaaccaacctcgacgatgtagaagccgtctttaaagattctgaagagcaccatgtgacagagaagaaagaagagcagccaacagcaatgaatgcattcgagttaatttccatgtccaaagggctcaaccttgaaaacttgtttgatgttgagcagggatttaaaagggaaacaagattcacatcaaagtcccctgccaatgagataatcagcaagattgaagaagctgcaaaacctcttggctttgatgtgcagaagaaaaattacaagatgaggcttgcaaatgtgaaagctggaaggaagggaaaccttaatgttgccacagaggtgtttcaagtggcaccttctcttcacatggttgaggtgcggaaagctaaaggcgatacattggagttccataagttctacaaaaaactctcgacatgcctggaagatgttgtttggaaaacagaagatgacatgcaaaagcaagaagcaaaatgatgttaatatcaatattatatatctggtgtaattttcttcatgtcttaagtcctcatgatattttccaatatatcttcattcgttattggcttcctccttgtaggtttgtttgtttggacattacatgttccatatatttagttccatgctattatttgtaaagcatgcagagtttatgtaagaatttatccatcaacagttcctgttatgttcatgaaacaaaaaaattatataagagagtgtgtagattgtataaaaaaaaaaaaaaaaa

SEQ ID NO: 18562 - protein, 441 aa, Lotus japonicus; identical to SEQ ID NO: 2024

SEQ ID NO: 18563 - DNA, 1575 bp, Capsicum annuum; identical to SEQ ID NO: 4558
  CDS (1)..(1575)

SEQ ID NO: 18564 - protein, 524 aa, Capsicum annuum; identical to SEQ ID NO: 4559

SEQ ID NO: 18565 - DNA, 1506 bp, Oryza sativa subsp; identical to SEQ ID NO: 2025
  CDS (1)..(1506)

SEQ ID NO: 18566 - protein, 501 aa, Oryza sativa subsp; identical to SEQ ID NO: 2026

SEQ ID NO: 18567 - DNA, 1356 bp, Oryza sativa subsp; identical to SEQ ID NO: 2135
  CDS (1)..(1356)

SEQ ID NO: 18568 - protein, 451 aa, Oryza sativa subsp; identical to SEQ ID NO: 2136

SEQ ID NO: 18569 - DNA, 1539 bp, Nicotiana attenuata
  CDS (1)..(1539)
atggatggatcaacagtccaaggtgggagcagcgtggagtcatttctacggaactataagcttgggaaaactcttggcattggatcattcggaaaagttaaaatagctgaacataccttaacagggcataaagttgctgtcaagattctcaatcgccggaaaatcaagaacatggatatggaagaaaaagtgagaagggaaattaaaatattgagattgttcatgcatcctcacatcattcggctgtatgaggttgtagagacaccatcagatatatatgttgtgatggagtatgtgaaatctggtgagctatttgattacattgtggagaagggcaggctacaagaggatgaagcacgtaaattcttccagcagataatctctggtgtggagtactgccacaggaacatggtggttcatagagatcttaagcctgagaacctccttttggattccaaatggaatgtgaagattgcagattttgggttgagtaatatcatgcgtgatggtcactttctcaagacaagttgtggtagcccaaattatgctgcgccggaggtgatatcaggtaagttatatgctggacctgaggtagatgtatggagctgtggtgttattctatatgctcttctctgtggcacccttccatttgatgatgaaaacattcccaacctctttaagaaaataaagggcggtatgtatactctgcccagccatttatcagctggtgcaagggatctgattccaaggatgcttatagttgaccctatgaagcgaatgactattcctgagattcgtatgcacccttggttccaagctcatctaccacgctatttagctgtacctccaccagatacgatgcaacaagcgaaaaagattgatgaagatattcttcaagaggtggtcaaaaggggatttgacaggaacagccttgtcgcctctctctgcaatagagttcagaatgagggtactgtggcgtactatttgctgctggacaaccgctttcgtgcttccagtggctacatgggagctgaattccaggagactatggaatacggttatcatcaaataaattcaagtgaagctgttgcttcccctgttgggcaacacttgcctggaataatggattttcaacaagttggtgcgaggcagtttcctgtcgaaaggaaatgggctcttgggctccagtctcgagcgcatccacgtgagataatgacagaagttctgaaagctctgcaaggactgaatgtacgttggaagaagatcggaccctacaacatgaaatgccaatgggttcctggcgtacctggccatcatgaaggcatgagtaataattccatacacaatccattctttggagatgattcaaccatcattgagaacggtggtgtcactatacctaatgcagtgaagtttgaagttcagctttataaaactcgggaggagaagtacctgcttgaccttcaaagagtacagggtccacagttccttttcttggatctctgtgctgctttccttgctcagcttcgggtcctctaa

SEQ ID NO: 18570 - protein, 512 aa, Nicotiana attenuata
MDGSTVQGGSSVESFLRNYKLGKTLGIGSFGKVKIAEHTLTGHKVAVKILNRRKIKNMDMEEKVRREIKILRLFMHPHIIRLYEVVETPSDIYVVMEYVKSGELFDYIVEKGRLQEDEARKFFQQIISGVEYCHRNMVVHRDLKPENLLLDSKWNVKIADFGLSNIMRDGHFLKTSCGSPNYAAPEVISGKLYAGPEVDVWSCGVILYALLCGTLPFDDENIPNLFKKIKGGMYTLPSHLSAGARDLIPRMLIVDPMKRMTIPEIRMHPWFQAHLPRYLAVPPPDTMQQAKKIDEDILQEVVKRGFDRNSLVASLCNRVQNEGTVAYYLLLDNRFRASSGYMGAEFQETMEYGYHQINSSEAVASPVGQHLPGIMDFQQVGARQFPVERKWALGLQSRAHPREIMTEVLKALQGLNVRWKKIGPYNMKCQWVPGVPGHHEGMSNNSIHNPFFGDDSTIIENGGVTIPNAVKFEVQLYKTREEKYLLDLQRVQGPQFLFLDLCAAFLAQLRVL

SEQ ID NO: 18571 - DNA, 1749 bp, Drosophila melanogaster
  CDS (1)..(1749)
atgccccagatgagggctgcggccgctgaggcggtggccgccggcagcgccaatggccagccgctggtcaagattgggcactacctactgggcgcaaccctgggaacgggaaccttcggcaaggtgaagatcggcgagcaccagatcacacgcgtcaaggtggccgtcaagatactcaatcgtcagaagatcaaaagcctggacgtcgtgggcaagatccggcgtgagatccagaacctaaagctcttccgccatccgcacatcatcaagttgtaccaggtcatatcgacgccgtcggacatcttcatgatcatggagtacgtgagcggcggggagctgttcgactatattgtgaagcacggcaagctgcaggagcaccaagcgcgccgcttttttcagcagattatctctggcgtggactattgccaccggcacatgatcgtgcatcgagacctgaagccagagaacctgctgctcgaccacaacatgcacgtgaagatcgccgactttgggctctcgaacatgatgctggacggcgagttcctgcgcacctcgtgcggctcgcccaactacgcggcgcccgaggtgatttccggcaagctgtacgccggtcccgaggtggacatctggtcgtgcggcgtcatcctgtacgccctgctgtgcgggacgctgccctttgacgacgagcatgtgcctacgctgtttcgcaagatcaagtcgggcattttccccattcccgagtacctcaacaaacaagtggtcaatctggtctgtcagatgctgcaagtggacccgctcaagcgggccaacatcgaggaaatcaagaagcacgagtggttccaaaaggacctcccggcctacctcttcccctcgtccatcgagcaggactccaatgtgatcgacacctacgctgtggcagaggtctgcaccaagttcggcgtcaaggagaccgaggtgcacaactcgctgctcagcggcgatccgcacgatcagctggccatcgcttaccatctgatcatcgacaacaaacgcttcgccgacgacgcggccaaccaaataaacgagatcaacaacttctttgtggccggctctccaccaccgccgccgcctccgcccgttccccaatcatcgatggaccaccaagcccctctggccaccgtgaccgttggcggaggtacctcagccagctcgggcaccgccacaccagtgccaccagtggctggaggcacgcctagcagcaccatacccattcgaccgcatccggagcggattgcgccgatgcgggaccgtcaactggccatgtccgtgcagacatctggcggcggagccttcccggagaaaaccgcacgtggcggcactcccatcaagcgcgccaagtggcatctgggcatccggtcgcagagcaagcccaacgacataatgctcgaggtataccgagcgatgaaggcactcagctacgagtggaagatcatcaatccgtaccacgttcgggtgcgcaggcagaacgtgaagaccggcaagttctcgaagatgtcactgcagctgtaccaggtggacgccaagagctatctgctcgacttcaagtcgctgaccaacgacgaggtcgagcagggcgacgacgtcatcatggagagccttactccgccgccgcttagcgtgtccggggtgatgccgctgcagccgaccggccaccacatcatggagtttttcgaaatgtgcgccgccctgatcattcaactggctcgctaa

SEQ ID NO: 18572 - protein, 582 aa, Drosophila melanogaster
MPQMRAAAAEAVAAGSANGQPLVKIGHYLLGATLGTGTFGKVKIGEHQITRVKVAVKILNRQKIKSLDVVGKIRREIQNLKLFRHPHIIKLYQVISTPSDIFMIMEYVSGGELFDYIVKHGKLQEHQARRFFQQIISGVDYCHRHMIVHRDLKPENLLLDHNMHVKIADFGLSNMMLDGEFLRTSCGSPNYAAPEVISGKLYAGPEVDIWSCGVILYALLCGTLPFDDEHVPTLFRKIKSGIFPIPEYLNKQVVNLVCQMLQVDPLKRANIEEIKKHEWFQKDLPAYLFPSSIEQDSNVIDTYAVAEVCTKFGVKETEVHNSLLSGDPHDQLAIAYHLIIDNKRFADDAANQINEINNFFVAGSPPPPPPPPVPQSSMDHQAPLATVTVGGGTSASSGTATPVPPVAGGTPSSTIPIRPHPERIAPMRDRQLAMSVQTSGGGAFPEKTARGGTPIKRAKWHLGIRSQSKPNDIMLEVYRAMKALSYEWKIINPYHVRVRRQNVKTGKFSKMSLQLYQVDAKSYLLDFKSLTNDEVEQGDDVIMESLTPPPLSVSGVMPLQPTGHHIMEFFEMCAALIIQLAR

SEQ ID NO: 18573 - DNA, 1494 bp, Oikopleura dioica
  CDS (1)..(1494)
atgccgagtaacggctcaagtggccatttcaatgacgagtacgagttgaaagaagagctcggaaaaggagcgttttccatcgtcaggcgctgcgtcaagaaatcaaatggagacgagtacgcggccaagattatcaacacaagaaaactttctgcgcgagaccaccaaaaacttgaacgcgaggcgcgaatctgtagactgctcaatcatgcgaatatcgtgagactgcacgattcgctctcggacgacaactgccattacctcgttttcgatttagtgactggtggcgagcttttcgaagatatcgtcgctcgcgagttttactccgagtcagatgccagtcgctgcatctcccaagtactcgactgtttgaaacatacacacagttataacgtcattcaccgagacctcaagccggaaaatctattgcttgcttcaaaaaataaaaacgcggacgtgaaactagctgattttggactcgcaattgaagttcaaggcgatactccagcctggtttggatttgctggaactccaggatatctcagccccgaagttttgcgaaaagaagcgtacggaaaagccgttgatatttgggcatgcggagtcattttgtatattttacttgtcggttacccgccattctgggatgaagaccagcaccggctttacgctcaaatcaaagccggagcgtatgactttccgtccccagaatgggacaccgttacggctgatgccaagaacctcatcaaacagatgctcgtgttggatccaaagaaaagaataactgcggaacaggctcttaatcatccctggatatcccaacgagaacgttatgctgctactattcatcgtcaagaaaccgtcgaatgcctcaaaaaattcaatgctcgaagaaaactcaagggtgcaattatcacaactatgcttgcaactcgcaacttttcttcccgcaacttgatctccaaggccaaggagaaccaaaagaaagaagagcttgcaaaagcagcgagcttgaaagagaaagaagagagtacagttaagccgagtcaaagtacaattacagtagtgccagagcatcaagacactgtaattgaggttacgtctaacgtgaccaaggtcaacgactcaaacagctcggcagaagagtccgacgaccaccgatcgcgcaagaatgaactgatcaagttcactgaaaacggacagctgatcaagggacaggattttcatcgattttatttcgacaacgggctacagcttccaaacgggctgagtggagccaaaagaatccaacagacgattggaaatccacacgtacaaatgctatccgacgattcggctgtcatggcttacgctagaatcgtgcagtaccaggataaatcgggaagcgtccaaacgattgtcctaaacgagtcgcgtgtttggaaaaaaagcacggagccgggctcgaacagctggatctgctgccattttcataaatccactgtgaataaataa

SEQ ID NO: 18574 - protein, 497 aa, Oikopleura dioica
MPSNGSSGHFNDEYELKEELGKGAFSIVRRCVKKSNGDEYAAKIINTRKLSARDHQKLEREARICRLLNHANIVRLHDSLSDDNCHYLVFDLVTGGELFEDIVAREFYSESDASRCISQVLDCLKHTHSYNVIHRDLKPENLLLASKNKNADVKLADFGLAIEVQGDTPAWFGFAGTPGYLSPEVLRKEAYGKAVDIWACGVILYILLVGYPPFWDEDQHRLYAQIKAGAYDFPSPEWDTVTADAKNLIKQMLVLDPKKRITAEQALNHPWISQRERYAATIHRQETVECLKKFNARRKLKGAIITTMLATRNFSSRNLISKAKENQKKEELAKAASLKEKEESTVKPSQSTITVVPEHQDTVIEVTSNVTKVNDSNSSAEESDDHRSRKNELIKFTENGQLIKGQDFHRFYFDNGLQLPNGLSGAKRIQQTIGNPHVQMLSDDSAVMAYARIVQYQDKSGSVQTIVLNESRVWKKSTEPGSNSWICCHFHKSTVNK

SEQ ID NO: 18575 - DNA, 1335 bp, Oryza sativa subsp; identical to SEQ ID NO: 2153
  CDS (1)..(1335)

SEQ ID NO: 18576 - protein, 444 aa, Oryza sativa subsp; identical to SEQ ID NO: 2154

SEQ ID NO: 18577 - DNA, 1437 bp, Gossypium hirsutum; identical to SEQ ID NO: 2027
  CDS (1)..(1437)

SEQ ID NO: 18578 - protein, 478 aa, Gossypium hirsutum; identical to SEQ ID NO: 2028

SEQ ID NO: 18579 - DNA, 1371 bp, Oryza sativa subsp; identical to SEQ ID NO: 2163
  CDS (1)..(1371)

SEQ ID NO: 18580 - protein, 456 aa, Oryza sativa subsp; identical to SEQ ID NO: 2164

SEQ ID NO: 18581 - DNA, 1731 bp, Schizosaccharomyces pombe
  CDS (1)..(1731)
atgcaaccgcaggaggttgatttaatggagaactcaaccatgcgaaatggagcaagagttttaccaccagaagccatatccaagcgccatatcggcccttatattataagggaaacccttggtgaaggttcttttggcaaagtcaagctcgctactcattacaaaacgcaacagaaagttgctctcaagtttatctcccgtcaattgctaaagaaaagcgatatgcatatgcgtgtggagcgtgaaatttcatacttgaagcttttgcgacatcctcatattattaaattgtatgatgtgataaccacgcccacagatatcgttatggtaattgaatatgcaggtggtgaattgtttgattatattgtagaaaagaaaaggatgactgaagatgagggtcgtcgtttttttcaacaaattatatgtgcaattgagtactgtcaccgtcacaaaattgtacatcgcgatcttaaacccgaaaatttgttgttggatgacaatctcaacgtaaagattgctgatttcggtttatcaaatattatgacagacggtaatttcctaaaaacgtcctgtggcagtccaaattatgcagccccggaagttatcaacgggaaattgtatgctggtccagaagtcgatgtttggagttgcggcattgttctctatgtgatgttggtgggtcgtcttcctttcgacgatgaatttatccccaatttgtttaaaaaagttaacagttgtgtttatgttatgcctgattttctttctcccggagcacaatctttaattcgccgaatgattgttgcagatccaatgcagaggataacaattcaggaaatacgtcgggacccttggttcaacgttaatttacccgattatttacgtcctatggaggaggtccaaggctcttatgctgattcacgaattgtcagcaagcttggtgaggcaatggggttctcggaggattacattgtcgaagctttacgttcagatgaaaataatgaagtaaaagaggcttataacttgctacatgaaaatcaagtaatccaagaaaagagtcatctctccaaatcaaaacgagtcgattcttttctatctgtatctccacccgcattttcagaatatacttctgaattgcaaaagaagtcaaaacaggagcttatcgatcctactttagaaggaccgcgttggacagtctccgaccctccaacatatgctaaacaaacaattgacagtaacatatgtgtccttgtgcctacggcagaaaaaaataaacttgaaatgaggactcttgccgatgctgctagtgctgtggatacgagccaatccactcgcaaaaagagtcgccgtaacaaatggcattttggtgttcgctgccggggcgatgcacctgaaattttgttggctgtgtatcgagctttacaacgtgcaggagctcagtttaccgttccaaaaccagtaaatggaaaatatcgatcagacatgtataccattaaaagtcgttgggaaattcctcattgtaaaagggaaggaaaaaatacttatgcttatattgagttacaactttatgaagttatgcccgggtgttttatgctagatgtgaaatctaatggttacaaagatatttattctcatcctgaacgaacagctgatcatggcatggatgatcttaagtcatcttccccattttcagatttgtgtgctatgctggtgtgcaagttattttctgcatga

SEQ ID NO: 18582 - protein, 576 aa, Schizosaccharomyces pombe
MQPQEVDLMENSTMRNGARVLPPEAISKRHIGPYIIRETLGEGSFGKVKLATHYKTQQKVALKFISRQLLKKSDMHMRVEREISYLKLLRHPHIIKLYDVITTPTDIVMVIEYAGGELFDYIVEKKRMTEDEGRRFFQQIICAIEYCHRHKIVHRDLKPENLLLDDNLNVKIADFGLSNIMTDGNFLKTSCGSPNYAAPEVINGKLYAGPEVDVWSCGIVLYVMLVGRLPFDDEFIPNLFKKVNSCVYVMPDFLSPGAQSLIRRMIVADPMQRITIQEIRRDPWFNVNLPDYLRPMEEVQGSYADSRIVSKLGEAMGFSEDYIVEALRSDENNEVKEAYNLLHENQVIQEKSHLSKSKRVDSFLSVSPPAFSEYTSELQKKSKQELIDPTLEGPRWTVSDPPTYAKQTIDSNICVLVPTAEKNKLEMRTLADAASAVDTSQSTRKKSRRNKWHFGVRCRGDAPEILLAVYRALQRAGAQFTVPKPVNGKYRSDMYTIKSRWEIPHCKREGKNTYAYIELQLYEVMPGCFMLDVKSNGYKDIYSHPERTADHGMDDLKSSSPFSDLCAMLVCKLFSA

SEQ ID NO: 18583 - DNA, 1530 bp, Zea mays
  CDS (1)..(1530)
atggatggaagtagtaaagggagtgggcattctgaagcattaaggaactacaacctgggaagaactttaggtatcggtacatttggaaaagtgaagattgcagagcataagcttactggacatagggttgctataaagatcatcaactgccgccaaatgagaaatatggaaatggaagagaaagcaaagagagaattcaagatattgaagttgttcattcacccccatatcattcggctttatgaggtcatatacacacctacagatatatatgttgtgatggaatattgtaagtatggcgagttatttgattacattgttgagaaaggcagattacaggaagatgaagctcgtcgaatcttccagcagatcatatctggcgtcgaatactgccatagaaacatggttgtccaccgtgacctaaagccggaaaacttgttacttgattcaaagtataatgtaaaacttgcggattttggtctgagcaatgtcatgcatgatggccattttctgaagactagctgtgggagtccgaactatgctgctccagaggtaatatctggtaaactatatgctggacctgaggtcgatgtatggagttgtggggtgattctttatgctcttctttgtggaactcttccatttgatgatgagaatattcccaatctgttcaaaaaaattaagggaggtatctacacacttccaagtcatttgtctgctttggccagggatttgatcccacgaatgcttgttgttgagcctatgaagagaatcacaattagggaaattcgggagcatcaatggttccagattcgccttccacgttacttggcagtgcctccaccagatacgacacaacaagccaaaatgattgatgaagatacacttcgagatgttgttaatatgggatttaacaagaaccatgtgtgtgaatcactgtgcagcagacttcaaaatgaggcaactgttgcatattatttactattggacaatcggtttagagcaactagtggctatcttggggcagattatcaagaatcaatggacaggaatttaaatcagctggcgtcatctgaatcatctagttctggtacgaggaattatgttccaggaagcagtgatcctcatagcagtggtttgcggccatattatcctgttgaaagaaaatgggcgcttggacttcagtctcgggcccaccctcgtgaaataatggttgaggtcttaaaagcacttcaagaattaaacgtcagatggaagaagaatgggcactacaacgtgaaatgcagatggtgcccagggtttcctgaagttaatgacacgttagatgccagcaacagctttcttggtgactctaccatcatggataatgatgatgctaatgggaggctacctactgtgatcaagtttgaattccagctttacaagacgaaggacgacaagtacctcttagatatgcagagagttactggacctcagctgctcttccttgacttctgtgcggccttccttaccaagcttagggttctatag

SEQ ID NO: 18584 - protein, 509 aa, Zea mays
MDGSSKGSGHSEALRNYNLGRTLGIGTFGKVKIAEHKLTGHRVAIKIINCRQMRNMEMEEKAKREFKILKLFIHPHIIRLYEVIYTPTDIYVVMEYCKYGELFDYIVEKGRLQEDEARRIFQQIISGVEYCHRNMVVHRDLKPENLLLDSKYNVKLADFGLSNVMHDGHFLKTSCGSPNYAAPEVISGKLYAGPEVDVWSCGVILYALLCGTLPFDDENIPNLFKKIKGGIYTLPSHLSALARDLIPRMLVVEPMKRITIREIREHQWFQIRLPRYLAVPPPDTTQQAKMIDEDTLRDVVNMGFNKNHVCESLCSRLQNEATVAYYLLLDNRFRATSGYLGADYQESMDRNLNQLASSESSSSGTRNYVPGSSDPHSSGLRPYYPVERKWALGLQSRAHPREIMVEVLKALQELNVRWKKNGHYNVKCRWCPGFPEVNDTLDASNSFLGDSTIMDNDDANGRLPTVIKFEFQLYKTKDDKYLLDMQRVTGPQLLFLDFCAAFLTKLRVL

SEQ ID NO: 18585 - DNA, 2634 bp, Phaeosphaeria nodorum
  CDS (1)..(2634)
atgtcggccgccatcgacaatgaggatctcgaggagctctccatctccatgccgcacccgcggcggggaggccccagcaccaccaaggctgtcgacttcaccacaccgcccgtcgcaccgcccaccgtcatgcaggcgagcaagagcagggacagcaaggccagccagcgcctggggcagtacaccattgtgaagacgctgggcgagggctcgttcggcaaggtcaagctcgcgacgcaccaggtcagcggccagaaggtcgccctgaagattatcaatcgcaagaggctggtgacgcgggacatggccggcaggattgagcgcgagatccagtatctgcagctgctgcggcatcctcacatcatcaagctgtacaccgtaataacgacgccgaccgagatcatcatggtgctggagtacgcgggcggggaactgttcgactacattgtgaacaacggcaggctgcaggaggacaaggcccgcaagttcttccagcagattgtctgcgcagtcgaatactgccatcgacacaagatcgtgcatcgcgacctgaagcccgagaacctgctgctggacgaccaatacaatgtcaagattgccgactttggcctgagcaacatcatgacggacggcaacttcctcaagacgagctgcggtagccccaattacgctgcgcccgaagtcatatctggaaagctgtatgccggaccagaagtggacgtctggagttgcggtgtcatcctctacgttctgttggtggggagacttcctttcgacgacgagtacatccccacgctcttcaagaagatcgcggcgggcaattacagcataccgagctacctatcccccggcgcagtatccctgatcaagaaaatgctcatggtcaatccggtacatcgcataaccattggcgagatccgcatggacccctggttcaccaaggacatcgcaccctacctcgagccgcccgtccaggaattcttcgacagcggtgtggacccgcacaaggcaattgacccgactgcgatagcgccggctataccagcaccagttgttcagaagttgcacgacacggttgtgacgaagcttgggaagacgatgggttatgccgaacacgatgtgcaggaagcgctggcgcgtgatgagccaagtgccatcaaggatgcctacttgattgtgcgggagaaccagatgatgaaggtgaacccattgatgacacaagagagccaactcgcaccattccttgcacaatcaccgccaacacaccacgaaagttacctgggtagctcaatacctcagatcttgaacagttcatcgccccccaaaggcataccgtcccaagcgcaagatcagcacgagagggcacggcatggatcaaatgctagcagccaacttgcgagcgtgcggagccctgtcagcacagtagctatcctacccagcagtctcacagaataccacaaagcatacatgaaaggccacccaagaccgccgttcaaaccagaacacgacggcctcccgccgactcctgatcagacagaagagcaacggcaaatctccgcgaggaggctgaagcccaacttccgagctcttccagataccacacgaaaccgaccagaaccaatgacttcactgcccgcgaagaagccccgaccaaccaagtggcagttcggaatcagatcaagaaaccagcctgcggaggccatgctcgcaatcttcaaggcattgaaagccatgggtgccgactgggaggtgccgaagattagaaaagcgggtggcaagggaggctcgcgcagtccaaccggttcacatgcatctcaagaaaggtcaagatcacggtcacggtcacggagccgctcaccagggtcttcagtatcgtcccacgattcaggtgatgagaagaaaactggtagcgactcacccacacacgagccgctcactgtgcgcaacgctgactccggagaacaacgtggccgtcagaggaagcactacaatcacaccaacgactggggctaccacatcccggaagacccctgggtcatcaacgcccgcttccgcaaagacggcatgttccctcccggcgtcgcacacccatcatccacacattcttcccgcgtcgaccttgcaaacgacccatccggtctccgccgccgcagctccaccaacaccagcacaacaagcctgtcccaccacatcgacagcatgaccatcaccgaccgacccaactccatcagcggcgaagaccaccctgaagccgacgaggccgtctacatctacgtctccatccagctctacagcatcgaccgcgaattcttcgtcgtcgacttcaagtgcgcgggctacgagcgtctcgtgtccaatctcgtgcgcgaggtcaaggccgcgtcgtcatcgtcgccacagcaccagcatgaagatggctgggacgacgaggcgggcgtgtggaggcgattggacgagggcgagccgctgccggatgatctggccaaggagttgagggatggcgggaaaggtgtactgagggagagaacggaggaagtgggtgcgggccgcaaggagggggagaaggtggtgacgagtccgtttccgttcttggatgtggcgagtacgctgatcttgcagttgagcggggagtag

SEQ ID NO: 18586 - protein, 877 aa, Phaeosphaeria nodorum
MSAAIDNEDLEELSISMPHPRRGGPSTTKAVDFTTPPVAPPTVMQASKSRDSKASQRLGQYTIVKTLGEGSFGKVKLATHQVSGQKVALKIINRKRLVTRDMAGRIEREIQYLQLLRHPHIIKLYTVITTPTEIIMVLEYAGGELFDYIVNNGRLQEDKARKFFQQIVCAVEYCHRHKIVHRDLKPENLLLDDQYNVKIADFGLSNIMTDGNFLKTSCGSPNYAAPEVISGKLYAGPEVDVWSCGVILYVLLVGRLPFDDEYIPTLFKKIAAGNYSIPSYLSPGAVSLIKKMLMVNPVHRITIGEIRMDPWFTKDIAPYLEPPVQEFFDSGVDPHKAIDPTAIAPAIPAPVVQKLHDTVVTKLGKTMGYAEHDVQEALARDEPSAIKDAYLIVRENQMMKVNPLMTQESQLAPFLAQSPPTHHESYLGSSIPQILNSSSPPKGIPSQAQDQHERARHGSNASSQLASVRSPVSTVAILPSSLTEYHKAYMKGHPRPPFKPEHDGLPPTPDQTEEQRQISARRLKPNFRALPDTTRNRPEPMTSLPAKKPRPTKWQFGIRSRNQPAEAMLAIFKALKAMGADWEVPKIRKAGGKGGSRSPTGSHASQERSRSRSRSRSRSPGSSVSSHDSGDEKKTGSDSPTHEPLTVRNADSGEQRGRQRKHYNHTNDWGYHIPEDPWVINARFRKDGMFPPGVAHPSSTHSSRVDLANDPSGLRRRSSTNTSTTSLSHHIDSMTITDRPNSISGEDHPEADEAVYIYVSIQLYSIDREFFVVDFKCAGYERLVSNLVREVKAASSSSPQHQHEDGWDDEAGVWRRLDEGEPLPDDLAKELRDGGKGVLRERTEEVGAGRKEGEKVVTSPFPFLDVASTLILQLSGE

SEQ ID NO: 18587 - DNA, 1515 bp, Solanum lycopersicum
  CDS (1)..(1515)
atgagttccagaggtggtggaattgctgaatctccttatttaaggaactacagggttggaaaaactcttggacatggatcctttggtaaagttaaaattgctgagcatttgctcactgggcataaagtggcgatcaaaatccttaatcggcggaaaatgaagactccagacatggaagaaaaactgaggagagaaataaaaatatgtagattatttgtgcatccacatgtcatacgactctatgaagtgatagagacgccaacagatatatatgttgtaatggagtatgtcaagtctggggagctctttgattatattgtagaaaaaggaaggttacaggaagatgaagctcggaaattttttcagcagattattgctggtgtggagtactgccataggaatatggtggttcatcgggaccttaagcctgagaatctgcttttggatgcaagacgcaatgtaaagatagcagattttggcttgggaaacattatgcgagatggccattttctgaagactagttgtggaagtccaaattatgcagctcctgaggttgtatctgggaaactatatgctggtcctgaggtagatgtttggagttgtggcgtaatcttatatgctcttctttgtggtacacttcctttcgatgatgagaacattcccaaccttttcaagaaaataaagagtggagtctacacccttccaagtcacctgtcacctttagctagggatttgataccaaggatgctgattgttgatcctatgaagcgcatatcggtagctgatattcgtcaacaccagtggttcaaaattcatcttcctcggtatttggcagttcctccacctgatgctaggcaacatcttaaaaagcttgatgaggaaattctccagcaagtaactaggatggggcttgatagggaccagttgcttgattctttacaaaagagaatacaagatgatgctactgttgcatactatctgctgtacgataaccgttccatggcttccagtgggtatctaggagctgagtttcaggaatctgtggatggttattcctctggattgtttccaaatcttgacctacagctgtctagtgggaacggagtttctgaagagagtttgagacgcccatttcgcaaagagaaaacgtggctagttggacttcagtctccagcaaatccaaaggagatcatgaatcaggttcttgggaccctgctagaactaaatgttcgatggaaaaaaattgggcactataatatgaagtgtttatggtgtcatgatcttcatcttcatagtatggccagcaatcatatgaatgatgatgatcattttattagtaatgcaactgccataagtacacatttacagccactacctactgtgaagtttgaaatgcagctgtacaaaactgaggatgagaaatatctgcttgatctccaaagaattagtggtccgcagttcctcttcctggatttctgtgctggtttcattaggcagctagaggggccacaatga

SEQ ID NO: 18588 - protein, 504 aa, Solanum lycopersicum
MSSRGGGIAESPYLRNYRVGKTLGHGSFGKVKIAEHLLTGHKVAIKILNRRKMKTPDMEEKLRREIKICRLFVHPHVIRLYEVIETPTDIYVVMEYVKSGELFDYIVEKGRLQEDEARKFFQQIIAGVEYCHRNMVVHRDLKPENLLLDARRNVKIADFGLGNIMRDGHFLKTSCGSPNYAAPEVVSGKLYAGPEVDVWSCGVILYALLCGTLPFDDENIPNLFKKIKSGVYTLPSHLSPLARDLIPRMLIVDPMKRISVADIRQHQWFKIHLPRYLAVPPPDARQHLKKLDEEILQQVTRMGLDRDQLLDSLQKRIQDDATVAYYLLYDNRSMASSGYLGAEFQESVDGYSSGLFPNLDLQLSSGNGVSEESLRRPFRKEKTWLVGLQSPANPKEIMNQVLGTLLELNVRWKKIGHYNMKCLWCHDLHLHSMASNHMNDDDHFISNATAISTHLQPLPTVKFEMQLYKTEDEKYLLDLQRISGPQFLFLDFCAGFIRQLEGPQ

SEQ ID NO: 18589 - DNA, 1563 bp, Oryza sativa subsp; identical to SEQ ID NO: 4580
  CDS (1)..(1563)

SEQ ID NO: 18590 - protein, 520 aa, Oryza sativa subsp; identical to SEQ ID NO: 4581

SEQ ID NO: 18591 - DNA, 1356 bp, Oryza sativa subsp; identical to SEQ ID NO: 2161
  CDS (1)..(1356)

SEQ ID NO: 18592 - protein, 451 aa, Oryza sativa subsp; identical to SEQ ID NO: 2162

SEQ ID NO: 18593 - DNA, 1351 bp, Nicotiana tabacum
  CDS (49)..(1290)
agtccactccaaaaatccaaaccaccaaatctcggcatttttcaacgaatgccggaaaagccattattcgggaaatatgagctcggaaaattactcggctgtggcgcatccgccaaagtttaccatgcccgagaaatcaacaatggccaaagcgtcgcgatcaaaatgatcaacaaaaacaacaaagacaatattccaaacgaaaacattgagcgcgagatttccatcttgcgccagctgcgccacccttacattgtcaaactctatgaagtgctcgccacgaaatcaaaaatctatttcgtcatggaatacgttaaaggaggcgaattattcaccaaaattgccgatcacggccgattcagcgaggatcttagccggaaatactttcagcaactaatttccgcgctcaattactgtcattcacgtggaatctaccaccgcgatttgaaacctgaaaacatattaattgatgaaaatggggatctcaaaatttccgatttcggtctaagtgccacaactgaccaaatacaaaaattcgacgggctgttacataccgtttgcggatctccagcttacgtggcaccggagattctaacaattaaaggatacgacggagctaaaactgatatatggtcatgtggaattattctgtacgtgatgatcgccggttatttgccgttttacgatcagaatttaatgctaatgtacaaaaaaatctacaaaggtgaattcaagtgcccgaaatggatgtctcctgatgttatacggatattatctcgtcttctggatacaaatccggcgacgagaataacgattgatgaaattatcaaggatccgtggttcagaaagggattgaaatttattaaatttgcaggggaagaagaagataaatattcattatcaagtaattgtttgaatgcgttcgatttaatttcgttttctcaaggattagacatttcgggattgttcaaatcgaataatccggcgaatgatttggagaggacggtggtggaacagtcgccggagagtgtaattgagagagttgaggaaatggcgaagaaggagaatttcagattaaggaaaaagaaagaatggggaattgagatgaaagtgcaaaatggtaaattaacaatgagcgtcgatatttacagattgacagaacgatttgtaattgtggaggtaaaaagagaagctggaaatggtgatttgtatacagatctatggcggaataaattgaaggcggtaattctgggccagcaaatagcagagattcaggattccggtagctagatttcacggcggggaagaagcttgagtgaatctattttaattttatttttatcacattact

SEQ ID NO: 18594 - protein, 413 aa, Nicotiana tabacum; identical to SEQ ID NO: 2030

SEQ ID NO: 18595 - DNA, 1359 bp, Arabidopsis thaliana; identical to SEQ ID NO: 2031
  CDS (1)..(1359)

SEQ ID NO: 18596 - protein, 452 aa, Arabidopsis thaliana; identical to SEQ ID NO: 2032

SEQ ID NO: 18597 - DNA, 1840 bp, Pisum sativum
  CDS (48)..(1598)
gcacgaggtccatcacaagaaactagagaaacctctcatctccatccatggcagtagtagcagctcccaagaagaacaactcattcaacaagaaagacaacccaaatcttctattgggtcgtttcgaattaggaaaactcctcggccatggaaccttcgccaaggtccacctagctaaaaacatcaaaaccggtgaagcagtagctataaagatcataagcaaagacaaaatccttaaaagtggtttagtttcacacatcaaacgagaaatctccattctccgccgtgtccgccaccccaacatcgtccagctgttcgaagtcatggcgacaaagacaaagatctacttcgtgatggaatatgtacgaggtggagagcttttcaataaagttgctaaaggtaggttgaaagaagaggttgcgagaaaatattttcaacagttaatatgtgcggttgaattttgtcatgctagaggtgtttttcatagagatataaagcctgagaatttgttgcttgatgaaaatggtaaccttaaagtttccgattttgggttaagtgctgtgtcggatgagattaagcaagatgggttgtttcatactttttgtggtacacctgcatatgttgctcctgaggttttgtctaggaaaggttatgatggtggtaaggttgatatttggtcttgtggtgttgttttgtttgttttaatggctggttatttaccttttcatgatcctaataatgttatggttatgtataagaagatttataaaggtgattttaggtgtcctagatggttttctcctgagcttgttaaccttcttactaggcttcttgatactaagcctcaaactaggatttcgattccggagattatggagaatcgttggtttaagataggttttaagcgtattaagttttatgttgaggatgatgttgtttgtaatcttgattctcttggtcttgatggtaataatggtaatgatggtaatgatgataagaaggtgctaaacattgatgaacaccgtgatgaagcgttggaatcggtatcagaatcagaatgggattctgaggttgtgaatagaaggaagaatcgtcagcttggttcattgccaaggcctgcgagtttgaatgcttttgacattatatcgttttcgcaaggctttgatctttctggattgtttgaggaaaagggcgacgaagcaaggtttgtgtctggtgcgtcggtgtcaaagattatgacgaaattggaggaagttgctcagttggttagtttcaaagtgaggaagaaagattgcagggttagcttcgagggttcaagagaaggggtaaaagggccgttgagtatcgctgctgaggtattcgagttaaccccgtctttggttgttgttgaagtgaagaaaaaaggaggggataaagttgagtatgataggtttttaaacactgaattgaagtctgctttgcatagtttaaccatggaagaatctgcaggttcttcatgtcaaaatacaccagatgaaactttgcaacaacgcgcgttttctgattccgccattgacaaacattcagatagcattgaatctctgaacttagacacctgaagaatgaatgacctataataagataaaaagggtattttattttcaatgtttttataggctgtgtatttatagtacttaaatttatgttacttttttctccaggattgtcctgtttttttgttttgtgtgtgtcctaatgttgtaagatgaatgccaattcaattttaatatactcaataaaacaaacatgttatgttttggccaaaaaaaaaaaaaaaaaaaaaaaaaaaaaaaaaaaaaaa

SEQ ID NO: 18598 - protein, 516 aa, Pisum sativum; identical to SEQ ID NO: 2034

SEQ ID NO: 18599 - DNA, 2334 bp, Neurospora crassa
  CDS (1)..(2334)
atggcacaggcctacgatgacgaggagctttccatctccttgtctccttctcagatccgaagtcgcaataagcgatccggcgatggcgcatcaggcttcggccccagtaccggcaacctccacgaatacggtcaacacggtcagcaattacaccctaatatcaacgccgtcatggccgacgcacccctccgcgacaagatgcgcaccgagcagcgcatcggtgcctataacattgtcaagacgctcggcgaaggcagcttcggaaaggtcaagctggctgtccatcgcatgaccggccagcaggtcgctctcaagatcatcgcccgcaagaagctcatcagccgcgacatgcaaggtcgcgtagagcgcgagattgagtatcttcaattgctaaggcatccccatatcatcaagctgtacaccgttatcaaaacaccaaccgagatcatcatggtgctagagtatgccggcggcgaattgttcgattacattgttcaacatggaaagatgaaggaggacgaagcccgccgcttctttcagcagatgctatgcgccgtcgaatactgtcatcgtcacaagatcgttcatcgcgacctaaagcccgaaaacctcttgctggacgataatctcaatgtcaaaattgccgattttggtcttagcaatatcatgaccgacggtaatttcctcaagaccagctgcggctctcccaattacgcggctcccgaggtcattggcggcaagctttacgcaggacccgaagtcgatgtctggagttgcggtgtcattctttacgtcctactcgtcgggcgcctccctttcgacgacgagcatatccccagtctttttgccaaaattgcgcgtggaagctacatggtgccgacctggatgagtcccggcgcggcgtcactaatcaagaagatgttggttgtcaaccctgttcaacgtgccacaattgacgaaatccgccaggacccgtggttcctcaaggatctgccggcttaccttcaccctcctgttgaggagttcctcaatactggcgtggaccccaacaaggccatcaaggttagcgacattgcgccaaatgcccctccgcaggaacaggagaagttgcataatgaggtcacggagaagatcagtaaaaccatgggctacggcaagagagatgtcgaagaggccttggaggccgatgaaccctcggccatcaaagatgcctacatgatcgtgcgtgagaacaagctgatgcagagtaaccttgattttgccacgtcccatcctccttcggcgtccattttacacttgcctagtggtgaacatcgcttgacgcaaaaaaaaagcaaatccttgagtttgcgaccatcgtccttttggagcaacaccaatgaggaataccaggataccctactaaaaaccgatgaagaaattccaggcctcacgacagaggagtctgtcccgagtccgctccatgacccgaatatgtcatcagctcgctcgatcgcatccgttagcacagcaacttcaccgcggccatatgtcagcaagatcggtattttgcctagcagtcttcctacctaccacagggtctttatggagcgagagaaggccaaggccgaaggtcttgagccccctgatgccatccccaccatcgttgagccggcaaatcagccgcgcagccaagctgaacaagaagagactatccgaagactcaagccacattcgaggagtcaacttcgccttgacgaggccaacaagcgcccacaaggacttacccccgtccacccgcccaagaagaacaagcctgctcgatggcaatttggtattcgatcccggaacgctccttgggaggcgctggtgtgtatttacaaggcgctaaacaagcttggcgctgggtggattgtcgatgaagactacgaaagagcccaccgggacgatgacgacactgatgactatgatgggcctagtatcgggtcccgcaagaagtcatcatccagcatggatcccaccaagacatatagacttcctgcggacccctggcatatcaagattcggtggacaactgataagctcaaaaagcattcggttgcctccggcctcagcgaagcaggagagaacacgcatgttagccgggatggcagcgacagcaaataccaggttgtggccatgcgtatggagattcagatatacgaaatggagcacggcgtctatcttgtcgatttcaaggtagacgggtacgagacccccgatggaaagcttctagaggataaggaagtcacgagccccttccccttccttgatatggcggccaaactcatcatgcagttggcagacgcagattga

SEQ ID NO: 18600 - protein, 777 aa, Neurospora crassa
MAQAYDDEELSISLSPSQIRSRNKRSGDGASGFGPSTGNLHEYGQHGQQLHPNINAVMADAPLRDKMRTEQRIGAYNIVKTLGEGSFGKVKLAVHRMTGQQVALKIIARKKLISRDMQGRVEREIEYLQLLRHPHIIKLYTVIKTPTEIIMVLEYAGGELFDYIVQHGKMKEDEARRFFQQMLCAVEYCHRHKIVHRDLKPENLLLDDNLNVKIADFGLSNIMTDGNFLKTSCGSPNYAAPEVIGGKLYAGPEVDVWSCGVILYVLLVGRLPFDDEHIPSLFAKIARGSYMVPTWMSPGAASLIKKMLVVNPVQRATIDEIRQDPWFLKDLPAYLHPPVEEFLNTGVDPNKAIKVSDIAPNAPPQEQEKLHNEVTEKISKTMGYGKRDVEEALEADEPSAIKDAYMIVRENKLMQSNLDFATSHPPSASILHLPSGEHRLTQKKSKSLSLRPSSFWSNTNEEYQDTLLKTDEEIPGLTTEESVPSPLHDPNMSSARSIASVSTATSPRPYVSKIGILPSSLPTYHRVFMEREKAKAEGLEPPDAIPTIVEPANQPRSQAEQEETIRRLKPHSRSQLRLDEANKRPQGLTPVHPPKKNKPARWQFGIRSRNAPWEALVCIYKALNKLGAGWIVDEDYERAHRDDDDTDDYDGPSIGSRKKSSSSMDPTKTYRLPADPWHIKIRWTTDKLKKHSVASGLSEAGENTHVSRDGSDSKYQVVAMRMEIQIYEMEHGVYLVDFKVDGYETPDGKLLEDKEVTSPFPFLDMAAKLIMQLADAD

SEQ ID NO: 18601 - DNA, 1308 bp, Arabidopsis thaliana; identical to SEQ ID NO: 2035
  CDS (1)..(1308)

SEQ ID NO: 18602 - protein, 435 aa, Arabidopsis thaliana; identical to SEQ ID NO: 2036

SEQ ID NO: 18603 - DNA, 1622 bp, Persea americana
  CDS (89)..(1450)
gagtcttaaaactcgtgcccaataaatagaaattgttttagcgggaggacataatatattactgcatcttagactaagcgaagttttaatggataataaagggggaattttgatgcaaaggtttgaattaggaaggctattggggcaaggtacttttgcaaaggtttaccatgcaaggaatctgaaaagtagccagagtgttgctataaaggtgatagacaaagagaaggttttgaaggtaggaatgattgatcagatcaagcgagaaatatcaacaatgagattggctagtcacccaaatgttgttcagctttatgaagtcatggctaccaaaaccaagatatattttgttttggaatatgtgaaaggcggtgagctctttaacaaggttgccaagggcaagctcaaagaggatgttgcatggaaatatttccagcagctggttagtgctgtggatttttgccacagcaggggtgtttatcatcgtgatttaaaacctgaaaacctactggtggatgagaatgagaacttaaaggttacagactttggattgggtgccctggcagaatccaagcggcaggatggtttacttcacacaacttgtgggactcccgcttatgttgctcctgaagtgataagtagaaaggggtatgatggtgcaaaagctgacatttggtcctgtggagtgatattatttgttcttctggctggatatcttccatttcatgattcaaatctgatggagttgtacaggaaggttggcaaagcggaatataaatgccctaattggtttccaccagaagtgcgtaggctgctagcaaggattttggatccgaacccaaacactcggatttcaattgcgaagatcaaagataactcttggttcaaaaggggatttgaagcaaagtttgccaaaggtgaaacaaagtccaaggaattggctcccctcgatactgatgcagcatttgcttcaagtgatactggtgttgctgcacgtaaaccagagttagtgaaaccacaacacctgaatgcgtttgatatcatctctctttctgctggatttgatctttctggtttgtttgaagacaccaactgcaggaaagaagcacggttcgcttctaagcagcctgcctcggccatcatctcaaagttggaggatattgctaagcgattgaggctgaaggtaaaaaagaaggatgagggaatattgaaattggaaggatccaaagaaggaagaaaaggagtgctttcaattgatgccgagatctttgtggtcaatccatcatttcatttggtggaggtgaagaagtcgagtggggatacactggaatatcagaagctatggaatcaggatatgagaccagcactgactgacattgtctgggcttggcaaggtgaccagcagcaacaacaagagtctttggtatgttctctaggacagtcgctctaattcaaatttgtactattgcgcagaatgttcctcatttaagtgatttcctaatgttatcttctatctgttatgatctgcctgttttgaaatattctgttttgactctatatgaagacttatattacttgtgaaaaaaaaaaaaaaaaaaaaaaaaaggaaaaaaaaaaaaaaa

SEQ ID NO: 18604 - protein, 453 aa, Persea americana; identical to SEQ ID NO: 2038

SEQ ID NO: 18605 - DNA, 2121 bp, Fusarium oxysporum; identical to SEQ ID NO: 2039
  CDS (1)..(2121)
  misc_feature (1815)..(1815): r is g or a

SEQ ID NO: 18606 - protein, 706 aa, Fusarium oxysporum; identical to SEQ ID NO: 2040

SEQ ID NO: 18607 - DNA, 2084 bp, Glycine max
  CDS (427)..(1743)
  misc_feature (244)..(244): s is g or c
cgactggagcacgaggacactgacatggactgaaggagtagaaaaggaaagaagagagagaacaaagcacttagtgctattcaataattacgaaaaaccaacagcgagtgttgtttttgtttggtccaggctggaccagggaatgaatagagatgagaggctttcggttgaagagaactgagttaagcggcgaagcaaacgcagaatcggcggcagaaattgccaccggaagcacgtcgaagasgggtgaaccaaacacaaaattccatccaccacttctcttttcaatccccaactcaaatctgtgaagaaaatctcaatttctaaattgtaattcttagcactactgctagtagtagtaaaaaaaaacaattagaaagtagtagagtgtttttttttctttttttcgtttgttttacttttaagatgggtgagaagagcaacgttggcggcgacgcgattaacacgacactgcttcacgggaagtacgagctgggccggctgttaggccacggaaccttcgcgaaggtgtaccacgcgcgccacctgaagacgggaaagagcgtggcgatgaaggtggtgggcaaagagaaggtggtgaaggtaggcatgatggagcagatcaagagagagatctcagccatgaacatggtgaagcacccaaacatcgtgcagcttcacgaggtcatggcgagcaagtccaagatctacatcgccatggagctcgtccgcggcggcgagctcttcaacaagatcgccagaggccgtctccgggaggagatggccagactttacttccaacaactcatctctgctgtggacttctgccacagccgcggcgtctaccaccgtgacctcaagccagagaaccttctcctcgacgacgacggcaacctcaaggtcaccgacttcggcctcagcactttctccgagcacctccggcacgacggcctgctgcacactacgtgcggcacgccggcctatgtcgcgcccgaggtgattgggaaaagaggctacgacggcgccaaggccgatatttggtcttgtggcgtaatcctctacgtacttcttgctggttttttacccttccaggatgacaacctggtggccttgtacaagaaaatttaccgcggtgacttcaagtgtccgccgtggttctcctccgaggcgcggaggctcatcaccaagctcctcgaccccaacccgaacacgcgaatcacaatttcaaaaatcatggactcgtcgtggttcaagaaacccgtgccgaagaacttgatgggaaagaaaagagaggaattggatctggaggagaagattaaacagcatgagcaggaggtttctactacgatgaatgcttttcacatcatttcgctctcggaggggttcgatttgtcgccgttgttcgaggaaaagaagagagaagagaaagagttacggtttgcgaccacgcgccccgcgagcagcgtgatttcgagattggaagatttggcgaaggcggtgaagttcgacgtgaagaagagcgagactaaggtgaggttgcagggtcaagaaaaagggcgaaaaggtaaactcgctattgctgcggacttgtacgccgtgacgccgtcgtttttggtggtggaggttaagaaggacaacggtgacaccttggagtataaccagttctgtagcaaggagcttcgtccagctcttaaagatatcgtgtggaggacttctcctgcagagaatcctacactcgcttgaagaacaaccaagactcccatgctaattgtcgttcctttgtagttgtttttgttaattcttgtttcaggactgagatattttagttatttgcttacttctttgttatgttttggcctctggggtgtgtcgtcttttaccccgaaaggggaattgttgaaaaggtgaatgcagtaatgaaccgaaatggacatcgaggagttgttgtcgatgatgattcaggtacatgtgctgcgtgttgttgtgctcgtgggtgatgttgttgctatgttggcgtgattgtgaatatgtttgcaaattgattggtgtggctcatgggtcattcatggctgcgtttaattttg

SEQ ID NO: 18608 - protein, 438 aa, Glycine max; identical to SEQ ID NO: 2042

SEQ ID NO: 18609 - DNA, 1251 bp, Arabidopsis thaliana; identical to SEQ ID NO: 2043
  CDS (1)..(1251)

SEQ ID NO: 18610 - protein, 416 aa, Arabidopsis thaliana; identical to SEQ ID NO: 2044

SEQ ID NO: 18611 - DNA, 1071 bp, Nicotiana tabacum
  CDS (1)..(1071)
atggataaatacgagcttgtgaaagatatagggtcagggaattttggtgtggcaaggctgatgaggcacaaggaaaccaaagaacttgtggcaatgaaatacattgagagaggacataagattgatgagaatgtagcaagggagatcattaatcatagatcgcttcggcatccaaacataattcgattcaaggaggtgttagtgactcccactcatcttgccattgttatggaatatgcagctggtggagaactgtttgagcgcatttgcaatgcaggaaggtttagtgaagatgaggctaggtactttttccagcagcttatttcaggagttcactactgtcacaacatgcaaatatgccatagagatttgaagctggagaatacgcttcttgatggaagtccagctccacgcttgaagatatgtgattttggatactcaaagtcgtccctgttgcattcgaggccaaaatcaactgttgggactccagcttatattgctcctgaggtcctatcaagaagagaatatgatggcaagctggctgatgtttggtcatgcggggtgacactttatgtgatgctggttggggcatatccttttgaagatcaggaggatccgaagaattttaggaaaactattcaacgaataatggcggtacagtacaagattcccgactatgttcacatatcacaagattgtaggcaccttctctctcggatatttgttgctaatccagcaaggaggatcacaatcaaagaaatcaagtctcacccatggtttttgaagaatttgccgagggaattaacagaagcagcacaggcagcttattacagaagagaaaacccaacattttcacttcagagtgttgaggagatcatgaaaattgtggaagaggcaaagactcccgctccagcttcccgttcagtctcaggctttggctggggaggagaagaagaagaagaggagaaggaaggagatgtagaagaagaggaagaggatgaagaagaagaagacgaatatgaaaagcaagtgaagcaggcacatgaaagcggagaagttcgtctcacctaa

SEQ ID NO: 18612 - protein, 356 aa, Nicotiana tabacum
MDKYELVKDIGSGNFGVARLMRHKETKELVAMKYIERGHKIDENVAREIINHRSLRHPNIIRFKEVLVTPTHLAIVMEYAAGGELFERICNAGRFSEDEARYFFQQLISGVHYCHNMQICHRDLKLENTLLDGSPAPRLKICDFGYSKSSLLHSRPKSTVGTPAYIAPEVLSRREYDGKLADVWSCGVTLYVMLVGAYPFEDQEDPKNFRKTIQRIMAVQYKIPDYVHISQDCRHLLSRIFVANPARRITIKEIKSHPWFLKNLPRELTEAAQAAYYRRENPTFSLQSVEEIMKIVEEAKTPAPASRSVSGFGWGGEEEEEEKEGDVEEEEEDEEEEDEYEKQVKQAHESGEVRLT

SEQ ID NO: 18613 - DNA, 1969 bp, Brassica napus
  CDS (288)..(1613)
cagatttcgtttctctctcttcctacctcctctactgattttgagaaaaaataagcgttaaaaaccctttgaagggaatgcagagagatggtcggagtatcgccggggaagactaagctgtgtgatcggtttaaccgatctgttggcggcaggaactgccaccggaaacacgtcgaggacgggtgatccaattcaactctctcgaattctccggacatcgaaagcttaaaccttttttctgttttatttttcttttaatttaaaataatcattgtaattaaaaaaatatggtcggagcaaaacctatagagaacggatctgacggtggagcaagcactggtcttctccacggacgttacgagctaggccgtcttctaggccacgggacattcgctaaagtgtaccacgcgcgtaacgtaacaacgggtaaaagcgtggcgatgaaagtcgtcggaaaagagaaggtggtgaaggtcggcatggtggaccagatcaagcgcgagatctcggtgatgaggatggtgaagcatcccaacatcgtcgagctccacgaggtgatggctagcaaaaccaagatctacttcgccatggagctcgtgcgaggcggggagctgttcgccaaagtcgccaaagggaggctgcgcgaggacgtggcgcgcgtgtactttcagcagctgatctccgccgtcgatttttgccacagccgcggggtttaccaccgagatctcaagccggagaatctcttgcttgacgaagaaggcaacctcaaggtcaccgactttggtctctctgctttcaccgagcatttgaagcaagacgggcttctccacaccacttgtggaactccggcgtacgtcgcgccggaggttatactgaagaaaggatatgacggagcgaaggcggatctttggtcttgcggcgttatcctcttcgtgctcctcgcgggttacttgccgtttcaggatgataatcttgtcaacatgtataggaagatctacagaggagacttcaagtgccctgggtggctctcctccgatgcgaggaggctcgtgacgaagcttctggatccgaatccgaatacccggatcactatcgataaggtgatggattcacactggttcaagaagtcctcaacgagatcaagaaacgagccagtggccgcaacaccagaggctgaggaggatgttgatgtgtccgtgcacaagtccaaggaagagacggagacgctaaacgcgtttcacatcatcgcgttgtctgaagggtttgatctctcgccgttgttcgaggagaagaagaaagaggagaagatggagatgaggttcgcgacttctaggccggcgagtagtgtgatatcgagccttgaggaggcggcgaaggttgggaataagtttgatgtgaggaagagcgagtgtagagtgaggatcgaagggaaacagaatggccggaaagggaagttggcggtggaggcggagatattcgcggtggctccgtcgtttgttgtcgtggaggtgaagaaagatcatggggacacgcttgagtacaataacttttgtagtacggctcttagaccagctctcaaggacatcttctggacttctactacacctgcttgattattagtatctgtttaaatcttgtgtgtttttaattcctgtctgtaaaatattgttgggttcgtgattcggttcgcgattattgttcttgattcttaaatgagtatcgtttgaactttaaatcgtgtaaaaaggttcgagtcttttcatcatttgtgtatgttttgtgtcgttgttgccggtttgttgcgtcacgaagcagagaatgtttgtgtggtgtgtgttcgtgcggtgttagaaatttagaatcgtgtcttaaaaattccttaccaataaatgatatttatgactcctctttgagaatgttcaagggtcgatgtttatacaaaaaaaaaaaaaaaaaaaaaaaaaaaaaa

SEQ ID NO: 18614 - protein, 441 aa, Brassica napus; identical to SEQ ID NO: 2046

SEQ ID NO: 18615 - DNA, 1290 bp, Arabidopsis thaliana; identical to SEQ ID NO: 2047
  CDS (1)..(1290)

SEQ ID NO: 18616 - protein, 429 aa, Arabidopsis thaliana; identical to SEQ ID NO: 2048

SEQ ID NO: 18617 - DNA, 1464 bp, Arabidopsis thaliana; identical to SEQ ID NO: 2049
  CDS (1)..(1464)

SEQ ID NO: 18618 - protein, 487 aa, Arabidopsis thaliana; identical to SEQ ID NO: 2050

SEQ ID NO: 18619 - DNA, 1425 bp, Oryza sativa subsp; identical to SEQ ID NO: 2051
  CDS (1)..(1425)

SEQ ID NO: 18620 - protein, 474 aa, Oryza sativa subsp; identical to SEQ ID NO: 2052

SEQ ID NO: 18621 - DNA, 1344 bp, Arabidopsis thaliana; identical to SEQ ID NO: 2053
  CDS (1)..(1344)

SEQ ID NO: 18622 - protein, 447 aa, Arabidopsis thaliana; identical to SEQ ID NO: 2054

SEQ ID NO: 18623 - DNA, 2016 bp, Trichoderma reesei; identical to SEQ ID NO: 2055
  CDS (1)..(2016)

SEQ ID NO: 18624 - protein, 671 aa, Trichoderma reesei; identical to SEQ ID NO: 2056

SEQ ID NO: 18625 - DNA, 1239 bp, Arabidopsis thaliana; identical to SEQ ID NO: 2059
  CDS (1)..(1239)

SEQ ID NO: 18626 - protein, 412 aa, Arabidopsis thaliana; identical to SEQ ID NO: 2060

SEQ ID NO: 18627 - DNA, 1290 bp, Arabidopsis thaliana
  CDS (1)..(1290)
atggaatcacttccccagccgcaaaaccaatcatctccggcaacaactccggcgaagatcctccttgggaaacacgaactcggtcgtcgtctcggtagcggaagcttcgcgaaagtccatttagctcgatcaatcgaatccgacgagctcgtcgccgttaaaatcatcgagaagaagaaaacaatcgaatccggtatggaaccaagaataatcagagagatcgatgcgatgcgtcgtcttcgtcatcatccaaacatactcaagatccatgaagttatggcaaccaaatctaagatctatctcgtaatggaactcgcttctggtggtgaacttttctcaaaagtcctccgtcgtggacgtcttcctgaatcaacggcgcgtcgttactttcaacaactcgcctccgctcttcgtttctctcaccaagacggtgtcgctcaccgtgatgtgaaacctcagaatctactcttagatgagcaaggtaacctcaaggtctctgactttggtttatcagctttaccggagcatctacaaaacggattgcttcacacggcgtgtggtactccggcttatacagctccggaggttatttcacggaggggatacgacggagcaaaagctgatgcgtggtcttgtggtgtgattttgtttgttttattggttggcgatgttccatttgatgattcgaatatcgctgcgatgtatcggaagattcatcggagagattatcggtttccgagctggatttcgaaacaagctaaatcgataatctatcagatgttagatccgaatccagtaacgaggatgagtattgaaacagtgatgaaaacgaattggttcaagaagtctctagagacttctgagtttcatcgtaacgtctttgattcggaagtagagatgaaatcgagtgttaattcgattactgcttttgatttgatctcgttatcgtcgggattagatctttctggattgtttgaggctaagaagaagaaggagaggagattcacggcgaaggtttcgggtgttgaagtggaggagaaggcgaagatgattggggagaagttaggttatgtagtgaagaagaagatgatgaagaaggaaggagaagtgaaggttgttggattagggagaggaagaactgtgattgtggtggaagcagtggagttaacggtggatgttgtggtggttgaagtgaaagttgttgaaggtgaagaagatgattcacggtggtctgatttgattactgagcttgaagatatagttctttcatggcacaatgacatcatgtaa

SEQ ID NO: 18628 - protein, 429 aa, Arabidopsis thaliana
MESLPQPQNQSSPATTPAKILLGKHELGRRLGSGSFAKVHLARSIESDELVAVKIIEKKKTIESGMEPRIIREIDAMRRLRHHPNILKIHEVMATKSKIYLVMELASGGELFSKVLRRGRLPESTARRYFQQLASALRFSHQDGVAHRDVKPQNLLLDEQGNLKVSDFGLSALPEHLQNGLLHTACGTPAYTAPEVISRRGYDGAKADAWSCGVILFVLLVGDVPFDDSNIAAMYRKIHRRDYRFPSWISKQAKSIIYQMLDPNPVTRMSIETVMKTNWFKKSLETSEFHRNVFDSEVEMKSSVNSITAFDLISLSSGLDLSGLFEAKKKKERRFTAKVSGVEVEEKAKMIGEKLGYVVKKKMMKKEGEVKVVGLGRGRTVIVVEAVELTVDVVVVEVKVVEGEEDDSRWSDLITELEDIVLSWHNDIM

SEQ ID NO: 18629 - DNA, 1698 bp, Arabidopsis thaliana
  CDS (2)..(1372)
gatggagaacaaaccaagtgtattaactgaaagatatgaagttgggaggttattgggtcaaggtacttttgctaaagtgtattctggaaggagtaatcataccaacgagagtgtagctatcaagatgattgacaaggacaaagttatgagagtcgggcttagccagcaaatcaagcgagagatctctgtaatgaggatcgctaaacacccgaatgtcgttgagttatacgaggttatggctacaaagtcaaggatttactttgttattgagtattgtaaaggtggtgagcttttcaacaaggttgcaaaaggaaaacttaaagaagatgttgcttggaagtatttttatcagcttattagtgcggttgatttttgtcacagccgcggagtttatcaccgcgacattaagccggaaaatcttttgttggatgacaatgataatcttaaggtatctgattttggtttaagtgcgcttgctgattgcaagcggcaagatggtcttctacatacaacttgtggtacacctgcttatgttgcgcccgaggttattaaccgaaaaggatacgagggtacgaaagcggatatttggtcttgtggtgttgttttgtttgttcttttggctggttatctccctttccatgacactaatcttatggagatgtataggaagataggtaaagcagacttcaagtgtcccagctggtttgctcctgaggtaaagagactattgtgtaagatgttggaccctaaccatgagactagaatcactattgcaaaaatcaaggagagttcttggttcagaaagggtttgcatttgaagcaaaaaaagatggaaaagatggagaaacaacaagtcagagaggctactaatcccatggaagctggaggttcaggccaaaatgaaaacggagaaaaccacgagccgcctcgacttgctaccttgaatgctttcgatatcatcgccttgtctacggggtttggtctggcaggactttttggggatgtatatgacaagcgagaatctaggttcgcgtcgcaaaaacctgcttcagagatcatttctaagctagtagaggttgccaagtgcctgaagctgaagataagaaagcaaggcgcaggcttgttcaaactggaaagagtaaaggaaggaaaaaacggaattttgacgatggatgcagagatattccaagtgacgccgacgtttcacctggtggaagtgaagaaatgtaatggagatacaatggagtatcagaagttagtggaggaggatcttaggcctgctttggcagatattgtttgggtttggcaaggcgagaaggagaaagaggagcagttactgcaggatgaacaaggagagcaagaaccatcatagcaagttcagctacaagcctacaactgcaagcacatgaattgttgcaggaacatgaaaatggtaaccctcttgcgacttcagctgaaacagaagcaagcatcaagaaactctaacgaaaacagaggaaggaaaacaataacaattgcacaaaatggattctttttgcatatagactacaaaaattgtagatagttgattgatttgtaacaactacgagcttttttttttaccttgcctcttgtgaagttttgaacgtatattgtttcatgagtacagtaattgaatttctttaagagtttggtcgatacataaaaaaaaaaaaaaaa

SEQ ID NO: 18630 - protein, 456 aa, Arabidopsis thaliana; identical to SEQ ID NO: 2062

SEQ ID NO: 18631 - DNA, 1395 bp, Arabidopsis thaliana; identical to SEQ ID NO: 2063
  CDS (1)..(1395)

SEQ ID NO: 18632 - protein, 464 aa, Arabidopsis thaliana; identical to SEQ ID NO: 2064

SEQ ID NO: 18633 - DNA, 1545 bp, Solanum lycopersicum
  CDS (1)..(1545)
atggacggaacagcagtgcagggcaccagcagtgttgactcatttttacggaactataaactcgggaaaacacttggcattggatcgttcggcaaagttaaaatagctgaacatacgttaacagggcacaaagttgctgtcaagattcttaatcgtcgaaaaatcaggaatatggacatggaggagaaagtccgtagagaaatcaaaatattgagattgttcatgcatcctcatattatacggctttatgaggtcatagagacaccatcagatatatatgttgtgatggagtatgtgaaatctggcgagttatttgattacattgttgagaagggcagattgcaggaggatgaagctcgtaacttttttcagcagataatttctggtgtggagtactgccatagaaacatggtggttcatagagaccttaagcctgaaaacctccttctggactccaaatggaatgtgaagatcgcagattttggtttgagcaatatcatgcgcgatggtcattttctgaagacaagttgcggaagcccaaactatgctgccccagaggttatatcaggtaaattgtatgctggccctgaggtagatgtatggagctgtggtgttattctttatgctcttctctgtggcacccttccgtttgacgatgaaaacatacccaatctttttaagaaaataaagggtggaatatatactctgcccagccatttatcagctggtgcgagggatttgattccgaggatgcttatagtcgacccaatgaagcgaatgactattcctgagattcgcctgcacccttggttccaagctcatttgccacgctatttggccgtgcctccaccagatacaacccaacaagcaaagaagatcgatgaagagattcttcaagaggtggttaagatgggatttgacaggaacaaccttactgagtctcttcgcaatagagttcaaaatgagggcactgttgcatactatctgctcctggacaatcgccatcgtgtttccactggctatcttggagctgaatttcaggagtccatggaatatggttacaaccggatcaattctaatgaaaccgctgcttcccctgttggtcaacgtttcccaggaataatggattatcagcaagctggtgcaagacagttccccattgaaagaaaatgggctcttggcctccagtctcgagcgcatccacgtgaaataatgactgaagttttgaaagctctgcaagaactgaatgtatgttggaaaaagattggtcagtataacatgaaatgtcgatgggttcctagcttacctggtcatcatgaaggcatgggtgttaattccatgcatgggaatcagttctttggagatgattcatccatcattgagaatgatggggccacaaagttaacaaatgtggtcaagtttgaagttcagctttacaaaaccagggaggagaagtacttgcttgaccttcagagacttcagggtccacaattcctcttcctggatctctgtgctgcttttcttgctcagcttcgagtactttaa

SEQ ID NO: 18634 - protein, 514 aa, Solanum lycopersicum
MDGTAVQGTSSVDSFLRNYKLGKTLGIGSFGKVKIAEHTLTGHKVAVKILNRRKIRNMDMEEKVRREIKILRLFMHPHIIRLYEVIETPSDIYVVMEYVKSGELFDYIVEKGRLQEDEARNFFQQIISGVEYCHRNMVVHRDLKPENLLLDSKWNVKIADFGLSNIMRDGHFLKTSCGSPNYAAPEVISGKLYAGPEVDVWSCGVILYALLCGTLPFDDENIPNLFKKIKGGIYTLPSHLSAGARDLIPRMLIVDPMKRMTIPEIRLHPWFQAHLPRYLAVPPPDTTQQAKKIDEEILQEVVKMGFDRNNLTESLRNRVQNEGTVAYYLLLDNRHRVSTGYLGAEFQESMEYGYNRINSNETAASPVGQRFPGIMDYQQAGARQFPIERKWALGLQSRAHPREIMTEVLKALQELNVCWKKIGQYNMKCRWVPSLPGHHEGMGVNSMHGNQFFGDDSSIIENDGATKLTNVVKFEVQLYKTREEKYLLDLQRLQGPQFLFLDLCAAFLAQLRVL

SEQ ID NO: 18635 - DNA, 1362 bp, Arabidopsis thaliana; identical to SEQ ID NO: 2065
  CDS (1)..(1362)

SEQ ID NO: 18636 - protein, 453 aa, Arabidopsis thaliana; identical to SEQ ID NO: 2066

SEQ ID NO: 18637 - DNA, 1572 bp, Oryza sativa; identical to SEQ ID NO: 4676
  CDS (1)..(1572)

SEQ ID NO: 18638 - protein, 523 aa, Oryza sativa; identical to SEQ ID NO: 4677

SEQ ID NO: 18639 - DNA, 1557 bp, Zea mays
  CDS (1)..(1557)
atggccgccatcacgccgccgacgcagtcggagccgtcgccgcagacggggcgcccggcctcgtctgccgccgccgcggccaagcgtggagggggcggggctggtgccgccggcgggccgctgatggggaagtacgagctggggcgcctcctggggcacggcaccttcgcgaaggtgtaccacgcgcggcacgtcgacacgggggacaacgttgccatcaaggtgctcgacaaggagaaggccgtgaagagcgggctcgtcccgcacatcaagcgcgagatcgctgtgctacgccgcgtgcgccacccgaacatcgtgcacctgttcgaggttatggccacaaagactaagatctacttcgtcatggagctcgtccgcggcggcgagctcttctcccgcgtctccaagggccgactcagggaggacaccgcgcgccgctacttccagcagctcgtctccgccgtggggttctgccacgcccgcggcgtcttccaccgcgacctgaagcccgagaatctactcgtcgacgagcaggggaacctcaaggtatcggattttgggctctccgccgtcgccgagcagttccgtcccgacggcctgctccacaccttctgcggcaccgcggcctatgtggcccccgaagtgctcggccgccgcgggtacgacggcgccaaggcagacgtgtggtcgtgcggtgtcatcctctttgtgctcatggccggatatctccctttccatgacaaaaacatcatggccatgtacaagaagatttacaagggcgagttccgctgtgcgaggtggttctccaaagaccttaccagcttgctgatgcgcattcttcacactaatcccaacactcggatcactttgccggagatcatggagtcccgctggttcaagaaaggattcaagcctgtcaagttctatatcgaggatgaccagctgcataacgttatagatgacgaagatggcctgttagatatgggacctgctggtcctgttcctccaccattgccacctccaccgccacctctacctccaccaaaggttgatggtgatgaatcagggtctgactcagactcgtcgatctcatcctgccctgcttcaatgttatctgatgagagccaaaggccccgtggctctctaccacgtccagcaagtcttaatgcctttgatatcatatcattttcaaggggatttaacttatcagggttatttgaggagaaaggggatgaagtgaggttcatctcggctgagcccatgtcagatatcataaccaaattggaggacatagcgaagctgaagagcttcaagttgcggaggaaggactggcgcatctgcctggagggtacaagggaaggagttaaggggccattaacaattggcgcggagatatttgaactcacacctccccttgtaatggtggaggtaaaaaagaaggcaggggataatgaagagtacgagaacttctgtgacaaggaattgaagccagggatgcagcaccttgtccaccatatggtccgagctccaagtatgctgcttactgatgccaagtga

SEQ ID NO: 18640 - protein, 518 aa, Zea mays; identical to SEQ ID NO: 2068

SEQ ID NO: 18641 - DNA, 1563 bp, Oryza sativa; identical to SEQ ID NO: 2069
  CDS (1)..(1563)

SEQ ID NO: 18642 - protein, 520 aa, Oryza sativa; identical to SEQ ID NO: 2070

SEQ ID NO: 18643 - DNA, 1266 bp, Arabidopsis thaliana; identical to SEQ ID NO: 2071
  CDS (1)..(1266)

SEQ ID NO: 18644 - protein, 421 aa, Arabidopsis thaliana; identical to SEQ ID NO: 2072

SEQ ID NO: 18645 - DNA, 1545 bp, Glycine max
  CDS (1)..(1545)
atggacagatcaactggccgtggtggtggtggaagtgtggacatgtttctccgaaattataagttgggaaaaacactcggcattgggtcctttggcaaggtgaaaattgctgagcatgtacggactggtcataaagttgctataaagatccttaaccgccacaagattaaaaacatggaaatggaagaaaaagttagaagagaaatcaaaattttaagattgtttatgcatcatcacattataagactatatgaggttgtagaaaccccaacagacatatatgttgttatggagtatgtgaaatctggagagctctttgattacatagtagagaagggtcggctgcaagaggatgaagcccgtcatttttttcagcagataatttctggtgtggagtactgtcacaggaatatggtggttcatagagacctgaagcctgagaatttactcttggactcaaaatttaacatcaagattgctgattttgggttgagcaacatcatgcgtgatggtcactttcttaagacaagttgtggaagccctaattatgcggctccagaggttatctctggaaaattgtatgctggaccagaagtagatgtctggagctgtggtgtaattttatatgctcttctctgtggcactcttccttttgatgatgaaaacattcccaatctcttcaaaaaaataaagggtgggatatacactcttcctagtcatctatcacctggtgctagagatttgataccaaggatgcttgtggtggatcccatgaagaggatgaccatacctgagatacgccaacacccatggttccaagttcatctaccgcgttatttagcagtgccaccaccagatacactgcaacaagccaaaaagattgatgaggagattcttcaggaagtggttaatatgggatttgacaggaatcaattggttgaatctcttagcaacaggatacaaaatgagggtactgtaacatactatttgttattggacaaccggtttcgtgtttctagtggttatcttggagctgaatttcaagagacaatggattctggttttaaccgtatgcattccggcgaagttgcttctccagttgttggacaccacagcacagggtatatggattatcaaggggtaggaatgcggcaacagttccctgttgagagaaaatgggcccttgggcttcagtctcgagcccaaccacgtgaaataatgactgaggtccttaaagctctacaagaattaaatgtttgtttggaagaagattggacactataccatgagtgcagatgggttgctggcactgctggtcatcatgaaatgattaacaattctctgcatagtaatcattactttggaaatgattccggcattattgaaaatgaagctgtttctaagtcaaatgtggtcaagtttgaagtgcagctttacaaaactcgtgaggagaaatatctgcttgatcttcaaagggtccagggcccacagtttcttttcttggatctgtgcgctgctttcctttcacagctacgtgttctctag

SEQ ID NO: 18646 - protein, 514 aa, Glycine max
MDRSTGRGGGGSVDMFLRNYKLGKTLGIGSFGKVKIAEHVRTGHKVAIKILNRHKIKNMEMEEKVRREIKILRLFMHHHIIRLYEVVETPTDIYVVMEYVKSGELFDYIVEKGRLQEDEARHFFQQIISGVEYCHRNMVVHRDLKPENLLLDSKFNIKIADFGLSNIMRDGHFLKTSCGSPNYAAPEVISGKLYAGPEVDVWSCGVILYALLCGTLPFDDENIPNLFKKIKGGIYTLPSHLSPGARDLIPRMLVVDPMKRMTIPEIRQHPWFQVHLPRYLAVPPPDTLQQAKKIDEEILQEVVNMGFDRNQLVESLSNRIQNEGTVTYYLLLDNRFRVSSGYLGAEFQETMDSGFNRMHSGEVASPVVGHHSTGYMDYQGVGMRQQFPVERKWALGLQSRAQPREIMTEVLKALQELNVCLEEDWTLYHECRWVAGTAGHHEMINNSLHSNHYFGNDSGIIENEAVSKSNVVKFEVQLYKTREEKYLLDLQRVQGPQFLFLDLCAAFLSQLRVL

SEQ ID NO: 18647 - DNA, 2443 bp, Mesembryanthemum crystallinum
  CDS (658)..(2046)
ctccaaagcatacaaagaaatcaaaacaaaaacacccggccccgtctcctcctctaatagactactaatagtagtactcctaataaattctcctctccttcccctcctcccaatcccaatcccaatcccagtactactctctacccgctgtttacaaaaagaaaaagaacaagaacaagggaaaggaaagaagggtgaggcgtgtaatgcggagagacggagatgaagagagctttgtcgctttttattaaaaaaattaatccaacaacatatttcccttcacggtggtcagccgactgctttttcttgaacaagaatgaccatgtcatcggcggcaggaattgccaccgcaagcatgtcgaagacgggtagtcttcctcttcctcatccccatccccatccccatctctctccccctttctatttccatctcacttttctcaattcaattcaaagatttcttctctgaatctttttcctattcttacaatcattcaatcaaaatcctcttttttttttttttgttctttgaatttttccaatccagaaaggaagattttgccaattgttgctcgtctgctaggctgagaaattgaatccttattggagtatttactctctaatcaaccaacaaaagaaaaaagaaaaaaatcaaaaatgggggaacaagaattgcttttgcagcagcaaatcaaggaagacaggaatgtgagtagggagacagagatgaagcatcctgcgctccaaggcaaatacgagctcgggagggtgttgggccaaggcacctttgctcgtgtctaccacgctcgcaacctggttaccggcaacagcctcgccatcaaggttgttgccaaggacaaggtcattaaagttgggatgatggagcagatgaagagagagattagcgtcatgaagagggtcaaacatcctaacattgtccaactccacgaggtcatggccagcaaatcaaagatctacctggctatggacctcgttcgcggcggcgagctattctccaaggtttccaaagggggcaagcttgacgaggacgtcgctcgatcctatttcaagcagctcatctccgctgtcgatttctgccacagccgaggcgtctaccaccgcgacctcaagcccgaaaacctgctcctggacgaacacggcaacctcaagatcaccgatttcggcctcagcgcctccttcgaaaacgaggaccatcaccagactctgctgcgtacaagctgcggcacccctcattatgtggcacctgaggtcatcagcaggaaagggcagcaggggtatcacggtgccaagtccgacatctggtcctgtggcatcatcctcttcgtcctcctcgccggcttcctcccttttcacgatgataacatcatcaggatgtaccgcaaggtcttcaagggggatttcacctgcccttcctggctctcctctcaggctcgggatctcatcacccgcttgctcgatatcaaccctgccacccgaatcactgtctccgaaattatgcaatccgattggtactgcatggacactagtagtatgaccgctgtcacaaccgacgagttcgatcttgatcacaacaacaacaacaacaacaacagcaactacaacaatattcatcatcacaagaaggagccagagatgttgaatgctttccacatcatatccctatcacaagggttcgacctgtctcccctcttcgaggagaagcacagggaggagagacaagatatgagatttgcaaccaccaagtcagcaagcacggtcgtgtcgaggctggaggaagtggctgccaaggctggcaagttcatcgtcaaaaagttctgtggggactcggtggtcaggctgcaggggcaggagcgaggcaggaaaggcaagctggccattgcagccgagattatgtcggtatcaccatcgctcctggtggtggaggtgaagaaagataacggagacactcttgagtacaaccaattctgcaccaagcagcttcgccccgctcttaaggatatcgtttggacctgcccctcttcttaatcaactagtactattactactagtcgtcatcattattggtaaccaaattttgcccagtttatagccaacatatgaattaagaatggacaatcttatttcaatttggtgttgctattagtcctgttgcatactggagtactatgtagtactagtacatactattaaattttggagtatgtttttttcttgctgtctttagttgttagcttcattgctatgctggaggttttcatatggttagtgagtaatagttgtacattacaattacataccaagtatgagattcatttcatgattattagttgagggagcacaaatgggctccctttctgtttctgtactgtcaatcattctaagattagaagaggtagataactaaactgtcctatctttacct

SEQ ID NO: 18648 - protein, 462 aa, Mesembryanthemum crystallinum; identical to SEQ ID NO: 2074

SEQ ID NO: 18649 - DNA, 1020 bp, Nicotiana tabacum
  CDS (1)..(1020)
atggaggaaaaatatgagcttttgaaagaacttggtactgggaattttggggtggctaggctagttaaggacaagaagacaaaggagctttttgctgtcaaatatatagaaagagggaagaagattgatgaaaatgtgcagagagaaattataaatcatagatcgttgggacatccaaacattatcaggtttaaagaggtcttggtaactccatcgcatttagcaattgttatggagtatgcagcaggtggagaactttttgctagaatatgcagtgctggcagatttagtgaggatgaggctcgtttcttcttccaacagctaatatctggagtcagttactgtcatgccatggaaatttgtcacagggatttgaaactagaaaacactcttcttgatggaagtgcttcaccacgtgtaaaaatatgtgattttggttattccaagtctggattgttgcattcccaaccaaagtcgacagtaggaacacccgcttacattgcccctgaggtcctgtcacgaaaggaatatgacgggaagatagcagatgtatggtcatgtggggtgacgttgtatgtgatgctagtcggagcatatccttttgaggatcctgaagatccaaaaaatttcagaaaaaccattggaagaataatgagtgcccaatactccataccggattatgtacgaatatctgcagattgtaagaacctcctttcgcgaatctttgttgcaaatccctcaaagagaataactattcctgagataaagaaacatccttggtttttaaagaatctgccaaaagacttaatggatggtgagcattccaaatatgaagaggcttcagagcaactacaacagagtgtggaggaaatcatgaggataatacaagaagctaagatacctggagaagtgtcaaaaccagaaggacaagctactgcagggacagcagaaccagatgatactgaggatgacctcgagtcggaaattgacagcagcaatgattttgctgtttatgtctga

SEQ ID NO: 18650 - protein, 339 aa, Nicotiana tabacum
MEEKYELLKELGTGNFGVARLVKDKKTKELFAVKYIERGKKIDENVQREIINHRSLGHPNIIRFKEVLVTPSHLAIVMEYAAGGELFARICSAGRFSEDEARFFFQQLISGVSYCHAMEICHRDLKLENTLLDGSASPRVKICDFGYSKSGLLHSQPKSTVGTPAYIAPEVLSRKEYDGKIADVWSCGVTLYVMLVGAYPFEDPEDPKNFRKTIGRIMSAQYSIPDYVRISADCKNLLSRIFVANPSKRITIPEIKKHPWFLKNLPKDLMDGEHSKYEEASEQLQQSVEEIMRIIQEAKIPGEVSKPEGQATAGTAEPDDTEDDLESEIDSSNDFAVYV

SEQ ID NO: 18651 - DNA, 1020 bp, Nicotiana tabacum
  CDS (1)..(1020)
atggaggaaaaatatgagcttttgaaagaacttggtgctggtaattttggagtggcaaggctagttaaggacaagaagacaaaggagctttttgctgtcaaatatatagaaagagggaagaagattgatgaaaatgtgcagagagaaattataaatcatagatcgttgggacatccaaacattatcaggtttaaagaggtcttggtaactccatcgcatttagcaattgttatggagtatgcagcaggtggagaactttttgctagaatttgcagtgctggcagatttagtgaggatgaggctcgtttcttcttccaacagctaatatccggagtcagctactgtcatgccatggaaattagctgttgggatttgaaactagaaaacactcttcttgatggaagtgcttcaccacgtgtaaaaatatgtgattttggttattccaagtctggattgttgcattcccaaccaaagtcgacagtaggaacacccgcttatattgcccctgaggtcctgtcacgaaaggaatatgacgggaagatagcagatgtgtggtcatgtggggtgacactgtatgtgatgctagtcggagcttatccttttgaggatcctgaagatccaaaaaatttcaggaaaaccattggaagaataatgagtgcccaattctccatacccgattatgtacgaatatctgcagattgtaaaaacctcctttcgcgaatctttgttgcaaatccctcgaagagaataactattcctgagataaagaaacatccttggtttttaaagaatctgccaaaagacttaatggatggtgagcattccaaatatgaagaggcttcagagcaactacagcaaagtgtggaggaaatcatgaggataatacaagaagctaagatacctggagaagtgtcaaaaccagaaggacaagctactgaaaggacaacagaacaagatgatacagaggatgatctcgaatcggaaattgatagcagcaatgattttgctgtttatgtctga

SEQ ID NO: 18652 - protein, 339 aa, Nicotiana tabacum
MEEKYELLKELGAGNFGVARLVKDKKTKELFAVKYIERGKKIDENVQREIINHRSLGHPNIIRFKEVLVTPSHLAIVMEYAAGGELFARICSAGRFSEDEARFFFQQLISGVSYCHAMEISCWDLKLENTLLDGSASPRVKICDFGYSKSGLLHSQPKSTVGTPAYIAPEVLSRKEYDGKIADVWSCGVTLYVMLVGAYPFEDPEDPKNFRKTIGRIMSAQFSIPDYVRISADCKNLLSRIFVANPSKRITIPEIKKHPWFLKNLPKDLMDGEHSKYEEASEQLQQSVEEIMRIIQEAKIPGEVSKPEGQATERTTEQDDTEDDLESEIDSSNDFAVYV

SEQ ID NO: 18653 - DNA, 1512 bp, Oryza sativa
  CDS (1)..(1512)
atggagggagctggcagtgatgggaaccctcttggcggttaccggattggcaaaaccctagggattgggtcatttggcaaagtgaagatcgcggagcatatattgactggtcacaaggtggcaatcaagatcctcaatcgccgtaagagcatggagatggaagagaaagttaaaagagaaatcaagatacttagattatttatgcacccacatatcattcgcctttatgaggtgatagacaccccagctgatatttatgttgttatggagtatgtcaaatctggagagttgtttgattatgatgttgagaagggaagactgcaagaggaagaagctcgacgctttttccagcagatcatatctggtgttgaatattgccatagaaacatggtggttcgtcgtgatctaaagccagagaaccttcttttggactccaaatgcaatgttaagattgcagactttggcttgagtaatgttatgcgtgatggtcactttctgaagacaagttgtggtagcccaaattatgcagcacctgaggtgatatctggtaaactatatgctggccctgaagttgatgtgtggagttgtggtgttattctttatgctcttctttgtggtacccttccatttgatgacgagaatattcccaacctttttaagaacataaagggtggaatatatacccttcccagtcatttgtcacctttgggaagggatttgattcccagaatgcttgttgttgatcccatgaagaggatcaccatacgtgaaatccgtgaacatcagtggttcacagttggtcttccgcgttatttagctgtgccacctcctgacactgcacaacaggttaaaaagctcgacgatgaaacacagaatgatgttatcaatatggggtttgacaagaatcagctaatcgaatcacttcacaagagactgcaaaacgaggcgacagttgcctactatttactattggacaataggctgcgcacaaccagtggctaccttggagctgagttccatgaatctatggtatcttctctcgctcaagtaactccagctgagacaccaaactcagccactgatcatcggcagcatgggcatatggaatctcctgggtttggcttgaggcatcatttcgcagctgacaggaaatgggcccttggtcttcagtctcgagcacatccacgagaaatcataactgaagttcttaaagctctgcaagagctaaatgtttgctggaagaagattggacatcataacatgaaatgcagatggagtcctagttttcccagtcatgagagtatgatgcataacaaccatggctttggtgcagcatctgctatgattgaaactgatgacagtgagaaatcaacccacactgtgaaatttgaaattcagctttacaaaacaagggatgaaaaatactttcttgacttgcaaaggctcagtggaccacagcttctctttctggacctgtgctctgcctttctaactcagctgagagtcctttaa

SEQ ID NO: 18654 - protein, 503 aa, Oryza sativa
MEGAGSDGNPLGGYRIGKTLGIGSFGKVKIAEHILTGHKVAIKILNRRKSMEMEEKVKREIKILRLFMHPHIIRLYEVIDTPADIYVVMEYVKSGELFDYDVEKGRLQEEEARRFFQQIISGVEYCHRNMVVRRDLKPENLLLDSKCNVKIADFGLSNVMRDGHFLKTSCGSPNYAAPEVISGKLYAGPEVDVWSCGVILYALLCGTLPFDDENIPNLFKNIKGGIYTLPSHLSPLGRDLIPRMLVVDPMKRITIREIREHQWFTVGLPRYLAVPPPDTAQQVKKLDDETQNDVINMGFDKNQLIESLHKRLQNEATVAYYLLLDNRLRTTSGYLGAEFHESMVSSLAQVTPAETPNSATDHRQHGHMESPGFGLRHHFAADRKWALGLQSRAHPREIITEVLKALQELNVCWKKIGHHNMKCRWSPSFPSHESMMHNNHGFGAASAMIETDDSEKSTHTVKFEIQLYKTRDEKYFLDLQRLSGPQLLFLDLCSAFLTQLRVL

SEQ ID NO: 18655 - DNA, 1491 bp, Schizosaccharomyces pombe
  CDS (1)..(1491)
atggctcaaaaattagataactttccttaccatattggtagagaaataggtactggggcttttgcttccgtccgtttatgttacgatgataatgctaaaatatatgctgtcaaatttgtcaataaaaaacatgctactagttgtatgaatgcaggggtatgggctagaaggatggctagtgaaatacaacttcacaaactatgcaatggacataaaaatatcattcatttttataatacagcagaaaatccccaatggagatgggtagtacttgaatttgctcaaggtggtgacttatttgacaaaatagagcctgatgtaggtattgatgaggacgtcgctcagttttattttgctcaacttatggaaggtatttccttcatgcactctaaaggtgtcgcgcatcgagacttgaaacctgagaacatccttttagattacaatggtaacttaaagatttcagacttcggctttgcatctttattttcctataaaggtaaaagtaggcttttgaatagtccagtgggtagtccaccatacgctgctccagaaattacacagcagtatgatggttcaaaagttgatgtctggtcctgcggtataattctttttgctttgttattaggcaacacaccttgggatgaagcaattagcaacactggtgactacttgctttataaaaaacaatgtgaacgcccgtcttaccacccatggaacttgttgtctccaggagcctattcgattatcaccggaatgcttcgaagtgatccatttaagcgctactctgtcaaacatgttgtacagcacccatggcttacctcaagtacaccatttcgaactaaaaatgggaattgtgccgatcctgtagcattggcatcaaggctcatgttgaaacttcgtattgatttagataaaccacgtcttgcctcatctagagcatctcaaaacgatagcggtttttcaatgacacagccagcttttaaaaaaaatgaccaaaaggagttggatcgtgtagaagtttatggcgccttatcccagccagtacaacttaataaaaatattgacgttactgaaatccttgaaaaagacccctcattgagtcagttttgtgagaatgaaggttttattaaaagattggccaaaaaggctaagaatttctacgaaatttgtcctcctgaaagactcactaggttttattctagggcgtcgagagaaaccattatagatcatctttatgacagtctacgactacttgcaatctcagtgactatgaaatatgttcgaaatcagaccatcctttatgttaatttacatgataaacggaaatgtctcttgcaaggtgttattgaactaactaatttaggccataacttagagcttataaactttataaagcgtaatggggatcctcttgaatggagaaaattttttaaaaacgttgtcagttcaatagggaagccgattgttcttacagatgtttcacaaaattaa

SEQ ID NO: 18656 - protein, 496 aa, Schizosaccharomyces pombe
MAQKLDNFPYHIGREIGTGAFASVRLCYDDNAKIYAVKFVNKKHATSCMNAGVWARRMASEIQLHKLCNGHKNIIHFYNTAENPQWRWVVLEFAQGGDLFDKIEPDVGIDEDVAQFYFAQLMEGISFMHSKGVAHRDLKPENILLDYNGNLKISDFGFASLFSYKGKSRLLNSPVGSPPYAAPEITQQYDGSKVDVWSCGIILFALLLGNTPWDEAISNTGDYLLYKKQCERPSYHPWNLLSPGAYSIITGMLRSDPFKRYSVKHVVQHPWLTSSTPFRTKNGNCADPVALASRLMLKLRIDLDKPRLASSRASQNDSGFSMTQPAFKKNDQKELDRVEVYGALSQPVQLNKNIDVTEILEKDPSLSQFCENEGFIKRLAKKAKNFYEICPPERLTRFYSRASRETIIDHLYDSLRLLAISVTMKYVRNQTILYVNLHDKRKCLLQGVIELTNLGHNLELINFIKRNGDPLEWRKFFKNVVSSIGKPIVLTDVSQN

SEQ ID NO: 18657 - DNA, 1335 bp, Arabidopsis thaliana; identical to SEQ ID NO: 2079
  CDS (1)..(1335)

SEQ ID NO: 18658 - protein, 444 aa, Arabidopsis thaliana; identical to SEQ ID NO: 2080

SEQ ID NO: 18659 - DNA, 1350 bp, Oryza sativa subsp; identical to SEQ ID NO: 2115
  CDS (1)..(1350)

SEQ ID NO: 18660 - protein, 449 aa, Oryza sativa subsp; identical to SEQ ID NO: 2116

SEQ ID NO: 18661 - DNA, 1266 bp, Arabidopsis thaliana; identical to SEQ ID NO: 2081
  CDS (1)..(1266)

SEQ ID NO: 18662 - protein, 421 aa, Arabidopsis thaliana; identical to SEQ ID NO: 2082

SEQ ID NO: 18663 - DNA, 1341 bp, Arabidopsis thaliana; identical to SEQ ID NO: 2083
  CDS (1)..(1341)

SEQ ID NO: 18664 - protein, 446 aa, Arabidopsis thaliana; identical to SEQ ID NO: 2084

SEQ ID NO: 18665 - DNA, 3429 bp, Saccharomyces cerevisiae
  CDS (1)..(3429)
atggcaatcaatggtaacagtattcctgccataaaggataataccatcggtccatggaaactaggtgaaactctcggtctagggagcactggtaaagtccagcttgctcgtaatggatccacaggacaagaggcggcagttaaggtaatatcaaaagcagtattcaataccggtaatgtcagcggtacttcgattgttggctccaccaccccagatgctctaccatatggtatagaacgcgaaataatcattatgaagttgttaaaccacccaaatgtgttacgtttatatgatgtctgggaaacaaatacagatttataccttgttttagaatacgcggagaaaggtgagttgttcaacttattggttgagagaggtcctctgccagagcatgaagctatcaggttttttagacaaattattattggtgtgtcgtactgtcatgcgttgggtattgtccatcgtgatctaaaaccggaaaatctattattagatcataaatataacatcaagattgcagattttggtatggctgctttggaaactgaaggaaagctactggagacgtcgtgcggatcaccacattatgctgcaccagaaattgtatctggtataccgtatcaaggtttcgcaagtgatgtgtggtcatgcggtgtgatcctattcgcccttcttactggtcggttaccctttgacgaggaagatggaaatataagaacactattacttaaagttcaaaaaggtgagttcgaaatgccttctgatgatgaaatttcgcgtgaagctcaggatttgattagaaaaatcttaaccgttgatcctgaaagaagaatcaagaccagagatatactcaaacatccgctattacaaaaatatccaagtataagagattctaaaagtattagaggcttaccaagagaagacacatatctcacgccattatcagaaagtaattcttctattgacgctacgattttgcaaaatttagtaatattatggcatggaagagatcctgaaggaattaaggaaaaactaagagaacctggcgctaatgcagaaaagacattatatgcactactgtatagatttaagtgtgacactcaaaaagagcttattaagcaacagcaagttaagaagaggcagtcaattagtagcgtttctgtttccccatctaaaaaagtatcgacaactccacaacgcagaagaaatagagaatctttaattagtgtaacatcttctcgtaaaaagccaatatccttcaacaaattcactgcctccagtgcctcctccagcaatctaactacacccggttcttcaaaacgcctttcaaaaaacttctcttcaaagaagaaattatctacaatcgttaaccaatcttctccaacaccagcatcacgtaataaaagagcttcggttataaatgtggaaaagaatcaaaaaagagcctctatcttttctactaccaagaagaacaaaagatcttctagatctatcaagagaatgtcattgataccaagcatgaaacgtgaatcggtgacaacaaaattaatgtcaacatatgcgaaattggcagaggatgacgattgggaatacattgagaaggaaacaaagagaacgagctcaaattttgcaactttgatagatgaaatttttgagtacgaaaagtacgaacaaataaggaaagagaaggaagagctagaacgtaaagtgagagaagcaaaagcacgtgaagagctggaacgtagaagacgtaaacaagaagaaaaagaacgtgcaagaaaattactagaaaaggaagatctgaaaagaaaacaggaggaactcaagaagcaaattgaaattgatataagtgatctagagcaagagctgtccaaacacaaagaggaaaaactggatggtaatattagatctatctctgctcctatggaaaatgaagagaaaaatatcaatcatttggaggttgatattgacaatattctccgtcgccgcaacttttctttacaaactagacctgtgtcaaggcttgatccgggtataatgttctccagtccaactgaggaagtaagtccagtggaaccaaagagaacagaaaatgaaagacttacaacagaaaagaaaattttagaaactatcagaagatcaaaattcttgggttcatcatttaatatcgataaagagttgaaattgtctaaaatggaatatccaagtataattgcaccacaaagattgtcagaggagcgagtggtgtcagattctaatgatggatatgaatctttgatcctcccgaaggatgggaatggcgtatctcaattaaaggatagtaccgcaacaactgctcccgtctctgatggtaggttgaggaagatctctgaaattagagtaccacaatttactagaaaatcaaggcattttagtgagtccaataaaaggctatctgtcctgtcgatgtactctaccaaggagtcgtttaccaacttggttgatattttgaaaaacggtaaccttgatgtcaataaccaacaaagccaaagaattccaacaccaagaagtgcggatgattcagaatttctttttgaaactgtcaacgaagaagctgaatatacaggaaatagttcgaacgatgagagattgtacgatgtcggtgattccactatcaaagacaaatccgcgttaaagctgaactttgcagatcgttttaatggatcgaacgaagcgaaacaaactgataacttacatcttccgatccttcctccgcttaatggtgacaatgaattgcgtaaacagaatagccaagagggtgaccaggcacatccaaagattaaatcgatgataccagaatcaggctcttcttcacatactgaaaaggaagaagaaaatgaggaaaaggaagagaaaaagccagaacaacacaaacaagaagaggatcaagaaaaaagagagaaagtagtagatgatatggagccaccattgaacaaatctgtgcaaaaaattagggaaaaaaatgctggctcgcaggcaaaggatcattcaaaagatcacttaaaagagcataagcaggataaaaatacagcaattggaaatggttccttctttagaaaattctcaaaatcttcggacaaaacaatggaattgtatgccaagatttctgcaaaacaattgtttaatggtttagagaagctgttgcgtggttggactcagtatggtttaaaaaatataaaatcgcaccccaacaatctgaccttaacgggtaaactatcgagtgataatatattctcactacgttcaacactctttgaggttaatatttatccgagaggtaagatgagcgttgtgcagttcaagaaagtttctggttcattcaaagctgtcaaaaagttggtcaatgaagttgagaacgtcctgaataaggaaggcgttctacaaaaatag

SEQ ID NO: 18666 - protein, 1142 aa, Saccharomyces cerevisiae
MAINGNSIPAIKDNTIGPWKLGETLGLGSTGKVQLARNGSTGQEAAVKVISKAVFNTGNVSGTSIVGSTTPDALPYGIEREIIIMKLLNHPNVLRLYDVWETNTDLYLVLEYAEKGELFNLLVERGPLPEHEAIRFFRQIIIGVSYCHALGIVHRDLKPENLLLDHKYNIKIADFGMAALETEGKLLETSCGSPHYAAPEIVSGIPYQGFASDVWSCGVILFALLTGRLPFDEEDGNIRTLLLKVQKGEFEMPSDDEISREAQDLIRKILTVDPERRIKTRDILKHPLLQKYPSIRDSKSIRGLPREDTYLTPLSESNSSIDATILQNLVILWHGRDPEGIKEKLREPGANAEKTLYALLYRFKCDTQKELIKQQQVKKRQSISSVSVSPSKKVSTTPQRRRNRESLISVTSSRKKPISFNKFTASSASSSNLTTPGSSKRLSKNFSSKKKLSTIVNQSSPTPASRNKRASVINVEKNQKRASIFSTTKKNKRSSRSIKRMSLIPSMKRESVTTKLMSTYAKLAEDDDWEYIEKETKRTSSNFATLIDEIFEYEKYEQIRKEKEELERKVREAKAREELERRRRKQEEKERARKLLEKEDLKRKQEELKKQIEIDISDLEQELSKHKEEKLDGNIRSISAPMENEEKNINHLEVDIDNILRRRNFSLQTRPVSRLDPGIMFSSPTEEVSPVEPKRTENERLTTEKKILETIRRSKFLGSSFNIDKELKLSKMEYPSIIAPQRLSEERVVSDSNDGYESLILPKDGNGVSQLKDSTATTAPVSDGRLRKISEIRVPQFTRKSRHFSESNKRLSVLSMYSTKESFTNLVDILKNGNLDVNNQQSQRIPTPRSADDSEFLFETVNEEAEYTGNSSNDERLYDVGDSTIKDKSALKLNFADRFNGSNEAKQTDNLHLPILPPLNGDNELRKQNSQEGDQAHPKIKSMIPESGSSSHTEKEEENEEKEEKKPEQHKQEEDQEKREKVVDDMEPPLNKSVQKIREKNAGSQAKDHSKDHLKEHKQDKNTAIGNGSFFRKFSKSSDKTMELYAKISAKQLFNGLEKLLRGWTQYGLKNIKSHPNNLTLTGKLSSDNIFSLRSTLFEVNIYPRGKMSVVQFKKVSGSFKAVKKLVNEVENVLNKEGVLQK

SEQ ID NO: 18667 - DNA, 2676 bp, Schizosaccharomyces pombe
  CDS (1)..(2676)
atggagtaccgtaccaataacgtacccgtcggtaatgagacaaagtctgccgctttaaatgcgttgccgaaaattaaaatatctgactcgcccaaccgtcatcacaacctggtggatgcttttatgcaatctccttcttattctacacaaccaaaatccgctgtagagcctctgggtttatctttttctcctgggtatatttctccttcttctcagtctccacatcatggccccgtaaggtctccatcaagtcgaaaaccgctaccagcatctccttctcgtacgcgggatcatagcctgcgagtacctgtatctgggcattcttatagcgctgacgagaagcctcgtgaaagaagaaaagtcataggcaattatgtactaggtaaaaccattggggctggtagcatggggaaagttaaagttgcgcatcatttaaaaacaggtgaacagtttgccattaaaatagttacccgtcttcatccagacataacgaaggcaaaagctgctgcttctgctgaggctactaaggcagcacaatcagaaaaaaacaaggaaattcgtactgttcgcgaagctgccttatctactttgctccgtcatccgtatatttgcgaggcaagagatgtttatattactaatagtcattattatatggtctttgaatttgtcgacggtggtcaaatgctggattatattatttcacatggaaaattaaaagaaaagcaagctcgaaaatttgtgcgtcaaattggaagtgcgctgagttatttgcatcaaaactctgtggtgcacagagatctaaaaattgaaaatattttaatttcgaagaccggtgacatcaaaattatcgattttggtctttcaaatttgtatcgacgtcagtctcgcttgcgcacgttttgtggttcattatattttgctgctccagaacttttgaatgctcaaccgtacattggtccagaggtagacgtttggagttttggaatagtactttacgttcttgtttgcggaaaagtgccatttgatgatcaaaatatgtctgccttgcatgcgaaaataaaaaaaggtaccgtcgagtatccaagttatttaagtagtgattgtaaaggtttactatcaagaatgttggttactgatcctctcaagcgagccacgcttgaagaagttttgaaccatccttggatgattcgcaattatgaaggacctccagcttcgtttgctccggaaagatctccgatcactcttccattagatcctgaaattattagggaaatgaacggttttgattttggaccaccagaaaaaattgttcgtgaattaactaaggtaattagcagtgaagcttatcaatctttagctaaaactggattttattccgggcctaattcagctgacaagaaaaagtctttctttgaattccggattaggcatgctgcgcatgatatcgagaatccaatattaccatctctttcaatgaacactgatatttatgatgcgtttcatcctctcatttcaatttattatttagtttctgaacgtcgtgtatatgaaaaaggtggaaattggaataggatagcaaaaacaccagtttctagcgttccttcttcgccagttcagccaactagttataatcgtactttaccgccaatgccggaagttgttgcctacaaaggcgacgaagaatcacctcgtgtttctcgaaacacatcacttgcacgcagaaagcctttgcctgatacggaatctcactccccttctccttcagcaacctcctccatcaaaaagaatccatccagcatttttagaaggttttcatcacgccgaaaacaaaataagtcttctacatctactcttcaaattagtgctccccttgagacctcacaatctccaccaacacctcgaaccaagccgtctcacaagcccccagtatcttacaagaataaacttgttacccaatctgctattggaagatcaacctctgttcgtgagggccgctatgctggtatctccagtcagatggattcactaaacatggattcaacagggccctctgcatccaatatggcaaatgcacctccgtcggttcgtaataatcgtgtacttaatcctcgtggtgcttccttggggcatgggcggatgtcaacttctacgaccaaccgccaaaagcaaatccttaatgaaacgatgggcaatccggtggacaagaactctacttccccatccaaatctacggataaattggatcctataaagcctgttttccttaaaggcttgttcagtgtttccactacatcgactaaaagtactgagtcaattcaacgagatcttattcgggtaatgggcatgcttgatattgagtataaagagatcaagggtggttatgcatgtctatataaacctcagggtatccgaacccctacaaaatcgacttctgttcatacacgacgtaagccttcttatggctctaattctaccactgattcttatggatcggtgccggacacagtcccattagatgacaatggtgagtcgcctgcctctaaccttgcctttgaaatatatattgtgaaagtccctatactctctcttcgtggcgtttcttttcatcgaattagtggaaactcatggcaatataagacattggctagtcgtattcttaacgaattaaaattgtga

SEQ ID NO: 18668 - protein, 891 aa, Schizosaccharomyces pombe
MEYRTNNVPVGNETKSAALNALPKIKISDSPNRHHNLVDAFMQSPSYSTQPKSAVEPLGLSFSPGYISPSSQSPHHGPVRSPSSRKPLPASPSRTRDHSLRVPVSGHSYSADEKPRERRKVIGNYVLGKTIGAGSMGKVKVAHHLKTGEQFAIKIVTRLHPDITKAKAAASAEATKAAQSEKNKEIRTVREAALSTLLRHPYICEARDVYITNSHYYMVFEFVDGGQMLDYIISHGKLKEKQARKFVRQIGSALSYLHQNSVVHRDLKIENILISKTGDIKIIDFGLSNLYRRQSRLRTFCGSLYFAAPELLNAQPYIGPEVDVWSFGIVLYVLVCGKVPFDDQNMSALHAKIKKGTVEYPSYLSSDCKGLLSRMLVTDPLKRATLEEVLNHPWMIRNYEGPPASFAPERSPITLPLDPEIIREMNGFDFGPPEKIVRELTKVISSEAYQSLAKTGFYSGPNSADKKKSFFEFRIRHAAHDIENPILPSLSMNTDIYDAFHPLISIYYLVSERRVYEKGGNWNRIAKTPVSSVPSSPVQPTSYNRTLPPMPEVVAYKGDEESPRVSRNTSLARRKPLPDTESHSPSPSATSSIKKNPSSIFRRFSSRRKQNKSSTSTLQISAPLETSQSPPTPRTKPSHKPPVSYKNKLVTQSAIGRSTSVREGRYAGISSQMDSLNMDSTGPSASNMANAPPSVRNNRVLNPRGASLGHGRMSTSTTNRQKQILNETMGNPVDKNSTSPSKSTDKLDPIKPVFLKGLFSVSTTSTKSTESIQRDLIRVMGMLDIEYKEIKGGYACLYKPQGIRTPTKSTSVHTRRKPSYGSNSTTDSYGSVPDTVPLDDNGESPASNLAFEIYIVKVPILSLRGVSFHRISGNSWQYKTLASRILNELKL

SEQ ID NO: 18669 - DNA, 1005 bp, Oryza sativa
  CDS (1)..(1005)
atggaggagaggtacgaggcgttgaaggagctcggggccggcaacttcggggtggccaggctggtcagggacaagaggagcaaggagctcgtcgccgtcaagtacatcgagaggggcaagaagattgatgaaaatgtgcagagggagatcatcaatcataggtcgctccggcatcccaatatcattcggtttaaggaggtttgtttgacacccacacacctagccattgtcatggagtatgctgctggtggagaactctttgaacaaatctgcaccgcagggcgattcagcgaagacgaggcaaggtacttcttccagcagctaatatcaggtgtcagctactgtcattctctggaaatttgccaccgtgatcttaaacttgagaacaccctcctggatggaagcccaacacctcgtgtgaagatttgtgactttggttactcaaagtctgctttgctgcattcgaagccgaagtctacagttggtactccagcatacatagcgccagaagttctttcaagaaaagaatatgatggcaaggtagcagacgtttggtcctgtggtgtgacactgtacgtgatgcttgtcggttcatacccgtttgaagatccaggtgatccgaggaatttccgcaaaacgatcagcagaattcttggcgtgcaatactccatcccggactacgtgagggtgtcttccgactgcaggcgccttctatctcaaatatttgttgccgatccttcaaagaggatcacgatccctgagataaagaagcacacgtggtttctgaagaatctgccaaaggagatatcggagagggagaaggccgactacaaggacacggacgccgcccctccgacgcaggccgtcgaggagatcatgcggatcatccaggaggccaaggtccccggcgacatggccgccgccgacccggcgctgctcgcggagctcgccgagctgaagagcgacgacgaagaggaggccgccgatgagtatgacacctactga

SEQ ID NO: 18670 - protein, 334 aa, Oryza sativa
MEERYEALKELGAGNFGVARLVRDKRSKELVAVKYIERGKKIDENVQREIINHRSLRHPNIIRFKEVCLTPTHLAIVMEYAAGGELFEQICTAGRFSEDEARYFFQQLISGVSYCHSLEICHRDLKLENTLLDGSPTPRVKICDFGYSKSALLHSKPKSTVGTPAYIAPEVLSRKEYDGKVADVWSCGVTLYVMLVGSYPFEDPGDPRNFRKTISRILGVQYSIPDYVRVSSDCRRLLSQIFVADPSKRITIPEIKKHTWFLKNLPKEISEREKADYKDTDAAPPTQAVEEIMRIIQEAKVPGDMAAADPALLAELAELKSDDEEEAADEYDTY

SEQ ID NO: 18671 - DNA, 1080 bp, Oryza sativa subsp
  CDS (1)..(1080)
atggagaggtacgagctgctcaaggacatcggcgccgggaacttcggggtggcgcggctgatgcggaataaggagaccaaggagctggtcgccatgaagtacatccctcggggcctcaagattgacgagaatgtggcgagggagatcatcaaccaccggtcgctgcggcaccccaacatcatccgcttcaaggaggtggtggtcacgccgacgcacctggcgatcgtgatggagtacgctgccggcggcgagttgttcgaccggatctgcaacgccgggaggttcagcgaggacgaggccaggtatttcttccagcagctcatctgcggcgtgagctactgccacttcatgcaaatttgccaccgggatttgaagctggagaacacgctgctggacggcagcccggcgccccgcctcaagatctgcgacttcggttactccaagtcgtcgctgctgcactcgaagcccaagtcgacggtcgggacgccggcgtacatcgcgccggaggtgctatcccgccgggagtacgacggcaagacagccgatgtgtggtcttgtggagtgactctttatgtgatgcttgttggtgcttacccctttgaggaccctgatgaccccaagaatttcagaaagaccattgggagaataatgtcaattcagtacaaaatacccgagtacgtccatgtatcccaggactgcaggcaactcctttctagaatttttgttgcaaaccctgcaaagagaataacaataagggagatcaggaaccacccatggttcctgaagaacctgccaagagagctcacagaagctgcacaggcaatgtactacaagaaggataacagtgccccgacctactccgtccagtcggtcgaggagatcatgaagattgtcgaggaagcgcggacgccgcctcggtcctccacccccgtggccggctttggctggcaagaggaggatgagcaggaggacaacagcaagaagccagaggaagaacaggaggaagaggaagatgctgaggatgagtacgacaagcaggtgaaacaagtccatgccagtggtgagtttcagctcagctga

SEQ ID NO: 18672 - protein, 359 aa, Oryza sativa subsp
MERYELLKDIGAGNFGVARLMRNKETKELVAMKYIPRGLKIDENVAREIINHRSLRHPNIIRFKEVVVTPTHLAIVMEYAAGGELFDRICNAGRFSEDEARYFFQQLICGVSYCHFMQICHRDLKLENTLLDGSPAPRLKICDFGYSKSSLLHSKPKSTVGTPAYIAPEVLSRREYDGKTADVWSCGVTLYVMLVGAYPFEDPDDPKNFRKTIGRIMSIQYKIPEYVHVSQDCRQLLSRIFVANPAKRITIREIRNHPWFLKNLPRELTEAAQAMYYKKDNSAPTYSVQSVEEIMKIVEEARTPPRSSTPVAGFGWQEEDEQEDNSKKPEEEQEEEEDAEDEYDKQVKQVHASGEFQLS

SEQ ID NO: 18673 - DNA, 1086 bp, Oryza sativa subsp
  CDS (1)..(1086)
atggagagggcggcggcggggccgctggggatggagatgccgataatgcacgacggtgacaggtacgagctggtgaaggagatcgggtcggggaacttcggcgtcgcccgcctcatgcgcaaccgcgcctccggcgacctcgtcgccgtcaagtacatcgaccgcggcgagaagattgacgagaacgtgcagagggagatcatcaaccacaggtcgctgcgccaccccaacatcatccgattcaaggaggttattctgacgccgacgcatctcgcgatcgtcatggagtacgcctccggcggcgagctcttcgagcgcatctgcagcgccggccgcttcagcgaggacgaggctcgtttcttcttccagcagctgatatctggagttagctactgccattccatgcaagtatgccatcgtgacttaaagctggagaacactctgctagatggaagtactgctcctcgcttgaagatatgtgactttggttactcgaagtcatcggttcttcattcacaaccaaaatcaacagttggaactccagcttatattgctccagaagttttgctcaagaaagaatacgatggaaagattgccgatgtttggtcatgcggtgtgacgctctacgtgatgttggttggcgcataccctttcgaggatcctgaagatcccaagaacttcagaaagacaattcagaaaatattgggtgttcagtactcaattccagactatgtccacatatctccggagtgccgcgatctcattacgaggatttttgttggcaacccagctagtaggatcaccatgcctgagataaagaaccacccatggttcatgaagaacatcccggctgacctcatggatgatggcatggttagcaatcagtacgaggagcctgaccagccgatgcagaatatgaacgagatcatgcagatactggcagaagcaacaattccagcagcaggcaccagtggaatcaatcagttcttgactgacagccttgacctcgacgacgacatggaggatatggactcggaccttgaccttgacattgagagcagcggagagatcgtatatgccatgtaa

SEQ ID NO: 18674 - protein, 361 aa, Oryza sativa subsp
MERAAAGPLGMEMPIMHDGDRYELVKEIGSGNFGVARLMRNRASGDLVAVKYIDRGEKIDENVQREIINHRSLRHPNIIRFKEVILTPTHLAIVMEYASGGELFERICSAGRFSEDEARFFFQQLISGVSYCHSMQVCHRDLKLENTLLDGSTAPRLKICDFGYSKSSVLHSQPKSTVGTPAYIAPEVLLKKEYDGKIADVWSCGVTLYVMLVGAYPFEDPEDPKNFRKTIQKILGVQYSIPDYVHISPECRDLITRIFVGNPASRITMPEIKNHPWFMKNIPADLMDDGMVSNQYEEPDQPMQNMNEIMQILAEATIPAAGTSGINQFLTDSLDLDDDMEDMDSDLDLDIESSGEIVYAM

SEQ ID NO: 18675 - DNA, 1863 bp, Candida albicans; identical to SEQ ID NO: 2085
  CDS (1)..(1863): transl_table=12

SEQ ID NO: 18676 - protein, 620 aa, Candida albicans; identical to SEQ ID NO: 2086

SEQ ID NO: 18677 - DNA, 1839 bp, Candida glabrata; identical to SEQ ID NO: 2087
  CDS (1)..(1839)

SEQ ID NO: 18678 - protein, 612 aa, Candida glabrata; identical to SEQ ID NO: 2088

SEQ ID NO: 18679 - DNA, 1860 bp, Candida tropicalis; identical to SEQ ID NO: 2089
  CDS (1)..(1860): transl_table=12

SEQ ID NO: 18680 - protein, 619 aa, Candida tropicalis; identical to SEQ ID NO: 2090

SEQ ID NO: 18681 - DNA, 1731 bp, Schizosaccharomyces pombe
  CDS (1)..(1731)
atgcaaccgcaggaggttgatttaatggagaactcaaccatgcgaaatggagcaagagttttaccaccagaagccatatccaagcgccatatcggcccttatattataagggaaacccttggtgaaggttcttttggcaaagtcaagctcgctactcattacaaaacgcaacagaaagttgctctcaagtttatctcccgtcaattgctaaagaaaagcgatatgcatatgcgtgtggagcgtgaaatttcatacttgaagcttttgcgacatcctcatattattaaattgtatgatgtgataaccacgcccacagatatcgttatggtaattgaatatgcaggtggtgaattgtttgattatattgtagaaaagaaaaggatgactgaagatgagggtcgtcgtttttttcaacaaattatatgtgcaattgagtactgtcaccgtcacaaaattgtacatcgcgatcttaaacccgaaaatttgttgttggatgacaatctcaacgtaaagattgctgatttcggtttatcaaatattatgacagacggtaatttcctaaaaacgtcctgtggcagtccaaattatgcagccccggaagttatcaacgggaaattgtatgctggtccagaagtcgatgtttggagttgcggcattgttctctatgtgatgttggtgggtcgtcttcctttcgacgatgaatttatccccaatttgtttaaaaaagttaacagttgtgtttatgttatgcctgattttctttctcccggagcacaatctttaattcgccgaatgattgttgcagatccaatgcagaggataacaattcaggaaatacgtcgggacccttggttcaacgttaatttacccgattatttacgtcctatggaggaggtccaaggctcttatgctgattcacgaattgtcagcaagcttggtgaggcaatggggttctcggaggattacattgtcgaagctttacgttcagatgaaaataatgaagtaaaagaggcttataacttgctacatgaaaatcaagtaatccaagaaaagagtcatctctccaaatcaaaacgagtcgattcttttctatctgtatctccacccgcattttcagaatatacttctgaattgcaaaagaagtcaaaacaggagcttatcgatcctactttagaaggaccgcgttggacagtctccgaccctccaacatatgctaaacaaacaattgacagtaacatatgtgtccttgtgcctacggcagaaaaaaataaacttgaaatgaggactcttgccgatgctgctagtgctgtggatacgagccaatccactcgcaaaaagagtcgccgtaacaaatggcattttggtgttcgctgccggggcgatgcacctgaaattttgttggctgtgtatcgagctttacaacgtgcaggagctcagtttaccgttccaaaaccagtaaatggaaaatatcgatcagacatgtataccattaaaagtcgttgggaaattcctcattgtaaaagggaaggaaaaaatacttatgcttatattgagttacaactttatgaagttatgcccgggtgttttatgctagatgtgaaatctaatggttacaaagatatttattctcatcctgaacgaacagctgatcatggcatggatgatcttaagtcatctttcccatttttagatttgtgtgctatgctggtgtgcaagttattttctgcatga

SEQ ID NO: 18682 - protein, 576 aa, Schizosaccharomyces pombe
MQPQEVDLMENSTMRNGARVLPPEAISKRHIGPYIIRETLGEGSFGKVKLATHYKTQQKVALKFISRQLLKKSDMHMRVEREISYLKLLRHPHIIKLYDVITTPTDIVMVIEYAGGELFDYIVEKKRMTEDEGRRFFQQIICAIEYCHRHKIVHRDLKPENLLLDDNLNVKIADFGLSNIMTDGNFLKTSCGSPNYAAPEVINGKLYAGPEVDVWSCGIVLYVMLVGRLPFDDEFIPNLFKKVNSCVYVMPDFLSPGAQSLIRRMIVADPMQRITIQEIRRDPWFNVNLPDYLRPMEEVQGSYADSRIVSKLGEAMGFSEDYIVEALRSDENNEVKEAYNLLHENQVIQEKSHLSKSKRVDSFLSVSPPAFSEYTSELQKKSKQELIDPTLEGPRWTVSDPPTYAKQTIDSNICVLVPTAEKNKLEMRTLADAASAVDTSQSTRKKSRRNKWHFGVRCRGDAPEILLAVYRALQRAGAQFTVPKPVNGKYRSDMYTIKSRWEIPHCKREGKNTYAYIELQLYEVMPGCFMLDVKSNGYKDIYSHPERTADHGMDDLKSSFPFLDLCAMLVCKLFSA

SEQ ID NO: 18683 - DNA, 1902 bp, Saccharomyces cerevisiae
  CDS (1)..(1902)
atgagcagtaacaacaacacaaacacagcacctgccaatgcaaattctagccaccaccaccaccatcaccaccatcaccaccaccatcacggtcatggcggaagcaactcgacgctaaacaatcccaagtcgtccttagcggatggtgcacatatcgggaactaccaaatcgtcaaaacgctgggagaggggtcctttggtaaagttaaattggcatatcataccactacgggccaaaaagttgctctaaaaatcattaataagaaggttttggcaaagagtgatatgcagggcagaattgaaagagaaatatcttatctgagactcttaagacacccccacatcatcaaactgtatgatgttatcaaatccaaagatgaaatcattatggttatagagtacgccgggaacgaattgtttgactatattgttcagagagacaaaatgagcgagcaagaggcaagaagatttttccagcagatcatcagtgccgtcgagtactgccataggcacaaaattgtccatagagatctgaagcctgaaaacttactactagatgagcatctgaatgtaaagattgccgattttggtttgtcaaacatcatgactgatggtaatttcttaaagacttcttgtggttctcccaattatgcggctcctgaagttatcagcggtaagctgtacgcaggcccagaagtggacgtgtggtcatgtggggttatcctttatgttatgctttgtcgtcgtctaccgtttgacgatgaaagcatcccagtgcttttcaagaatatcagcaacggtgtttacaccttgcctaaatttttatctcctggagctgctgggctaatcaaaagaatgttaatcgttaatccattgaacagaataagcattcatgaaattatgcaagacgattggttcaaagttgacctgccagaatatctacttccaccagatttgaaaccacacccagaagaagagaatgaaaataatgactcaaaaaaggatggcagcagcccagataacgatgaaattgatgacaaccttgtcaatattttatcatcgaccatgggttacgaaaaagacgagatttatgagtccttagaatcatcagaagacactcctgcattcaacgaaattagggacgcgtacatgttgattaaggagaataaatctttgatcaaggatatgaaggcaaacaaaagcgtcagtgatgaactggatacctttctgtcccagtcacctccaacttttcaacaacaaagcaaatcccatcaaaagagtcaagtagatcatgaaactgccaagcaacacgcaagaaggatggcaagtgctatcactcaacaaaggacatatcaccaatcacccttcatggatcagtataaagaagaagactctacagtttccattttgcctacatctttacctcagatccacagagctaatatgttagcacaaggttcgccagctgcctctaaaatatctcctcttgtaacgaaaaaatctaaaacgagatggcattttggtatacgatctcgctcatatccattagacgttatgggtgaaatttatattgccttgaagaatttgggtgccgaatgggccaagccatctgaagaggatttatggactatcaaattaaggtggaaatatgatattggaaacaagacaaacactaatgaaaaaatacctgatttaatgaaaatggtaattcaattatttcaaattgaaaccaataattatttggtggatttcaaatttgacggctgggaaagtagttatggagatgatactactgtttctaatatttctgaagatgaaatgagtactttttcagcctacccatttttacatttaacaacaaaactaattatggaattagccgttaacagtcaaagcaattga

SEQ ID NO: 18684 - protein, 633 aa, Saccharomyces cerevisiae
MSSNNNTNTAPANANSSHHHHHHHHHHHHHGHGGSNSTLNNPKSSLADGAHIGNYQIVKTLGEGSFGKVKLAYHTTTGQKVALKIINKKVLAKSDMQGRIEREISYLRLLRHPHIIKLYDVIKSKDEIIMVIEYAGNELFDYIVQRDKMSEQEARRFFQQIISAVEYCHRHKIVHRDLKPENLLLDEHLNVKIADFGLSNIMTDGNFLKTSCGSPNYAAPEVISGKLYAGPEVDVWSCGVILYVMLCRRLPFDDESIPVLFKNISNGVYTLPKFLSPGAAGLIKRMLIVNPLNRISIHEIMQDDWFKVDLPEYLLPPDLKPHPEEENENNDSKKDGSSPDNDEIDDNLVNILSSTMGYEKDEIYESLESSEDTPAFNEIRDAYMLIKENKSLIKDMKANKSVSDELDTFLSQSPPTFQQQSKSHQKSQVDHETAKQHARRMASAITQQRTYHQSPFMDQYKEEDSTVSILPTSLPQIHRANMLAQGSPAASKISPLVTKKSKTRWHFGIRSRSYPLDVMGEIYIALKNLGAEWAKPSEEDLWTIKLRWKYDIGNKTNTNEKIPDLMKMVIQLFQIETNNYLVDFKFDGWESSYGDDTTVSNISEDEMSTFSAYPFLHLTTKLIMELAVNSQSN

SEQ ID NO: 18685 - DNA, 1281 bp, Oryza sativa; identical to SEQ ID NO: 2097
  CDS (1)..(1281)

SEQ ID NO: 18686 - protein, 426 aa, Oryza sativa; identical to SEQ ID NO: 2098

SEQ ID NO: 18687 - DNA, 1122 bp, Oryza sativa; identical to SEQ ID NO: 2099
  CDS (1)..(1122)

SEQ ID NO: 18688 - protein, 373 aa, Oryza sativa; identical to SEQ ID NO: 2100

SEQ ID NO: 18689 - DNA, 1350 bp, Oryza sativa; identical to SEQ ID NO: 2149
  CDS (1)..(1350)

SEQ ID NO: 18690 - protein, 449 aa, Oryza sativa; identical to SEQ ID NO: 2150

SEQ ID NO: 18691 - DNA, 1017 bp, Oryza sativa; identical to SEQ ID NO: 2175
  CDS (1)..(1017)

SEQ ID NO: 18692 - protein, 338 aa, Oryza sativa; identical to SEQ ID NO: 2176

SEQ ID NO: 18693 - DNA, 1323 bp, Brassica napus; identical to SEQ ID NO: 2179
  CDS (1)..(1323)

SEQ ID NO: 18694 - protein, 440 aa, Brassica napus; identical to SEQ ID NO: 2180

SEQ ID NO: 18695 - DNA, 1332 bp, Brassica napus; identical to SEQ ID NO: 2181
  CDS (1)..(1332)

SEQ ID NO: 18696 - protein, 443 aa, Brassica napus; identical to SEQ ID NO: 2182

SEQ ID NO: 18697 - DNA, 1338 bp, Brassica napus; identical to SEQ ID NO: 2183
  CDS (1)..(1338)

SEQ ID NO: 18698 - protein, 445 aa, Brassica napus; identical to SEQ ID NO: 2184

SEQ ID NO: 18699 - DNA, 1083 bp, Glycine max
  CDS (1)..(1083)
atggatcgggcggcgttgacggtcggaccgggcatggacatgccgataatgcacgacagcgaccgttacgatctggtccgcgacatcgggtccggaaatttcggcgtggcgaggctgatgcaggataaacaaaccaaggaactcgtcgccgtcaagtacatcaaaaggggtgataagattgatgaaaatgtgaagagggaaattatcaatcacaggtctctgaggcatcctaacattgttaggtttaaagaggtaattttaacacctactcatcttgctattgtaatggaatatgcatctgggggagagctctttgagaaaatctgcaatgctggacgttttactgaggatgaggctcgattcttctttcagcaactcatatccggggtcagctattgccatgctatgcaagtatgtcatcgggacttgaagctggaaaacactttgctggatggaagctcggcacctcgtttaaagatatgcgattttgggtactccaagtcttcagtgcttcattcacaaccaaagtcaactgtgggaactcctgcatatattgctccagaagtattgttgaaacaagagtatgatggcaagcttgcagatgtctggtcatgtggagtaacgttatatgtgatgctagtgggagcatatccttttgaagatcctaatgaaccaaaggactttcgcaagacaattcagagagttcttagtgtccagtattccattccggacggtgttcaaatatctccagagtgtggccaccttatctcaaggatctttgtttttgacccagcagagagaatcaccatgtctgaaatctggaaccatgaatggtttctgaagaatctccctgcggacctgatggacgagaagataatgagcaatcaatttgaagagccagaccaacccatgcagagcatcgatacgatcatgcagataatttcagaagctaccgtgccagcggctgggacctattcttttgacaagtttatggaggagcaaatttatgacttagaatctgaatctgatgctgaatctgatcttgatattgatagcagtggggaaatagtgtatgccatatag

SEQ ID NO: 18700 - protein, 360 aa, Glycine max
MDRAALTVGPGMDMPIMHDSDRYDLVRDIGSGNFGVARLMQDKQTKELVAVKYIKRGDKIDENVKREIINHRSLRHPNIVRFKEVILTPTHLAIVMEYASGGELFEKICNAGRFTEDEARFFFQQLISGVSYCHAMQVCHRDLKLENTLLDGSSAPRLKICDFGYSKSSVLHSQPKSTVGTPAYIAPEVLLKQEYDGKLADVWSCGVTLYVMLVGAYPFEDPNEPKDFRKTIQRVLSVQYSIPDGVQISPECGHLISRIFVFDPAERITMSEIWNHEWFLKNLPADLMDEKIMSNQFEEPDQPMQSIDTIMQIISEATVPAAGTYSFDKFMEEQIYDLESESDAESDLDIDSSGEIVYAI

SEQ ID NO: 18701 - DNA, 1476 bp, Brassica napus; identical to SEQ ID NO: 2185
  CDS (1)..(1476)

SEQ ID NO: 18702 - protein, 491 aa, Brassica napus; identical to SEQ ID NO: 2186

SEQ ID NO: 18703 - DNA, 1326 bp, Brassica napus; identical to SEQ ID NO: 2189
  CDS (1)..(1326)

SEQ ID NO: 18704 - protein, 441 aa, Brassica napus; identical to SEQ ID NO: 2190

SEQ ID NO: 18705 - DNA, 1344 bp, Glycine max; identical to SEQ ID NO: 2195
  CDS (1)..(1344)

SEQ ID NO: 18706 - protein, 447 aa, Glycine max; identical to SEQ ID NO: 2196

SEQ ID NO: 18707 - DNA, 1386 bp, Glycine max; identical to SEQ ID NO: 2199
  CDS (1)..(1386)

SEQ ID NO: 18708 - protein, 461 aa, Glycine max; identical to SEQ ID NO: 2200

SEQ ID NO: 18709 - DNA, 1320 bp, Triticum aestivum; identical to SEQ ID NO: 2201
  CDS (1)..(1320)

SEQ ID NO: 18710 - protein, 439 aa, Triticum aestivum; identical to SEQ ID NO: 2202

SEQ ID NO: 18711 - DNA, 1524 bp, Linum usitatissimum; identical to SEQ ID NO: 2203
  CDS (1)..(1524)

SEQ ID NO: 18712 - protein, 507 aa, Linum usitatissimum; identical to SEQ ID NO: 2204

SEQ ID NO: 18713 - DNA, 1599 bp, Linum usitatissimum; identical to SEQ ID NO: 4770
  CDS (1)..(1599)

SEQ ID NO: 18714 - protein, 532 aa, Linum usitatissimum; identical to SEQ ID NO: 4771

SEQ ID NO: 18715 - DNA, 1350 bp, Zea mays; identical to SEQ ID NO: 2205
  CDS (1)..(1350)

SEQ ID NO: 18716 - protein, 449 aa, Zea mays; identical to SEQ ID NO: 2206

SEQ ID NO: 18717 - DNA, 1356 bp, Zea mays; identical to SEQ ID NO: 2209
  CDS (1)..(1356)

SEQ ID NO: 18718 - protein, 451 aa, Zea mays; identical to SEQ ID NO: 2210

SEQ ID NO: 18719 - DNA, 1068 bp, Zea mays
  CDS (1)..(1068)
atggacaagtacgaggcggtgcgggacatcgggtcggggaacttcggggtggcgcgcctgatgcgcaacagcgagacccgggagctcgtcgcagtcaagtgcatcgagcgcggctaccggattgacgagaatgtgtacagggagatcatcaaccaccgctccctgcgccatcctaacattattcgcttcaaggaggtgatacttacaccaacacatcttatgattgtgatggagttcgcagcaggtggagagcttttcgatcagatctgtgatcgtgggcggtttagtgaggatgaggcccggtatttctttcagcagttgatctgtggcgtgagctactgccattacatgcaaatatgccatagagatctgaagctggagaatgttctcttggatggcagtccagctccacggcttaagatatgcgattttggctattccaagtcatcagtgttgcattcaagacccaaatcagctgtgggaacaccagcatatattgcacccgaggtgctatcccgtcacgaatacgatggaaagcttgcagacgtatggtcctgtggggtgactctttacgtcatgcttgtgggagcatacccatttgaagacccagatgaccccaagaatatacgcaagaccattcagcaaataatgcaagtgcagtacaagataccagattatgtccacatatctacggaatgccagcaacttattgcccgtatctttgttgccaatccagtgaggagaatcacaatgaaggaaataaagagccatccatggtttttgaagaacctaccacgggaactcacggagactgcacaaggcatgtactacaggagggataacaaggtgccttcttattcagaccaaacgtcggaagaaatcatgaagatagttcgtgatgcaaggaccatgccgaaatcatccagatcaggctatgggtggagcgctgagtattcggatgaagaagagaaggaagaggaacacagactagaggaagatgaatacgataggagggtgaaggaggtccatgcaagcggagaactccgtatggacactcttcacatatga

SEQ ID NO: 18720 - protein, 355 aa, Zea mays
MDKYEAVRDIGSGNFGVARLMRNSETRELVAVKCIERGYRIDENVYREIINHRSLRHPNIIRFKEVILTPTHLMIVMEFAAGGELFDQICDRGRFSEDEARYFFQQLICGVSYCHYMQICHRDLKLENVLLDGSPAPRLKICDFGYSKSSVLHSRPKSAVGTPAYIAPEVLSRHEYDGKLADVWSCGVTLYVMLVGAYPFEDPDDPKNIRKTIQQIMQVQYKIPDYVHISTECQQLIARIFVANPVRRITMKEIKSHPWFLKNLPRELTETAQGMYYRRDNKVPSYSDQTSEEIMKIVRDARTMPKSSRSGYGWSAEYSDEEEKEEEHRLEEDEYDRRVKEVHASGELRMDTLHI

SEQ ID NO: 18721 - DNA, 1338 bp, Zea mays; identical to SEQ ID NO: 2211
  CDS (1)..(1338)

SEQ ID NO: 18722 - protein, 445 aa, Zea mays; identical to SEQ ID NO: 2212

SEQ ID NO: 18723 - DNA, 1356 bp, Zea mays; identical to SEQ ID NO: 2353
  CDS (1)..(1356)

SEQ ID NO: 18724 - protein, 451 aa, Zea mays; identical to SEQ ID NO: 2354

SEQ ID NO: 18725 - DNA, 1308 bp, Brassica napus; identical to SEQ ID NO: 2213
  CDS (1)..(1308)

SEQ ID NO: 18726 - protein, 435 aa, Brassica napus; identical to SEQ ID NO: 2214

SEQ ID NO: 18727 - DNA, 1452 bp, Brassica napus; identical to SEQ ID NO: 2215
  CDS (1)..(1452)

SEQ ID NO: 18728 - protein, 483 aa, Brassica napus; identical to SEQ ID NO: 2216

SEQ ID NO: 18729 - DNA, 1299 bp, Brassica napus; identical to SEQ ID NO: 2219
  CDS (1)..(1299)

SEQ ID NO: 18730 - protein, 432 aa, Brassica napus; identical to SEQ ID NO: 2220

SEQ ID NO: 18731 - DNA, 1323 bp, Brassica napus; identical to SEQ ID NO: 2221
  CDS (1)..(1323)

SEQ ID NO: 18732 - protein, 440 aa, Brassica napus; identical to SEQ ID NO: 2222

SEQ ID NO: 18733 - DNA, 1608 bp, Brassica napus; identical to SEQ ID NO: 2223
  CDS (1)..(1608)

SEQ ID NO: 18734 - protein, 535 aa, Brassica napus; identical to SEQ ID NO: 2224

SEQ ID NO: 18735 - DNA, 1341 bp, Brassica napus; identical to SEQ ID NO: 2225
  CDS (1)..(1341)

SEQ ID NO: 18736 - protein, 446 aa, Brassica napus; identical to SEQ ID NO: 2226

SEQ ID NO: 18737 - DNA, 1452 bp, Brassica napus
  CDS (1)..(1452)
atggcttctcgaacaacaccttcgcgatccactccttctcgatcgacaccttcaggtagtagtagtagtagtagttcgattagtaggacacgagtgagtaagtacgagcttgggagaacacttggtgaaggaaccttcgctaaggtcaaattcgctaggaacgtcgagaagggagagagagtgactatcaaggttattgataaagagaaggttctgaagaacaagatgatcgctcagattaagcgtgagatctcgaccatgaagctgatcaagcacccaaatgtcatccgcatgattgaggtgatggctagcaagactaagatctactttgtgttggaacttgttactggtggagagcttttcgataaaatttcaagcactgggagattgaaggaagatgaggcgaggaagtactttcagcagcttattaatgcagtggactattgccatagcagaggtgtttatcatagagaccttaagcccgagaatttgcttttggatgcaaacgggactctcaaagtttctgattttggactgagtgcacttcctcagcaagtccgagaggatgggctacttcacacaacatgtggaacacccaattatgttgctccagaggtaatcaacaacaaaggttacgatggagctaaggctgatctgtggtcttgtggtgtgatcctcttcgtcttaatggctggttacttacctttcgaagattctaatctcacgtcactatacaaaaagatatttaaagccgaatttacgtgcccgccttggttctcagcaagtgctaagaagttaattaaaaggattctcgatcctaaaccagcaacgaggataacatttgctgaagtcattgaaaatgagtggtttaagaaagggtataaggctcctaaatatgagaacgctgatgtcagccttgatgacgttgatgcaatctttgatgaatcaggggagtctaagaaccttgttgtggagaggaaagaagaagaacctaaaaacccagtaactatgaatgcttttgagctcatctcaacctcccagggtctcaatctgggctcacttttcgaaaaacaaatgggacttgtaaaacgaaaaactcgatttacttcgaaatgttcggctaatgatatagtcacaaaaattgaggctgcagcagggcctttggggtttgatgtcaagaaaaacaactacaagatgaagctgctaggagagaaatcagggcgcaagggtcagttagcagttgctactgaggtttttcaagtagctccatcgctttacatggttgaaatgcgaaaatcaggtggtgacacgttggaatttcacaagttttacaaaaaccttaccacgggtcttaaggatattgtttggaaaacaatcgacgaagagaaagaagaaggaactgaaggtaaagcatcaggtggtactactaatggtaccgtggctgcttcttga

SEQ ID NO: 18738 - protein, 483 aa, Brassica napus; identical to SEQ ID NO: 2192

SEQ ID NO: 18739 - DNA, 1326 bp, Brassica napus; identical to SEQ ID NO: 2227
  CDS (1)..(1326)

SEQ ID NO: 18740 - protein, 441 aa, Brassica napus; identical to SEQ ID NO: 2228

SEQ ID NO: 18741 - DNA, 1461 bp, Brassica napus; identical to SEQ ID NO: 2229
  CDS (1)..(1461)

SEQ ID NO: 18742 - protein, 486 aa, Brassica napus; identical to SEQ ID NO: 2230

SEQ ID NO: 18743 - DNA, 1299 bp, Brassica napus; identical to SEQ ID NO: 2231
  CDS (1)..(1299)

SEQ ID NO: 18744 - protein, 432 aa, Brassica napus; identical to SEQ ID NO: 2232

SEQ ID NO: 18745 - DNA, 1323 bp, Brassica napus; identical to SEQ ID NO: 2235
  CDS (1)..(1323)

SEQ ID NO: 18746 - protein, 440 aa, Brassica napus; identical to SEQ ID NO: 2236

SEQ ID NO: 18747 - DNA, 1389 bp, Brassica napus; identical to SEQ ID NO: 2237
  CDS (1)..(1389)

SEQ ID NO: 18748 - protein, 462 aa, Brassica napus; identical to SEQ ID NO: 2238

SEQ ID NO: 18749 - DNA, 1299 bp, Brassica napus; identical to SEQ ID NO: 2239
  CDS (1)..(1299)

SEQ ID NO: 18750 - protein, 432 aa, Brassica napus; identical to SEQ ID NO: 2240

SEQ ID NO: 18751 - DNA, 1095 bp, Brassica napus; identical to SEQ ID NO: 2241
  CDS (1)..(1095)

SEQ ID NO: 18752 - protein, 364 aa, Brassica napus; identical to SEQ ID NO: 2242

SEQ ID NO: 18753 - DNA, 1338 bp, Brassica napus; identical to SEQ ID NO: 2243
  CDS (1)..(1338)

SEQ ID NO: 18754 - protein, 445 aa, Brassica napus; identical to SEQ ID NO: 2244

SEQ ID NO: 18755 - DNA, 1338 bp, Glycine max; identical to SEQ ID NO: 2245
  CDS (1)..(1338)

SEQ ID NO: 18756 - protein, 445 aa, Glycine max; identical to SEQ ID NO: 2246

SEQ ID NO: 18757 - DNA, 1323 bp, Zea mays; identical to SEQ ID NO: 2247
  CDS (1)..(1323)

SEQ ID NO: 18758 - protein, 440 aa, Zea mays; identical to SEQ ID NO: 2248

SEQ ID NO: 18759 - DNA, 1389 bp, Glycine max; identical to SEQ ID NO: 2249
  CDS (1)..(1389)

SEQ ID NO: 18760 - protein, 462 aa, Glycine max; identical to SEQ ID NO: 2250

SEQ ID NO: 18761 - DNA, 1269 bp, Glycine max; identical to SEQ ID NO: 2253
  CDS (1)..(1269)

SEQ ID NO: 18762 - protein, 422 aa, Glycine max; identical to SEQ ID NO: 2254

SEQ ID NO: 18763 - DNA, 1383 bp, Glycine max; identical to SEQ ID NO: 2255
  CDS (1)..(1383)

SEQ ID NO: 18764 - protein, 460 aa, Glycine max; identical to SEQ ID NO: 2256

SEQ ID NO: 18765 - DNA, 1314 bp, Glycine max
  CDS (1)..(1314)
atggaaccgccattgcagcaaaaatcgccgcaaccgccaccacgaaccgccaccatcctcgggaagtaccagctgacgcgcttcctcggccgcggaagcttcgccaaggtctaccaggggagatccctcgtcgacggttccgccgtcgccgtgaaaataatcgacaaatcgaaaaccgtggacgccggcatggagccacgtataatccgcgagatcgacgccatgcgccgcctccaccaccaccctaacatcctcaaaatccacgaggtgctcgcaaccaaaaccaagatccacctcgtcgtggagctcgccgccggcggcgagctcttcgccaaaatctcccgccgcggaaagctaccggagtccaccgcgcgccgctacttccagcagctcgtttcggcgttgcggttctgccaccgcaacggcgtggcccaccgcgacctgaagccgcagaacctcctcctcgacggcgacggaaacctcaaggtctccgacttcgggctctccgcactgccggagcagctcaagaacggcctcctccacaccgcctgcggcacgccggcgtacaccgcgccggagatactccgccggagcggcggctacgacgggtccaaggccgacgcctggtcctgcggcctcatcctcttcgtcttccttgccggacacctcccgttcgacgacaccaacattccggcgatgtgcaaaaaaatttcccgacgagattaccagttcccggagtggatttcaaaaccagcccgttttgttatccacaaattactcgacccgaatccggaaacccgaattagcctggagtccctgtttgggaacgcgtggtttaagaaatcactaaacccggaaacggcggaagaaaacgcgttggggctgagttatgtgaagagtagttataattacgaagggagtaaaaaaagttcgggagtgacagcgtttgacataatatcgatgtcttcgggtttggatttgacgaggttgttcgaaacgacgtcggatttggggagtaaaagagagaagaggtttagttcgagtgcgagagttgaggtggtggaagagaaagttaaggaagtgggtggggtattggggtttaagattgaggttgggaagagtaacggtgcaattgctttggtgaaagggaaggtggctttggtgtttgaggtgcttgagattgtgcctcatgaacttctttttgtggcggttaaggtggtggagggtgcgttggagtttgaggaacatcattggggggattggaaagatgcgttgcaagatctcgtgctctcttggcacaaccaagaatcgtga

SEQ ID NO: 18766 - protein, 437 aa, Glycine max; identical to SEQ ID NO: 1820

SEQ ID NO: 18767 - DNA, 1341 bp, Glycine max; identical to SEQ ID NO: 2259
  CDS (1)..(1341)

SEQ ID NO: 18768 - protein, 446 aa, Glycine max; identical to SEQ ID NO: 2260

SEQ ID NO: 18769 - DNA, 1323 bp, Glycine max; identical to SEQ ID NO: 2261
  CDS (1)..(1323)

SEQ ID NO: 18770 - protein, 440 aa, Glycine max; identical to SEQ ID NO: 2262

SEQ ID NO: 18771 - DNA, 1326 bp, Glycine max; identical to SEQ ID NO: 2265
  CDS (1)..(1326)

SEQ ID NO: 18772 - protein, 441 aa, Glycine max; identical to SEQ ID NO: 2266

SEQ ID NO: 18773 - DNA, 1341 bp, Glycine max; identical to SEQ ID NO: 2267
  CDS (1)..(1341)

SEQ ID NO: 18774 - protein, 446 aa, Glycine max; identical to SEQ ID NO: 2268

SEQ ID NO: 18775 - DNA, 1389 bp, Glycine max; identical to SEQ ID NO: 2269
  CDS (1)..(1389)

SEQ ID NO: 18776 - protein, 462 aa, Glycine max; identical to SEQ ID NO: 2270

SEQ ID NO: 18777 - DNA, 1350 bp, Glycine max; identical to SEQ ID NO: 2271
  CDS (1)..(1350)

SEQ ID NO: 18778 - protein, 449 aa, Glycine max; identical to SEQ ID NO: 2272

SEQ ID NO: 18779 - DNA, 1362 bp, Glycine max; identical to SEQ ID NO: 2273
  CDS (1)..(1362)

SEQ ID NO: 18780 - protein, 453 aa, Glycine max; identical to SEQ ID NO: 2274

SEQ ID NO: 18781 - DNA, 1335 bp, Glycine max; identical to SEQ ID NO: 2275
  CDS (1)..(1335)

SEQ ID NO: 18782 - protein, 444 aa, Glycine max; identical to SEQ ID NO: 2276

SEQ ID NO: 18783 - DNA, 1083 bp, Glycine max
  CDS (1)..(1083)
atggatcgggcggcgttgacggttggaccgggcatggacatgccgatcatgcacgacagcgaccgttacgatctggtacgcgacatcgggtccggaaatttcggcgtggcgaggctgatgcaggataaacaaaccaaggaactggtcgccgtcaagtacatcgaaaggggtgataagattgatgaaaatgtaaagagggaaatcattaatcacaggtctctgaggcatcctaacattgttagatttaaagaggtaattttaacacctactcatcttgctattgtaatggaatatgcatctgggggagagctctttgagaaaatctgcaatgctgggcgttttaccgaggatgaggctcgattcttctttcagcaactcatatctggggtcagctattgccatgctatgcaagtatgtcatcgggacttgaagcttgaaaacactttgctggatggaagcccggcacctcgtttaaagatatgcgattttgggtactccaagtcttcagtgcttcattcacaaccaaagtcaactgtgggaactcctgcatatattgctccagaagtattgctgaaacaagagtatgatggcaagcttgcagatgtctggtcatgtggagtaaccttatatgtgatgctagtgggagcatatccttttgaggatcctaatgaaccaaaggactttcggaagacaattcagagagttcttagtgtccagtattccattccggacggtgttcaaatatctccagagtgtcgccaccttatttcaaggatctttgtttttgacccggcagagagaatcaccatgtctgaaatctggaaccatgaatggtttctgaagaatctcccggcagacctgatggacgagaagataatgggcaatcaatttgaagagccagaccaacccatgcagagcatcgatacgatcatgcagataatttcagaagctaccgtaccagcagttgggacctattcttttgaccagtttatggaggaacaaatttatgacttggaatctgaatctgatgctgaatctgatcttgatatagatagcagtggggagatagtgtatgccatatag

SEQ ID NO: 18784 - protein, 360 aa, Glycine max
MDRAALTVGPGMDMPIMHDSDRYDLVRDIGSGNFGVARLMQDKQTKELVAVKYIERGDKIDENVKREIINHRSLRHPNIVRFKEVILTPTHLAIVMEYASGGELFEKICNAGRFTEDEARFFFQQLISGVSYCHAMQVCHRDLKLENTLLDGSPAPRLKICDFGYSKSSVLHSQPKSTVGTPAYIAPEVLLKQEYDGKLADVWSCGVTLYVMLVGAYPFEDPNEPKDFRKTIQRVLSVQYSIPDGVQISPECRHLISRIFVFDPAERITMSEIWNHEWFLKNLPADLMDEKIMGNQFEEPDQPMQSIDTIMQIISEATVPAVGTYSFDQFMEEQIYDLESESDAESDLDIDSSGEIVYAI

SEQ ID NO: 18785 - DNA, 1479 bp, Glycine max
  CDS (1)..(1479)
atggaccggcgatcccatcccacgggcaccgtcagcacccggaacatcctcttcaacaagtacgagattggaaaattgctgggacagggcaacttcgccaaggtgtaccacggcagaaacctcagcacaaacgagagcgtggccatcaaaaagtacgagattggaaaattgctgggacagggcaacttcgccaaggtgtaccacggcagaaacctcagcacaaacgagagcgtggccatcaaagtcataaaaaaggaaaggctccagaaagagaggctcgtgaagcagatcaaacgcgaggtctccgtcatgcgcctggtgcgtcacccccacatcgtcgaattaaaagaggtcatggccaacaaagccaaaatcttcatggttgtcgaatacgtcaagggaggggaactcttcgccaaggtagcaaaagggaagatgaaggaagatgtcgccagaaagtactttcagcaactcatcagcgccgtcgatttctgccacagccgcgacgtcacccaccgcgatctcaagccggagaatctgctcctcgacgagaacgaagaccttaaagtctccgactttggcctgtcggcgctaccggaccagcgcagatccgacgggatgctcctcacgccgtgcggcacgccggcctacgtggcgccggaggttctcaagaagaagggctacgatgggtcgaaggctgatatatggtcctgcggggtcatcctctttgctcttctttctggctatttgccctttcaaggtgaaaatgtgatgagaatttacagcaagtctttcaaagccgattatgcattccccgaatggatttcccctgcggccaaaaacttgatctccaatttactcgttgtggacccgcaaaagaggtattccattccagacatcatgaaggacccttggtttcaaattggcttcttgaggcccattgcgttttccatgaaggagtctgcgcttgaagataacattgatttcagcggggatgatgttcctagtcctggtagtgatgatggtaatagcagcagcaacaacgaggatggggagttgacgggggctaagcctgctcgtccgtcttacaacgcttttgagataatctcgtccttgtcgcatgggttcgatctgaggaatttgtttgagacgaggaagcggtcgccgtcaatgttcatttccaagttttcggcttcggcggtgatggcgaagctggagggggtggccaagaagctgaactttagggtgacggggaagaaggagttcatggtgaggatgcagggggcgacggaagggaggaaggggaagctggccatgacggtggaggtattcgaggtggcgccggaggtcgcggtggtcgagttctccaagtccgccggagacacgcttgaataccttaatttctgtgaggaccaagtcagaccttcgctcagggatattgtgtggagttggcaaggggacgctaattgccaccagtaa

SEQ ID NO: 18786 - protein, 492 aa, Glycine max
MDRRSHPTGTVSTRNILFNKYEIGKLLGQGNFAKVYHGRNLSTNESVAIKKYEIGKLLGQGNFAKVYHGRNLSTNESVAIKVIKKERLQKERLVKQIKREVSVMRLVRHPHIVELKEVMANKAKIFMVVEYVKGGELFAKVAKGKMKEDVARKYFQQLISAVDFCHSRDVTHRDLKPENLLLDENEDLKVSDFGLSALPDQRRSDGMLLTPCGTPAYVAPEVLKKKGYDGSKADIWSCGVILFALLSGYLPFQGENVMRIYSKSFKADYAFPEWISPAAKNLISNLLVVDPQKRYSIPDIMKDPWFQIGFLRPIAFSMKESALEDNIDFSGDDVPSPGSDDGNSSSNNEDGELTGAKPARPSYNAFEIISSLSHGFDLRNLFETRKRSPSMFISKFSASAVMAKLEGVAKKLNFRVTGKKEFMVRMQGATEGRKGKLAMTVEVFEVAPEVAVVEFSKSAGDTLEYLNFCEDQVRPSLRDIVWSWQGDANCHQ

SEQ ID NO: 18787 - DNA, 1383 bp, Glycine max; identical to SEQ ID NO: 2277
  CDS (1)..(1383)

SEQ ID NO: 18788 - protein, 460 aa, Glycine max; identical to SEQ ID NO: 2278

SEQ ID NO: 18789 - DNA, 1344 bp, Glycine max; identical to SEQ ID NO: 2279
  CDS (1)..(1344)

SEQ ID NO: 18790 - protein, 447 aa, Glycine max; identical to SEQ ID NO: 2280

SEQ ID NO: 18791 - DNA, 1293 bp, Glycine max; identical to SEQ ID NO: 2281
  CDS (1)..(1293)

SEQ ID NO: 18792 - protein, 430 aa, Glycine max; identical to SEQ ID NO: 2282

SEQ ID NO: 18793 - DNA, 1332 bp, Glycine max; identical to SEQ ID NO: 2283
  CDS (1)..(1332)

SEQ ID NO: 18794 - protein, 443 aa, Glycine max; identical to SEQ ID NO: 2284

SEQ ID NO: 18795 - DNA, 1386 bp, Glycine max; identical to SEQ ID NO: 2285
  CDS (1)..(1386)

SEQ ID NO: 18796 - protein, 461 aa, Glycine max; identical to SEQ ID NO: 2286

SEQ ID NO: 18797 - DNA, 1083 bp, Glycine max
  CDS (1)..(1083)
atggatcgggcggcgttgacggtcggaccgggcatggacatgccgataatgcacgacagcgaccgttacgatctggtccgcgacatcgggtccggaaatttcggcgtggcgaggctgatgcaggataaacaaaccaaggaactcgtcgccgtcaagtacatcgaaaggggtgataagattgatgaaaatgtgaagagggaaattatcaatcacaggtctctgaggcatcctaacattgttaggtttaaagaggtaattttaacacctactcatcttgctattgtaatggaatatgcatctgggggagagctctttgagaaaatctgcaatgctgggcgttttaccgaggatgaggctcgattcttctttcagcaactcatatctggggtcagctattgccatgctatgcaagtatgtcatcgggacttgaagcttgaaaacactttgctggatggaagcccggcacctcgtttaaagatatgcgattttgggtactccaagtcttcagtgcttcattcacaaccaaagtcaactgtgggaactcctgcatatattgctccagaagtattgctgaaacaagagtatgatggcaagcttgcagatgtctggtcatgtggagtaaccttatatgtgatgctagtgggagcatatccttttgaggatcctaatgaaccaaaggactttcggaagacaattcagagagttcttagtgtccagtattccattccggacggagttcaaatatctccagagtgtcttcaccttatttcaaggatctttgtttttgacccggcagagagaatcaccatgtctgaaatctggaaccatgaatggtttctgaagaatctcccggcagacctgatggacgagaagataatgggcaatcaatttgaagagccagaccaacccatgcagagcatcgatacgatcatgcagataatttcagaagctaccgtaccagcagttgggacctattcttttgaccagtttatggaggaacaaatttatgacttggaatctgaatctgatgctgaatctgatcttgatatagatagcagtggggagatagtgtatgccatatag

SEQ ID NO: 18798 - protein, 360 aa, Glycine max
MDRAALTVGPGMDMPIMHDSDRYDLVRDIGSGNFGVARLMQDKQTKELVAVKYIERGDKIDENVKREIINHRSLRHPNIVRFKEVILTPTHLAIVMEYASGGELFEKICNAGRFTEDEARFFFQQLISGVSYCHAMQVCHRDLKLENTLLDGSPAPRLKICDFGYSKSSVLHSQPKSTVGTPAYIAPEVLLKQEYDGKLADVWSCGVTLYVMLVGAYPFEDPNEPKDFRKTIQRVLSVQYSIPDGVQISPECLHLISRIFVFDPAERITMSEIWNHEWFLKNLPADLMDEKIMGNQFEEPDQPMQSIDTIMQIISEATVPAVGTYSFDQFMEEQIYDLESESDAESDLDIDSSGEIVYAI

SEQ ID NO: 18799 - DNA, 1479 bp, Glycine max
  CDS (1)..(1479)
atggaccggcgatcccatcccacgggcaccgtcagcacccggaacatcctcttcaacaagtacgagattggaaaattgctgggacagggcaacttcgccaaggtgtaccacggcagaaacctcagcacaaacgagagcgtggccatcaaaaagtacgagattggaaaattgctgggacagggcaacttcgccaaggtgtaccacggcagaaacctcagcacaaacgagagcgtggccatcaaagtcataaaaaaggaaaggctccagaaagagaggctcgtgaagcagatcaaacgcgaggtctccgtcatgcgcctggtgcgtcacccccacatcgtcgaattaaaagaggtcatggccaacaaagccaaaatcttcatggttgtcgaatacgtcaagggaggggaactcttcgccaaggtagcaaaagggaagatgaaggaagatgtcgccagaaagtactttcagcaactcatcagcgccgtcgatttctgccacagccgcgacgtcacccaccgcgatctcaagccggagaatctgctcctcgacgagaacgaagaccttaaagtctccgactttggcctgtcggcgctaccggaccagcgcagatccgacgggatgctcctcacgccgtgcggcacgccggcctacgtggcgccggaggttctcaagaagaagggctacgatgggtcgaaggctgatatatggtcctgcggggtcatcctctttgctcttctttctggctatttgccctttcaaggtgaaaatgtgatgagaatttacagcaagtctttcaaagccgattatgcattccccgaatggatttcccctgcggccaaaaacttgatctccaatttactcgttgtggacccgcaaaagaggtattccattccagacatcatgaaggacccttggtttcaaattggcttcttgaggcccattgcgttttccatgaaggagtctgcgcttgaagataacattgatttcagcggggatgatgttcctagtcctggtagtgatgatggtaatagcagcagcaacaacgaggatggggagttgacgggggctaagcctgctcgtccgtcttacaacgcttttgagataatctcgtccttgtcgcatgggttcgatctgaggaatttgtttgagacgaggaagcggtcgccgtcaatgttcatttccaagttttcggcttcggcggtgatggcgaagctggagggggtggccaagaagctgaactttagggtgacggggaagaaggagttcgtggtgaggatgcagggggcgacggaagggaggaaggggaagctggccatgacggtggaggtattcgaggtggcgccggaggtcgcggtggtcgagttctccaagtccgccggagacacgcttgaataccttaatttctgtgaggaccaagtcagaccttcgctcagggatattgtgtggagttggcaaggggacgctaattgccaccagtaa

SEQ ID NO: 18800 - protein, 492 aa, Glycine max
MDRRSHPTGTVSTRNILFNKYEIGKLLGQGNFAKVYHGRNLSTNESVAIKKYEIGKLLGQGNFAKVYHGRNLSTNESVAIKVIKKERLQKERLVKQIKREVSVMRLVRHPHIVELKEVMANKAKIFMVVEYVKGGELFAKVAKGKMKEDVARKYFQQLISAVDFCHSRDVTHRDLKPENLLLDENEDLKVSDFGLSALPDQRRSDGMLLTPCGTPAYVAPEVLKKKGYDGSKADIWSCGVILFALLSGYLPFQGENVMRIYSKSFKADYAFPEWISPAAKNLISNLLVVDPQKRYSIPDIMKDPWFQIGFLRPIAFSMKESALEDNIDFSGDDVPSPGSDDGNSSSNNEDGELTGAKPARPSYNAFEIISSLSHGFDLRNLFETRKRSPSMFISKFSASAVMAKLEGVAKKLNFRVTGKKEFVVRMQGATEGRKGKLAMTVEVFEVAPEVAVVEFSKSAGDTLEYLNFCEDQVRPSLRDIVWSWQGDANCHQ

SEQ ID NO: 18801 - DNA, 1344 bp, Oryza sativa; identical to SEQ ID NO: 2289
  CDS (1)..(1344)

SEQ ID NO: 18802 - protein, 447 aa, Oryza sativa; identical to SEQ ID NO: 2290

SEQ ID NO: 18803 - DNA, 1371 bp, Oryza sativa; identical to SEQ ID NO: 2291
  CDS (1)..(1371)

SEQ ID NO: 18804 - protein, 456 aa, Oryza sativa; identical to SEQ ID NO: 2292

SEQ ID NO: 18805 - DNA, 1341 bp, Zea mays; identical to SEQ ID NO: 2293
  CDS (1)..(1341)

SEQ ID NO: 18806 - protein, 446 aa, Zea mays; identical to SEQ ID NO: 2294

SEQ ID NO: 18807 - DNA, 1323 bp, Zea mays; identical to SEQ ID NO: 2295
  CDS (1)..(1323)

SEQ ID NO: 18808 - protein, 440 aa, Zea mays; identical to SEQ ID NO: 2296

SEQ ID NO: 18809 - DNA, 1356 bp, Zea mays
  CDS (1)..(1356)
atggtgggcggtggcggcggcgggccgctgcggcgggtgggcaagtacgaggtgggacgcaccatcggggaaggcaccttcgccaaggtcaagttcgcgcagaacaccgagaccggggagagcgtcgccatgaaggtgctcgaccgctcctccatcctcaagaacaagatggccgaacagattaagagagaaatatccataatgaagcttgtcaggcatcccaatgtcgttaggctacacgaggttttggcaagccggaagaagatatttataattctggagttcatcactggcggcgagctattcgataaaattattcgtcatgggagactcagtgaagcagatgcccgcagatactttcagcagcttattgatggtgttgatttttgtcacaagaaaggagtctaccatcgagacttaaagcctgaaaatctcctccttgattcccaaggcaatcttaaaatttcagactttggactgagtgcatggcctgctcagggatctttccttctacgtacaacctgtgggactccgaactatgttgccccagaggttctcagtcataagggatataatggcgcacttgctgatacatggtcatgtggagtaattttatatgtattgttagcaggttatcttccatttgatgaagtggacctgactaccctttatggaaagattgagagtgcagaatattcattcccagcctggttttcaggtggtgcaaaatcactgattcgtagaattcttgacccaaatccagagacacgaatcaggatagaagagatcagaagcgatgaatggtttcagaaaaattatgaacctatcaaagaaatagaaaatgaggaagtcaatctcgatgatgtcaatgcagcttttgatgatcctgaggacgataatgaggatgctttcgaagatgaaacaggtcctctaacacttaatgcattcgacctaatcattctttcgcaaggattgaatcttgcagcgctctttgaccgcagacaggactgtgacaagcttcaaaatagattcttatcacgcaatccagcaaaggttatcttgtcaagcatggaggttgttgcgcaatcaatgggatttaagacacacattcgcaattataagatgagggtggaaggtctaaatgccgacaagactagtcatctctcagttatggttgaagttttcgaagttgctccatcaatcttcatggtagaactacaaagagcagcaggagatacttcagagtataacacgttcgtaaataactactgcggcaaattagatgatatcatctggaaatttccaactgagaagggaaaatcaaggataccccggttatcaaagtctcattcataa

SEQ ID NO: 18810 - protein, 451 aa, Zea mays; identical to SEQ ID NO: 2332

SEQ ID NO: 18811 - DNA, 1335 bp, Glycine max; identical to SEQ ID NO: 2299
  CDS (1)..(1335)

SEQ ID NO: 18812 - protein, 444 aa, Glycine max; identical to SEQ ID NO: 2300

SEQ ID NO: 18813 - DNA, 1332 bp, Triticum aestivum; identical to SEQ ID NO: 2301
  CDS (1)..(1332)

SEQ ID NO: 18814 - protein, 443 aa, Triticum aestivum; identical to SEQ ID NO: 2302

SEQ ID NO: 18815 - DNA, 1557 bp, Zea mays
  CDS (1)..(1557)
atggccgccatcacgccgccgacgcagtcggagccgtcgccgcagacggggcgcccggcctcgtctgccgccgccgcggccaagcgtggagggggcggggctggtgccgccggcgggccgctgatggggaagtacgagctggggcgcctcctggggcacggcaccttcgcgaaggtgtaccacgcgcggcacgtcgacacgggggacaacgttgccatcaaggtgctcgacaaggagaaggccgtgaagagcgggctcgtcccgcacatcaagcgcgagatcgctgtgctacgccgcgtgcgccacccgaacatcgtgcacctgttcgaggttatggccacaaagactaagatctacttcgtcatggagctcgtccgcggcggcgagctcttctcccgcgtctccaagggccgactcagggaggacaccgcgcgccgctacttccagcagctcgtctccgccgtggggttctgccacgcccgcggcgtcttccaccgcgacctgaagcccgagaatctactcgtcgacgagcaggggaacctcaaggtatcggattttgggctctccgccgtcgccgagcagttccgtcccgacggcctgctccacaccttctgcggcacgccggcctatgtggcccccgaagtgctcggccgccgcgggtacgacggcgccaaggcagacgtgtggtcgtgcggtgtcatcctctttgtgctcatggccggatatctccctttccatgacaaaaacatcatggccatgtacaagaagatttacaagggcgagttccgctgtgcgaggtggttctccaaagaccttaccagcttgctgatgcgcattcttcacactaatcccaacactcggatcactttgccggagatcatggagtcccgctggttcaagaaaggattcaagcctgtcaagttctatatcgaggatgaccagctgcataacgttatagatgacgaagatggcctgttagatatgggacctgctggtcctgttcctccaccattgccacctccaccgccacctctacctccaccaaaggttgatggtgatgaatcagggtcggactcagactcgtcgatctcatcctgccctgcttcaatgttatctgatgagagccaaaggccccgtggctctctaccacgtccagcaagtcttaatgcctttgatatcatatcattttcaaggggatttaacttatcagggttatttgaggagaaaggggatgaagtgaggttcatctcggctgagcccatgtcagatatcataaccaaattggaggacatagcgaagctgaagagcttcaagttgcggaggaaggactggcgcatctgcctggagggtacaagggaaggagttaaggggccattaacaattggcgcggagatatttgaactcacacctccccttgtaatggtggaggtaaaaaagaaggcaggggataatgaagagtacgagaacttctgtgacaaggaattgaagccagggatgcagcaccttgtccaccatatggtccgagctccaagtatgctgcttactgatgccaagtag

SEQ ID NO: 18816 - protein, 518 aa, Zea mays; identical to SEQ ID NO: 2334

SEQ ID NO: 18817 - DNA, 1293 bp, Zea mays; identical to SEQ ID NO: 2303
  CDS (1)..(1293)

SEQ ID NO: 18818 - protein, 430 aa, Zea mays; identical to SEQ ID NO: 2304

SEQ ID NO: 18819 - DNA, 1347 bp, Zea mays; identical to SEQ ID NO: 2305
  CDS (1)..(1347)

SEQ ID NO: 18820 - protein, 448 aa, Zea mays; identical to SEQ ID NO: 2306

SEQ ID NO: 18821 - DNA, 1332 bp, Zea mays; identical to SEQ ID NO: 2309
  CDS (1)..(1332)

SEQ ID NO: 18822 - protein, 443 aa, Zea mays; identical to SEQ ID NO: 2310

SEQ ID NO: 18823 - DNA, 1362 bp, Zea mays; identical to SEQ ID NO: 2311
  CDS (1)..(1362)

SEQ ID NO: 18824 - protein, 453 aa, Zea mays; identical to SEQ ID NO: 2312

SEQ ID NO: 18825 - DNA, 1392 bp, Zea mays; identical to SEQ ID NO: 2313
  CDS (1)..(1392)

SEQ ID NO: 18826 - protein, 463 aa, Zea mays; identical to SEQ ID NO: 2314

SEQ ID NO: 18827 - DNA, 1317 bp, Zea mays; identical to SEQ ID NO: 2315
  CDS (1)..(1317)

SEQ ID NO: 18828 - protein, 438 aa, Zea mays; identical to SEQ ID NO: 2316

SEQ ID NO: 18829 - DNA, 1455 bp, Zea mays; identical to SEQ ID NO: 2317
  CDS (1)..(1455)

SEQ ID NO: 18830 - protein, 484 aa, Zea mays; identical to SEQ ID NO: 2318

SEQ ID NO: 18831 - DNA, 1356 bp, Zea mays; identical to SEQ ID NO: 2319
  CDS (1)..(1356)

SEQ ID NO: 18832 - protein, 451 aa, Zea mays; identical to SEQ ID NO: 2320

SEQ ID NO: 18833 - DNA, 1350 bp, Zea mays; identical to SEQ ID NO: 2321
  CDS (1)..(1350)

SEQ ID NO: 18834 - protein, 449 aa, Zea mays; identical to SEQ ID NO: 2322

SEQ ID NO: 18835 - DNA, 1290 bp, Zea mays; identical to SEQ ID NO: 2323
  CDS (1)..(1290)

SEQ ID NO: 18836 - protein, 429 aa, Zea mays; identical to SEQ ID NO: 2324

SEQ ID NO: 18837 - DNA, 1383 bp, Zea mays; identical to SEQ ID NO: 2325
  CDS (1)..(1383)

SEQ ID NO: 18838 - protein, 460 aa, Zea mays; identical to SEQ ID NO: 2326

SEQ ID NO: 18839 - DNA, 1380 bp, Zea mays; identical to SEQ ID NO: 2335
  CDS (1)..(1380)

SEQ ID NO: 18840 - protein, 459 aa, Zea mays; identical to SEQ ID NO: 2336

SEQ ID NO: 18841 - DNA, 1317 bp, Zea mays; identical to SEQ ID NO: 2337
  CDS (1)..(1317)

SEQ ID NO: 18842 - protein, 438 aa, Zea mays; identical to SEQ ID NO: 2338

SEQ ID NO: 18843 - DNA, 1332 bp, Zea mays; identical to SEQ ID NO: 2341
  CDS (1)..(1332)

SEQ ID NO: 18844 - protein, 443 aa, Zea mays; identical to SEQ ID NO: 2342

SEQ ID NO: 18845 - DNA, 1383 bp, Zea mays; identical to SEQ ID NO: 2343
  CDS (1)..(1383)

SEQ ID NO: 18846 - protein, 460 aa, Zea mays; identical to SEQ ID NO: 2344

SEQ ID NO: 18847 - DNA, 1356 bp, Zea mays
  CDS (1)..(1356)
atggcagagcataaagggaacgttctcttgcacaagtatgagatggggaaattgcttggccaaggcacctttgccaaggtttaccatgctcgtaacacggcgacttcggaaagtgtcgcgatcaaagtgattgataaggagaaggttatgaaggttggtctcattgatcaaatccagcgagaaatttctgtgatgaagcttgttaggcatccaaacatcgtacagctctatgaggtcatggccaccaaaaccaaaatatactttgtgctggaacatgttaaaggtggagagctgttcaacaagattcagcgaggaaggctcaaggaagacgcagcgaggaagtacttccagcagttgatctgtgcggtggacttctgccacagcaggggtgtctatcatcgagatttgaagccagaaaatcttttgctcgatgagaatagcaacctgaaggtatcagattttggtctaagcgcacttgctgaatgccatagacaagacggcctgctccacacgacttgtggcacgcctgcttatgttgccccagaggtgattaacagaaagggttatgatggtgcaaaggctgacatatggtcttgtggggtcatcctgtttgtgctattggctggttatcttccgttccatgataagaacttgatggacatgtataagaagattgagaaagctgacttcaaatgtccaagttggttttctaccgatgttcggaggcttttgcaaaggattcttgatcctaaccctagtagaaggatctcggtggaaaaaatcatggagaatccatggtttaggaagggtttaggtgcaaagctacttaggtacgatttacagaataagaatgcccctcatgtggacaagaaggcagattttgattcactgagcaccaacgtaacaactgagagcaagcaacatgaagaaaagaagcctaccaacatgaatgcatttgatataatatctctatcaactggcttggacctctctggtttatttgaagaatctaacaagaagagagaatccaaattcacatctaccaacacaagctcgacaatcatatcgaagatcgaagatattgcaaagaatttgcggttgaatttgacaaagaaggatggtggtttgttaaagatggaagcttcaaagcccggaaggaaaggggtaatgggtatcgatgccgaagtatttgaggttagccctaactttcatcttgtggagataaagaagacgaatggcgacactctagagtatcaaaaggtcctgaaccaagaaatgaggcccgcactcaaggaaatagtgtgggcttggcaaggtgagcaatcaaagcaaaagcaggaacaacagtcgtgttaa

SEQ ID NO: 18848 - protein, 451 aa, Zea mays; identical to SEQ ID NO: 2298

SEQ ID NO: 18849 - DNA, 1332 bp, Zea mays; identical to SEQ ID NO: 2347
  CDS (1)..(1332)

SEQ ID NO: 18850 - protein, 443 aa, Zea mays; identical to SEQ ID NO: 2348

SEQ ID NO: 18851 - DNA, 1395 bp, Zea mays; identical to SEQ ID NO: 2329
  CDS (1)..(1395)

SEQ ID NO: 18852 - protein, 464 aa, Zea mays; identical to SEQ ID NO: 2330

SEQ ID NO: 18853 - DNA, 1338 bp, Zea mays; identical to SEQ ID NO: 2349
  CDS (1)..(1338)

SEQ ID NO: 18854 - protein, 445 aa, Zea mays; identical to SEQ ID NO: 2350

SEQ ID NO: 18855 - DNA, 1344 bp, Zea mays; identical to SEQ ID NO: 2355
  CDS (1)..(1344)

SEQ ID NO: 18856 - protein, 447 aa, Zea mays; identical to SEQ ID NO: 2356

SEQ ID NO: 18857 - DNA, 1356 bp, Zea mays; identical to SEQ ID NO: 2357
  CDS (1)..(1356)

SEQ ID NO: 18858 - protein, 451 aa, Zea mays; identical to SEQ ID NO: 2358

SEQ ID NO: 18859 - DNA, 1512 bp, Zea mays; identical to SEQ ID NO: 2359
  CDS (1)..(1512)

SEQ ID NO: 18860 - protein, 503 aa, Zea mays; identical to SEQ ID NO: 2360

SEQ ID NO: 18861 - DNA, 20 bp, Artificial sequence
  primer
atggtgataaagggaatgcg

SEQ ID NO: 18862 - DNA, 24 bp, Artificial sequence
  primer
ctacgctaaaagctcctgtacttg

SEQ ID NO: 18863 - protein, 514 aa, Artificial sequence
  consensus sequence
  Variant (3)..(3): Xaa in position 3 is any amino acid
  Variant (5)..(7): Xaa in position 5 to 7 is any amino acid
  Variant (9)..(9): Xaa in position 9 is any amino acid
  Variant (11)..(11): Xaa in position 11 is any amino acid
  Variant (13)..(13): Xaa in position 13 is any amino acid
  Variant (16)..(19): Xaa in position 16 to 19 is any amino acid
  Variant (20)..(58): Xaa in position 20 to 58 is any or no amino acid
  Variant (60)..(60): Xaa in position 60 is any amino acid
  Variant (62)..(67): Xaa in position 62 to 67 is any amino acid
  Variant (68)..(103): Xaa in position 68 to 103 is any or no amino acid
  Variant (107)..(112): Xaa in position 107 to 112 is any amino acid
  Variant (113)..(114): Xaa in position 113 to 114 is any or no amino acid
  Variant (117)..(122): Xaa in position 117 to 122 is any amino acid
  Variant (125)..(128): Xaa in position 125 to 128 is any amino acid
  Variant (129)..(130): Xaa in position 129 to 130 is any or no amino acid
  Variant (132)..(135): Xaa in position 132 to 135 is any amino acid
  Variant (137)..(139): Xaa in position 137 to 139 is any amino acid
  Variant (140)..(140): Xaa in position 140 is any or no amino acid
  Variant (146)..(152): Xaa in position 146 to 152 is any amino acid
  Variant (153)..(178): Xaa in position 153 to 178 is any or no amino acid
  Variant (180)..(181): Xaa in position 180 to 181 is any amino acid
  Variant (184)..(185): Xaa in position 184 to 185 is any amino acid
  Variant (187)..(187): Xaa in position 187 is any amino acid
  Variant (190)..(192): Xaa in position 190 to 192 is any amino acid
  Variant (194)..(195): Xaa in position 194 to 195 is any amino acid
  Variant (198)..(199): Xaa in position 198 to 199 is any amino acid
  Variant (202)..(202): Xaa in position 202 is any amino acid
  Variant (211)..(211): Xaa in position 211 is any amino acid
  Variant (215)..(219): Xaa in position 215 to 219 is any amino acid
  Variant (220)..(224): Xaa in position 220 to 224 is any or no amino acid
  Variant (226)..(227): Xaa in position 226 to 227 is any amino acid
  Variant (233)..(240): Xaa in position 233 to 240 is any amino acid
  Variant (241)..(254): Xaa in position 241 to 254 is any or no amino acid
  Variant (256)..(256): Xaa in position 256 is any amino acid
  Variant (258)..(258): Xaa in position 258 is any amino acid
  Variant (261)..(261): Xaa in position 261 is any amino acid
  Variant (263)..(263): Xaa in position 263 is any amino acid
  Variant (265)..(265): Xaa in position 265 is any amino acid
  Variant (266)..(266): Xaa in position 266 is any or no amino acid
  Variant (271)..(273): Xaa in position 271 to 273 is any amino acid
  Variant (274)..(278): Xaa in position 274 to 278 is any or no amino acid
  Variant (280)..(280): Xaa in position 280 is any amino acid
  Variant (282)..(284): Xaa in position 282 to 284 is any amino acid
  Variant (286)..(286): Xaa in position 286 is any amino acid
  Variant (292)..(292): Xaa in position 292 is any amino acid
  Variant (294)..(294): Xaa in position 294 is any amino acid
  Variant (297)..(298): Xaa in position 297 to 298 is any amino acid
  Variant (300)..(300): Xaa in position 300 is any amino acid
  Variant (304)..(313): Xaa in position 304 to 313 is any amino acid
  Variant (314)..(319): Xaa in position 314 to 319 is any or no amino acid
  Variant (321)..(324): Xaa in position 321 to 324 is any amino acid
  Variant (325)..(327): Xaa in position 325 to 327 is any or no amino acid
  Variant (329)..(331): Xaa in position 329 to 331 is any amino acid
  Variant (332)..(337): Xaa in position 332 to 337 is any or no amino acid
  Variant (339)..(343): Xaa in position 339 to 343 is any amino acid
  Variant (345)..(348): Xaa in position 345 to 348 is any amino acid
  Variant (350)..(352): Xaa in position 350 to 352 is any amino acid
  Variant (354)..(355): Xaa in position 354 to 355 is any amino acid
  Variant (357)..(365): Xaa in position 357 to 365 is any amino acid
  Variant (366)..(367): Xaa in position 366 to 367 is any or no amino acid
  Variant (370)..(389): Xaa in position 370 to 389 is any amino acid
  Variant (390)..(496): Xaa in position 390 to 496 is any or no amino acid
  Variant (499)..(499): Xaa in position 499 is any amino acid
  Variant (500)..(500): Xaa in position 500 is any or no amino acid
  Variant (502)..(505): Xaa in position 502 to 505 is any amino acid
  Variant (506)..(509): Xaa in position 506 to 509 is any or no amino acid
  Variant (511)..(513): Xaa in position 511 to 513 is any amino acid
YEXGXXXGXGXFXKVXXXXXXXXXXXXXXXXXXXXXXXXXXXXXXXXXXXXXXXXXXXAXKXXXXXXXXXXXXXXXXXXXXXXXXXXXXXXXXXXXXXXXXXXREIXXXXXXXXHPXXXXXXEVXXXXXXIXXXXEXXXXGGELFXXXXXXXXXXXXXXXXXXXXXXXXXXXXXXXXXEXXARXXFXQLXXXVXXCHXXGVXHRDLKPENXLLDXXXXXXXXXXKXXDFGLSXXXXXXXXXXXXXXXXXXXXXXLXTXCGXPXYXXAPEVXXXXXXXXYXGXXXDXWSCGVXLXVLXXGXLPFXXXXXXXXXXXXXXXXIXXXXXXXPXXXXXXXXXSXXXXXLXXXXLXXXPXXRXXXXXXXXXXXWFXXXXXXXXXXXXXXXXXXXXXXXXXXXXXXXXXXXXXXXXXXXXXXXXXXXXXXXXXXXXXXXXXXXXXXXXXXXXXXXXXXXXXXXXXXXXXXXXXXXXXXXXXXXXXXXXXXXXXXXXXXXXXXXAFXXIXXXXXXXXLXXXF

SEQ ID NO: 18864 - protein, 30 aa, Artificial sequence
  protein pattern
  Variant (2)..(2): Xaa in position 2 is any amino acid
  Variant (4)..(4): Xaa in position 4 is Ile, Leu or Met
  Variant (5)..(5): Xaa in position 5 is Ile, Leu, Met or Val
  Variant (6)..(6): Xaa in position 6 is any amino acid
  Variant (7)..(7): Xaa in position 7 is Ala, Gly, Ser or Val
  Variant (8)..(8): Xaa in position 8 is Ile, Leu, Met or Val
  Variant (9)..(9): Xaa in position 9 is any amino acid
  Variant (10)..(10): Xaa in position 10 is Phe, His or Tyr
  Variant (11)..(11): Xaa in position 11 is any amino acid
  Variant (13)..(15): Xaa in position 13 to 15 is any amino acid
  Variant (16)..(16): Xaa in position 16 is Ile or Val
  Variant (17)..(17): Xaa in position 17 is any amino acid
  Variant (23)..(23): Xaa in position 23 is Leu or Pro
  Variant (26)..(26): Xaa in position 26 is any or no amino acid
  Variant (28)..(28): Xaa in position 28 is any amino acid
  Variant (29)..(29): Xaa in position 29 is any or no amino acid
FXQXXXXXXXXHXXXXXHRDLKXENXLXXD

SEQ ID NO: 18865 - protein, 20 aa, Artificial sequence
  protein pattern
  Variant (2)..(2): Xaa in position 2 is any amino acid
  Variant (4)..(4): Xaa in position 4 is Ala or Ser
  Variant (7)..(7): Xaa in position 7 is Ile or Val
  Variant (8)..(8): Xaa in position 8 is any amino acid
  Variant (10)..(10): Xaa in position 10 is Phe or Tyr
  Variant (12)..(12): Xaa in position 12 is any or no amino acid
  Variant (14)..(17): Xaa in position 14 to 17 is any amino acid
  Variant (18)..(18): Xaa in position 18 is any or no amino acid
DXWXCGXXLXVXLXXXXXPF

SEQ ID NO: 18866 - protein, 13 aa, Artificial sequence
  protein pattern
  Variant (2)..(2): Xaa in position 2 is any amino acid
  Variant (5)..(5): Xaa in position 5 is Ser or Thr
  Variant (7)..(7): Xaa in position 7 is Ala, Cys, Asn or Ser
  Variant (9)..(9): Xaa in position 9 is any amino acid
  Variant (13)..(13): Xaa in position 13 is Ile, Leu or Val
TXCGXPXYXAPEX

SEQ ID NO: 18867 - protein, 13 aa, Artificial sequence
  protein pattern
  Variant (3)..(3): Xaa in position 3 is any amino acid
  Variant (4)..(4): Xaa in position 4 is Ile or Val
  Variant (5)..(5): Xaa in position 5 is Ile, Leu or Val
  Variant (6)..(6): Xaa in position 6 is any amino acid
  Variant (7)..(7): Xaa in position 7 is Phe, Ile or Leu
  Variant (8)..(8): Xaa in position 8 is any amino acid
  Variant (11)..(12): Xaa in position 11 to 12 is any amino acid
  Variant (13)..(13): Xaa in position 13 is Gly, Asn, Ser or Thr
HPXXXXXXEVXXX

SEQ ID NO: 18868 - protein, 9 aa, Artificial sequence
  protein pattern
  Variant (2)..(2): Xaa in position 2 is Ile, Leu or Val
  Variant (3)..(3): Xaa in position 3 is Ala, Ser or Thr
  Variant (9)..(9): Xaa in position 9 is Ala, Asn, Thr or Val
KXXDFGLSX

SEQ ID NO: 18869 - DNA, 1656 bp, Arabidopsis thaliana; identical to SEQ ID NO: 4380
  CDS (1)..(1656)

SEQ ID NO: 18870 - protein, 551 aa, Arabidopsis thaliana; identical to SEQ ID NO: 4381

SEQ ID NO: 18871 - DNA, 2156 bp, Glycine max
  CDS (19)..(1659)
ggctcgagcccttcctcaatgggcaactgttgctctcaaggcaacgttgccgacggcccggctgacgactctgccgccgccaatgacaagggagaagctaaccaacaaggtagtaataaccatgcaaacgacaacaatgataattccacaaaccctaccactgccccaacgacgacatcaaagccaccacccacggtcaccccacccacttcaaaaccctcgaaaccggctgcaatgggcccggtcctcggccggccgatggaggacgtgagagccacgtatacaataggtaaagagctagggagaggccaatttggtgtcacacatttgtgcacaaacaaagccacggggcaacaatttgcatgcaaaacaattgcaaagaggaagcttgtgaacaaggaggacatagaggacgtgagaagagaggttcaaatcatgcaccatctctcgggtcaacctaacattgtggaacttaagggtgcatatgaggacaaacaatcggtgcatttggtcatggaactttgtgcgggtggtgagctttttgatcgtataattgctaagggacattacactgaacgtgccgcggcttcgttgttaagaaccataatgcaaattattcacactttccactccatgggtgtcattcatagagatcttaagcccgaaaatttcctcatgttgaataaggatgaaaattcacccgtcaaggctacggattttggtctatcagtttttttcaaagaaggagagacattcaaagacattgttggaagtgcatattacattgctcctgaggtcttgaagaggaaatatgggccagaagttgacatatggagtgttggtgtcatgctatacattcttctaagtggtgtccctccgttttgggcagaatccgaacatggtatattcaatgccatcttaagaggtcacattgattttacaagcgatccatggccttcaatatccaatgcagcaaaggatcttgtaaggaaaatgttgactacagaccccaaacaaagactgacatcacaagaagttctaaatcatccatggatcaaggaggatggcgaagcaccagataaaccacttgacaatgctgtactgaataggctgaaacaattcagagcaatgaaccaattcaagaaagtagctctaagggtcattgctggatgtctatcagaagaagaaatcatgggattgaaggaaatgttcaaggggatggacactgacaacagtggaaccattacaattgaagagctcaagcaagggcttgcaaagcaaggaacaaagcttacagagcaagaagttaagcaattaatggaagctgctgatgctgatggcaatggaaccattgattacgacgagttcatcaccgcaacaatgcacatgaacagaatgaacagagaagaacatctttacactgccttccaatactttgataaagataacagcgggtttattaccactgaagaactagaacaagccctccgtgagtataacatgcatgatggcagggacatcaaggaaatccttcaagaagttgatggagataatgatggacgcattaactacgatgagtttgcggcaatgatgagaaaaggaaacccagaagttatgacgaagaagaggcgtgattcattgccattgccattgccataatggagggactctaagggaaggaacttaaaatggtttcatcagtacaatggttttcttaggtggagaagcttatgggtgaatgaaagaatgatcatgggctgcatttcatcatagctttgttggttgcgaggggatacagattaggaacgggagaaaggtggaatcaaaaaccaagaaaagagggaaagggggagggggggtaagaagaacataaacaaatccttgagaaatgttaagatacactaggtggtttggttgattaacatttttttgcttttgctttttccttatatgtgaaaacgttgcaacatgacatgtattgatattgcggctcacataattaggaattaaaaaaagggtatttgtttatgtattatttccttttaaatactaggccttaatagtttgtgctaggtttaccataaaaaaaagtttgtgctaggtttcatatattttactgacttatatatatgatgatcatgctctcttgaaacttg

SEQ ID NO: 18872 - protein, 546 aa, Glycine max
MGNCCSQGNVADGPADDSAAANDKGEANQQGSNNHANDNNDNSTNPTTAPTTTSKPPPTVTPPTSKPSKPAAMGPVLGRPMEDVRATYTIGKELGRGQFGVTHLCTNKATGQQFACKTIAKRKLVNKEDIEDVRREVQIMHHLSGQPNIVELKGAYEDKQSVHLVMELCAGGELFDRIIAKGHYTERAAASLLRTIMQIIHTFHSMGVIHRDLKPENFLMLNKDENSPVKATDFGLSVFFKEGETFKDIVGSAYYIAPEVLKRKYGPEVDIWSVGVMLYILLSGVPPFWAESEHGIFNAILRGHIDFTSDPWPSISNAAKDLVRKMLTTDPKQRLTSQEVLNHPWIKEDGEAPDKPLDNAVLNRLKQFRAMNQFKKVALRVIAGCLSEEEIMGLKEMFKGMDTDNSGTITIEELKQGLAKQGTKLTEQEVKQLMEAADADGNGTIDYDEFITATMHMNRMNREEHLYTAFQYFDKDNSGFITTEELEQALREYNMHDGRDIKEILQEVDGDNDGRINYDEFAAMMRKGNPEVMTKKRRDSLPLPLP

SEQ ID NO: 18873 - DNA, 2206 bp, Zea mays
  CDS (309)..(1904)
  misc_feature (2196)..(2196): n is a, g, c or t
cccggtcgaccccgcgtccggttccggaccccgtgagtcgctgccacgatcgaggcagggcgccaattgcggtggccaccacttccaatccactccccgcgttcgcctcgccgagctgttcttgctctgtcctctctccaactccacgatttgttccacacccggttcccgagcctccgcagcgcttcttgctgaaaaagggaactccgagttctccagctctggatcggcagagagcggtggttccttttgcggactctgagtcgggctgcaggcttagagctggaaggaataatttgactagagaaatggggcagtgttgcagcagagctacggccccggactctggacggggaggtgccaatggttatggctattctaaccaggcaaagccggcgcaagcacctccgagttacaaccctcctcagcaggcggccgaggtgaggtacacaccatcggcgacgaactcttcggcagtcccacccgtggctgtgccgccgaagccaacggcggacacgattcttggcaagcagtacgaggacgtgcgctctgtctactccctcgggaaggagcttggccggggccagttcggggtgacatacctctgcacagagattgcctctggtaggcagtacgcctgcaagtccatctccaagcgcaagctcgtcagcaaggcagacagggaggacattcgaagggagatccagatcatgcagcacctgtctgggcagccaaacattgtcgagttccggggagcatacgaggacaagagcaatgtccatgtggtgatggagctctgcgcaggtggggagctcttcgatcgcatcattgcaaaggggcactacacagaacgtgcggctgctacaatctgcagagcagttgtgaatgttgtcaacatttgccacttcatgggtgtgatgcatcgtgatctgaaacccgagaacttcttgcttgcgaccaaggaggagaatgcaatgctcaaggccactgattttgggctttctgtcttcattgaagaaggaaagatgtacagggacattgttggaagtgcttactatgttgctcctgaagtccttaggcggagctatggaaaagagatagatgtttggagtgcaggtgttattttgtacattcttctcagtggcgtgcctccattttgggctgaaactgaaaaggggatatttgatgctattctgcatgaggagattgactttgaaagtcaaccttggccatcaatttctgagagtgctaaagacttggtgagaaagatgttgacacgagatccaaagaaaagactgacttcagcccaagttcttcaacatcagtggctcagagaaggtggggaggcatctgataagcctatcgacagtgctgttctttctagaatgaagcaattcagagcaatgaataagctgaaaaagatggccctaaaggttattgcttcaaaccttaacgaggaagagatcaaggggctaaagcaaatgttcatgaacatggacacagacaatagtggcacaatcacatacgaagaactcaaagcaggattagccaaacttggatcaaagctgtcagaagctgaagtaaagcagttgatggaggctgctgatgttgatgggaatggatctattgactatgtggagttcatcactgccacaatgcatagacacaagctcgaaagggacgagcatttgttcaaggcattccagtactttgacaaagataacagcggcttcatcacaagggatgaactggaatctgctttgattgagcatgagatgggcgacacgagtacaataaaggagatcatatcagaagttgacacagataatgatgggaggattaactatgaggagttttgtgcaatgatgagaggagggatgcagcagccaatgaggctcaagtagcctgttcccttaatagaaacggtgtaccactagttactgttcactttttttcttcatgtttggtacttggtagtcggataaagcttacaatgggtgttgcttttgtattgttgagagatgattgtctatacctttttttccctttttgctcgtgcttgttgcattgtagtatcttgaacgtcccttcctttttttaagtttgtttatgcaagtacatctaatacaaagtgcattttgaaaaaaaaaaaaaaaaaaaaaaaaaaaaaaaaaaaaaaaaaaaaaaaaaatagtnctagatcgca

SEQ ID NO: 18874 - protein, 531 aa, Zea mays; identical to SEQ ID NO: 2308

SEQ ID NO: 18875 - DNA, 2230 bp, Physcomitrella patens; identical to SEQ ID NO: 4356
  CDS (327)..(1976)

SEQ ID NO: 18876 - protein, 549 aa, Physcomitrella patens; identical to SEQ ID NO: 4357

SEQ ID NO: 18877 - DNA, 1650 bp, Oryza sativa
  CDS (1)..(1650)
atgggcgcccgcgcctctcgccaccgccaatcccccgaccaatcccaatcccaatccccatccccacaccacaagcaccaccaccaccaccaaaccacccgggcccccaagcccaagcccaagccccagccaccgccgccgcagcagccgcgatctcagcctccgccgccgccgcggcaccagccccagcaggcgccccagcaggcggcggcggaggatggggtggggcgggtgctggggcggcccatggaggacgtccgtgcgacctacaccttcgggcgggagctggggccggggcagttcggggtgacctacctcgccacccacaagcccaccggccgacgctacgcctgcaagtccatcgccgcccgcaagctcgcccgccccgacgacctcgacgacgtccgccgcgaggtccacatcatgcaccacctcaccggccaccgcaacatcgtcgagctgcgcggcgcctacgaggaccgccactccgtcaacctcgtcatggagctctgcgagggcggcgagctcttcgaccgcatcatcgccaggggccactactccgagcgcgccgccgccgccctctgcagggagatcgtctccgtcgtccacagctgccactccatgggggtcatgcacagggacctcaagcccgagaacttcctcttcctcaacaagcgcgaggactccccgctcaaagccaccgattttggcctctccgtcttcttcaagcccggtgagcagttcagagatcttgttggaagtgcatattatgtggctcctgaggtcctaaaacgactatatggagctgaggcagacatatggagtgctggagttatcctttacatccttctatcaggggttcctccattctgggcagaaaacgaggacggtatatttgatgctgttctgcaaggtcatatcgacttctcatctgaaccatggccttctatatctagtggtgcaaaagacttggtcaagcggatgcttcggcaggacccaaaggagcggttaactgctgctgaaattttgaaccacccatggattagagaggatggagaggccccagataaaccacttgatattacagtgatcagtagaatgaagcagttcagagcaatgaacaaacttaagaaggttgccttgaaggtcgttgcagagaacttgtcagaggaagagattgtgggtttaaaggaaatgttcaaatctttagatactgataacagtgggacgataactcttgaagaactaagagctggtctaccaaagcttggcactaaaatttcggaatcagaattaaggcagttgatggaagcggctgatgttgatggaaatgggtccattgattatgttgaatttatatcagcaacgatgcacatgaatagattagagaaggaagatcacatatataaagcatttgaatattttgacaaggaccacagcgggttcataacagtcgatgaattggaagaagctctgacaaagtacgacatgggtgatgaagcgacaattaaagaaataattgctgaagtggatacagaccatgataatcgaattgattacattgaatatcttgaaaacattggaggagatttggttttcaagtatgctgaatgttgctcagccatctctaagatcatggatgctggctaa

SEQ ID NO: 18878 - protein, 549 aa, Oryza sativa
MGARASRHRQSPDQSQSQSPSPHHKHHHHHQTTRAPKPKPKPQPPPPQQPRSQPPPPPRHQPQQAPQQAAAEDGVGRVLGRPMEDVRATYTFGRELGPGQFGVTYLATHKPTGRRYACKSIAARKLARPDDLDDVRREVHIMHHLTGHRNIVELRGAYEDRHSVNLVMELCEGGELFDRIIARGHYSERAAAALCREIVSVVHSCHSMGVMHRDLKPENFLFLNKREDSPLKATDFGLSVFFKPGEQFRDLVGSAYYVAPEVLKRLYGAEADIWSAGVILYILLSGVPPFWAENEDGIFDAVLQGHIDFSSEPWPSISSGAKDLVKRMLRQDPKERLTAAEILNHPWIREDGEAPDKPLDITVISRMKQFRAMNKLKKVALKVVAENLSEEEIVGLKEMFKSLDTDNSGTITLEELRAGLPKLGTKISESELRQLMEAADVDGNGSIDYVEFISATMHMNRLEKEDHIYKAFEYFDKDHSGFITVDELEEALTKYDMGDEATIKEIIAEVDTDHDNRIDYIEYLENIGGDLVFKYAECCSAISKIMDAG

SEQ ID NO: 18879 - DNA, 2142 bp, Oryza sativa (japonica cultivar-group); identical to SEQ ID NO: 4360
  CDS (1)..(2142)

SEQ ID NO: 18880 - protein, 713 aa, Oryza sativa (japonica cultivar-group); identical to SEQ ID NO: 4361

SEQ ID NO: 18881 - DNA, 1548 bp, Oryza sativa (japonica cultivar-group); identical to SEQ ID NO: 4700
  CDS (1)..(1548)

SEQ ID NO: 18882 - protein, 515 aa, Oryza sativa (japonica cultivar-group); identical to SEQ ID NO: 4701

SEQ ID NO: 18883 - DNA, 1650 bp, Oryza sativa (japonica cultivar-group); identical to SEQ ID NO: 4704
  CDS (1)..(1650)

SEQ ID NO: 18884 - protein, 549 aa, Oryza sativa (japonica cultivar-group); identical to SEQ ID NO: 4705

SEQ ID NO: 18885 - DNA, 1638 bp, Oryza sativa (japonica cultivar-group); identical to SEQ ID NO: 4706
  CDS (1)..(1638)

SEQ ID NO: 18886 - protein, 545 aa, Oryza sativa (japonica cultivar-group); identical to SEQ ID NO: 4707

SEQ ID NO: 18887 - DNA, 1794 bp, Oryza sativa (japonica cultivar-group); identical to SEQ ID NO: 4362
  CDS (1)..(1794)

SEQ ID NO: 18888 - protein, 597 aa, Oryza sativa (japonica cultivar-group); identical to SEQ ID NO: 4363

SEQ ID NO: 18889 - DNA, 1725 bp, Oryza sativa (japonica cultivar-group); identical to SEQ ID NO: 4714
  CDS (1)..(1725)

SEQ ID NO: 18890 - protein, 574 aa, Oryza sativa (japonica cultivar-group); identical to SEQ ID NO: 4715

SEQ ID NO: 18891 - DNA, 1800 bp, Oryza sativa (japonica cultivar-group); identical to SEQ ID NO: 4716
  CDS (1)..(1800)

SEQ ID NO: 18892 - protein, 599 aa, Oryza sativa (japonica cultivar-group); identical to SEQ ID NO: 4717

SEQ ID NO: 18893 - DNA, 1731 bp, Oryza sativa (japonica cultivar-group); identical to SEQ ID NO: 4718
  CDS (1)..(1731)

SEQ ID NO: 18894 - protein, 576 aa, Oryza sativa (japonica cultivar-group); identical to SEQ ID NO: 4719

SEQ ID NO: 18895 - DNA, 1617 bp, Oryza sativa (japonica cultivar-group); identical to SEQ ID NO: 4720
  CDS (1)..(1617)

SEQ ID NO: 18896 - protein, 538 aa, Oryza sativa (japonica cultivar-group); identical to SEQ ID NO: 4721

SEQ ID NO: 18897 - DNA, 1602 bp, Oryza sativa (japonica cultivar-group); identical to SEQ ID NO: 4722
  CDS (1)..(1602)

SEQ ID NO: 18898 - protein, 533 aa, Oryza sativa (japonica cultivar-group); identical to SEQ ID NO: 4723

SEQ ID NO: 18899 - DNA, 1644 bp, Oryza sativa (japonica cultivar-group); identical to SEQ ID NO: 4726
  CDS (1)..(1644)

SEQ ID NO: 18900 - protein, 547 aa, Oryza sativa (japonica cultivar-group); identical to SEQ ID NO: 4727

SEQ ID NO: 18901 - DNA, 1629 bp, Oryza sativa (japonica cultivar-group); identical to SEQ ID NO: 4730
  CDS (1)..(1629)

SEQ ID NO: 18902 - protein, 542 aa, Oryza sativa (japonica cultivar-group); identical to SEQ ID NO: 4731

SEQ ID NO: 18903 - DNA, 1707 bp, Oryza sativa (japonica cultivar-group); identical to SEQ ID NO: 4732
  CDS (1)..(1707)

SEQ ID NO: 18904 - protein, 568 aa, Oryza sativa (japonica cultivar-group); identical to SEQ ID NO: 4733

SEQ ID NO: 18905 - DNA, 1539 bp, Oryza sativa (japonica cultivar-group); identical to SEQ ID NO: 4366
  CDS (1)..(1539)

SEQ ID NO: 18906 - protein, 512 aa, Oryza sativa (japonica cultivar-group); identical to SEQ ID NO: 4367

SEQ ID NO: 18907 - DNA, 1653 bp, Oryza sativa (japonica cultivar-group); identical to SEQ ID NO: 4368
  CDS (1)..(1653)

SEQ ID NO: 18908 - protein, 550 aa, Oryza sativa (japonica cultivar-group); identical to SEQ ID NO: 4369

SEQ ID NO: 18909 - DNA, 1362 bp, Oryza sativa (japonica cultivar-group)
  CDS (1)..(1362)
atgggggacgaggtggggagaggccacttcggctacacctgcgccgcgaagatcaagaagggggcgcgcaagggggacgcggtcgccgtcaaggtcatccccaaggccaagatgacaacatccattgctatagaggatgtccgaagggaggtgaaaatattgaaagctttggcgggacacaagaacttggttcaattttatgatgcctatgaggacaatgacaatgtgtacatagtaatggagttgtgtgaaggaggagagcttctggatagaatactttccagaggtgggaagtactctgaggatgatgcaaaagcggttctggtgcaaatattaaatgtcgtttcattttgccacattcaaggagtggttcatcgggatctcaagccagagaattttctatttacttcaaaagatgagaactctcaacttaaggctattgattttggcttatcagattttgtaaaaccagatgagaggctaaatgatattgttggaagtgcttattatgttgctcctgaagttctgcacagatgctatagcacagaagctgatgtctggagtataggtgtaattgcatatattctcctttgtggcagtcgtccattttgggcacgcactgaatctggcatattccgttccgttctcaaagctgaccccagttataatgaggcaccttggccttctcttactctggaagcaatggattttgttaagcgcttgctttgcaaggatccacgtagaagaatgactgcagcacaggctttaagtcatccatggatcagaaattacaatgacattaagctgccactggacatccttatattccgacttatcaaagcttatattcgttcctcatcattgcgaaaagctgctctaagggctctatcgaagactttgactgttgatgagcttttctatctgaaaggacagttttctctgttggaaccagacagaaatggatgcatcactctagataatatcagaatggccttaacaagagaagccacttatgctatgaaggaatcacgagttcaggagattcttgtctcgttaagcgctcttcagtacagaagaatggactttcaagagttctgtgcagcagcagttagtgtgcaccagcttgaagcattagatagatgggagcaacatgcccgttccgcttatgatttctttgagaaggatggcaatcgagctatcgtaattgatgaactagcttctgaactgggtctcagcccttcagtgccattgcatgttgttctgcaagattggatcaggcacaccgacgggaaattgagtttccttggatttgtcaagttattgcatggcatgtccagcaggtccttgtcaaagatgagatag

SEQ ID NO: 18910 - protein, 453 aa, Oryza sativa (japonica cultivar-group)
MGDEVGRGHFGYTCAAKIKKGARKGDAVAVKVIPKAKMTTSIAIEDVRREVKILKALAGHKNLVQFYDAYEDNDNVYIVMELCEGGELLDRILSRGGKYSEDDAKAVLVQILNVVSFCHIQGVVHRDLKPENFLFTSKDENSQLKAIDFGLSDFVKPDERLNDIVGSAYYVAPEVLHRCYSTEADVWSIGVIAYILLCGSRPFWARTESGIFRSVLKADPSYNEAPWPSLTLEAMDFVKRLLCKDPRRRMTAAQALSHPWIRNYNDIKLPLDILIFRLIKAYIRSSSLRKAALRALSKTLTVDELFYLKGQFSLLEPDRNGCITLDNIRMALTREATYAMKESRVQEILVSLSALQYRRMDFQEFCAAAVSVHQLEALDRWEQHARSAYDFFEKDGNRAIVIDELASELGLSPSVPLHVVLQDWIRHTDGKLSFLGFVKLLHGMSSRSLSKMR

SEQ ID NO: 18911 - DNA, 1734 bp, Oryza sativa (japonica cultivar-group); identical to SEQ ID NO: 4736
  CDS (1)..(1734)

SEQ ID NO: 18912 - protein, 577 aa, Oryza sativa (japonica cultivar-group); identical to SEQ ID NO: 4737

SEQ ID NO: 18913 - DNA, 1692 bp, Oryza sativa (japonica cultivar-group); identical to SEQ ID NO: 4750
  CDS (1)..(1692)

SEQ ID NO: 18914 - protein, 563 aa, Oryza sativa (japonica cultivar-group); identical to SEQ ID NO: 4751

SEQ ID NO: 18915 - DNA, 1839 bp, Oryza sativa (japonica cultivar-group); identical to SEQ ID NO: 4752
  CDS (1)..(1839)

SEQ ID NO: 18916 - protein, 612 aa, Oryza sativa (japonica cultivar-group); identical to SEQ ID NO: 4753

SEQ ID NO: 18917 - DNA, 1488 bp, Arabidopsis thaliana; identical to SEQ ID NO: 4374
  CDS (1)..(1488)

SEQ ID NO: 18918 - protein, 495 aa, Arabidopsis thaliana; identical to SEQ ID NO: 4375

SEQ ID NO: 18919 - DNA, 1821 bp, Arabidopsis thaliana; identical to SEQ ID NO: 4376
  CDS (1)..(1821)

SEQ ID NO: 18920 - protein, 606 aa, Arabidopsis thaliana; identical to SEQ ID NO: 4377

SEQ ID NO: 18921 - DNA, 1566 bp, Arabidopsis thaliana; identical to SEQ ID NO: 1837
  CDS (1)..(1566)

SEQ ID NO: 18922 - protein, 521 aa, Arabidopsis thaliana; identical to SEQ ID NO: 1838

SEQ ID NO: 18923 - DNA, 1626 bp, Arabidopsis thaliana; identical to SEQ ID NO: 4382
  CDS (1)..(1626)

SEQ ID NO: 18924 - protein, 541 aa, Arabidopsis thaliana; identical to SEQ ID NO: 4383

SEQ ID NO: 18925 - DNA, 1716 bp, Arabidopsis thaliana; identical to SEQ ID NO: 4384
  CDS (1)..(1716)

SEQ ID NO: 18926 - protein, 571 aa, Arabidopsis thaliana; identical to SEQ ID NO: 4385

SEQ ID NO: 18927 - DNA, 1749 bp, Arabidopsis thaliana; identical to SEQ ID NO: 4386
  CDS (1)..(1749)

SEQ ID NO: 18928 - protein, 582 aa, Arabidopsis thaliana; identical to SEQ ID NO: 4387

SEQ ID NO: 18929 - DNA, 1563 bp, Arabidopsis thaliana
  CDS (1)..(1563)
atggggaatgtatgtgttcatatggtcaacaattgtgtggatacgaaatcgaattcatgggttcgtcccacagatctcatcatggatcatcccttgaagccacaactccaggacaagcctcctcagccaatgctaatgaacaaggatgatgataaaaccaagcttaatgacactcatggtgaccctaaattacttgaggggaaagagaaacctgcgcagaagcaaacgagtcagggacaaggaggaaggaagtgcagtgacgaagagtataagaagcgagcgattgcgtgtgctaacagtaaaagaaaggctcacaatgtgaggagactgatgagtgcagggctacaagcagagtcagtgttgaagaccaaaacagggcatttgaaggaatattataacttgggtagcaagttaggtcatggacagtttgggactacgtttgtgtgtgttgagaaaggaacaggggaggaatatgcatgcaagtcgattccgaagaggaagctagagaacgaagaagacgtggaggatgtgagaagagagattgagataatgaaacatctcttggggcaaccaaatgtgatctccatcaaaggagcttatgaggactcagtggctgttcacatggtgatggagctgtgtagaggaggtgagctgtttgataggatagtggagagagggcattactctgagagaaaagctgctcatttggctaaagtcatacttggtgtggttcagacttgtcattctttaggtgtgatgcacagagatcttaaacctgagaactttctctttgtcaacgatgacgaggattcgcctcttaaggctattgatttcgggttatctatgtttctcaagcctggagaaaactttacggatgtggttggaagtccctactacattgcgcctgaagttctgaacaagaattacggtccagaagcagatatatggagcgcaggtgtgatgatttacgtgttactgtctggttcagctccgttttggggagaaacggaagaagaaatcttcaatgaggttctggagggtgagcttgatttgacatcagatccttggccacaagtctctgaaagcgcaaaagatttgatcagaaagatgcttgaaagaaatcccatacaaagactcactgctcaacaagtattatgccatccatggattagggatgaaggaaatgcaccagatacaccacttgacacaactgtgttgagtcgcttgaagaagttttcagcaacagacaagcttaagaagatggctttaagggtgattgcagaaaggctttccgaagaagagattcacgagctcagagaaacattcaagactatagacagtggaaagagcgggcgagtaacttataaagaactcaaaaacggtcttgaaagatttaacacaaatcttgacaactctgacatcaatagtcttatgcaaataccaacggatgtgcacttggaagacacagtagactacaacgaattcatagaggcgattgtaagactgagacaaatacaagaagaggaagcaaatgatcgtttagaatcatcaacaaaagtgtaa

SEQ ID NO: 18930 - protein, 520 aa, Arabidopsis thaliana
MGNVCVHMVNNCVDTKSNSWVRPTDLIMDHPLKPQLQDKPPQPMLMNKDDDKTKLNDTHGDPKLLEGKEKPAQKQTSQGQGGRKCSDEEYKKRAIACANSKRKAHNVRRLMSAGLQAESVLKTKTGHLKEYYNLGSKLGHGQFGTTFVCVEKGTGEEYACKSIPKRKLENEEDVEDVRREIEIMKHLLGQPNVISIKGAYEDSVAVHMVMELCRGGELFDRIVERGHYSERKAAHLAKVILGVVQTCHSLGVMHRDLKPENFLFVNDDEDSPLKAIDFGLSMFLKPGENFTDVVGSPYYIAPEVLNKNYGPEADIWSAGVMIYVLLSGSAPFWGETEEEIFNEVLEGELDLTSDPWPQVSESAKDLIRKMLERNPIQRLTAQQVLCHPWIRDEGNAPDTPLDTTVLSRLKKFSATDKLKKMALRVIAERLSEEEIHELRETFKTIDSGKSGRVTYKELKNGLERFNTNLDNSDINSLMQIPTDVHLEDTVDYNEFIEAIVRLRQIQEEEANDRLESSTKV

SEQ ID NO: 18931 - DNA, 1752 bp, Arabidopsis thaliana; identical to SEQ ID NO: 4388
  CDS (1)..(1752)

SEQ ID NO: 18932 - protein, 583 aa, Arabidopsis thaliana; identical to SEQ ID NO: 4389

SEQ ID NO: 18933 - DNA, 1731 bp, Arabidopsis thaliana; identical to SEQ ID NO: 4390
  CDS (1)..(1731)

SEQ ID NO: 18934 - protein, 576 aa, Arabidopsis thaliana; identical to SEQ ID NO: 4391

SEQ ID NO: 18935 - DNA, 1593 bp, Arabidopsis thaliana; identical to SEQ ID NO: 4392
  CDS (1)..(1593)

SEQ ID NO: 18936 - protein, 530 aa, Arabidopsis thaliana; identical to SEQ ID NO: 4393

SEQ ID NO: 18937 - DNA, 1788 bp, Arabidopsis thaliana; identical to SEQ ID NO: 4394
  CDS (1)..(1788)

SEQ ID NO: 18938 - protein, 595 aa, Arabidopsis thaliana; identical to SEQ ID NO: 4395

SEQ ID NO: 18939 - DNA, 1941 bp, Arabidopsis thaliana; identical to SEQ ID NO: 4396
  CDS (1)..(1941)

SEQ ID NO: 18940 - protein, 646 aa, Arabidopsis thaliana; identical to SEQ ID NO: 4397

SEQ ID NO: 18941 - DNA, 1800 bp, Arabidopsis thaliana; identical to SEQ ID NO: 4398
  CDS (1)..(1800)

SEQ ID NO: 18942 - protein, 599 aa, Arabidopsis thaliana; identical to SEQ ID NO: 4399

SEQ ID NO: 18943 - DNA, 1626 bp, Arabidopsis thaliana; identical to SEQ ID NO: 4400
  CDS (1)..(1626)

SEQ ID NO: 18944 - protein, 541 aa, Arabidopsis thaliana; identical to SEQ ID NO: 4401

SEQ ID NO: 18945 - DNA, 1785 bp, Arabidopsis thaliana; identical to SEQ ID NO: 4402
  CDS (1)..(1785)

SEQ ID NO: 18946 - protein, 594 aa, Arabidopsis thaliana; identical to SEQ ID NO: 4403

SEQ ID NO: 18947 - DNA, 1806 bp, Arabidopsis thaliana; identical to SEQ ID NO: 4404
  CDS (1)..(1806)

SEQ ID NO: 18948 - protein, 601 aa, Arabidopsis thaliana; identical to SEQ ID NO: 4405

SEQ ID NO: 18949 - DNA, 1587 bp, Arabidopsis thaliana; identical to SEQ ID NO: 4406
  CDS (1)..(1587)

SEQ ID NO: 18950 - protein, 528 aa, Arabidopsis thaliana; identical to SEQ ID NO: 4407

SEQ ID NO: 18951 - DNA, 1734 bp, Arabidopsis thaliana; identical to SEQ ID NO: 4408
  CDS (1)..(1734)

SEQ ID NO: 18952 - protein, 577 aa, Arabidopsis thaliana; identical to SEQ ID NO: 4409

SEQ ID NO: 18953 - DNA, 1617 bp, Arabidopsis thaliana; identical to SEQ ID NO: 4410
  CDS (1)..(1617)

SEQ ID NO: 18954 - protein, 538 aa, Arabidopsis thaliana; identical to SEQ ID NO: 4411

SEQ ID NO: 18955 - DNA, 1458 bp, Arabidopsis thaliana; identical to SEQ ID NO: 4412
  CDS (1)..(1458)

SEQ ID NO: 18956 - protein, 485 aa, Arabidopsis thaliana; identical to SEQ ID NO: 4413

SEQ ID NO: 18957 - DNA, 1728 bp, Arabidopsis thaliana
  CDS (1)..(1728)
atgggtaattgctgcggaagtaaacccctaacagcttctgatatcgtctcggatcaaaagcaagagacgattcttgggaagccattggaagatatcaagaagcactatagcttcggtgacgaactaggcaaaggaaagagttacgcttgcaaatccatacctaagagaactctaagcagcgaagaagaaaaagaagctgtgaagacagagattcaaatcatggatcatgtttcaggacagcctaacatcgtacagatcaaaggttcctacgaagataataattctatacacattgtaatggaattgtgtggtggtggtgagttattcgacaagatcgatgctttggtcaagtctcatagctattactctgagaaagatgctgctggaatctttaggtctattgtgaatgctgtgaagatttgtcattctttggatgtcgttcatcgtgatctcaagcctgagaacttcttgttctctagtaaagatgagaatgctatgcttaaagctatcgatttcgggtgttctgtttacatcaaagaagggaaaacttttgagagagttgttggaagtaaatactacattgctcctgaagtattagagggaagctatgggaaagaaatcgacatttggagtgctggtgttattttatacatcctactgagcggcgtaccgccatttcaaactggaattgaatctataattgtgtctactctttgtattgtagatgctgagattaaagaatgcaggcttgattttgagagccaaccatggcctttgatatcttttaaagcgaagcaccttatcgggaagatgctcaccaaaaaaccgaaggaacgaatctctgctgcagatgttcttgaacatccatggatgaaaagcgaagctccagataagcctattgataatgttgtcttatcacgtatgaagcaattccgagcaatgaacaagcttaagaagcttgctcttaaggttattgcggagggtctatcggaagaggagatcaaaggtcttaaaaccatgtttgagaatatggatatggacaaaagcgggtcaatcacttatgaagaactcaaaatggggctgaatagacatggctctaaactctctgagactgaagttaagcaactcatggaagcagtgagtgctgatgttgatgggaatggaacaattgactacatagagtttatctcagcgacgatgcatagacaccgtttggaacgagatgaacatttatacaaagcattccaatactttgataaagacggaagcgggcacataacgaaggaggaagtggagatagcaatgaaagagcatggtatgggagatgaagctaatgccaaagatttgatttcagaattcgataaaaacaacgatggaaaaatagactatgaggagttttgtacgatgatgagaaatggcatcttgcaaccacaagggaaacttttaaaacggctctatatgaatcttgaagaactcaaaactgggctaactagacttgggtctagactctctgaaactgaaatcgacaaagcattccaacactttgataaagacaacagcgggcacataactagagatgagttggaaagtgcaatgaaagaatatggaatgggagatgaagctagcatcaaagaagttatatccgaagttgataccgacaatgtaagttgcactctccaacatatagccaacatctcaaacattaaacaggttcttgaaaccttgtaa

SEQ ID NO: 18958 - protein, 575 aa, Arabidopsis thaliana
MGNCCGSKPLTASDIVSDQKQETILGKPLEDIKKHYSFGDELGKGKSYACKSIPKRTLSSEEEKEAVKTEIQIMDHVSGQPNIVQIKGSYEDNNSIHIVMELCGGGELFDKIDALVKSHSYYSEKDAAGIFRSIVNAVKICHSLDVVHRDLKPENFLFSSKDENAMLKAIDFGCSVYIKEGKTFERVVGSKYYIAPEVLEGSYGKEIDIWSAGVILYILLSGVPPFQTGIESIIVSTLCIVDAEIKECRLDFESQPWPLISFKAKHLIGKMLTKKPKERISAADVLEHPWMKSEAPDKPIDNVVLSRMKQFRAMNKLKKLALKVIAEGLSEEEIKGLKTMFENMDMDKSGSITYEELKMGLNRHGSKLSETEVKQLMEAVSADVDGNGTIDYIEFISATMHRHRLERDEHLYKAFQYFDKDGSGHITKEEVEIAMKEHGMGDEANAKDLISEFDKNNDGKIDYEEFCTMMRNGILQPQGKLLKRLYMNLEELKTGLTRLGSRLSETEIDKAFQHFDKDNSGHITRDELESAMKEYGMGDEASIKEVISEVDTDNVSCTLQHIANISNIKQVLETL

SEQ ID NO: 18959 - DNA, 1596 bp, Arabidopsis thaliana; identical to SEQ ID NO: 4414
  CDS (1)..(1596)

SEQ ID NO: 18960 - protein, 531 aa, Arabidopsis thaliana; identical to SEQ ID NO: 4415

SEQ ID NO: 18961 - DNA, 1563 bp, Arabidopsis thaliana; identical to SEQ ID NO: 4416
  CDS (1)..(1563)

SEQ ID NO: 18962 - protein, 520 aa, Arabidopsis thaliana; identical to SEQ ID NO: 4417

SEQ ID NO: 18963 - DNA, 1506 bp, Arabidopsis thaliana; identical to SEQ ID NO: 4418
  CDS (1)..(1506)

SEQ ID NO: 18964 - protein, 501 aa, Arabidopsis thaliana; identical to SEQ ID NO: 4419

SEQ ID NO: 18965 - DNA, 1665 bp, Arabidopsis thaliana; identical to SEQ ID NO: 4420
  CDS (1)..(1665)

SEQ ID NO: 18966 - protein, 554 aa, Arabidopsis thaliana; identical to SEQ ID NO: 4421

SEQ ID NO: 18967 - DNA, 1590 bp, Arabidopsis thaliana; identical to SEQ ID NO: 4422
  CDS (1)..(1590)

SEQ ID NO: 18968 - protein, 529 aa, Arabidopsis thaliana; identical to SEQ ID NO: 4423

SEQ ID NO: 18969 - DNA, 1671 bp, Arabidopsis thaliana; identical to SEQ ID NO: 4348
  CDS (1)..(1671)

SEQ ID NO: 18970 - protein, 556 aa, Arabidopsis thaliana; identical to SEQ ID NO: 4349

SEQ ID NO: 18971 - DNA, 1605 bp, Arabidopsis thaliana; identical to SEQ ID NO: 4424
  CDS (1)..(1605)

SEQ ID NO: 18972 - protein, 534 aa, Arabidopsis thaliana; identical to SEQ ID NO: 4425

SEQ ID NO: 18973 - DNA, 1587 bp, Arabidopsis thaliana; identical to SEQ ID NO: 4426
  CDS (1)..(1587)

SEQ ID NO: 18974 - protein, 528 aa, Arabidopsis thaliana; identical to SEQ ID NO: 4427

SEQ ID NO: 18975 - DNA, 1572 bp, Arabidopsis thaliana; identical to SEQ ID NO: 4428
  CDS (1)..(1572)

SEQ ID NO: 18976 - protein, 523 aa, Arabidopsis thaliana; identical to SEQ ID NO: 4429

SEQ ID NO: 18977 - DNA, 1473 bp, Arabidopsis thaliana; identical to SEQ ID NO: 4430
  CDS (1)..(1473)

SEQ ID NO: 18978 - protein, 490 aa, Arabidopsis thaliana; identical to SEQ ID NO: 4431

SEQ ID NO: 18979 - DNA, 1785 bp, Arabidopsis thaliana; identical to SEQ ID NO: 4432
  CDS (1)..(1785)

SEQ ID NO: 18980 - protein, 594 aa, Arabidopsis thaliana; identical to SEQ ID NO: 4433

SEQ ID NO: 18981 - DNA, 1572 bp, Arabidopsis thaliana; identical to SEQ ID NO: 4434
  CDS (1)..(1572)

SEQ ID NO: 18982 - protein, 523 aa, Arabidopsis thaliana; identical to SEQ ID NO: 4435

SEQ ID NO: 18983 - DNA, 1638 bp, Arabidopsis thaliana; identical to SEQ ID NO: 4436
  CDS (1)..(1638)

SEQ ID NO: 18984 - protein, 545 aa, Arabidopsis thaliana; identical to SEQ ID NO: 4437

SEQ ID NO: 18985 - DNA, 1635 bp, Arabidopsis thaliana; identical to SEQ ID NO: 4438
  CDS (1)..(1635)

SEQ ID NO: 18986 - protein, 544 aa, Arabidopsis thaliana; identical to SEQ ID NO: 4439

SEQ ID NO: 18987 - DNA, 1608 bp, Arabidopsis thaliana; identical to SEQ ID NO: 4440
  CDS (1)..(1608)

SEQ ID NO: 18988 - protein, 535 aa, Arabidopsis thaliana; identical to SEQ ID NO: 4441

SEQ ID NO: 18989 - DNA, 1455 bp, Arabidopsis thaliana; identical to SEQ ID NO: 4442
  CDS (1)..(1455)

SEQ ID NO: 18990 - protein, 484 aa, Arabidopsis thaliana; identical to SEQ ID NO: 4443

SEQ ID NO: 18991 - DNA, 1602 bp, Arabidopsis thaliana; identical to SEQ ID NO: 4444
  CDS (1)..(1602)

SEQ ID NO: 18992 - protein, 533 aa, Arabidopsis thaliana; identical to SEQ ID NO: 4445

SEQ ID NO: 18993 - DNA, 1593 bp, Arabidopsis thaliana; identical to SEQ ID NO: 4446
  CDS (1)..(1593)

SEQ ID NO: 18994 - protein, 530 aa, Arabidopsis thaliana; identical to SEQ ID NO: 4447

SEQ ID NO: 18995 - DNA, 1686 bp, Arabidopsis thaliana; identical to SEQ ID NO: 4448
  CDS (1)..(1686)

SEQ ID NO: 18996 - protein, 561 aa, Arabidopsis thaliana; identical to SEQ ID NO: 4449

SEQ ID NO: 18997 - DNA, 1647 bp, Triticum aestivum; identical to SEQ ID NO: 4450
  CDS (1)..(1647)

SEQ ID NO: 18998 - protein, 548 aa, Triticum aestivum; identical to SEQ ID NO: 4451

SEQ ID NO: 18999 - DNA, 1635 bp, Medicago truncatula
  CDS (1)..(1617)
atggggtgtttgttaagtaaagacaaagattcagaaccagaacacaacaatggtggttatagatatggtgaacacaatcatagaaacaatcatgaacaagtcaacacatcaagaacagcaccaacaagttcttatcaacctcaaataccaaccaagccttcatcaatttctgctccaagtccaaaacctcttatcaagcaagacagtaacacaatcctaggaaaaggtttggaagatgtgaaacaattctacacactaggtaaagaattaggtagaggccaattcggagtaacgtttctatgcaccgagaattcaactggattgctttatgcttgcaagtcaatttccaagaggaaacttgtgagtaaatctgatagggaagatataaagagagagattcagatcatgcaacatttgagtggtcaaccaaatattgttgaatttaaaggagcttatgaggataggaattcagttcatgttgttatggaactttgtgctggtggtgaactttttgataggatcattgctaaaggacattatagtgaaaaagctgctgcttctatttgtagacagattgttaatgttgttaatatttgtcattttatgggagttatgcatagggatctgaaaccagagaatttcttgttggctagtaaagatgaaaatgcacttcttaaggctactgattttgggttggctgttttcattgaagaaggaaaggtgtatcgcgatatagtcggaagtgcttattatgttgctccagaagttcttcgtcgtagatgcgggaaagaaatagatatatggagtgcaggagttatactatatatcttacttagtggtgtccctccattttgggctgagactgaaaagggaatatttgatgcaatattggaaggtcatattgattttgaaagtgaaccgtggcctaaaatttcagacagcgccaaggatcttgttcgtaaaatgcttatacaggaaccgaagaaacgcattaccgctgcacaggttctagagcatccttggattaaagatggtaatgcttctgataagccaatagacagtgcagttctttcaagaatgaagcaattcagagctatgaataaactaaagaaacttgcattgaaggtcattgctgagaatatgtctgaagaagaaatccgaggtttgaaggcgatgtttacaaatatggacacagacaatagtggtacaatcacctatgaagaactaaaagcaggattacaaagacttggctcaaagctttcagaagctgaagttaagcaactcatggaagctgctgatgtagatggaaatggcacaattgattgcattgaattcatcactgctacaatgcatagacacaagttagaaagagatgaccatctttacaaggcattccaatattttgacaaagacagcagtgggtttattacaagagatgaactggaaacagccatgaaagaatatggtatgggagatgatgccacaatcaaggaaattatatctgaagttgatacaattatatctgaagtggacacagatcatgatggtagaatcaactatgaagaattctgtgcaatgatgagaagtggaaaccaacagcaagttaagctattctaaagtacttctgagaagtgc

SEQ ID NO: 19000 - protein, 538 aa, Medicago truncatula; identical to SEQ ID NO: 4453

SEQ ID NO: 19001 - DNA, 1605 bp, Oryza sativa subsp; identical to SEQ ID NO: 4454
  CDS (1)..(1605)

SEQ ID NO: 19002 - protein, 534 aa, Oryza sativa subsp; identical to SEQ ID NO: 4455

SEQ ID NO: 19003 - DNA, 1506 bp, Oryza sativa subsp
  CDS (1)..(1506)
atgggcaactgctgtcctggctctggggatgcggagcccgcctcctccgacgcctccaccggcaacggctcgtcctccttcaaggccggcgcgtcgccgtcgtcggcgcccgcgcagaacaagccgccggcgcccatcgggcccgtgctcggccgccccatggaggacgtccggagcatctacaccatcggcaaggagctcgggcgcgggcagttcggcgtcacctccctgtgcacccacaaggcgacggggcagaagttcgcgtgcaagaccatcgccaagcggaagctgtccaccaaggaggacgtggaggacgtgcggcgggaggtgcagatcatgtaccacctcgccgggcagcccaacgtggtggagctcaagggcgcctacgaggacaagcagtccgtccacctcgtcatggagctctgcgccggcggcgagctcttcgaccggatcatcgccaagggccactacaccgagcgcgccgccgcctcgctcctccgcaccatcgtcgagatcatccacacctgccactccctcggcgtcatccaccgcgacctcaagcccgagaacttcctcctcctcagcaaggacgaggacgcccctctcaaggccaccgacttcggcctctccgtgttcaaggacatcgtcggcagcgcgtactacatcgcgccggaggtgctgaagcggagctacggccccgaggcggacatctggagcgtcggcgtcatcctctacatcctcctctgcgaatcggagcatggcatcttcaattccatcctgagagggcaggtggacttcaccagtgacccatggccacgcatttcagctagcgccaaggaccttgtcaggaagatgctcaactccgaccccaagaagagaatttcagcctacgaagtcctcaatcacccgtggatcaaggaagatggagaagcacctgacacgccgcttgacaacgctgtcatgaacaggctcaagcagttcagggctatgaaccaattcaagaaagcagcgctaagggtcattgctggatgcttgtcggaggaagagatcagagggctgaaggagatgttcaagagcatggactctgacaacagcggcaccattaccgtcgatgagctgcgcaaagggctgtccaagcaagggaccaagctcacggaggccgaagtgcagcagctaatggaggctgccgacgcggacgggaacggaaccatcgattacgacgagttcatcacagcgacgatgcacatgaacaggatggacagagaggagcatctttacaccgcgtttcagtatttcgacaaggacaacagcggctgcatttcgaaggaggagctcgagcaagcgctgagggagaaaggtcttctcgatggcagagacatcaaagacatcatatcagaagtcgacgccgataacgatggaaggatagactacagcgagttcgcggcgatgatgcggaagggaaacccggaggccaatcccaagaagcgacgggacgttgtgatatag

SEQ ID NO: 19004 - protein, 501 aa, Oryza sativa subsp
MGNCCPGSGDAEPASSDASTGNGSSSFKAGASPSSAPAQNKPPAPIGPVLGRPMEDVRSIYTIGKELGRGQFGVTSLCTHKATGQKFACKTIAKRKLSTKEDVEDVRREVQIMYHLAGQPNVVELKGAYEDKQSVHLVMELCAGGELFDRIIAKGHYTERAAASLLRTIVEIIHTCHSLGVIHRDLKPENFLLLSKDEDAPLKATDFGLSVFKDIVGSAYYIAPEVLKRSYGPEADIWSVGVILYILLCESEHGIFNSILRGQVDFTSDPWPRISASAKDLVRKMLNSDPKKRISAYEVLNHPWIKEDGEAPDTPLDNAVMNRLKQFRAMNQFKKAALRVIAGCLSEEEIRGLKEMFKSMDSDNSGTITVDELRKGLSKQGTKLTEAEVQQLMEAADADGNGTIDYDEFITATMHMNRMDREEHLYTAFQYFDKDNSGCISKEELEQALREKGLLDGRDIKDIISEVDADNDGRIDYSEFAAMMRKGNPEANPKKRRDVVI

SEQ ID NO: 19005 - DNA, 1839 bp, Oryza sativa subsp
  CDS (1)..(1839)
atgggcaacgtctgcatcggcccgcgccgcaacttcgccaagaacggcctcctcggcatcctgcggccgcgccacgccgcgccgtcctccccgtcgcagcccaccaccacctcccgctccatccccgtcgtgctcccctccgccccctcctccaagccgccgccgcccacccagaccgccccgcccgtacccgtcgtcatctccgagccgccgccaccgcagccgcagcccgaaccgcagcccgcggcgccgtcgcagccgccgccaccgcaggagcagccttcggcgccaagggccgcgtcgttgaaaaccacccagcagcctccgccgccgcagcagcggcagcagtcgcgcgccaagaagccggcgcacatcaagcgcatctccagcgccggcctgcaggtggagtcggtgctccggcgaaagacggagaatctcaaggacaaatacagcctggggcgcaaactcggtcagggccagttcgggacgacgtacctgtgcgtcgacaaggcgaacggcggcgagtacgcgtgcaagtcgatcgccaagcggaagctactcaccgacgaggacgtggaggacgtccgccgcgagatccagatcatgcaccacctcgccggccaccccaacatcatctccatccgcggcgcctacgaggacgccgtggcggtgcacgtcgtcatggagctctgcgccggcggcgagctgttcgaccggatcgtgcgcaaggggcactacacggagcggcaggcggccgggctcgcccgcgtcatcgtcgccgtcgtcgagtcgtgccactcgctcggcgtcatgcaccgcgacctcaagcccgagaacttcctgttcgtcggcaacgaggaggacgcgccgctcaagaccatcgacttcggcctctccatgtttttccgcccaggcgaggtgttcaccgacgtggtggggagcccgtactacgtggcgccggaggtgctgaagaagagctacgggcaggaggccgacgtgtggagcgccggcgtcatcatctacatcctcctctgcggcgtgccgccgttctgggcagagacggagcaggggatattcgagcaggtgctgcacgggacgctggacttcgagtcggacccatggccgaacgtgtcggatggcgccaaggacctcctccgcaaggtgctcgtccgggaccccaagaagcggctcaccgcgcacgaagtcctatgccatccatggctgcagatgagcgggtcggcgccggacaagccgctggactcggcggtgctgtcgcggctgaggcagttctcggccatgaacaagctcaagaagatggcattgagagtgatcgcggagaacttgtcggaggaggagatcgccgggttgaaggagatgttcaagatgatggacacggacaacagcgggcagatcaactacgaggagctcaaggccgggttggagagagtgggtgccaacatgaaggagtctgaaatttatcagctcatgcaggctgctgatatcgacaatagtggcaccatagattatggagaattcatagctgccactctacacctcaacaaagttgaaagggaagatcatctatatgccgccttccaatacttcgacaaagatggcagtggatacatcacatctgatgagctccagcaagcctgcgatgagtttggtatcgaggatgttcgactcgaagacatgataggcgaagtagatcaggacaatgatgggcgtatagattacaacgagtttgtcgcgatgatgcagaaaacaacaacagggttcgggaagaaaggcggtcataattttagcggttttagggatgccttgaagtcacatagctga

SEQ ID NO: 19006 - protein, 612 aa, Oryza sativa subsp
MGNVCIGPRRNFAKNGLLGILRPRHAAPSSPSQPTTTSRSIPVVLPSAPSSKPPPPTQTAPPVPVVISEPPPPQPQPEPQPAAPSQPPPPQEQPSAPRAASLKTTQQPPPPQQRQQSRAKKPAHIKRISSAGLQVESVLRRKTENLKDKYSLGRKLGQGQFGTTYLCVDKANGGEYACKSIAKRKLLTDEDVEDVRREIQIMHHLAGHPNIISIRGAYEDAVAVHVVMELCAGGELFDRIVRKGHYTERQAAGLARVIVAVVESCHSLGVMHRDLKPENFLFVGNEEDAPLKTIDFGLSMFFRPGEVFTDVVGSPYYVAPEVLKKSYGQEADVWSAGVIIYILLCGVPPFWAETEQGIFEQVLHGTLDFESDPWPNVSDGAKDLLRKVLVRDPKKRLTAHEVLCHPWLQMSGSAPDKPLDSAVLSRLRQFSAMNKLKKMALRVIAENLSEEEIAGLKEMFKMMDTDNSGQINYEELKAGLERVGANMKESEIYQLMQAADIDNSGTIDYGEFIAATLHLNKVEREDHLYAAFQYFDKDGSGYITSDELQQACDEFGIEDVRLEDMIGEVDQDNDGRIDYNEFVAMMQKTTTGFGKKGGHNFSGFRDALKSHS

SEQ ID NO: 19007 - DNA, 2248 bp, Zea mays
  CDS (357)..(2021)
cggacggccaccagccgctgcgtgcgttcgctttcccccgaaacgtgacccgagacgagctgcagagagaaaggagaagccgccatgaagtagcagcagctgcctcctagtcgtccccgttaaatccctgctcgccaagccacgactacgagcaccagccgtccagccccggtttttctcctcccgcccccgttccccgtcccgactcccgacccaacccatatcagagattccttccgttggtggcgctggcgtccgcgctggcgttcccgtgagtcggcccgcgcgcgaaggcggccgtgaccgaccgtccggagcttcatgcgccaggggcggcggctccaccccgtcgtttgatgggcaacgcatgcggcggcgcccttagatccaagcaccagcacagcttcaagcacgccgcgtcgtcgcagcgccaccacgcctcctccgagtacagcgccagcgccgcggccgacgactcgcccaggaagccgccaccgccgcccgccaccacggacgcccacgcgccgccgccgccgcccgccaccgccatgaggcgcggcggggccggcgcgccgccggacctggggtccgtgctcggccaccccacccccaacctccgcgacctctacgcgctcggcaggaagctcgggcaggggcagttcggcaccaccttcctctgcaccgagctcgccacgggggtcgactacgcctgcaagtccatctccaagcgcaagctcatcaccagggaggacgtcgacgacgtgcgccgcgagatccagatcatgcaccacctctccggccacaccaacgtcgtcgccatcaagggcgcctacgaggaccagctctacgtccacatcgtcatggagctctgcgccgggggcgagctcttcgaccggatcatacagcgcggccactacagcgagcgcaaggccgccgagctcaccaggatcatcgtcggcgtcgtcgaggcctgccactccctcggtgtcatgcaccgggacctcaagcccgagaacttcctgctcgtcaacaaggacgacgacctctcgctcaaggccatcgatttcggactctctgtcttcttcaagcctggtcaagttttcaccgatgttgttggtagcccatattatgtagctccagaagttttgttgaaaaattatggaccagcagctgatgtatggacagctggtgtcattctttacattctactaagtggcgtgcctccgttttgggcagaaacacaacaaggaatatttgatgctgtattgaaaggtgtcattgattttgattctgatccgtggcctgtcatatctgatagtgcaaaagatcttataagacggatgctgaatcctcgctctgccgagcgcttaacagcacatgaagttctatgccatccatggattcgtgaccatggagtagctcctgaccgtccactggatccagctgtcttatctcgcattaagcaattctctgcaatgaataagttgaagaaaatggctttgcgagtaatagctgagagcctatcagaagaggaaattgcggggttgaaggaaatgttccagaccatggacactgacaacagtggcgcaattacctacgatgaactaaaagaaggattgagaaaatatggttccacactgaaggacactgagattcgtgatcttatggatgcagctgatatcgacaacaatggaacaattgactacattgaattcattgctgcaactttgcatctcaataagctggagcgcgaagaacatctcgtggcagccttttcatatttcgacaaagatggtagtggctatatcacagtggacgaactacagcaagcttgcaaagagcataacatgccggatgcttttcttgatgatgtcatcaacgaagctgatcaggataacgatggccgcattgactatggagagtttgttgccatgatgaccaagggcaatatgggagttggtcgacggacaatgagaaacagcttgaatatcagcatgagggacgcacctggtgcattctgagacttaacacgatgtacagcttgtggcctagccacttcctcctctgtcttgttttgctgccctacgaaaccttctgcaattttttttttcaagatgtttgtcaggtgtatgtgtggatgtgttttttttctggggattctgattcaactcttgtgattgattccatgaaatgcataacaagatgtccaaaaaaaaaaaaaaaaaaaaaaaaaaaaaaaaaaaaaaaa

SEQ ID NO: 19008 - protein, 554 aa, Zea mays; identical to SEQ ID NO: 4483

SEQ ID NO: 19009 - DNA, 1806 bp, Arabidopsis thaliana; identical to SEQ ID NO: 4484
  CDS (1)..(1806)

SEQ ID NO: 19010 - protein, 601 aa, Arabidopsis thaliana; identical to SEQ ID NO: 4485

SEQ ID NO: 19011 - DNA, 1479 bp, Zea mays; identical to SEQ ID NO: 4486
  CDS (1)..(1479)

SEQ ID NO: 19012 - protein, 492 aa, Zea mays; identical to SEQ ID NO: 4487

SEQ ID NO: 19013 - DNA, 1473 bp, Glycine max; identical to SEQ ID NO: 4488
  CDS (1)..(1473)

SEQ ID NO: 19014 - protein, 490 aa, Glycine max; identical to SEQ ID NO: 4489

SEQ ID NO: 19015 - DNA, 2436 bp, Glycine max
  CDS (489)..(2105)
  misc_feature (2330)..(2330): k is g or t
gaactccaccttatgtactactagcatttatccctttttttttttttatacattctttctctttcaccctctttcaaggctccacttttataattccttgtaatttcttcatcaaagtatcaaacttgtcttctctctctctccttttacttcctctgcatatatgatatattcttccaaaatcctcatctaagggttaattttgttccggacaagtttttattattattattattattttttaaatttcagaatgatttacttataggtttctgatccaaggtttaagatgttatagtttccttgaattctcatctgggttcaacctgtttgatgttttgactgaatcagtttgaaatagtggtgattatctgataccaaacataaaagattcagctctttttcttgtttctttgtcacaagacttggattttgagaatctggagacatgggttgtcgtgcaagtaaagagtcagacccgcaacacaatggttacagacatgctgggactggtggtgtgcacaaccaagaagactcatgaacctttggtcaaccaatcaagagcacctgcaaatcaaccttatcatttacatgaaaagcatgctgcatccactgctcagacagtgcctcaaaatatgccatggaagcctcctggtccagcccttagtcctaaacctgttgttggtgttaggcaagacacaattcttgggaagcagtttgaggatgtgaagcagttccacacacttgggaaggagttgggtagagggcaatttggtgtgacatatctttgcactgagaattcgaccggattgcagtatgcctgcaagtccatttccaagaggaaacttgcgagcaaatctgataaggaggacataaagagggagattcagattatgcagcatttgagtggtcaacccaacattgttgagttcaaaggggcttatgaggataggagctcagttcatgttgtgatggagctgtgtgcaggtggggaactttttgataggattattgccaaggggcattacagtgagaaggctgctgcttcaatttgcagacaaattgtaaatgttgttcatatctgtcatttcatgggtgtgatgcatagggatctgaaaccagagaattttttgctatctagtagggacgaaaatgcacttctcaaggcaaccgattttggcttgtcagttttcattgaagaaggaaaggtatatcgggatatagttggtagtgcttactatgttgctcctgaagttctgcggcgcagatgtgggaaggaaatagatatatggagtgcaggagtcatattgtatatcttacttagtggagtccctccattttgggctgagactgagaagggaatatttgatgccatattggaaggtcacattgattttgaaagtcaaccatggcctaacatctcagacagtgccaaggatcttgttcgtaagatgcttatacaggatccaaagaaacgcattacctctgctcaagttcttgagcacccatggattaaagatggaaatgcttcagacaagccgatagacagtgcagtcctttccagaatgaagcaatttagagcaatgaataagctaaagaaacttgccttgaaggtcattgctgagaatatgtctgcagaagagatccaaggtttgaaggcaatgtttacaaatatggacactgacaagagtggtacaatcacctatgaagaacttaagtcaggattgcatagacttggctcaaagcttacagaggctgaagtgaagcaacttatggaagctgctgatgtagatggaaatggctcaattgactacatagaattcatcactgctacaatgcatagacacaaattagaaagagatgaccaacttttcaaggccttccaatattttgataaagacaacagtgggtttattacaagagatgaattggaatcagccatgaaagaatatggtatgggtgatgatgcaacaatcaaggaaatcatatctgaagttgatacaattatatctgaagtggatacagatcatgatggtagaatcaactatgaagaattctctgcgatgatgaagagtgggaaccaacaacaaggcaagctattctaaatcacaccatctaaccagtctgagggcctggtatccaaaacccctctagagaaaaggtttatacctctgagaagtacttccaaacagtttgtatcactcataggcatgtaaagcttctatttagaatgtttttgagttactatgctcctcatgactgttagtcaactccctttttttcatttctgggacctttttttgcttttcactgagattccatttccgagkcctctttgaatttgttttggacacaaagtataaactcacatagaaaaaggtgatatctcaataagattatacaagtttttgcgcttgaaaaaaaaaaaaaaaaaaa

SEQ ID NO: 19016 - protein, 538 aa, Glycine max; identical to SEQ ID NO: 4491

SEQ ID NO: 19017 - DNA, 2243 bp, Tortula ruralis
  CDS (257)..(1993)
cttctctctctgaagtcagtttcggccaccttacactcaattcagggttcgcttctcagccttgaaaccctagacggcggtctttctcctcagcctgttcttatttcagatgattgtgcgaaggtacgtggccaaatggtgacaaaaacggcatcaagttcgttgtagtgtatgtttaggcctttgctttaagagacaagtttaggggaacgggtcaaatagattcccgtggagggatgttacagattgtgtctgaatgggcaacagttgtgtaggagcggctgggtactttcagggcttcaccagtgtgatcgcactgggagggcgtagctccagatcccctagtgaggtatcacccactccatccaaggcagagtccagaggggggagcagggcagaggcggagtccccggagactcaacggaaaccgccacgcccagctcacattcctgctgtggaaccggccgaaactcagcaattcaaagaagtgatcgaagccatgaagaaagggagagagatgaagcccgtccctggccagagtctgactcactctgtgctgcagcggaagacagagaacctcagagacctgtatgttctgggaaagaagctggggcaaggtcaattcggcaccacctacctgtgcattgagaaggccaccaacagggagtacgcatgcaagtctattgccaagcggaagcttatctccaaggaagacgtggatgacgttcgccgtgaactgcagatcatgcatcacctttcaggacatccgaacattgtcatgatcaagggggcgtatgaggatcctgcttcagtgcatctggtgatggagctttgtgcaggcggtgagctgtttgaccgcatcattcaacgaggacagtactcggaagccaaagcggcagtgctcactcgtactatcgtgggcgtggttgagacctgccattctcttggcgtgatgcacagagatttgaagccggagaacttcctgttttcgagtacgaaggaggatgcggctctgaaaacgactgattttgggctatcagtgttctttaaacctggagaagttttcagagatgtggttggaagcccttactatgtggcacctgaagtgttgaggaagaactatggcccggaagcggatgtgtggagtgcgggtgtgatactttacatccttctcagcggagtccctccattctgggcagagacggagcagggcatctttgagcaggttttgaaatcagagcttgattttgcatcagatccatggcctaagatttctgatagcgccaaggatttgatccgcaaaatgctcacgccccaggcttcgaagaggttgaaagcccatcaagtgttggcacatccttggatctgcgaggacggagtagcgcccgacagacccatcgattccgcagtgcaatcccggctcaagcacttctccgcaatgaacaagctgaagaagatcgccatccgggtgatcgcggagtccttgtcggaggaggagatcgcaggtctgaaggagatgttcaagatgatggacacggacaactcagggtccatcagctacgaggagctgaaggcgggtctgaagaaagtgggttccaatctcaaagaggaagacgttcggcagctcatggacgccgctgacgtcgacggcagtggggcaatcgattatggtgagtttctggccgccactctccacctgaacaaggtcgaacgcgatgagaacatgttcgccgccttctcgtacctggacaaggacaacagcggctatctgacggtcgatgagctgcaacatgcgttggccgaattcaacatgggagacgtatccgtggaggagctgctcagggaggtcgaccagaacaacgatggtcagattgattacaccgagttcgtcaccatgatgcgcaagggcaatatgggcggcggtgctggtcgctcatcgctacgcaacagccagcagttgagtctgaccgacgtgttggggatcggaggatagggttcacaccgagttcagcaggaagtaggcacctcaacatgactgtgcgaaccagtcacttctacagaggcgagtagcattctctccgtaccatggggagtttgaatatgtaaagcttgtcatgttacttgctctagggccatggcctttagtccccgtgtatcattttcagtgccatcgctagaggcgcccgagaggaaatgattaggtgccaaacactgttgatgcttctaaaaaaaaaaaaaaaaaa

SEQ ID NO: 19018 - protein, 578 aa, Tortula ruralis; identical to SEQ ID NO: 4493

SEQ ID NO: 19019 - DNA, 1967 bp, Fragaria ananassa
  CDS (28)..(1617)
ttggactaatacaccggttttgggtagatgggtaattgctgtgtcacccctccccagacgggttcgccgttaaagaacaagaagaataagccaaacccgtttgcgatagactacgttgtcgccaatggcggcaagctctccgttttgaagaacccaaccggcactgaaatcgagcagacttacgagctgggccgcgagctcggccgcggagagttcgggattacgtatctgtgtactgacaaggccaccaacgagaactacgcttgcaaatcgatatcgaagcagaaactgaggacggctgtggatattgaagatgtgaggagggaagttgagatcatgaagcacttgcctaagcatcccaatattgtgagcttgaaagatacttacgaggatgataatgctgtccatcttgttatggagctctgtgagggcggtgagctttttgatcggatcgtgtctaggggacattacactgagcgtgctgctgctgctgtcactaagactattgtggaagttgttcagatgtgccacaagcatggtgtgatgcaccgggatcttaaacctgagaactttttgtttgcaaacaagaaagaaacagcgcccttgaaggcaattgattttgggttgtcagtgttctttaagcctggtgaaagattcagtgaaattgttggaagtccatactacatggctcctgaggtgctaagacgcaattatggtcctgaagttgatgtgtggagtgctggagttatactttacatcttactttgtggtgttccgcctttctgggcagaaactgaacagggagttgcacaagcaattatacggtctgttgtagattttaagagggacccctggcctaaggtttctgataatgcaaaagaccttgtgaaaaagatgcttgatcctgacccgaagcggaggcttacagctcagcaagttctagatcatacttggttgcaaaatgcaaagagagctccaaatgtttctttaggtgaaacagtgagagcaaggctcaagcagttctctgtaatgaacaagcttaagaaaagtgcactgaaggtcatagctgagcatttgtcacaggaggaagttgctggcatacaagagggatttaagatcatggatactagcaataagggcaagattaacattgatgagctaagagttgggttacataaactaggccatcagattcctgatgctgatgttcatatcctaatggaagctggtgatgtagataatgatgggtatctggactatggggagtttgttgccatttctgttcacctaagaaggatgggcaatgatgatgagcaccttcgcaaagcttttgacttctttgatcaaaacaaaagtgggttcattgaagtcgaggagttgcgaactgccttggctactgaagttgatgaccacgttgaagatgttattagtgccattatcagtgacgtggatacagacaaggatggaaaaataagttacgaggagtttgccaccatgatgaaggccggcacagattggagaaaggcctcaaggcagtattcacgagagcggttcaatagtctcagtttgaaattgatgagggatggatcattggaaggtaaaaccgagagcaaatgacacatcatacatgttaatgaaagaattgttcattttttgtttgtgtttttgtaattctttcttttgtaagttttctctgttaattttacatccttttgtagacccttctgtgattattaggatatgagccaagggttttctcatgtcttgatgtagagtgagttggcaaagaaattcagtgtgattgtaaatatgttatagaaaattggcatatattttcatcaaagtgatcatgtgaaattatggtatcatttgtcaaagttagctaggaatataccaaacttcttgacatcttatgccttttattaatggatcatcttgaggtgtccaataaaaaaaaaaaaaaaaaa

SEQ ID NO: 19020 - protein, 529 aa, Fragaria ananassa; identical to SEQ ID NO: 4495

SEQ ID NO: 19021 - DNA, 2552 bp, Oryza sativa
  CDS (777)..(2405)
ctcgtgccgaattcggcacgagaaggatttcgagcccggtccctaggctcgatccggccgtgtcctttgctccgatcgagcgcgcgaggtctcgtaaggtccatcctgagcttgttgctgtggagtgcgcgattccgcgctcgatttcgtttcttccggcgcagatttcgtgtttttggcctagatttggcttgtgggtgaccgcctaggcgtttctcgcgtgtttcggctttttgtctgggatcgatttgtggctggatttgcttgttcctggctgcggagcttggatcttagcattagaaaccctcagattggggatttcctgccggaggaagctttttggaggagctgcctttgggaggaactcttccagttctgagggtttcggtgtttgttgctcgcctggctcgagaagaactgggaaatctcgtattttagggcgggttctagtagatttcgtgtagtggagagcaaaaagtttgtgtggttttggtggtcaagtctggtggtggaagcccctcaggccggagatttcctccttccggtggacgaccaaaggagccgcccttggaaggaatttcttgccatcccagaggttggggatttcctcacgcccaggaagccaagcaagggctgccttagcgaggaactcttccaattggacgggtttgcgcgtagcggtgcggctatataagtggaaatctgcatccctgggaaggatacaattgttttgaggctgggaactttggaattggtttgcataaggagttcttggaatggggaatcagtgccagaacgggactcttgggagtgattaccacaatcggttcccaagggagcatgccgttgggtacgttcagggggatagctacttggacttgaagaagttcgatgatacttggcctgaggtgaacaacttcaagcctactgctgctagtattctcaggcgggggttggatcctacatctatcaatgtccttgggcggaagacagcggacctaagggagcattatatcattggtcggaagcttggtcagggccagtttggcacaacttacctctgtaccgagatcaatacagggtgtgagtatgcttgcaagaccatcccaaagcgcaagctcatcaccaaggaggatgtagaagatgtgcgccgtgagattcagataatgcaccatttgtcgggccacaagaatgttgttgcaatcaaggatgtctatgaggatgggcaagcggtgcacattgtgatggagctctgcgctggtggggagctctttgacaggattcaggagaaggggcattacagcgagcggaaggctgcagagcttataagaataattgtcagcattgtggctatgtgccattcgctcggggtgatgcaccgtgatcttaagccagaaaatttcctccttttggataaagatgatgatctgtcaataaaggcaatagattttggtctatccgtgttcttcaaaccaggtcaggttttcactgagctggttgggagtccatattatgttgctcctgaggtattgcacaaacgttatggaccagaatctgatgtgtggtcagctggagtgatactttacgttttgctgagtggagtgccaccattttgggcagagacacaacaaggaatatttgatgcagttctgaagggtcacattgattttcaatctgatccatggccaaagatatctgacagtgcaaaggatcttataagaaaaatgctctctcattgcccttcggagcgtttgaaggcccatgaagtgctaaggcatccttggatctgtgaaaatggagttgccactgatcaagctctggatcccagtgttatctctcggctcgaacaattctctgcaatgaacaagttaaagaagttggctctgagagtgatagctgagcgtctttcagaggaggagattgctgggttaagagaaatgttcaaggcagtggacacaaaaaatagaggtgttatcactttcggtgagcttagagaaggtttaagaagatttggcgctgaatttaaggatacagagattggtgatataatggaagcggcacacaacgacaataatgttacaatccattatgaagaatttattgctgcaactctacctcttaacaagatggaacgtgaggagcacctgctggcagctttcacatattttgacaaagatgggagtggttatatcacagttgacaagcttcgacgagcttgtggagaacataacatggaggattcactccttgaagagattatttcacaggttgatcaaaacaatgacggccaaattgactacgccgaatttgttgccatgatgccaggcagcaacgttggactacggtggcaaacaatggaaagcagtttgaatgtagcattaagagacgcacctcaagtacattgatgcacgaatgtatagatttggttctcttctcttgtccattcattcttcactacccaattccggtctgtgacttgtctgagaagagatcaagtcaattcatttagttggtatttattccaaaaaaaaaaaaaaaaaaaaaaaaaaaaa

SEQ ID NO: 19022 - protein, 542 aa, Oryza sativa; identical to SEQ ID NO: 4497

SEQ ID NO: 19023 - DNA, 1611 bp, Arabidopsis thaliana; identical to SEQ ID NO: 4498
  CDS (1)..(1611)

SEQ ID NO: 19024 - protein, 536 aa, Arabidopsis thaliana; identical to SEQ ID NO: 4499

SEQ ID NO: 19025 - DNA, 1662 bp, Arabidopsis thaliana; identical to SEQ ID NO: 4500
  CDS (1)..(1662)

SEQ ID NO: 19026 - protein, 553 aa, Arabidopsis thaliana; identical to SEQ ID NO: 4501

SEQ ID NO: 19027 - DNA, 2251 bp, Nicotiana tabacum
  CDS (171)..(1793)
  misc_feature (361)..(361): n is a, g, c or t
  misc_feature (370)..(370): n is a, g, c or t
gaattcggcacgagggaggttgttttagctagaagtatatccaacaatcttgaatcttgatttagtcattcacaaagttacaatcttttactctgtaaaaccccccaaattcttgatttcttgaggaattaaagtccaaaaattcaatcttgctcacataaactgtagaaatgggtggttgttttagcaagaagtatagacaagaaggtgctaatggggggtatagggcaacaagaagaaatgctaatcaagaatatcagaagccaccacaacatcaaccagaaaggccatatcagccacagcctcaacctcagcctcagcctcagccacgcccacagccacaagcacatactgttaccgngcagccggnacaaacccaagatcaaatgcaaggaccccatttgaataacatattaggaaagccttttgaagatattaggaagcaatatacacttgggaaagaattaggtaggggtcagtttggagtgacatatcattgtactgagaattccacggggaacccttatgcttgtaagtctatattgaaaaggaagcttgtgcgtaagaatgatagggaggatatgaagagggaaattcaaattatgcagcatttaagtggccagccaaatatcgtggaatttaaaggcgcgtatgaggataggcattcagtgcacctcgtgatggaactttgtgctggaggagagttgtttgataggattattgctcggggatattattcggagaaggatgctgctgagattattagacagattgcaaatgttgttaacatttgccatttcatgggtgttatgcatagggatcttaagccagagaatttcttactgactagtaaggatgaaaatgcaaagctcaaggcaaccgattttggactttctgtcttcattgaagaagggaaggtgtaccgggatatagttggtagtgcatattatgttgcccctgaagtattgcggcgtagttatgggaaggaagcagatgtatggagtgcaggtgttattttgtatattctactcagcggcgtgcctccattttgggctgaaactgaaaagggaatatttaatgccatactaaaaggagaaattgactttcaaagtgatccatggccatccatatcaaatagtgccaaggaccttataagaaaaatgctcacgcaggagccaaggaagagaatgacttcagcacaagttcttgaacatccatggcttcgaatgggagaagcatcagacaagccaatagacagtgcagtgctgtccagaatgaaacagttcagagcaatgaacaagctcaagaaacttgcattgaaggtcattgcggaaaatttatctgaagaagaaattaagggtctaaaagctatgtttgcgaacattgatacagacaatagtggcacaatcacttatgaagaattgaagtcgggattggctcggcttggatcaaagctaacagagaccgaagtcaagcaactcatggaagctgctgatgtggatggaaatggaacaatcgactacatcgagtttattactgcaacaatgcatagacatcggcttgaaagggatgagcatctctttaaagcatttcagtatttcgacaaggaccacagtggctttatcacgagagatgaactggaaagcgccatgaaggagtacggtatgggcgatgaggcgaccataaaggaaataattgcagaggtggacactgataatgatggtaggatcaattatgaggagttctgtgctatgatgagaagtggaacacaaccacagccgaagcttttctagtgcattgacaaaaataccctcgctagcagagatgttcagcagtcagcatgatagaaaggcgtctacagaaaagagagatgaagtataggtgatgtagttggtatttcttcaatccttcaacgatcttcggaaagcactggagtacaaaggaggcattttgcgttgtaggttgagtttgaatgcagagtgtgtgaatagttaagttaatggtaatatttacacttttcctgtaatgtgtctgatcccctattgtaattttatgtggatcatattgtcatgttgaccttgttaacagattacaacaagacaacctggaattagcattatgcttgaaaaagagaggattgttgacttgacattagtgaagtttttaagatgttgatgtttatcgaccttggatgttttccatctttaacttagctaattatcaagttataataaaaaaaaaaaaaaaaaaa

SEQ ID NO: 19028 - protein, 540 aa, Nicotiana tabacum; identical to SEQ ID NO: 4503
  misc_feature (64)..(64): The Xaa at location 64 stands for Ala, Glu, Gly, or Val.
  misc_feature (67)..(67): The Xaa at location 67 stands for Ala, Glu, Gly, or Val.

SEQ ID NO: 19029 - DNA, 2566 bp, Zea mays
  CDS (313)..(2232)
ggcacttgcctctctaatcctcagtcctctgtagagctggtcctcctacccctcactttgccttgagcaatttggtttctagcatctgtggggtggcttgtgggtggtcgccttggactgctcctttctccacctgctgcgccggcaggcgacgagggtccaaaagcctggtggggctcatcatcaagaacaccgaagcggcgagagtggcatgggatctgatccgaggcggagctcgaggagctgagggctgtacgtgctcttggatccggtagagatcacgtgccctcgtgttcgtccccggccgccgcgatggggaacacgtgcgtcggccccagcatcaccatgaacggcttcttccagtccgtgtccacggcgctgtggaagacgccgcaggaaggcgacgcgctgcccgccgccgccaatggccccggcgggccagccggggccggttcgcagtcggcgctgccgaagccggcgtccgacgtgcaccacgtcgccgtgcagagcgaggcccctgagcccgtcaagatcgccgcctaccactcggagccggcgcccgccgtgcggagcgaggcccctgagcccgtcaagatcgccgcctctcactcggagccggcgcccatggccgccaagcctggtggcgccgccgccaacgccagccccagccccagccccaggccgcgtccgcaggtgaagcgcgtgtcgagcgccgggctgctgctggggtcggtgctgaggcgcaagacggagaacctcaaggacaagtacagcctggggcggcggctcgggcaggggcagttcggcacgacgcacctgtgcgtggagcgcgccacggggaaggagctcgcgtgcaagtcgatcctgaagcgcaagctgggcagcgacgacgacgtggaggacgtgcggcgggagatccagataatgcaccacctggcgggccaccccagcgtggtcggcatccgcggcgcgtacgaggacgccgtggccgtgcacctcgtcatggagctctgcggcggcggcgagctgttcgaccggatcgtgcggaggggccactacaccgagaggaaggccgccgagctcgcccgcgtcatcgtcggcgtcgtggaggcgtgccactccatgggcgtcatgcaccgggacctcaagcccgagaacttcctcttcgctgaccactcggaggaggccgctctcaagaccattgacttcggtctctccatcttctttcgccctggccaaattttcaccgacgtcgtgggcagcccttactacgtggcgccggaggtactgaagaagagatacgggccagaggcggacgtctggagcgctggcgtaatcatctacatcctgctgtgcggagtgccgccattctgggcagagaacgagcagggcatattcgaggaggttctgcacgggaggctggacttcgagtcggagccgtggcccagcatctccgacggcgccaaggatctcgtgaggaggatgcttgtcagggacccgaggaagagactgaccgctcacgaagttctacggcatccgtgggttcaggtcggtggagtggctcctgacaggccgctggactcggccgttctgtctcgcatgaagcagttctcggctatgaataagctgaagaagatggctcttagggtgatcgccgagaacctgtcggaggacgagatcgccgggctgagggagatgttcaagatgatcgacgcggacaacagcgggcagatcacgttcgaggagctcaaggttggcctggagaaggtgggcgccaacctgcaggagtcggagatctacgcgctcatgcaagccgcggacgtggacaacaacggcacgatcgactacggcgagttcatcgcggccacgctgcacctgaacaaggtggagcgggaggaccacctgttcgcggcgttccagtacttcgacaaggacggcagcggctacatcaccgccgacgagctgcaggtggcgtgcgaggagttcggcctgggcgacgtccagctggaggacttgatcggggaagtcgaccaggacaacgacgggcgcatagactacaacgagttcgtggcgatgatgcagaagccgacggtggggggatcccgaagaaggccgatctgcagaacagcttcagcatcgggttcagcatcgggttcagggaggcgctcaggatggcctagacctctgtgtctctggcttccctgctgcctgcgtgtaggtgtagatgattgaattgagtgggtgtcagtgcagttgctgtagagaccaccgtagcatagagatctgatgagatgcgagttgaggcgggccaggagacgtgtacatgtgccatagccatacaggcggccctgcatcggtttgatttgattgcttggttccaaacggtcctgtgtttcatgtcgcgtgcacatgtgccatatctgcctgctgctgctactactgctatatgccgtgcacgtgcacgtcggtgacctgaaacttggctgtccggcggtccggccaccgagctctaaggctatccatagcggtttttctaaatttttatccttatatcattttttgcgtc

SEQ ID NO: 19030 - protein, 639 aa, Zea mays; identical to SEQ ID NO: 4505

SEQ ID NO: 19031 - DNA, 2550 bp, Cucurbita pepo
  CDS (591)..(2312)
ggcacgagcttagcagacaaagcctacccataaccctcaacgattcttcttcttccgctcaactcatccggagttcgactactcagctatgtatttatcgcccatcgatttcgtttatcgcctgttctttgcttaagatccaccgccgctttggttttttgctctgatcggtcgattagttgctttcatagcttcgatttgttgatcgcctcttctgatttctaggtttgattctggttgttttgaagaatttggcgatgtggattttgtagttcatcttcagatttgattaggttcaaggattgatgcattgactttttactttacctgcttatatatacttttctattcgatttctctgccatttttggggacgattctgattcttgagttatacttatttgattgtaattctgttgctagtttttgagcttagaggtagagctaggtgtttggtttgagatttcagtgtattgagcttttggagatcggatcttaagtttggtgttaatcgatcatatagaatatgaatgtttctttgtgtttgaattgaggaacttgcttggaaggatcttgagttgtaggaatcaatggggaatacttgtgtaggaccaagtatttcaaagaatggattctttgaatctgtttctgctgctatgtggcgatctaaaacgccggagaactcggtttctaatcatactaatggagaaaatgttcgagaggtagtagctagcgaacccgaatcgcctttgcctgttcaaaaccaacctcctgaaaaagtgacaatgccagaatcagtagctaaaccagaaccgcctatggaaccgaaggtgcgccctgttatgaagagggtgggtagtgctgggcttcgaggtggttcggttctacagacgaaaacgggaaactttaaggagtattatagcttgggtaaaaaattaggccaaggacaatttgggacaacatatatgtgtgtggagaaggcaactgggaaagagtatgcttgtaagtctattgcaaagaggaagttggttaatgaggatgatgttgaagatgtgagaagggaaattcagataatgcaccatttgtctggacacccgaatgttatatcgatcaagggggcgtacgaggatgccgttgcagttcaggtagtcatggagttgtgtgctggaggtgagctatttgataggatcattcaacgtggacattataccgaaagaaaggctgctgagcttactaggaccatagtcggggttttggaggcatgtcacgctcttggagttatgcaccgtgaccttaagcccgagaattttctctttgttagcaaggaagaggaatcacttctcaagacaattgattttggactatcaatgttcttcaaaccaggcgaaaagtttaatgatgtggtcgggagtccgtactatgttgcacctgaagttttgcggaagcgatatggtccagaagcagatgtttggagtgctggagtaattgtatacattctgttaagtggagtgcctcccttttgggctgagtctgaggaagggatatttgaagaggtcctgcacggcgatcttgacttctcctccgacccttggcccagcatctccgacagtgcgaaagatttggttagaagaatgcttgttcgagacccgagaaagagactgacagcatatgaagttttgtgccacccttgggttcaagttgatggtgtcgctcctgacaagccgcttgactcggcagtcttgactcgcttgaagcagttttcagccatgaacaagctcaagaaaatggctatcaaggtcattgcagagagcttatctgaagaagaaattgctggactcaaggaaatgttcaagatgatagatactgacaacagcggccaaatcacatttgaagaactcaaagctggattgaaaaagtttggagctaatcttaaggagtccgaaatttacgacctaatgcaagcagcggatatagacaacaacggaaccatcgactacggggagttcgtagctgccacattgcatctaaacaaaatcgagaaggaagatcatcttctagcagcgttttcatatttcgacaaagatggaagcgggttcattacccacgacgagcttcaacaagcatgtaaagagttcgggatagaggatcttcaaatggaagaaatgatgcgcgaggtcgatcaaaacaatgacggaagcatcgactataacgagttcgtggcgatgatgcaaaaaggaaatgtagtgaatactggcaagaaagggctacaaagtagcttcagcattggctttagggaggctctaaaactctagtgtattatgtaaaggtaacattcaagttagtttctttattgttcttgcctgcaagttattgcagagcaaggagcacggccgctcgcctgctcgggttcgataccacgtcattcatttcgacctcttcgttttcccctcgttctcaacgagtattcttcacccgaatcaaacacaacacgtaaaatactatgcagaggacaagccatatattttttttcaaaaaaaaaaaaaaaaaaaa

SEQ ID NO: 19032 - protein, 573 aa, Cucurbita pepo; identical to SEQ ID NO: 4509

SEQ ID NO: 19033 - DNA, 1458 bp, Ostreococcus tauri
  CDS (1)..(1458)
atgatgatgcgatgcgcgagctacaaggagaagaatgagcggacgggaaaggcgaacccggtggggaagacggcgcggccgtcgagcgtgctcggacgggaaaccccggacgtgaacgatctgttcgaattccacgatgaactgggtcggggtcagtttgggacgacgttcttggtcacggagaaggcgactgggcgtaagtgcgcgtgcaaggcgatctccaagcggcagttgcaaaacgccgaggacatcgaagaggtgagaaatgaggtgagaatccttcatcacctctccggtgataatcgcgtcgtcgaactcgtcggtgcgtacgaaggcaataagcacgtttacatcgtcatggagctcctttctggcggtgaactcttcgatcgcattgttgaaaagggcaagtacagcgagaaggacgcgtccgagaccttgcgcaccatcgttgagactgtggagtactgccacgagctcagcgtcatgcaccgcgatttgaagcccgaaaacttcgttctcaagacgaaggatcgggattcgccggtgtgcgccatcgactttggtttgtctacgttcttccgcgataaccaagtcttcgttgatcttgtcgggagcccgtactacgtcgctccggaggtgctccgtcgcagatacggccgcgaggccgacatctggtcgtgcggtgtcatcctttacatccttctctccggcgttccgcctttctgggcgcaaaccgagcaaggcattttcgacgccatcttgcagggctcgctcgatctcgacagcgacccgtggccgaaaatcagtagcgaagccaaggagctcatctctggcatgctgcaatcggatccgtcgaaacgtatgacggcggctcaggtgctgaagcatccgtgggtggccgatccgaacgtcgcgccgaagaccaagctggacaacaccgtgttcaagcgcttcaagaactttgccggtatgacgaagttcaagaagatgggtctcatggccatggcaaagaccatgacctcggacgaggtcgctggcttgaaggagctcttcaagagcttcgacaccgatggctctggtaccatctccatcgacgaacttcgtcagggcttgaagctcaagtcggccggaccagcgatggaagaactcagagccatcatgaagacaattgacattgacggaagcggcgagcttgattacgaagagttcatcgcggcgacgctcgcgacgtccaagcaacaatcaaacgatgccgttcgacgcgctttcgattacttcgataaggacggcgacggttcgatcacggtacaagagtttgaggaagccttcaagaagatgacggacgttgaacgggccaacttgggtgacatcggcagcctcatcaagagcgccgacacggacggtgatggttgcatcgacttcaacgaatttatcgccatgatgtcgtctaagtaa

SEQ ID NO: 19034 - protein, 485 aa, Ostreococcus tauri
MMMRCASYKEKNERTGKANPVGKTARPSSVLGRETPDVNDLFEFHDELGRGQFGTTFLVTEKATGRKCACKAISKRQLQNAEDIEEVRNEVRILHHLSGDNRVVELVGAYEGNKHVYIVMELLSGGELFDRIVEKGKYSEKDASETLRTIVETVEYCHELSVMHRDLKPENFVLKTKDRDSPVCAIDFGLSTFFRDNQVFVDLVGSPYYVAPEVLRRRYGREADIWSCGVILYILLSGVPPFWAQTEQGIFDAILQGSLDLDSDPWPKISSEAKELISGMLQSDPSKRMTAAQVLKHPWVADPNVAPKTKLDNTVFKRFKNFAGMTKFKKMGLMAMAKTMTSDEVAGLKELFKSFDTDGSGTISIDELRQGLKLKSAGPAMEELRAIMKTIDIDGSGELDYEEFIAATLATSKQQSNDAVRRAFDYFDKDGDGSITVQEFEEAFKKMTDVERANLGDIGSLIKSADTDGDGCIDFNEFIAMMSSK

SEQ ID NO: 19035 - DNA, 2585 bp, Isatis tinctoria
  CDS (496)..(2373)
gcgggggtagtgctattaaactatcctcttctatttttctcctcattttcccacccaacctaattcatcttcccatctttttctctactctccagatctctctgtttttttttttgtttccttgcctgggggtgatttctactctctgggttggttattgcatccttctcttttttgggttcgcttcacttcacaaattttccagtacccttttgatatttcctgctccagataacctctgctcttgtttccccttcaattttttttgctcgcatctatacccaagcagggtttatcagcttgtctgtgtacaaatttgaaagccaatattggtttgatccttgaacttcgaggatttgatgttcgatgttcttagcatagaaaggatttgactttcatggcattaggaatgagattagactgttttgagcgttttgtgatcagatcttagatgctatttctggaaagagattaagacacgtttaggggtattggatgggtaatacttgtgttggaccaagcagaaatgggttcttgcaatccgtttcggctgcaatgtggcggcctcgggatgcagatgattcggtttctcagagcaatggagatactgcaagtgaagctgtttcaggagagcttcgatctccatcatctgatcaggtccagaataaacctcctgagcagctcacaatgccaaagccagggactaacatcgagataaaggcgaaatccgatgtagagattcagcctgaaatcaagctggaaacgcaagaggtgacaaaaccggagtccaagccggagaccaagtcagagactaagcctgagaccaagtcggagactaagccggagaccaagtcagagactaagccggagacaaaagctgatactccggctaagcctaagaaacctaaacacatgaagagagtgtccagtgcaggtcttaggactgagtcggtgttgcagaggaaaactgaaaactttaaggaattctattccttgggaaggaaacttggacaagggcaatttgggacgacttttctatgcgtggagaagacttcagggaaggagtttgcctgcaagtctattgctaagaggaagctgttgaccgatgaggacgtggaagatgtgagaagggaaattcagattatgcatcacttggctggtcacccgaatgtcatatccattaaaggagcttatgaggatgttctggcggtgcaccttgttatggagtgttgtgcaggtggcgagctttttgacagaataattcaacgcggtcactacacagagaggaaagctgctgagctcactagaaccatagtcggggtggtagaggcttgtcattctcttggtgttatgcatcgagacctcaagcccgagaattttctgtttgtcagtaaacacgaagattcactcttgaagacgattgattttggactctctatgttctttaagccagatgatgtttttacagatgttgttggtagcccgtattatgtagctccggaagttcttcgaaagcattatggtcctgaagctgatgtctggagtgctggagtgattgtatacattttgttaagtggagttcctccattctgggctgaatccgaacaaggtattttcgaacaggtcctccatggtgatcttgacttttcatccgatccctggccgagcatatctgaaagtgcaaaagacttagtgaggaaaatgcttgttcgggatcccaagagaagactaactgcacaccaagtattatgtcatccatgggtacaaatcgacggcgtggctccagacaaacctctagattctgctgttctgagccgtatgaagcaattttctgcaatgaacaagttcaagaaaatggctcttagagtcattgctgagagcttatctgaagaggaaatagccggcttgaaagaaatgtttaatatgatagatgccgacaaaagcggtcagataactttcgaagaactgaaagcaggactaaaacgagtaggggcgaatctcaaagagtcagagattctcgacttgatgcaagctgctgatgtggacaacagtggaacaatagactacaaagagttcatagcagcaacattgcatttaaacaagatagagagagaagaccatttgtttgcagcctttacatactttgacaaagatgggagcggttatatcaccccggacgagcttcaacaagcttgtgaggagtttggagttgaggatgtccgcatagaagaaatgatgcgtgatgttgatcaagacaatgacgggcgaatagattataacgagtttgtggcgatgatgcagaaagggagcatcacaggagttccagtgaagatgggactagagaaaagctttagcattgctcttaaactctagtttcaatctttttaagttacaaaactaaagccaaagacaagagttccttctgatgatatatgattgtcgaagacaaatagcacagccaagattctcttttcgattctcaatcttttgaatgagtttttgtcttgttttcgaaacttggtttgttgcatcgtgtagttgttgagcatataacaaggactttgtcaaaaaaaaaaaaaaaaaaa

SEQ ID NO: 19036 - protein, 625 aa, Isatis tinctoria; identical to SEQ ID NO: 4511

SEQ ID NO: 19037 - DNA, 1803 bp, Oryza sativa subsp; identical to SEQ ID NO: 4712
  CDS (1)..(1803)

SEQ ID NO: 19038 - protein, 600 aa, Oryza sativa subsp; identical to SEQ ID NO: 4713

SEQ ID NO: 19039 - DNA, 1572 bp, Medicago truncatula; identical to SEQ ID NO: 4516
  CDS (1)..(1572)

SEQ ID NO: 19040 - protein, 523 aa, Medicago truncatula; identical to SEQ ID NO: 4517

SEQ ID NO: 19041 - DNA, 1554 bp, Medicago truncatula; identical to SEQ ID NO: 4518
  CDS (1)..(1554)

SEQ ID NO: 19042 - protein, 517 aa, Medicago truncatula; identical to SEQ ID NO: 4519

SEQ ID NO: 19043 - DNA, 1599 bp, Triticum aestivum; identical to SEQ ID NO: 4520
  CDS (1)..(1599)

SEQ ID NO: 19044 - protein, 532 aa, Triticum aestivum; identical to SEQ ID NO: 4521

SEQ ID NO: 19045 - DNA, 1612 bp, Triticum aestivum
  CDS (11)..(1609)
ttgagcacagatgggccagtgttgcagcagagctacgtccccggattctgtccaaggaggagccaatggctatggctattctcaccagccaaaacaagcacaaacacctcctagttacaacaatgctcagccaccaccacaagctgaggtgaggtacacaccgccagcgatgaaccctcctgtcgtcccacctgtggttgccccctcaaagcccatgccggacacgattctcggcaagcagtacgaggatgtgcgctctgtctactcccttggcaaggaacttggtagggggcagttcggggtgacgtacctttgcactgagattagcactggcaggcagtatgcttgcaagtccatatccaagcgcaagctcgtgagtaaggccgacaaggaggatatccgcagggagatccagatcatgcagcacctatctgggcagccgaacatagtggagttctgtggagcatatgaggacaagggcagcgtgcatgttgtgatggagctctgtgcaggcggggagctgtttgatcggattattgccaaggggcactactcagagcgtgcagctgctacaatctgcagaggagttgtgaatgttgtcaatgtttgccatttcatgggagtgatgcaccgcgatctgaagccagagaacttcttgctcgcgaccaaggatgagaatgctgtgctcaaggccactgatttcgggctttcggtcttcattgaagaaggaaaaatgtatagggacatcgttggaagtgcttattatgttgctcctgaagtccttaggagaaactatggtaaagagatagatgtttggagtgcaggtgttattctgtacattcttctcagcggtgttcctccattctgggctgaaactgagaagggaatatttgatgctattcttcaaggggagattgactttgaaagtcagccatggccatcaatttctgagagcgctaaagaccttgtgaggaagatgttggcacaggatccaaagaaaagaattagttcagcccaagttcttcaacatccatggctcagggaaggagaagcatcagataaacctattgacagtgctgttctttctaggatgaagcaattcagagcaatgaataaactgaaaaagatggctctaaaggttatagcttcaaatcttaatgaggaagagatcaagggcctgaagcaaatgtttatgaacatggacacagacaacagtgggacaatcacatatgaggaactcaaagcaggactagccaaacttggatcgaagctctcagaagctgaagtaaagcagttgatggatgcggctgatgtggatggcaatggatcaattgactacgttgagttcataacagcaaccatgcatagacacaagctcgaaagagacgagcatttgttcaaggcgttccagtactttgacaaagacaacagtggcttcatcacaagagatgaactggagactgctttgattgagcatgaaatgggcgatgcggataccataaaggacatcatatcagaagtcgacacagataatgatgggaggattaactacgaggaattctgcgctatgatgagaggagggatgcagcagccaataaggctcaagtagtct

SEQ ID NO: 19046 - protein, 532 aa, Triticum aestivum; identical to SEQ ID NO: 4523

SEQ ID NO: 19047 - DNA, 1545 bp, Triticum aestivum; identical to SEQ ID NO: 4526
  CDS (1)..(1545)

SEQ ID NO: 19048 - protein, 514 aa, Triticum aestivum; identical to SEQ ID NO: 4527

SEQ ID NO: 19049 - DNA, 1542 bp, Triticum aestivum; identical to SEQ ID NO: 4528
  CDS (1)..(1542)

SEQ ID NO: 19050 - protein, 513 aa, Triticum aestivum; identical to SEQ ID NO: 4529

SEQ ID NO: 19051 - DNA, 1962 bp, Triticum aestivum
  CDS (280)..(1878)
gtgtgtattagtcgctctcacgattgggggcgacgctaatcgcggtgccaccacttccaatccactctcgcggtcgccgtgccgagctgttcctgctctgtcttcaaccactccaagatttgttctttagacgcctgcagcttcggtgcgcagggacggaggagagctcgggacttggttcagagcttaggatctttgtcgattcaggtttcgattggtttcgtctgctcggctgactgggttgtaaatttggaactggaaggaagaatttgagcacagatgggccagtgttgcagcagagctacgtccccggattctgtccaaggaggagccaatggctatggctattctcaccagcccaaacaagcacaaacacctcctagttacaacaatgctcagccaccaccacaagctgaggtgtggtacacaccgccagcgatgaaccctcctgtagtcccacctgtggttgccccctcaaagcccatgccggacacgattctcggcaagcagtaccaggatgtgcgctctgtctactcgcttggcaaggaacttggtagggggcagttcggggtgacgtacctttgcactgagattagcactggcaggcagtatgcttgcaagtccatatccaagcgcaagctcgtgagtaaggccgataaggaggatatccgcagggagatccagatcatgcagcacctatctgggcagccaaacatagtggagttctgtggagcatacgaggacaagggcagcgtgcatgttgtaatggagctctgtgcaggcggggagctgtttgatcggattattgccaaggggcactactcagagcgcgcagctgctacaatctgcagaggagttgtgaatgttgtgaatgtttgccatttcatgggagtgatgcaccgcgatctggagccggaaaacttcttgctcgcgaccaaggatgagaatgcagtgctcaaggccactgatttcgggctttcggtcttcattgaagaaggaaaaatgtatagggacatcgttggaagtgcttattatgttgctcctgaagtccttaggagaaactatggtaaagagatagatgtttggagtgcaggtgttattctgtacattcttctcagcggtgttcctccattctgggctgaaactgaaaagggaatatttgatgctattcttcaaggggagattgactttgaaagtcagccatggccatcaatttctgagagcgctaaagaccttgtgaggaagatgttggcgcaggatccaaagaaaagaattagttcagcccaagttcttcaacatccatggctcagggaaggagaagcatcagataaacctattgacagtgctgttctttctaggatgaagcaattcagagcaatgaataaactgaaaaagatggctctaaaggttatagcttcaaatcttaacgaggaagagatcaagggcctgaagcaaatgtttatgaacatggacacagacaacagtgggacaatcacatatgaggaactcaaagcaggactagccaaacttggatcgaagctctcagaagctgaagtaaagcagttgatggatgcggctgatgtggatggcaatggatcaattgactacgttgagttcataacagcaaccatgcatagacacaagctcgaaagagacgagcatttgttcaaggcgttccagtactttgacaaagacaacagtggcttcattacaagagatgaactggagactgctttgattgagcatgaaatgggcgacgcggataccataaaggacatcatatcagaagtcgacacagataatgatgggaggattaactacgaggaattctgcgctatgatgagaggagggatgcagcagccaataaggctcaagtagtctttccttgtagaaatggtgtaccattagcaactgtttttggttccttttttttcgctgctgcacggatgagaagttctcttt

SEQ ID NO: 19052 - protein, 532 aa, Triticum aestivum; identical to SEQ ID NO: 4531

SEQ ID NO: 19053 - DNA, 1599 bp, Triticum aestivum; identical to SEQ ID NO: 4532
  CDS (1)..(1599)

SEQ ID NO: 19054 - protein, 532 aa, Triticum aestivum; identical to SEQ ID NO: 4533

SEQ ID NO: 19055 - DNA, 2215 bp, Trifolium pratense
  CDS (91)..(1767)
gttttctttctacacgctttctactttccactcattcataataatcgatccataaacccttttttttcaattcaatccaaattcaacaaaatgggttgtcacggtagtaaggaagcgaaaaaatccgccgcagaacatagccgccaccgccaccaatcatccgccgcagctggtggtgctgctaccggcggtactaatttccagtatcaaattgttcaaccttcttcctctcacgttcaaacttcaccaccaccaaaaccaaaaccagaatcacattcacactcacattcacatgcttcaacagtgactacaacaacaacatcaaatccaaaaccctctgcttctgagaatgtgagaacagtgcagaaaccagacacaacaatattaggaaaaccctttgaagatattaaaaagttctatactttaggtaaagaattgggtagaggtcaatttgggattacttatttttgtactgagaattcaactggtttaaattatgcttgtaaatctatattaaagaggaaacttgtttctaaagctgatagagaagatattaagagagagattcagattttgcagcatttatctggtcaacctaacattgttgaatttaaaggtgcttatgaggataggttttctgttcatcttgttatggaactttgtgctggtggagagttgtttgatagaattattgctcaaggtcattattcagagagagctgctgcatctatttgtagggctgttgttaatgttgtgcacatttgtcattttatgggtgtattgcatcgcgatttgaagccggaaaatttcttgctttctagtaaagatgaaggagcagcacttaaagctactgattttggactttctgttttcattgaagaaggaaaggtttaccgtgatatggtaggaagtgcttactatgttgctcctgaggtattgcgtcgtaattatggaaaggaaatagacatttggagtgcaggcatcatattgtatattctccttagtggtgtaccacctttttgggctgaaactgaaaagggaatatttaatgccatattggaaggtgaacttgactttgttagtgaaccatggccatcaatatcagacagtgctaaagatctagtcagaaagatgctgacacaggatccaaagaagagaattacttctacccaagtccttgaacacccgtggatgagagaaggtggagaggcctctgataaaccgattgatagtgctgttctatctagaatgaaacaattcagggcaatgaataagttcaagaaacttgcattgaaggttatggctgaaaatctatcagaagaagagattaaaggtctcaaggcaatgtttgcaaatatggacactgatggtagtggcaccatcacctatgaagaactgaagtcaggcctagcacgaattggatcacgattgtctgagcctgaagtgaagcaacttatggaagctgctgatgttgatggaaatggctcaatcgactatcttgaattcatatcagctacaatgcatagacacagacttgaacgagatgaacatctttacaaagcattccagtattttgataaagacaatagtgggcatattactagagaagaattggagactgccatgacaaagcatggaatgggtgatgaagcaacaataaaggaaattatttctgaggtggatacagataatgatgggagaataaactatgaggaattctgtgcaatgatgagaagtggaatgccacaccaggcacaactattttaaatctacggaatggagtcaatttcacatgttcgtgtgattcatcgtgaaagccaattggtcgagagacttaacgttgttggcaagtaatgttatctcctagaatatgcaagacacttcatggattggtgattactttgaggttctttgcaatcctaattttcgtaacaaggttgttttcgtgcgtgtggtgctaaaaatagattgattaaagtattgttatgcatttctttgtacatttaatttccggctgtcacgttttccaagtgtcttgagcctggattgatttatatgttaaaatgtggactatgatatcagagttactgtatcattttagttatggcagaggaacgaataaacacgggaggaatctgatttccttaacctgtatgaggatgtatgtgtaaacttaagtctacaattcccataatgtattgataatctattgtgc

SEQ ID NO: 19056 - protein, 558 aa, Trifolium pratense; identical to SEQ ID NO: 4535

SEQ ID NO: 19057 - DNA, 1943 bp, Ipomoea nil
  CDS (37)..(1581)
agaattagcagtttgacttgggtcgtctaccttcaaatggggagttgtaacagcataccttcgtcgccctttgccgccacttcagccggcggagaaagcgatccaccgccgccgaaaaatgacatcaccgtccttccgccctcccagcctccccctccacgtcccttcctctccggcgtcggccgcgtccttgggcgccccatggaggacgtccactccacctacatttttgggggggagctaggtcggggacagttcggggtcacctacctagtcacccaccgcaagacgcgcgagcgcctcgcctgcaagtcaatcgccacgcgcaagcttctctccaaggacgacgttgacgatgtccggcgtgaggtccagattatgcaccacctcaccggccaccgcaacatcgtcgagctcaagggaacctatgaggaccgcaaccacgtccacctagtcatggagctctgcgctggcggcgagctcttcgaccgtatcatcgccaagggccactactccgaacgcgccgccgccggcctctgccgtcagatggttaccgttcttcactactgtcactctatgggggttatgcaccgggatttgaagcctgagaatttcttgttcttgagctccgatgagaattcgccattgaaggctactgattttggcttgtcagtcttctttaaaccaggagatacattcaaggacctggtaggtagtgcatattatgtggctcctgaagttttgcgccgaaattatggacctgaagccgatatttggagtgctggagtgatactgtacattttactcagtggcgttcccccattttggggagagaatgagcagagcatctttgatgctgttcttcggggacatctagatttttcttctgatccttggccatcaatatctagtagtgctaaagatcttgttaagaagatgctacgttcggatcccaaagaaagactttctgctactgatgtcctgaatcatccttggatgagagaagatggtgatgcatctgacaagcctattgacattgctgccttaagtagaatgaaacagttccgtgctatgaacaagctcaagaaagtagctcttaaggtaattgccgaaaatctttctgaagaagaaattattggtttgaaggaaatgttcaaatcaatagacacagatgacagtggcacaattacttatgaagaactgaaagctggtcttacaaaaatgggcaccaagctctcagagtcagaagttaggcaattgatggaagcggctgatgttgatggaaatggaactattgattatcttgagttcatcacagctacgatgcatatgaaccgtgtggaaagagaagaccacttgtacaaggcttttgagtattttgacaaggacaagagcgggtatattactatggaagaattggagcattccctgaagaaatacaacattaccgatgaaaagacaataaaggagatcattgtagaagttgacacagataacgatgggaaaatcaattatgatgaatttgtggcgatgatgaggaaaggcacccctgacttggtcattaataggcgtcgtagatgaaaccatgaaagaaacaaaaatatttgtgtcgtgttgcaatgtgcatgcgatattcggtttgttctgtgttgagcaatttggatatgtgcatgggaatgtacatggtttactgtacctatccatccctcattttggagggagagcaagatatacagtctgcttgttaaagtgttttctttgagaggttgtgctgctgatcagagataggttatacaactgggagaggaagatctgttcatacgctactcagttataaattgtaaattgtacacttcaatgttgtttactctttctttcaaataaataaaatatcaggtttttgtgtgtagtccaaaaaaaaaaaaaaaaaaaaaaaaaaaaaa

SEQ ID NO: 19058 - protein, 514 aa, Ipomoea nil; identical to SEQ ID NO: 4537

SEQ ID NO: 19059 - DNA, 2346 bp, Gossypium hirsutum
  CDS (146)..(1999)
gaaaatagacaacaaaagctttgagttttctttttattattagttttcatttcagttttatagtttgttgaaatggtttaaggctttaaggagagattcaaaatcctactctccggggaaaagagagagataggcgtacacttcaatgggtctttgcacctccaaaccctccccaaacccttctgattctacaaatgcctctatcaatacccggaataacgatatctaccgcaagcctaactctgtttcggcttctcctttacctgatggagtaaactccaaggaagatcaaggtaaacaaggagaagaagaaaaagaaagctccaatcccaacaatgaaggcaagaaatcgccgtttttcccgttttatagtcccagtccagctcactacttgttttccaaaaagtctcctgcgagatcttcaaccaattccactccaaaacggtttttcaggaggccattccctccgccgtctccggcgaagcatattagggcagtgcttgcgcggaggcacgggtctgtgaagccgaatgaggccgcgatcccggaaggaagcgacgcagaggcagcgggagctaccggtaccggactggataagagcttcggcttctcgaagcacttcgggagcaaatatgagctcggagacgaagtaggaagaggccatttcggttatacttgtacggcgaagtttaagaaaggagagcttaaaggacaacaagttgccgttaaagttatacctaaagcgaagatgactactgcaattgccattgaggatgttagaagggaggtaaaaatattaagagctctatctggacatagcaatttagtacaattctatgatgcctacgaggaccatgataatgtctacatagtgatggaattatgtgaaggaggggagctcttggacagaattctttctaggggcggaaaatacactgaggatgatgcaaaagctgtgatgattcagatacttaacgttgttgctttttgccatctccagggtgttgtgcaccgggatcttaaacctgagaatttcttgtttacatcaaaggatgaaaattcacaattgaaggctatagactttggcttgtctgattttgtgaaaccggatgaaaggcttaatgacattgttggtagtgcatactatgtagcaccagaagttctacataggtcttacagtacagaagcagatgtctggagtataggtgtgattgcttatattcttttgtgtggtagtcgtccattttgggctcgaacagagtctgggatttttcgagctgttctaaaagctgatccaagttttgatgaagcaccttggccatctctatcttctgaggctagggattttgtgaagcgtttactgaataaggacccaaggaaaagattgactgcagcccaagctctgagtcatccctggataaaaaagtataacgatgtaaaagtgcccttggatatactgatattcaaactcatgaaggcttatctgcgttcttcatctcttcggaaggctgctttaagggccctgtctaaaactttgactgtggatgagctgttttacttgaaggagcagtttgcattattggaaccaaataaaaatggcactataagcttagaaaatatcaaagcggttctgatgaaaaatgcaacagatgctatgaaggatgctcgcatccctgagtttcttgcatcgctaaatgcacttcaatacagacggatggactttgatgagttctgtgcggctgcattaactgttcatcagctggaggctcttgatcggtgggaacagcatgcacgttgtgcttacgaaatctttgagaaggaaggaaacagacctattgtcattgaagagctagcttcggagctcggactgagcccatctgtgcctgttcatgctgttcttcatgactggattaggcacactgatgggaagctaagttttctcggatttgtcaaattattgcacggtgtatctagccgaaccatcgcaaaagctcaatagaagccgtaaaacttcgtaagagctctactgagctggtatggctaataaaaggttcaggttaggtgtttgctaggctataacctgaatatgataaagaggtagagtgaatttcgccgtcgcaatcaatgcccctacctcaacatcttcgattatggcttatttcatttgtctagcacaagcttattgacaccccccccccacacacacaattgaaggcaatgaacctcctgcaagtgcaacttaacattgaccaagctttaatcattttatgttttctttttccccactgtaaagttaaagaatggattaaatataaatataaatatatatatatctaaacaaaaaaa

SEQ ID NO: 19060 - protein, 617 aa, Gossypium hirsutum; identical to SEQ ID NO: 4539

SEQ ID NO: 19061 - DNA, 1626 bp, Oryza sativa subsp; identical to SEQ ID NO: 4746
  CDS (1)..(1626)

SEQ ID NO: 19062 - protein, 541 aa, Oryza sativa subsp; identical to SEQ ID NO: 4747

SEQ ID NO: 19063 - DNA, 2094 bp, Hordeum brevisubulatum
  CDS (305)..(1903)
cctcccgagatttcatttcttgcccgtgtgtattagtcgctctcacgattgggggcgacgctaatcgcggtgccaccacttccaatccactctcgcggtcgccgtgccgagctgttcttgctctctcctcaactactccaagatttgttctttagacgcctgcagcttcggtgcgcagggacggcggagagctcgggacttggttcagagctttggatctttgtcgattcaggttttgattggtttcgtctgctcggctgactgggttgtaaatttggaactggaaggaagaatttgagcagagatgggccagtgttgcagcagagctacgtccccagattctgtccaaggaggagccaatggctatggctattctcaccagccaaaacaagcacaagcacctcctagttacaacaatgctcagccaccaccacgagctgaggtgaggtacacaccgccagcgatgaaccctcctgtagtcccacctgtggttgccccctcaaagcccatgccggacacgattctcggaaagcagtacgaggacgtgcgctctgtctactcccttggcaaggaacttggtagggggcagttcggggtgacgtacctttgcactgagattagcactggcaggcagtatgcttgcaagtccatatccaagcgcaagctcgtgagtaaggccgacaaggaggatatccgcagggagatccagatcatgcagcacctatctggacagccaaacatagtggagttctgtggagcgtacgaggacaagggcagcgtgcatgttgtgatggagctctgtgcaggcggggagctgtttgatcggattattgccaagggacactactcagagcgtgcagctgctacaatctgcagaggagttgtgaatgttgtcaatgtttgccatttcatgggagtgatgcaccgtgatctgaagccggagaacttcttgctcgcaaccaaggatgagaatgcagttctcaaggccactgattttgggctttcggtcttcattgaagaaggaaaaatgtatagggacatcgttggaagtggcttattatgttgctccgaagtccttaggagaaattatggtaaagagatagatgtttggagtgcaggtgttattctgtatattcttctcagcggcgttcccccattctgggctgaaactgagaaggggatatttgatgctattcttcaaggggagattgactttgagagtcagccatggccatcaatttctgagagtgctaaagaccttgtgaggaagatgttggcacaggatccaaagaaaagaattagttcagcccaagttctccgacatccatggctcagggaaggagaagcatcagacaaacctattgacagtgctgttctttctaggatgaagcaattcagagcaatgaataaactgaaaaagatggccctaaaggttatagcttcaaatcttaatgaggaagagatcaagggcctgaagcaaatgtttatgaacatggacacagacaacagtgggacattcacatatgaggaactcaaagcaggactagccaaacttggatcgaagctgtcagaagctgaagtaaagcagttgatggatgcggctgatgtggatggcaatggatcaattgactacgttgagttcataacagcaacaatgcatcgacacaagctcgaaagagacgagcatttgttcaaggcgttccagtactttgacaaagacaacagtggcttcatcacaagagatgaactggagactgctttgattgagcatgaaatgggcgatgcggataccataaaggacatcatatcggaagttgacactgataatgatgggaggattaactacgaggaattctgcgctatgatgagaggagggatacagcagccaataaagctcaagtagtatttctttgtagaaatggtgtaccattagcaactgttcttggttccttctttttttcgctgcacggacgagaagttctctttggcgttgttgagatgattgtgtatatcttgtggccttttgctcgtgcatgttgttcttgttcctctagtgttttggacctactttcttctgtaaaaaaaaaaaaaaaa

SEQ ID NO: 19064 - protein, 532 aa, Hordeum brevisubulatum; identical to SEQ ID NO: 4541

SEQ ID NO: 19065 - DNA, 2626 bp, Chlamydomonas eugametos
  CDS (15)..(1790)
gaattcggcacgagatggcagctaagttcgttgagggcacactggatgtcacgctcaagagcgcgagtgatctccgcgaggatatgtctgtcaagctggacgcctactgcgtcgtgtcctgtgctagcacggcacaccgcagcaacaccgtcacagacgctgggaagacaatgaattgggagcagacgtttcacttcgacaaagttgcatcaacatctgtgttgaagctggagtcttcgatgagaagaacgccgtcggaccgtagctcttgcgcttgcaagattcctctcacacgggcttgcacctcggggtcagatgaggtgtgcgtgccagtgctggacaagaagggcaagcccattggcgagacgcatgtcagcatgacctttaaggccacgtccatggcggatgggccaacaaagggcaactggatccttcctacctatgcgaacaaggactgttggaaggactacgagcagggcaaggtggtgggcaagggctcattcggcaccacctaccttgtcaccaagaaggatacccaagagcagtatgcagtcaaggtcatctccaagcgcaagctgaccaccatggaggaggtggaggacatccagcgtgaggtgcgcatcatgcaccacctggctggccaccccaacgtcgtgcagctcaagaacgtgtacgaggataagagctacgtgtacctggtcatggatgcttgcatgggtggagagctgtttgacgcgatcgtggagcgcgggacgtacagcgagaaggacgcacgcgcgcttatgcgcacgattgtgagcgtcgtggctcattgccatgacatgggcgtgatccaccgtgatctcaagcctgaaaacttcctgttgctggacaagtcggcgaacccggtgctcaagtccatcgactttggtctgtcgtcgttctaccaggagggccaagtgtttcacgacattgtcggcagccccttctacgtcgcccccgaggtcgtgcgccgctcttacggcaaggaggcggacatctggagctgcggcgtgatcctctacatcctgttgtgtggctacccccccttccacggtgacaacgagacaaagatctttgaggcaatcatgaacaagtccctagacttccagtcagacccctggcccaaggtctcggaacctgccaaggaatgcattcgccgcatgcttgaccgcaaccccaagacgagagcctctgcgcagcagacgctggagcacgagtggatgcgtgagaacggtgtggccactgagaagcgcctggagatggaggtgctgaccagtatgaagaagttcagtgctggcaacaggctcaagaaggaggcggcaaagatcattgctgcaaacctccccactgacgagatctgcgggctgcgcgagatgttcatcgccattgacgtcgaccacagcggcagcatcacagcggaagagtttgccaacgcgctgcgcatgaagggcaacagcctccccgaggacgaggtgcagaggctcgtgtccaacgcggacgtggatggggacggcacatgcgactacgaggagttcttagctgccaccatcaaccagagcaagctggagcgtgaggacaggctcaagattgcgtttgagcattttgacctggaccacgacggcagcattacccatgacgagctcatgcagagcctggccaacctcggcatcaacgacgcgggcatcaaggagatcattgcggatgtggacagggatggcaacggccagatcgactacaatgagttctgcctgatgatgcgcaacctgtgaccaagtcaagcaagaacgactcctcgggatgctagcaagggctcccccagggctactggcaattgttcctcagggcaccagcaagggctccccatccccagggcactagcaagaggccccccagggcactagcaagcaagcacgcagctggagtgtgcgcacgtgtttgtgtgcccgttagttcgggcttcgtttacacgcagctgcagtggcaagattaccagcagctgctgagaccaagggttaaaatctactgtgtgtgttgtgcactgtcacttcacctcctatctgctctgaaggacatgcgaacgcagggcaccagcaggctgtgtgtaggttgcctagccctgctgatgcacttgtgcggaagcacttgtgctgaggcgctttgtgtggttggtcagagcacagcagtggtagagagctgcacgcctacgcgaccctatgataggactccaacttctaccctgcccagcttggatctgggggccgtgtgcaaagttcaagtttaagcctgttcttgtcgtcctgttcgttgggtatcgcgcctcagtgcgctttgacatgcctggcgatcgccaagcaaggctgcatcaggcggggttcatttcagcgattcttgtgctctctttctcttgccttgggatctgcgttcaacttaatatcaagcaacggggtctgccttcccagctacctctgatgatcagtttctgatgaggcgaatcaaggacagagtctgtgtattgttcccataacgttgcgccccgatctgcacgtgcttctgggaatgtcgcatgtgtgcaatcgtgtcttgctctaaaaaaaaaaaaaaaaaa

SEQ ID NO: 19066 - protein, 591 aa, Chlamydomonas eugametos; identical to SEQ ID NO: 4547

SEQ ID NO: 19067 - DNA, 1599 bp, Petunia integrifolia subsp; identical to SEQ ID NO: 4548
  CDS (1)..(1599)

SEQ ID NO: 19068 - protein, 532 aa, Petunia integrifolia subsp; identical to SEQ ID NO: 4549

SEQ ID NO: 19069 - DNA, 1611 bp, Petunia integrifolia subsp
  CDS (1)..(1611)
atgggaacctgcatgtctgtacaaaatgcaagtttcttgaaaagaaccaggaataggcctgttcctattgatcaagaaacttgctccaagaatacaagccggacatcggtaccaaaatctcagaaattctctcgtccattaaatgtcgtgaaggatccatctggagatgacattaacaagaggtatgagtttgggaaggagttaggaagaggagagtttgggataacataccactgtgttgataaagttagtggagagaatgtggcatgtaaaacaatagcaaagagtaagttgaggactgagattgatgtggaggatgtgaggagggaggtggtaattatgaggcatttgcctaaacaccctaatattgttagctataaagaagtttatgaggacaaagaagctgtttatcttgttatggaactttgtgaaggtggagaattatttgatagaattgttgcaagaggacattatactgaaagagctgctgctcgtgtcaccaagacaattcttgaagttgtcaaggtatgccatgaacatggtgtaattcatcgagacctcaaacctgagaactttttatatgccaatgcaactgaaaatgctcaattaaaggccattgattttggcctttccattttctttgaacctggtcagagatttagtgaaatagttggaagtccctattacatggctccagaagttcttagacgaaattatggaccagaagtagatgtgtggagtgctggtgttattctttacattttgttgtgtggcgttccacccttttgggcagaaaccgaagaaggaattgctcatgcaatagtgaagggtacaatagattttaatagagatccttggccaagagtatccgaagaggctaaggaccttgtcaaaggaatgcttgatccaaatccttataacagattgactgttgaagaagtccttgaccattactggatacaaaatgctgagaaggtctctaacatttgtttgggagaaggcgtgagagcaaagattaagcaattcactttgatgaataaattcaagaagaaggttctcagagttgtagcagataacttaccacaagatcaagttcacggaattaaacaaatgttctatatgatggacactgacaaaaatggaaacttgagtttccaagagctcaaagatggtttacatttgatggggcaagctgttgctgatcctgaagtgcaattgctaatggatgccgctgacgttgatggaaatggaatgctgaattgtgaagaatttgtgacaatggctgtgcacttaaagaggttaagcaacgatgatcatctccgcaaagcttttctccactttgacaaaaacaaaagtggatatattgagtttgaagacttgaaagattctttatttgatgatcatcttggccccaaaaatgatcaagttattcatgatatcatatttgatgctgatttggataaggatggaaggataagttaccaagatttcaaggtcatgatgtcaacaggcactgattggaagatgggttcacgtcaatactctaaagcaatgctaaatgcacttagcatgagacttttcaaagacaaatccatccaagtgaaaaattaa

SEQ ID NO: 19070 - protein, 536 aa, Petunia integrifolia subsp
MGTCMSVQNASFLKRTRNRPVPIDQETCSKNTSRTSVPKSQKFSRPLNVVKDPSGDDINKRYEFGKELGRGEFGITYHCVDKVSGENVACKTIAKSKLRTEIDVEDVRREVVIMRHLPKHPNIVSYKEVYEDKEAVYLVMELCEGGELFDRIVARGHYTERAAARVTKTILEVVKVCHEHGVIHRDLKPENFLYANATENAQLKAIDFGLSIFFEPGQRFSEIVGSPYYMAPEVLRRNYGPEVDVWSAGVILYILLCGVPPFWAETEEGIAHAIVKGTIDFNRDPWPRVSEEAKDLVKGMLDPNPYNRLTVEEVLDHYWIQNAEKVSNICLGEGVRAKIKQFTLMNKFKKKVLRVVADNLPQDQVHGIKQMFYMMDTDKNGNLSFQELKDGLHLMGQAVADPEVQLLMDAADVDGNGMLNCEEFVTMAVHLKRLSNDDHLRKAFLHFDKNKSGYIEFEDLKDSLFDDHLGPKNDQVIHDIIFDADLDKDGRISYQDFKVMMSTGTDWKMGSRQYSKAMLNALSMRLFKDKSIQVKN

SEQ ID NO: 19071 - DNA, 2306 bp, Zea mays
  CDS (419)..(2014)
agcaaagcttgagaggcttttctcaaaaacgcgccgtcgccgtttcttccccctttttctttgagaaaattcgcccgcgagatctttagtttcagaccccgtgtggattagtcgctgtcacgatcgaggcggggcgccaattgcggtggccaccacctccaatccactccccgcggtggcctcgccgagctgttcttgctccgtcctccctccaactccaagatttgtttcgcacccgattcctgagcttccgcggcgcttcttgctgaaaagaaagctccgagttcttcagttctggatcgatagagaggcggttcctttgcgggctctgaggttcagctctcgctcttgatttgtctcatcgacgcatcagttgggctgcaggcttagagctggaaggaataatttgactagagaaatggggcagtgttgtagcagagctcccgccccggactctggacggggaggcaccaatggttatggctattctaaccaggcaaagccagcgcaaacaccttcgagttacaaccctcctcagcagccggccgaggtgaggtacacgccgccggcgacgaaccctccggtagtcccacctgtgcctgtgccaccgaagcccacggcggacacgattcttggcaaacagtacgaggacgtgcgctctgtctactccctcggaaaggagcttggccggggccagttcggggtgacatacctctgcacagaggttgcctctggtaagcagtacgcctgcaagtccatctccaagcgcaagcttaccagcaaggcagacagggaggacattcgaagagagatccagatcatgcagcatctgtctggacagccaaacattgttgagttccggggagcatacgaggacaagagcaatgtccatgtggtgatggagctctgcgcaggtggggagctcttcgatcgcatcattgccaaggggcactacacagagcgtgcagctgctacaatctgcagagcagttgtgaatgttgtcaacatttgccacttcatgggtgtgatgcaccgtgacctgaaaccggagaacttcttgcttgcgagcaaggaggagaatgcaatgctcaaggccactgattttgggctttccgtcttcatcgaagaaggaaagatgtacagggacatcgttggaagtgcttattatgttgcgcctgaagtccttaagcggagctatggaaaagagatagatgtttggagcgcaggtgttattttgtacattcttctcagtggtgtgcctccattttgggctgaaactgaaaaggggatatttgatgctattctgcatgaggagattgactttgaaagtcaaccttggccatcaatttctgagagtgctaaagacttggttagaaagatgttgacacgagatccaaagaaaagactgacttcagctcaagttcttcaacattcatggctcagagaaggtggaggtgcatctgataagcctatcgacagtgctgttctttctagaatgaagcagttcagagcaatgaataagctgaaaaagatggccctaaaggttattgcctcaaaccttaacgaggaagagatcaaggggctaaagcaaatgttcatgaacatggacacagacaatagtggcacaatcacgtatgaagaactcaaagcaggactagccaaacttggatcaaagctgtcggaagctgaagtaaagcagttgatggaggctgctgatgttgatgggaatggatccatcgactatgttgagttcatcactgccacaatgcatagacacaagctcgaaagagacgagtatttgtttaaggcattccagtacttcgataaagataacagcggtttcatcacaagagatgagctggagtctgctttgatcgagcatgagatgggtgacacgagtacaataaaggagatcatatcagaagtggacacagacaatgatgggaggattaactatgaggagttctgcgcaatgatgagaggagggatgcagcagccaatgaggctcaagtagcctgttcccttagtagaaatggtgtaccgttagttactgttcttcactctttttcccccttcgtatttggtactcttggtagccggattaagcttacaatgggcgtcgctcttttgcattgtcaagagatgattgtgtatatctttttcttttgctcgtgtttgttgcattgtagtatcctgaacgtcccttccttttgtaagtttgtttatacacaagcacatccaatagaaagtgcaatttgtgtctcactctgtactagttgtgtaattggtgataggaaaaaggtcta

SEQ ID NO: 19072 - protein, 531 aa, Zea mays; identical to SEQ ID NO: 4551

SEQ ID NO: 19073 - DNA, 2022 bp, Phaseolus aureus
  CDS (97)..(1560)
caaaatatcaattctgcagaaaacaacaacagcaacagcaccggcgtcatcaacaacaacaacaatccacccttcaactccaagagagactccatcatgcgccgcggcctagacaaccaggcatattatgtcttgggccataagactcccaacattcgtgatctatacactcttggccgcaaattgggacagggacaatttggcaccacttatttatgcaccgagaattctacttccaatgaatatgcctgcaaatctatctccaaaagaaagttgatttccaaggaggatgttgaggatgtcaggagggaaattcagataatgcatcatttagctggtcacaagaacattgtcaccattaagggtgcttacgaggatcctctctatgtgcatatagtcatggagctttgttctgggggtgagttgtttgatcgcatcatccagaggggccactataccgagaggaaggctgcagagttgaccaaaattattgttggggttgttgaggcttgtcattcccttggggtcatgcacagagatctcaagccagaaaactttcttttggtcaataaagatgatgatttctctcttaaagcaattgactttggcctctccgttttcttcaaacccggtcaaattttcactgatgtagtcggcagcccatactatgttgctcctgaggttctcctcaagcactatgggcctgaagcagacgtgtggacagccggtgtcatactgtacatattgcttagtggtgtaccaccattttgggcagagacccaacaaggtatatttgatgcagtattgaagggacatatagattttgactcagatccttggcctctaatatctgacagtggaaaagatctgatcagaaagatgctgtgttctcagccttcagaacggttgactgctcatcaagtgttatgtcatccttggatatgtgaaaatggagttgcacctgacagggcaatagaccctgctgttctttctcgtcttaaacagttttctgcaatgaataagctgaagaagatggcattgcgggtgattgctgaaagtctatctgaagaggagattgctggattgagagaaatgtttcaggctatggataccgataacagtggtgcaatcacttttgatgaactcaaagctggtctaagaagatatggttctacccttaaagatgtagaaatacgtgatctgatggaagcggctgatgtcgacaaaagtggaaccatagattatggggagtttattgctgctacagttcatctcaacaaactagaacgtgaagaacatcttattgcagcattccaatattttgacaaggatggcagtggttatattacggttgatgaacttcaacaagcttgtgcagaacataacatgactgatgcttttcttgaagatattattagggaagttgatcaagataatgatggaaggattgattatggtgaatttgctgcaatgatgcaaaaaggcaatgctggaattggtaggaggactatgcgcaatagtctgaatttaagcatgagggacgcatctagtgctcaatagcttcaattgtactcattatgtacaggttgtatgcagcgaaccgggaaagagaaaaacaaccgtaaatctttacaaaaattgttcatatcctgctggtgggtcaatccatgaagaagaatcaggattgtggttgctcaacacgagcatccgatcaagtgttacatttatgtgctgtatgagtgcaaattatttctctttgtaaacctcggtgttgggtgttgcagctctttcaagttggtcttctatttttctgtgctttcatgtaggggcattctgtctatagtttaagtagaaggattttgatttgactttcaggttcttaatttcacgaatgtaaagtttcacacgcgtgacatgatgtattcggcaaactaagaagcctttgtggattatgtcagagaacatgcattatgctaatgttaaagtgacattggaagtatattatttttcagctggctaaaa

SEQ ID NO: 19074 - protein, 487 aa, Phaseolus aureus; identical to SEQ ID NO: 4555

SEQ ID NO: 19075 - DNA, 1704 bp, Nicotiana tabacum; identical to SEQ ID NO: 4556
  CDS (1)..(1704)

SEQ ID NO: 19076 - protein, 567 aa, Nicotiana tabacum; identical to SEQ ID NO: 4557

SEQ ID NO: 19077 - DNA, 2437 bp, Capsicum annuum
  CDS (449)..(2023)
gtttgacttagggtaaagttgcaatcttgagatacccttttggcgttggaggttaattgagtgaaaaatttggtgttttagctgtgaaagttgaggttttgttgtgtggatttgttggggaaaggtaaaattttgagaccctttttgttttagctgaaaaattggatcttggttgaagtttgagtagtgtaaagttgcaatcttgaaagagacttttgaggttaatagagtggaaattggtgatttagctgtgaaagttgagattttgttgtgttgatttagtggggaaaggtaagatttttttgacccttttagtttgaggtgaaaattggatttttacctgtgagaattgaagctttttgttgtgttagtttggtgggaaagttaagatcttgagacccttttagctgaaagttttgaggtacttgggttttgaagatctggttcaatgggtaattgttgtgcagtaccaaaaacttcagacacagaggagaagaaaagggggaaaaataagccaaatccattttctgttgattatgctcatgggaacggacacaagtcctatgtgttggataatccaaccggctgtgatatcgaggcaacgtatgagctagggcgtgagcttgggagaggtgaatttggggttacgtatttgtctaccgacaaagcaactggagatgtatatgcttgtaaatcgatatccaagaagaaacttaggactcgagtggatatcgaggatgtaaggagagaagttgagatcatgaagcatttgcctaagcatcctaatattgtcaccttaaaggatacttatgaggatgataatgcagtacatatagttatggagctgtgtgagggcggtgagctatttgatcggattgttgcgagggggcattatactgagagggcagcagctgctgtgactcgcacaattgttgaagtgattcagatgtgccataagcacggagtcatgcatcgtgacctcaaacctgaaaacttcttgtttgaaaacaagaaagagacagcaccattgaaggcaattgattttggtctctcagtattctttaagcctggtgaaagatttaacgaaattgtgggaagtccatactacatggcacccgaggtgctgaagagagattatggtccagaagtagatgtatggagtgctggagtaattctctacatcttgctgtgtggtgttccaccattttgggcagaaactgaacaaggagttgctcaagcgatcattcgttctgttgtgaatttcaaaagagacccttggcctaaggtctccgacaatgcaaaagaccttgtgaagaggatgcttaaccctgatcctagcaagaggcttactgctcaagaagttctagatcatccctggatacaaaatgcaaagaagaatccaaatgtttctttgggtgaaacagtgaaagcaaggctcaagcaattttctatgatgaacaagctaaagaaaagagctttaagggtgattgctgagcatttgactgtggacgaagtggctggaataaaggagggattccagttgatggatataggtaacaaagggaagattgacattaacgagttgagagtggggttgcagaaacttggccatcaaattcccgaatctgatgtgcaaattcttatggatgttggtgatgttgataaagatggatttttggactacggggagtttgtagcaatttcagtccacttaagaaagatggcaaatgaggagcacctgaaggcggcgtttgaattttttgataagaaccaaaacggatatatagagattgacgagttaagggaggctttagatgacgagattgaaaccaacagcgaagaagttatcaatgctattatgcaagatgtagacactgacaaggatggacggataagttacgatgagttctctgcaatgatgaaagctggcacagattggaggaaggcgtcaagacagtattcacgagagcgatataatagtctcagcttgaaactaatgaaggatggatccttacaaagctagttaagcaaagccagatttatgacatcttgaagagtaaaactcaccttttggctttccaaattcttctcttctttcccgttcaactatcattccgcctttattttttccgtttatgtgatttttcttccggaggggttggataactaccaggtcccccaacattcatgtgttcattttgttgtaatcatgttgtgttttttctttctttttcgtcttggacgatctgagggaatatggtgaaggattagcaaaggtgattattgtggttgtatataggttggcaagtatgcttcaattattcagttatggagtcttactatttaatgataacgccatttcagattcaaaattgtactcttcattcagtcttctaacttttaacttatcttgataaataaaaaaaaaaaaaaaaaa

SEQ ID NO: 19078 - protein, 524 aa, Capsicum annuum; identical to SEQ ID NO: 4559

SEQ ID NO: 19079 - DNA, 1809 bp, Zea mays; identical to SEQ ID NO: 4560
  CDS (1)..(1809)

SEQ ID NO: 19080 - protein, 602 aa, Zea mays; identical to SEQ ID NO: 4561

SEQ ID NO: 19081 - DNA, 1783 bp, Vicia faba
  CDS (128)..(1609)
acgcgggggtgcgaagcatatgaatagtagaagaatgtgaagtcacaaacaaacactgactctgactcttgtcttctttctttctctttcgttgttccaaacccaacacagtacaaccttcacaacaatgtcgaattccaacaacccgccacccccgaaacccacctgggtcctcccatacataacagaaaatatccgtgaactctacaccttaggtagaaaactgggtcaaggccaattcggcaccacctatctctgcacacacaacccaaccggtaaaacctacgcttgcaaatcaatcccaaagaagaaacttttatgcaaagaggattacgatgatgtgtggagagagattcagataatgcaccatttatctgagcatcctaatgttgtcaggatccatgggacttatgaggattcggtttctgttcatttggttatggagctttgtgaaggtggtgagttgtttgataggattgtgaacaaggggcattatagtgagagggaagctgctaagctgattaggactattgtcgaggttgtggaaaattgtcattctcttggtgttatgcatagggaccttaagccggagaattttttgtttgatactgttgaggaagatgctgttcttaaaactactgattttgggctctctgctttttacaagccaggtgaaatctttagtgatgttgttggaagcccatactatgttgcaccagaggttttgcacaagcattatggacccgaggctgatgtgtggagtgccggggttattttgtacattttattaagcggggtgccgccattttgggctgagacagaaatagggatcttcaaacagattttgcagggacgacttgatttccagtctgagccatggcctgggatttcagacagcgccaaggatctaattcgaaaaatgcttgataggaatccgaaaactaggtttacagctcaccaagtgctatgtcatccatggattgtcgatgatagcattgcaccagacaaacctcttgattctgctgttttatctcgcttgaagcagttctctgcaatgaataaacttaaaaagatggctttacgtgttattgcggagaggctgtctgaggaagaaattggtggtttgaaagagttgttcaagatgcttgatgctgacagcagtggaaccataacattagacgagctaaaagaaggcttaaagcgagtaggatctgaacttatggaatctgaaatcaaggatcttatggacgcagcagatatcgataataatggcacgctcgactatggtgaattcattgctgctactgtccacttaaacaagctggagagagaggaaaatctcttgtctgcattctcctactttgacaaagatggaagtggttacataaccattgacgagattcacgtagcttgtaaggagtttggtttggatgatatccatattgatgaaatggtcaaggaaattgatcaagacaacgatggacaaatagattatggagaatttgctgctatgatgagaaaaggcaatggcgggatgggaagacgaaccatgacaagccgactcaatttcagaaatgctctcggaatcataggcaatgaatccaattaaattattgtccctcaaataactaattggtgataaaatttttggacgaggaataaactatggtatctttcaatattatcagtaacatgatcaaattttgtcttcgtatgcagacccaaaaatgagaagccaaaatcacaccattgtgatacttggagataaaaaaaaaaaaaaaaa

SEQ ID NO: 19082 - protein, 493 aa, Vicia faba; identical to SEQ ID NO: 4565

SEQ ID NO: 19083 - DNA, 1993 bp, Malus domestica
  CDS (208)..(1839)
gggactactgaatttcagctccgtgtcagcacgcaaaattcaaacctcttccatgtaggcgataactatggtcgcaccttgatctgggttttgcttgaattcctcaaatatcagatttttgggttgtcttcgattccacatttcatcgttagccttttgttcgtcgattgaaatccgccaccaaattccctgaatcctgatcggaaaatgggttgctacagcagcaaagagaatgctccgaaacccggttcaaaggggttcgggtcatcccagccttaccagcagccgcagacggctgctcagcctcagaaagtctcatcccaacaaccccataacccaccaccaccacccagaccacagccccagcagagggcacagccagcgccccaaccaagggcacagtaccagcagccaagccctcctccagcaaaaccggcgccgcagccgaatagcattctggggaagccctttgatgacattaagcagtactacacactcggcaaagaactgggcaggggccaattcggtatcacatacttgtgcactgagaactccaccggccacagctacgcctgcaagtcgatcctgaaacgcaaacttgtgagcaaaaacgacagggacgacatcaagagagagattcagataatgcagcatttgtctgggcagccaaacattgtggagatcaagggggcttatgaggacaggtactctgtgcatttggtgatggagctctgcgccggaggggaacttttcgatcgaattatagcgcagggacagtattcggagagggctgccgctgcgattctgcgtgacattgtgaatgttgtgcacatttgtcacttcatgggcgtgctgcaccgtgatctcaagccggagaatttcttgttgtctagcaaggatgagaaggcaatgctgaaggcaacggatttcggtttgtctgttttcattgaggaaggaaaggtgtaccgtgatatagtcggcagtgcttactatgttgcccctgaagtcttgcggcgtagttatggaaaggaaatagacatttggagtgcaggagtcattctgtatattctactcagcggtgtacctccattttgggctgaaactgagaggggtatattcgatgccatattggaaggagtaatagactttgatagtcaaccatggccatcaatatcagacagtgctaaagatttagttagaaagatgctgacacaggacccaagaaagagaattacttctgcagaagttctcgagcacccgtggctcagagtaggcggagtagcatcagacaagccattagatagtgcagttctctctagaatgaagcagtccagggcaatgaataagctcaagcaacttgctttgaaggtcatagcagagaatctatctgaggaagaaattaaaggccttaaaacaatgttcaccaatatggacactgacaaaagtggtacaataacttacgaagaactgaagacaggtttagcgcgtattgggtcacggctgtcagaagccgaagttaggcaactcatggatgctgctgatgtcgatggaaatggatcaattgactacattgaatttatatctgctactatgcatagacaaagattagaaagagacgagcacctgtacaaagcatttcagtacttcgacaaggatagcagcgggtacattacaagagatgaattagaggctgctatgaaggagcatggaatgggtgatgacaacaccatcagagagataatttctgaggttgatgccgataatgatgggaggatcaactattcggaattctgtgcaatgatgagaagtggggctcaacaaccagcaaagctcttttaatttcactagcgggcatttcagaatttacaagcggaagtgagtttaaccgttaggtcgtatcagagcattgtttccaggaggtatgaagtaaactagaccaatcttgataaaaagaatgggcaatttgagcatgtgaagctagagtttggtgttt

SEQ ID NO: 19084 - protein, 543 aa, Malus domestica; identical to SEQ ID NO: 4569

SEQ ID NO: 19085 - DNA, 1714 bp, Vitis labrusca x Vitis vinifera
  CDS (81)..(1574)
agagagagagtcttccgttctccatcctttcctcgaccggagagagaagggcttctaggatttgcccatttcccccagaaatgaagaaatcgtccgcaggagcaccatcaaaacccacaaaaccggcatgggtcctcccctacaagacccaagacttgagaaccctgtacaccataggtcagaagctgggtcaagggcagtttgggacaacatttctgtgcacagacaaggccacgggccacaactatgcctgcaaatccatcccaaagaggaagctcttctgcaaggaggactatgatgatgtgtggagggagattcagataatgcaccacttgtccgagcacccaaatgtggtgaggatcaggggaacctatgaggaccccgtgtttgtgcatttggtcatggagttgtgtgagggaggtgagctttttgataggattgtgcagagggggcattacagtgagagagaggctgcaaagctgatcaagaccattgttggggtggttgaggggtgtcattcacttggggttatgcatagggatctcaagcccgagaacttcttgtttgataccactgctgaggatgctgctctcaaggccactgattttgggttgtctgttttctataagccaggtgaaaccttttctgatgtagttgggagtccctactatgttgcaccagaggtgttgtgcaagcattatggacctgaagcagatgtttggagtgcgggagttattttgtatatcttactaagcggggttccacctttttgggcagagactgaaacaggaatcttccgtcagatactacaaggaaagttagattttgaatctgaaccgtggccttgcatttcagaaactgccaaggaactattgcggaaaatgcttgataggaatccaaagaaaaggctaactgctcatgaagtcctttcccacccatgggtcgtagatgatagaatggccccagataaacctcttgattctgcagtgttatcacgcctgaagcagttctctgcaatgaacaaacttaaaaagatggctttgcgtgtcatagcagaggggctttctgaagaggagattggtggtttgcgggagttgttcaaaatgatagacacggacaatagtggaacaataacgtttgatgaattgaaagatggcttaaaaagagtgggctccgaactaatggagtctgaaatcagggatctcatgaatgcagctgacattgacaacagtggaacaatagattatggggaattccttgctgctactgtgcacttgaataagttggagagggaggaaaatttggtgtcagcattctccttttttgacaaagataaaagtggttacattaccattgatgagcttcaacaagcttgtaaagagtttggcttaagtgaggcccatcttgatgacatgatcaaagaaattgaccaagataatgatggacagatagattacggggaatttgctgcaatgatgaggaagggcaatggaggaatcgggcggagaaccatgagaaacaacttaaacttgggagatgttctagggataccagatatgcgcttgacaaactgatcaatgttaaccgtaagaaatcttttttaaaatgttcaaatgtggaaagaaaccaatgggctgaaactcaaatattaacttgtagctggtttcggcattaatttgatcgttttgttaaaaaaaaaaaaaaaaaaaaaaaa

SEQ ID NO: 19086 - protein, 497 aa, Vitis labrusca x Vitis vinifera; identical to SEQ ID NO: 4481

SEQ ID NO: 19087 - DNA, 1587 bp, Oryza sativa subsp; identical to SEQ ID NO: 4570
  CDS (1)..(1587)

SEQ ID NO: 19088 - protein, 528 aa, Oryza sativa subsp; identical to SEQ ID NO: 4571

SEQ ID NO: 19089 - DNA, 1698 bp, Nicotiana plumbaginifolia
  CDS (1)..(1605)
atggggaactgttgttcaaggggccaacctgatgataatgaacatacaagtaataatgatcaaaaatccaataccaaaaatgatcaatcaatttcaaataattctcaacaacaacaaaataatggttcaattacaccatcaaaatcacctgatccttcatcaaaaccatcaaaaaattccccaattggtccagttttaggcagaccaatggaagatgttagaaaaacatattcaataggtaaagaattagggaggggtcaatttggtattacacatttatgtacacataaacaaagtggtgaacaatttgcatgtaaaactatagcaaaaaggaaattggttaataaagaagatattgaagatgttaagagagaagtacaaattatgcatcatttaacaggtcaacaaaatattgttgaattaaaaggggcttatgaagataaacattcagttcatttggttatggaattatgtgctggtggtgaattatttgatagaattattgctaaaggacattatactgaaagggctgctgcaactttattaagaacaattgtgcaaattgtacatacttgtcattctatgggtgttattcatagagatcttaagcctgagaatttcctcctacttaataaagatgaagattcacctctcaaggctacagattttggtctttctgtgttttacaaacaaggagatgtatttaaggacattgtgggtagtgcatattacattgcacctgaagtgttgaaaagaagatatggtccagaagttgatatatggagtgtgggagttatgttgtatattcttctttctggtgttcctcctttttgggcagaaactgaacatggaatattcaatgcaatattgagaggacatgttgatttttcaagtgatccatggcctgcaatttcccatggtgccaaagacattgtcaagaagatgttgactatagaccctaagcagaggttgacagcaatccaagtcctaaatcatccatggatcaaggaggatggagaagcaccagatacaccacttgataatgctgttttgagtaggctcaaacaattcagagctatgaacaacttcaagaaagttgctctccgggtaattgcagggtgtctatcagaggaagaaattatgggattgaagcaaatgttcaaaagcatggatactgataacagtggagcaataacacttgaagagctaaaacaaggacttgccaaacaaggaacaaaattatctgatcatgagattgaacagttaatggaagctgctgatgctgatggaaatggaaccatagattatgaagagtttattacagcaacaatgcacatgaacagaatggacaaagaagaacatctttacactgcattccaatattttgacaaggataatagcgggttcattacaatagaagagttagagcaagctttaagagaatttggaatgactgatggaaaggatataaaggaaattgttgctgaagttgactctaataatgatggtcgaattaactatgaagagtttgtagctatgatgagaaaaggaactccagaaactgcagcaaatctaaagaaaagaagggagtcatttgttgcataaattttcattgttaatataaaaagaaatcaaaattaaggaaaaaaaatcaaagtcattggtatttttattggagggaagaccaatggcttattt

SEQ ID NO: 19090 - protein, 534 aa, Nicotiana plumbaginifolia; identical to SEQ ID NO: 4573

SEQ ID NO: 19091 - DNA, 1887 bp, Nicotiana plumbaginifolia
  CDS (31)..(1617)
atttttcaggagttgatcttgtaaagcatcatgggtaattgctgtgtgaaacccggcaaatctgctgaaaaaaagaagaacaaaaagaacaaaccaaaccccttttcaattgattatggggcatctgggggtggagttaagcttgttgtattgaaagaaccaacagggcagaacatacacgacaagtatgatttgggtcgtgagctcggaagaggagaatttggggttacttacctatgcactgaagtggacacaggcgataagtatgcctgcaaatcaatatccaaaaagaagttaaggactgcagtcgatatcgatgatgttaggagagaggttgagatcatgaagcatttgcctaagcatcctaatattgtgactttaaaggatacatatgaggatgataatgcagtgcatattgtgatggaactgtgtgagggtggtgagttgtttgaccgtatcgtagctagaggtcactataccgagagggcagctgctggaattttgaggactgtcgttgaagtcgttcagatgtgtcacaggcatggggttatgcatcgtgatctcaaacctgagaactttctttttggtaacaagaaagaaacagctccactgaaagcaattgactttgggttgtcagttttctttaagcctggggaacgctttaatgagatagttggaagtccttattacatggctccagaggttctaaagcgtaattatggaccagaggttgacgtctggagtgctggagttatactctacattcttctttgtggtgttccacccttctgggcagagactgaacaaggagtagcccaagcaattattcgttctgttattgatttcaagagggatccatggcctaaagtttctgataatgcaaaggatcttgtaaagaaaatgcttgatccagatccaagtcgacggctcacagctgagcgagttcttgagcatccctggttacaaaatataaagaaagcaccaaacgtctcattaggcgagactgtaaaagcaaggctcaagcagttttcagtgatgaacaagctcaagaaaaaagctctaacggttatagctgagtttttgtctgcggaggaagtggcgggaatgagggacgcatttgaaatgatggatactggaaagaagggccagataaaccttggagaacttaaagatggtttacagaagcttggccatcagacctctgatgttgatcttcagattctcatggaagctgccgatgttgatggagatggaagtttaaattatgcagagttcgttgctgtatctgttcatcttagaaagatggctaatgatgaacacctgcacaaagcattttcatttttcgacaaaaaccaaagtggttacatagaaatcgaagagctgcgttgtgccttaagcgatgaggacgacaacactagtgaggaagtcatcaatgccattatgcatgatgttgacacggataaggatggtcgcattagttacgaggaatttgctgcgatgatgaaggctggtacggattggagaaaagcatcgcgacagtattctcgtgaacggtttaacagcctcagcttaaaattgatgagggatggctcgttacaactcgaaaacaaagcctaggatgagcaaatccaaaagaaagaaatgttagaggaaaaaggaaattttttcactaatagatatctgagtatgaagttcttgtttcctcttattatgtctaaaaaagaattttctgccatctgaactccatcttaggcatatcaacttgtaactattaggcaagctttaggaatgtttattctatgatatttaaatgtatggatagctttatttacttgtaaatatatggaatcagagatcacttaaaaaaaattaagtatttttcttctg

SEQ ID NO: 19092 - protein, 528 aa, Nicotiana plumbaginifolia; identical to SEQ ID NO: 4575

SEQ ID NO: 19093 - DNA, 1828 bp, Triticum aestivum
  CDS (43)..(1599)
tcgtgccgctcaatctcccctcgtcaaacccattcacacacaatgggcaaccgcacctcgcgccaccgccgcgccgccgcggaccagccggccacggcccctccgccgacggcccagcccaaaccccagccgccgccgaagccccagacggcgccggccccggccccgacgccggaagcgggacaggtggccatgggccgcgttctgggacgcccgatggaggacgtgcgcgcgacctacaccttcggccgcgagctcggccgggggcagttcggggtcacctacctcgtcacgcacaaggctacgggccagcgcttcgcctgcaagtccatcgccacgcggaagctcgtccaccgcgatgacatcgaggatgtgcagcgggaggtgcagatcatgcaccacctcacgggtcaccgcaacatcgtcgagctccgcggcgcctacgaggaccgccactcggtcaacctcatcatggagctatgtgagggcggggagctattcgaccgcatcatcgcgcgggggcactactccgagcgagccgccgccctgctctgccgcgagatggtctccgtcgtgcacagctgccactccatgggggttttccaccgggatctcaagcccgagaactttttgtttctcaacaacaaggaggactcgccgctcaaggccactgacttcggtctctccgtcttcttcaaacacggggagcagtttaaggatctcgttggaagtgcgtattatgttgctcctgaggtactgaagcggcactatggagcagaagctgacatatggagtgcggggattattctgtacatccttctgtctggtgttcctcctttttgggcagacaatgaggatggcatatttgaggctgtcttgcttggtcacatagatttctcatctgatccctggccttcaatatctaatggtgcaaaagatttggtgaagaagatgttgcggcaagaccccaaagagcgcttgactgctgcagaaattttgaatcacccatggattagggaagatggagaggctccagataagccacttgacattactgttatcagtagaatgaagcagttccgggcgatgaacaagcttaagaaagttgcattgaagatcgttgcagagaacttgtctgaggaagagataacaggcttgaaagaaatgttcagatccctggacactgataacagtgggacaattactcttgaagagctaagatctggtttaccaaaacttggcaccaaaatttctgaatcagaaattacacagttaatggaggcggctgatgttgatggaaatgggaccattgattattctgagttcgtatcagcgacaatgcacatgaatagattggagaaggaagaccacatacttaaagcatttgaatattttgataaggaccacagcggatacataacagtagatgagctggaagaagctctgaagaagtatgacatgggggatgataaaacaattaaagatattatcgctgaagttgatacagatcatgatggaagaatcaactaccaggagttcgttgccatgatgagaaacaacagcccggagattgttccaaatcggcggcgcatgttctaattatcttctaccgtaacatcttcctggccccattatcgtccaagaataattttgagggatgtgccgctttgatgttattgtccctcatctttagatttggcgtgtatttccttgatcacatgatcggttccattgctgctccgagggtattatgatcatatgcgtactcctcctgatcatttatatggaaacaggcgtggtgtaacagttttttaatgattatgttaag

SEQ ID NO: 19094 - protein, 518 aa, Triticum aestivum; identical to SEQ ID NO: 4577

SEQ ID NO: 19095 - DNA, 1800 bp, Oryza sativa subsp; identical to SEQ ID NO: 4582
  CDS (1)..(1800)

SEQ ID NO: 19096 - protein, 599 aa, Oryza sativa subsp; identical to SEQ ID NO: 4583

SEQ ID NO: 19097 - DNA, 2144 bp, Cicer arietinum
  CDS (151)..(1773)
ttcgcggatccgaacactgcgtttgctggctttgatgaaaaccaacttttcatttctcttcaaattttctcctctccccattttacccttccaccaaaaccaatttccagatccaattcaaactcagatctaacaaaattgtaaaacgccatgggtaattgttgcgctacccctccggtaaccggagaagaaacaaacaacaacaaaaagaaaaacaacaaaaaacctaaaaaggaaaatcccttcgcaatcgattacaatttcaacgcgaacaacacgaactcaaaactcaccgttttgaaggatccaacgggacgcgaaatcgaggttcgatacgagctaggtcgtgaactaggtcgaggcgagttcggaataacgtacctctgtacggacaaagaaaacggagaagaactagcgtgtaagtcgatatcgaagaagaagctaagaacattggtggatattgaagatgttaggagagaagttgaaataatgaaacacatgcccaaacatcctaatattgttacgttgaaagatacttatgaagatgataatgctgttcaccttgttatggagctttgtgaaggtggtgaactttttgatcggattgttgcgcgtggtcattatactgaacgcgccgccgccgctgttaccaaaaccatcgttgaagttgttcagatgtgccacaaacacggagtgatgcatagggatctcaagcctgagaactttttgtttgcaaataagaaggagacagcagcattgaaagctatagattttggattgtcagtgttttttacaccaggggaaaaatttaatgagatagttggaagtccatattacatggctcctgaggtattgaagcgaaattacggcccagaggttgatatctggagtgctggagtaattctatacatcttactttgtggtgtccctccattttgggcagaaactgagcaaggagttgcacaagcaatcatacgatctgttgttgatttcaaaagggatccatggcctaaagtttccgataatgcaaaagaccttgtgaagaggatgctaaatcccgaccctaagcggcgacttactgcacaggaagtattagatcatccatggttacaaaatgcaaagaaagctcccaatgtttcattaggagaaacagttagagcaaggcttaagcaattttccgtaatgaacaagcttaagaaaagagctttgagggtcattgcagagcatttgtcagtagaagaagctgctggactaaaagagggattcaagctcatggatacaagcaacaaaggcaagattaacattgatgagctgcgaataggattgcataaactaggccatcaaattcctgatgcagatgtccagattcttatggaagctggcgatgtagacagggatggacacttggattatggagagtatgttgccatttcagttcatttgagaaagatgggaaatgatgagcatcttcacaaagccttcgattttttcgatcagaaccaaactgggtatattgagattgaggagctgcgcaatgccttatctgatgaaattgaaacaaatagtgaagaagtgattagtgcaattatgcatgacgtggatacagataaggatggaaagataagttacgaggaatttgcttcaatgatgaagctgggaacagattggagaaaggcgtccaggcagtattcgcgagagaggttcaacagtctcagcctgaaattgatgagggatggttcattgcaattaaccaatgaaaaccaatgccagtagagatggcttttctttagaaaaatgccaaaatttacttttggaaaaagaaaacatgataaagaagtctattatatttttttaattttaaccttctcttcattgtaattcttttctccaacaccccccatttttgggtgaaaaaaattaggatgttggctccagcagtgttgctacgttgtttgatgtgttcttttatttttactttttctgggtctgttgaggttgtgataggaaagacaggacagggtgggagagtcttgacaagtcttcatttctggttgtaaatatttctaaattatcacgcttttatattaacgtgtactataatttttaggcaaacctttccttccaaaaaaaaaaaaaaaaaaaaa

SEQ ID NO: 19098 - protein, 540 aa, Cicer arietinum; identical to SEQ ID NO: 4585

SEQ ID NO: 19099 - DNA, 2228 bp, Cicer arietinum
  CDS (61)..(1731)
  misc_feature (1888)..(1888): n is a, g, c or t
  misc_feature (1956)..(1956): n is a, g, c or t
  misc_feature (2183)..(2183): n is a, g, c or t
caatcttcttcttcttccattttcccccaaatacttatccttactttttctctttactaaatgggttgtcaaggtagcaaggagaagaacaaacctacgcctgattttactgcccgccaccatggatcatccgctactgctgcttccgccagtggtgttgccactaataatcaccagtaccactctgttcaaccatcttcaactcatgttcaaacaccacctccaaaaccagactcaaatccaaaacccactgtcactacccagaatgtcaaaacagttcacaaaacagacacaaccatattaggtaaaccctttgatgatataaagaaacattacactttaggtcaagaattaggtagagggcaatttgggattacttatttttgcactgagaattcaactggcaacacttatgcttgcaaatcaatattaaagaggaaacttgtgtctaaatctgatagagaagatattaagagagagattcagattcttcagcatttgtctggtcaaccaaacattgttgaattcaaaggtgcttatgaggatagattctctgtgcatcttgtcatggaactttgtgctggtggagagttatttgatagaatcattgctcaaggtcactattcagagagagctgctgcatccatttgtagggctgttgttaatgttgtgcatatttgtcatttcatgggtgttttgcatcgcgatttgaagcccgagaatttcttgctctctagtaaggatgaaggagcaacacttaaagctactgattttggactttctgttttcattgaagaaggaaaggtttatcgcgatatggtaggcagtgcttactacgttgctcctgaggtactgcgtcgtagttatggaaaggaaattgacatttggagtgcaggcatcatcttgtatattctccttagtggtgtaccacctttttgggctgaaactgaaaagggaatatttaatgccatactggaaggagaacttgactttgctagtgaaccatggccatcaatatcagacagtgctaaagatctagtcaggaagatgcttaatcacgatccaaagaagaggattacttctgcacaagtccttgaacacccgtggatgagagaaggtggagaggcctctgataaaccgattgatagtgcagttctttctagaatgaaacaattcagggcaatgaataagctcaagaagcttgcattgaagattattgctgaaaatctatcagaagaggagattaaaggtctcaaggcaatgtttgcaaatatggacactgacaatagtggtaccatcacctatgaagaattgaagactggcttggctcgaatcggatcacggttgtctgagaccgaagtgaagcaacttatggagctggctgatgttgatggaaatgggtcgattgactatcttgaattcatatcggctacaatgcataggcacagacttgaacgggatgaacacctttacaaagcattccagtattttgataaggacaacagtgggcatattactagagaagaattggagactgccatgacacagcatggaatgggtgatgaagcaacaataaaggacataatttctgaggtggatacagatcatgatgggagaataaactatgaggaattttgtgcaatgatgagaagcggaatgccaccaccagggaccactattataaatctacagagtgaattcgatttcatatgttcatgcaattcattatgaaagccatttggttgagagacttattgtatcccagaatatgcaagacactttgaggttctttgaaatcccaattctcgtagcaaggttgttttcgtacgcatggtgctgaaaatgattgattgcttgaagtaatgttatgcttatgcatttctttgtncatttaatttccgtcagctgtcacattttccaagtggcttgagcccttgatttttatgttcaaatgcntgaccgtgatattatagagttatccttttagttatggcagaggaaagaataatcactggaggaatttgatttcatttacctgtaatgtatgaggaattgcaaacttaagtctttagtttccataatgtattgataatgctattgtgcaagtgctagattagtagttttcctccttttctgccaagagcttttctttgtaagtcaggatcatgctcgcttatttggangcaagttatatgaactgagattatataaaaaaaaaaaaaaaaaaa

SEQ ID NO: 19100 - protein, 556 aa, Cicer arietinum; identical to SEQ ID NO: 4587

SEQ ID NO: 19101 - DNA, 1533 bp, Zea mays; identical to SEQ ID NO: 4588
  CDS (1)..(1533)

SEQ ID NO: 19102 - protein, 510 aa, Zea mays; identical to SEQ ID NO: 4589

SEQ ID NO: 19103 - DNA, 2185 bp, Capsicum annuum
  CDS (119)..(1732)
taaaataataatacaactggtagttgcaagagtagatcgttgacctccttcatcttcttcttcttcttcttcttcgacgagctagcgttgagtgtgagctggggactttgattgcttgatgggcaacgcatgccgtggatctttccgagccaaaacttttcagggcagctaccctcagaaccattccacttccaagcatagtaaagtagaagaagaacaacaaccagacccagcccccctcgtcgtcaaagatcatagcaccagcaccaagaatatgaaccatcgcagcagcgctaaccagtcgtgttgcgttctgggtcataagacccctaacattcgggatctctacgctctcggtcgtaaacttggacaaggccagtttgggaccacttatttatgcaccgaattgtccacctgtatcgactacgcctgtaaatctattgccaagagaaaactcatctccaaagaagacgttgaagatgtccgcagggaaattcagataatgcaccatttggctggtcacaagaacatcgtttccatcaagggtgcttatgaggatcccttgtatgttcatattgtcatggagctttgtggcggcggtgagttgttcgaccgcatcattcaaagaggacactataccgagagaaaggctgctgatttgactaaaattattgttggtgttgttgaggcatgccattttatgcatagagatctcaaacctgagaatttcttgttggttaacaaggacgatgatttctctctcaaggccattgactttggactctctgtattctttaagccaggccaaattttcacagatgttgttgggagtccatattacgttgctcctgaggtgcttctgaagaattacggtccagaagcagatgtttggacagcaggagtcatactctatatcctgctaagtggtgttccaccattctgggctgaaacacagcaggggatatttgatgcagttctgaaagggcacattgattttgactcagatccttggcctttaatatctgagagtgcaaaagatctcatccggaagatgttatgcatgcgaccctcagagcggttaactgctcatgaagtactatgtcatccttggatttgtgaaaacggtgttgctccagatagagcacttgatcctgcagtactttctcgcctcaaacacttttctgcaatgaacaagttaaaaaagatggctctgcgggtgattgctgaaagcttgtcggaggaagagattgccggtcttaaggagatgtttaaggccatggatactgataatagtggtgcaattacattcgatgaactaaaagctggtttgagaaaatacggctctactctaaaggatatagagatacgggaacttatggatgcggctgacgtggacaatagtggaactattgactatggagaattcattgcagcaactattcaccttaacaaactggaccgcgaggaacatctcatggcagcatttcagtattttgacaaggatggaagtggttatattacagttgatgagctccagcaggcatgtgcagatcataacattacggatgtattatttgaggatattatcagagaagttgatcaagataccgatggacgcattgattatggagaatttgttgctatgatgcaaaaaggaaatccatgcataggaagacgaactatgcgaaatagtttgaatttcagcatgagagatgcgcccggagctcattagctttttgaatgggcatattatttagagaacatagcagaggcgatgaaactaccaaaacgacgtctgctacccagtcctgacaggagcatgccatgctctcaagtttgattagaagaggatgactgaaagagctcgtagactgctgttggcttgctgtgtgcctcaacaaaatgttgaaatctctgtagaccttagtgtgtgaaattgtttcagctgcccagtgttcttagttgaggcttcacgcttgcttcaattagaaggatacatccttctcaatcagtttcacatttgtaatttacataatgttgtattttatccgtgagtttttttctctattgggagacgtgtctttattgttttaaaagggaaagaacacgatttggtgcaacaatttacacaagctatgtttgcagaacatggtcgatgacgagcttgattcaatcacaacatatt

SEQ ID NO: 19104 - protein, 537 aa, Capsicum annuum; identical to SEQ ID NO: 4591

SEQ ID NO: 19105 - DNA, 1614 bp, Glycine max; identical to SEQ ID NO: 4592
  CDS (1)..(1614)

SEQ ID NO: 19106 - protein, 537 aa, Glycine max; identical to SEQ ID NO: 4593

SEQ ID NO: 19107 - DNA, 1473 bp, Glycine max; identical to SEQ ID NO: 4594
  CDS (1)..(1473)

SEQ ID NO: 19108 - protein, 490 aa, Glycine max; identical to SEQ ID NO: 4595

SEQ ID NO: 19109 - DNA, 1524 bp, Glycine max; identical to SEQ ID NO: 4596
  CDS (1)..(1524)
  misc_feature (1179)..(1179): n is a, g, c or t

SEQ ID NO: 19110 - protein, 507 aa, Glycine max; identical to SEQ ID NO: 4597

SEQ ID NO: 19111 - DNA, 2099 bp, Spirodela oligorhiza
  CDS (319)..(1965)
ggaaccttcaggttctgcttcctcggggccgaagaaatcccgattgctccgccttctttgccccccttcttcttcttccgccacggtcagggatgagattgttaccctgaggtagatcgattcctctttgaatttgcagagctccgctggctgcttgcagtttagggttctcgcggtggatcacggtgagtcgtcttatttcggctggatttgggacgatcgcgtgctcggttggtctgatctgagtacgcgatctcttcgcctctcgtgggtagggaggaatcctgaatcggtgatcagttttgggattttgaggcgatgggtgtctgcttcagcaaggcctctaagccttctggtaatggctaccagcctccgccgccgcagccgtacaagcccccgccgccgccggctgctcgcccagcgcagccgtcggtccaaatcccgcagacccaccatacccagcagaggcagcagagcgaccatcaatccgcgtctcaggcagcgccgtctcccgcgaagcagcatctcccttctccccgcaacagtcctgccgcggccgtctcggcggcgacgccggcgaccgtgctgggcaagccctttgaagacgttaaggctaagtacacgatcggtaaggtgctggggagaggccagttcggcgtcacctacctctgcacctgcaactccacgggagcgaagtacgcctgcaagtcgatctcgaagaggaagctggtgaaccggaacgacagggaggacgtgaagagggagatccagataatgcagcacctgagcgggcaggagaacatcgtggagtttaagggggcgtacgaggacaggcattcggtgcatgtggtgatggagctctgcgcaggaggggagctttttgataggataatcgccaaggggcactattcagagagggcggcggcggcgatgtgcaggtcgatcgtgaatgtggtgaacatctgccatttcatgggggtcatgcaccgagatctcaagccggagaacttcctgctctccaccaaggacccgggtgcggcactcaaggccacagatttcgggctctccgtcttcatcgaggaaggcaaagtgtacagaagcatagtgggcagcgcatactatgtcgctcctgaagtgctaatgcgctcttacggcaaggagatcgacgtctggagcgccggaatcatcgtctacatccttctctccggcgtgccgcctttctggggcgagacagagaagaagatctttgactccatcatgaaggacgacatcgacttccagtctgatccctggccgtcgatctctgccagtgcaaaagatctcgtctcaaagatgctgacaagggatcctaagaagaggatcactgcggcccaagttctcgatcacccatggatcagagtggacggcgaggcgtcggataagccaatcgacagtgcagtgttgtctaggatgaaacagttcagggctatgaataagctcaagaagatggctctcaaggtcatcgcagagagcctatcggaagaggagattaaggggctgaggcagatgtttcagaacatggacaccgatcaaagcgggacgatcacctatgaagagctcaagaccgggcttgctcgacttgggtcgagactttcagaggccgaagtcaaacagctcatggatgctgctgatgtggatgggaatggatccattgactacattgagttcatcacggccacgatgcaccggcacaagctagagagagaggagcacctttactcggcgttcagttactttgacaaggataatagcgggtacatcactagggatgagttaaagcaggcactggaggagcatgggatgggtgatgccgacagcattagagagataatatctgaagtggacacggacaacgatgggaggattaattacgatgagttttgcgccatgatgaggagtgggacgcatcctccgggtagaccttaaggtttcgattgggtgtgattagagagagagagagagagagagagaggggcatgtctgatattgaggttgggttgtgtgaatattcttagattctttatcatgtgaacttttaatcaaaaaaaaaaaaaaaaaaa

SEQ ID NO: 19112 - protein, 548 aa, Spirodela oligorhiza; identical to SEQ ID NO: 4599

SEQ ID NO: 19113 - DNA, 1785 bp, Oryza sativa subsp; identical to SEQ ID NO: 4602
  CDS (1)..(1785)

SEQ ID NO: 19114 - protein, 594 aa, Oryza sativa subsp; identical to SEQ ID NO: 4603

SEQ ID NO: 19115 - DNA, 1749 bp, Arabidopsis thaliana; identical to SEQ ID NO: 4604
  CDS (1)..(1749)

SEQ ID NO: 19116 - protein, 582 aa, Arabidopsis thaliana; identical to SEQ ID NO: 4605

SEQ ID NO: 19117 - DNA, 2368 bp, Ceratopteris richardii
  CDS (225)..(1793)
tctcccagcaggaatctttatgtgccgaaagagcaatctcagatctagtcatcccatttgaatctctgcaatgtgcccaagatttctcatcaacaggatcaatacatttggacgtgaagagtctttatgtttttcctgtcacattgtcctcttttcatatacctggctggtccattctagatcagctcgttcttgtgtgcgtttagcgagttgattatacaacaatggggaactgttgcggaacagatggattcaaacatgaaaggcctcttcctgcccacccaaatcgtcaaggagaagacaaaaccggtgcgccgaaggtaatttcgcacacaaagctctcgtcatgtggtgagcagagcgtcaatgagaagtatcaccttggaagagagcttggtcgtggtgaatttggcatcacttacttatgcacagatcgggagactgacgaagtgctagcatgtaaatctatttctaaagggaagcttaggacacccatagacattgaagatgttcgaagagaggtggatattatgagacatcttcctaaacatccaaacattgtgactttggaaggggtgtatgaggatgagaatgcagtgcatcttgtcatggaactatgtgaaggtggtgaattgttcgatcgcattgtagcaagaggtcactacagcgagagagctgcagctgcggtcatgcgtaccattcttgaagttgtacaggtttgccataggcatggtgtcatgcaccgcgaccttaagccagaaaattttctgtttgcaaacaagaaagaaaattcgcccttaaaggctattgattttggattatccatcttcttcaaacctggggagaagtttaccgaaatagtaggaagtccatactatatggcacctgaggtactgaaaagaagttatgggccagaagttgatatatggagtgcaggagttatactttacattcttttatgcgggagtccccccttttgggctgagaccgaacaattagtagcccaggccatcttacgtggtaatgtggacttcaacagagatccttggccaaatgtttcagaaaatgctaaggcgctagtgcggcaaatgcttgaaccagatccaagcaaaagattgacagctcaacaagtccttgatcattcgtggcttgtgaatgcaagaaaagctccagatgtccctcttggtgatgctgtttgtgctcgactcaaacagttctctgctatgaacaaactgaagaaaagggctttaagagtgattgcagagctcttgacaggtgaagaagttgagggcatcagagctatgtttaacatgatggatgtagagaggactggttctcttacgtttgggcaattgaaagcagggctttataagcttggttcgcagctccctgaatctgaaatccaacaattaatggaagctgctgatgtgaatgggaatggaactctcgactatggtgaatttgttgctatcactgtacatcttcaaaggatggacaatgatgagtgcctaaggaaagcttttaattttttcgatctaaatggtgatggattcatagaccgtagtgaactgcatgaaatgctggaagctgatcttggggaagtaggcactgacataattgatgacataatccaagaggttgacattgataaggatggaaggataagttatgatgagtttgcaagcatgatgagaactggcacagactggagaaaagtatctagaaatttctcgagggagagatatgcgagcttgagcattaagctgatgcaggaagggtcattaaaactgtagaagggatggcttttgctttggggatgtctgcagaacaagttgtggtgcttgaaaaggatgcaaaatattatctcagtttggaatccagctattaatgaaggggagactgctaatcatgtgcaatggtcttgcaagttaaccacaaaagtggattccttttatgtgatttttacattgtgtaccttgtcgatcattctatgggtggaaaggactagggagtgaatttctttgagtttgacaataagttgaaatggaggccgtcagcatctggtacggaaggcaattcaaaatgaggaaatttgttgtcaggcttgcatcatgtggatctttcgaactatgagttcttaacgtgtgttttagagaatccaaagacttaaaacttgaaaaattcatgttgtaaaatgggggaaagtgattgctataaagcttgtacctttagcattgaagcatttgctatggtcgatgtaacttatgaagagcagaggtggcctctgtgattctattttggcccgtttgtggcacacactttatgcagtactagcagttttcgtggctgtttcaaaaaaaaaaaaaaa

SEQ ID NO: 19118 - protein, 522 aa, Ceratopteris richardii; identical to SEQ ID NO: 4607

SEQ ID NO: 19119 - DNA, 2248 bp, Oryza sativa
  CDS (456)..(2084)
gcggccgcaagcgggttctagtagatttcgtgtagtggagagcaaaaagtttgtgtggttttggtggtcgagtctggtggtggaagcccctcaggccggagatttcctccttccggtggacgaccaaaggagccgcccttggaaggaatttcttgccatcccagaggtttccacttcctcaccttggctaagtttaaaactttccgctgttttcccttgccgtgtagtaacaagtatgggttgctgatcaagtctttgttgtgaaaaatgtcaggttggggatttcctcacgcccaggaagccaagcaagggctgccttagcgaggaactcttccaattggacgggtttgcgcgtagcggtgcggctatataagtggaaatctgcatccctgggaaggatacaattgttttgaggctgggaactttggaattggtttgcataaggagttcttggaatggggaatcagtgccagaacgggactcttgggagtgattaccacaatcggttcccaagggagcatgccgttgggtacgttcagggggatagctacttggacttgaagaagttcgatgatacttggcctgaggtgaacaacttcaagcctactgctgctagtattctcaggcgggggttggatcctacatctatcaatgtccttgggcggaagacagcggacctaagggagcattatatcattggtcggaagcttggtcagggccagtttggcacaacttacctctgtaccgagatcaatacagggtgtgagtatgcttgcaagaccatcccaaagcgcaagctcatcaccaaggaggatgtagaagatgtgcgccgtgagattcagataatgcaccatttgtcgggccacaagaatgttgttgcaatcaaggatgtctatgaggatgggcaagcggtgcacattgtgatggagccctgcgctggtggggagctctttgacaggattcaggagaaggggcattacagcgagcggaaggctgcagagcttataagaataattgtcagcattgtggctatgtgccattcgctcggggtgatgcaccgtgatcttaagccagaaaatttcctccttttggataaagatgatgatctgtcaataaaggcaatagattttggtctatccgtgttcttcaaaccaggtcaggttttcactgagctggttgggagtccatattatgttgctcctgaggtatggcacaaacgttatggaccagaatctgatgtgtggtcagctggagtgatactttacgttttgctgagtggagtgccaccattttgggcagagacacaacaaggaatatttgatgcagttctgaagggtcacattgattttcaatctgatccatggccaaagatatctgacagtgcaaaggatcttataagaaaaatgctctctcattgcccttcggagcgtttgaaggcccatgaagtgctaaggcatccttggatctgtgaaaatggagttgccactgatcaagctctggatcccagtgttatctctcggctcaaacaattctctgcaatgaacaagttaaagaagttggctctgagagtgatagctgagcgtctttcagaggaggagattgctgggttaagagaaatgttcaaggcagtggacacaaaaaatagaggtgtaatcactttcggtgagcttagagaaggtttaagaagatttggcgctgaatttaaggatacagagattggtgatataatggaagcggcacacaacgacaataatgtaacaatccattatgaagaatttattgctgcaactctacctcttaacaagatagaacgtgaggagcacctgctggcagcttttacatattttgacaaagatgggagtggttatatcacagttgacaagcttcaacgagcttgtggagaacataacatggaggattcactccttgaagagattatttcagaggttgatcaaaacaatgacggccaaattgactacgccgaatttgtagccatgatgcaaggcagcaacgttggactagggtggcaaacaatggaaagcagtttgaatgtagcattaagagacgcacctcaagtacattgatgcacgaatgtatagattttgttctcttctcttgtccattcattcttcactacccaattcgggtctgtgacttgtatgagaagagatcaagtcaattcatttagttggtatttattccaagcaagtgtgagttggcaaaaaaaaaaaaaaaaaaaaaaaaaaaa

SEQ ID NO: 19120 - protein, 542 aa, Oryza sativa; identical to SEQ ID NO: 4609

SEQ ID NO: 19121 - DNA, 2214 bp, Cucurbita maxima
  CDS (150)..(1826)
atttagttgctttcgctgttcatggaatccatttttgtttccttctttgccggaacagcaacacgggttccgcgattgatgaggcataattggtgagtttgggggagacagaccgtgagggtctgagtagaagcgcgattctgtgtttcatgggcaatacctgccgtggatctttcaaagggaatatatttcagggatacagccagcccgaggagagctcaaccccaaattttaagcgcaacatcaacggttcctctgaccattccccttccagcatcaacactaacaatctaatttcccaagcctttgctgaagagaacaaaaccaaatcaaaggacaacgattgcaagaaagactacacaatgaggaaaagcgccgagaatcaagcctattatgttttgggtcataagactgccaatattcgtgatctgtatacactcggtcgcaagttaggacaaggacagtttggaactacttatttatgcactgagattatgactggcatcgagtatgcttgtaagtctatctccaagaggaagttgattgcgaaggaggatgtggaggacgttcggcgggagattcagatcatgcaccatttggcaggtcataagaatattgttaccatcaagggtgcttatgaagattctttgtatgttcatattgttatggagctttgtagtggcggtgagttgttcgataggatcatccaaagggggcattacagtgagagaaaagctgctgaattgaccaggattattgttggtgttgttgagacttgccattcgcttggagttatgcatagagatttgaagccagaaaatttcttgttggttaataaggatgatgacttctctcttaaagctattgattttggcctctctgttttcttcaaaccaggtcaaatcttcactgatgttgttggaagcccatactatgttgctccagaggtactgctcaagcattatgggccagcagcggacgtgtggactgcaggagttatactgtatatattgctaagtggcgtgccaccgttttgggcagaaactcaacaaggaatatttgatgctgtgcttaagggacatatcgacttcgactctgacccttggcccctaatatctgacagtgcaaaggatctaataaggaagatgctatgttctcgaccatcagatcggttgactgcacatgaagtattatgccacccttggatttgcgaaaatggagttgctcctgatagggctctcgatccagctgtactttctcgactcaaacaattctctgcaatgaacaagttaaagaagatggcattacgagtgattgctgaaagcctttccgaagaggagattgctggcctaagagaaatgtttacagctatggacactgataacagtggtgcaattacgtttgatgaacttaaagctggtttgagaagatatggttcaaccttgaaagataccgaaatacgtgacctcatggaagcggctgatattgacaatagtgggactatagattatggggagtttattgctgcaaccattcatctcaacaaactagagcgtgaagaacaccttgttgcagcgtttagatactttgacaaagatggaagtggttacatcacagtagatgaactgcagcaagcttgtgcagaacataatatgactgacgcgtaccttgaggatataatcagagaagttgatcaagataatgatggaaggattgattatagcgagtttgttgccatgatgcagaaaggcaatgcaggaattggaagacgaactatgagaaacagtttgaatttgagcatgagagacggacctggtgctctttagtttctgaatcatgtggttgatgtacaggttgtacagcggatgtaaagctggggaatcgactctttcccgacacgattgagcttcttttcctcctagcttctaggatcgttgccaaggatttctgtggtgagaactcttctcgagcatttcactaacgtttccttcttatcgctgtatagccaaaggatgatgtggtatatgaacatctgtgtgtgtgaaattgcaagagctgtttgagttgctaggttcttttgcataacattttcaattggggactattaaatgtttgtatagatacaatcttctacctctggttcggatttcgttccaatattgtaacttttctccattgctaattccattgttcgaccaaaaaaaaaaaaaaaaa

SEQ ID NO: 19122 - protein, 558 aa, Cucurbita maxima; identical to SEQ ID NO: 4613

SEQ ID NO: 19123 - DNA, 2270 bp, Cucurbita maxima
  CDS (131)..(1846)
  misc_feature (1920)..(1920): r is g or a
tctctccactgttcatggattccagaaccacaacaacaattcgggtttcgtgattgatgagacgtgattggtgagttttgggagagagggagcgagagagaaacagaactgaagggcgattacgtgtttcatgggcaatacctgccgtggatctttcaaagggaatatatttcagggctacagccagcccgaggacagctcaacactctattctaagcgcaataacagcagttcttcagcccgatcgaattctgatatttcccctaccagtataaacactcacaatttaattgcacaagagttttccaaagagaacaagacgaaatccaaggataacgattacaatcaagccttcttaagccccaccaagaaagacttcacaatgaggaaaagcgctgagaatcaagcctattatgttttgggtcataagactgcaaacattcgagatctctatacgctcggtcggaaattaggacagggacagtttggaactacttatttgtgcactgagattaccactggcattgagtatgcttgtaagtctatctcgaagaggaagttgattgcgaaggaggatgtcgaggacgttcgacgggagattcagatcatgcaccatttggcaggtcataagaatattgtaaccatcaagggtgcttatgaagattctttgtatgttcatattgtaatggagctttgtagcggcggggagttgttcgacaggatcatccataggggacattacagtgagaggaaagctgctgagttaaccaggattattgtcggggttgtcgagacttgccattcgcttggagttatgcatagagatttgaagccagagaatttcttgttggttaacaaggatgatgacttctctcttaaagctattgattttggcctctctgttttcttcaaaccaggtcaaattttcactgatgttgttggaaggccatactatgttgctccagaggtacttcttaagcactatggaccggcagcggacgtgtggactgcaggagttatcttgtatatattgctgagtggtgtgccaccattttgggcagaaactcaacaaggaatatttgatgctgtgctgaagggacatatcgacttcgactcagacccttggcccctaatatctgacagtgcaaaggatattatcagaaagatgctatgttctcgaccatcagatcgtttgactgctcatgaagtattatgtcatccttggatttgcgaaaatggggttgctcctgatagggctctcgatcctgccgtactttctcgactcaaacaattctctgcaatgaataagttaaagaagatggcattacgagtgattgctgaaagcctctctgaagaggagattgctggccttagagaaatgtttacagctatggacactgataacagtggcgcaattacctttgatgaactcaaagctggtttgagaagatatggttcgaccttgaaagatattgaaatacgcgaccttatggatgcggctgacattgacaatagtgggactatcgactatggagaatttattgctgcaaccattcatctcaacaaactagagcgtgaagaacaccttgttgctgcatttcgatactttgacaaagatggaagtggttacatcacagttgatgagctgcagcaagcttgtgcagaacataatatgaccgacgcatacctcgaggacgtaatcagagaagttgaccaagataatgatggaaggatcgattatggtgagtttgttgccatgatgcagaaaggcaatgcaggagttggaagacgaactatgagaaacagtttgaatttgagcatgagagacggacccggtgctctttagcctccgaaccacacgcttcagtaaaggttgacagccggttgtcgaattgaggaattgataccttcccgaaggarctcctcttcctcctagcttcaaggatcattgcgaaggatttctgtagtgaagactgcttgagtatttccctaatatatttccttctcattgctgtattagccaaatggtgatgtggttagaaatatgaactcccgagtgtgaaagtgctagagagatgttcgagttgctagggttcttttgcataacattttcatttggggattatttatctgtttgtatagatactcttatcttcttctacctctgcttcaaatttcattacaatattgtaacttttctccattgataattccatcaagttgtccattcttccaaaaaaaaaaaaaaaaaaaaaaaaaaaaaaaaaaaa

SEQ ID NO: 19124 - protein, 571 aa, Cucurbita maxima; identical to SEQ ID NO: 4615

SEQ ID NO: 19125 - DNA, 1656 bp, Oryza sativa subsp; identical to SEQ ID NO: 4616
  CDS (1)..(1656)

SEQ ID NO: 19126 - protein, 551 aa, Oryza sativa subsp; identical to SEQ ID NO: 4617

SEQ ID NO: 19127 - DNA, 2229 bp, Solanum lycopersicum
  CDS (219)..(1880)
ggcaagtggggaaaaagcctagaaaaataacaagggcaaaagctggcaaagaaagtgtgtagcattttcatggagttttttcccatgaagtcaatgaagagggttcaaaacgttggcattttctgatctgtggaatatcttttaggttgttgttttttttgtaacttgttgaggaattgaagtatccaaagttcaatcttgttgaatagactgtagaaatgggtggttgttttagcaagaagtatacccaacaagatgctaatgggcatagggcaggaagaagagttaatcaagcatatcaaaaaccaccacaaccccagccagaaaggccatatcagcctcagccccagcaggaaaggccatatcagccaccgccacagccagcatatcagccaccgccacagccaaagccacaacctcagccccaccctgttcctgttactgtgcagtctggacagccccaagaccaaatgcaaggaccccatatgaataacatattgggaaagccttttgaggaaattagaaagctctatacacttgggaaagaattgggtaggggtcagtttggagtgacttactattgtactgagaactcaactgggaacccttatgcttgcaagtccatacttaagaggaagcttgtaagcaagaatgatagggaggatatgaagagggaaattcagattatgcagcatttgagtgggcagccaaacattgtggaattcaagggtgcttatgaagataggcagtcagtacaccttgtgatggaactttgtgctggaggagagttgtttgacaggattatcgcccgtggatattactcagagaaggatgctgctgagattattagacagattgtaaatgttgttaacatttgccatttcatgggtgtcatgcatagggatctcaagccagagaatttcttactgactagtaaggatgaaaatgctatgttgaaggcaactgattttggactttctgtcttcattgaagaagggaaggtgtaccgtgatatagttggtagtgcatattatgttgcccctgaagtgttgcggcgtagttatgggaaggaagcagatgtatggagtgcaggtgttattttgtatattctgctcagtggtgtacctccattttgggctgaaactgaaaagggaatatttaataccatactaaaaggagaaattgacttccaaagtgatccatggccatcaatatcaaatagtgccaaggaccttattcggaaaatgctaacgcaggagccaaggaagagaattacttccgcgcaagttcttgaacatccatggcttcgacttggagaagcatcagataagccaatagacagtgcagtcctgtccagaatgaagcagttcagagcaatgaacaagctcaaaaaactcgcattgaaggtcattgcggaaaatttatctgaagaagaaatcaagggtctgaaagctatgtttcacaacattgatacggacaatagtggcacaatcacttatgaagaactgaagtcgggattggctcggcttggatcaaagctaacggagactgaagtcaagcaactcatggaagctgctgatgtggatggaaatggatcaattgattacattgagtttattactgcaacgatgcatagacatcggctagaaagggatgagcatctttttaaagcttttcagcattttgacaaggaccatagtggattcatcacgcgagatgaattggaaaacgctatgaaggaatatggtatgggtgatgaggccaccatcaaggagataatcgcagaggtggacactgacaatgacggtaggatcaattacgaggagttctgtgctatgatgagaagtggaacaacacaaccacaacaaaagcttttctagtgcatcgagagcaaattacccttgcaacgagcagagaacgttcaccagccagcacgatggagagatgtctatcacgagaggatcagtaacttaacatacttccatatttcttcaatccttcagctatcttcaaaaagcactggagtacatgagacctttttcgtgtaggttgagttcgcgtggaaaatgtgtgtatagctagttaatggtatatttcgagtttcttgtaatgtatttgatcccccttcgtaattttgtgtggatcgcgttgtgaagttgacctcccgtagagattataacaagacaatctgaatatagctttatgcttgaaaaaaaaaaaaaaaaaaaa

SEQ ID NO: 19128 - protein, 553 aa, Solanum lycopersicum; identical to SEQ ID NO: 4619

SEQ ID NO: 19129 - DNA, 1797 bp, Solanum lycopersicum; identical to SEQ ID NO: 4620
  CDS (1)..(1797)

SEQ ID NO: 19130 - protein, 598 aa, Solanum lycopersicum; identical to SEQ ID NO: 4621

SEQ ID NO: 19131 - DNA, 1587 bp, Arabidopsis thaliana; identical to SEQ ID NO: 4622
  CDS (1)..(1587)

SEQ ID NO: 19132 - protein, 528 aa, Arabidopsis thaliana; identical to SEQ ID NO: 4623

SEQ ID NO: 19133 - DNA, 1788 bp, Arabidopsis thaliana; identical to SEQ ID NO: 4624
  CDS (1)..(1788)

SEQ ID NO: 19134 - protein, 595 aa, Arabidopsis thaliana; identical to SEQ ID NO: 4625

SEQ ID NO: 19135 - DNA, 1587 bp, Arabidopsis thaliana; identical to SEQ ID NO: 4626
  CDS (1)..(1587)

SEQ ID NO: 19136 - protein, 528 aa, Arabidopsis thaliana; identical to SEQ ID NO: 4627

SEQ ID NO: 19137 - DNA, 1809 bp, Nicotiana tabacum; identical to SEQ ID NO: 4628
  CDS (1)..(1809)

SEQ ID NO: 19138 - protein, 602 aa, Nicotiana tabacum; identical to SEQ ID NO: 4629

SEQ ID NO: 19139 - DNA, 2360 bp, Nicotiana tabacum
  CDS (199)..(1917)
ttttttttttttttttttctccttcttataactttcctcttaaatctctttattattctcttacattcacattcccttccccccccccccccccggccccatataattctctccttatatccataatctttctccaatttctctgatgatttggttttttctccaaaaactttgaggctttatattcatatcccaaatatgggtaataactgtttttctagctcaaaagttagtggttctaacagcaacaccccctccaccaccgccacagccaccaccgtgaatgtccggaggaacaaagcaaatccaccttctacatccacaattacatcaacaaaacaagaagggtctcattgcaataaacagaaagttaaagataaccacaaaagccaacaccaaaaacaacaacctagaaattctcagcaaaatgttaagaagcataataatgggaggagacagaagagtggggttattgcttgtgggaaaagaactgattttgggtatgataaagattttgataagaggtttaccattgggaagttgttgggtcatggccaatttggttatacctacgttgccacccacaagtctaatggagatcgcgtcgctgtcaagagaattgagaagaacaagatggttcttccgattgcagttgaggatgtaaaacgagaagtcaagatattgaaggccttatccggtcatgagaatgtggttcaattcaataatgcatttgaggatgataactacgtctacatagtaatggagttatgtgagggtggagaactcttggaccgcattttggccaaaaaggacagccgttatgccgagaaagatgcagcaatagttgtacgtcagatgctaaaagaagccgctcaatgtcatttacatggtttggtgcatcgtgatatgaaacctgagaattttctctttaaatcttcaaaggaggattcaccattgaaggccacagattttggtctttcagacttcataagaccagggaagaagttccaagatattgttggtagtgcatattacgtagcgccagaggtattaaagcgtagatcaggacccgaatcagatgagtggagtattggtgttattacatacattttgctctgtggccgtcgccgcttctgggataaaacagaggatggcatattcaaggaggtactaagaaacaagcctgattttcgtcgcaagccgtggccaactatcagcaacagtgctaaagattttgttaagaaattattggtgaaggatcctcgtgctagacttactgctgcccaggccctatcgcatccatgggtccgcgaaggaggtgatgcatctgagattccactggacatttctgtcttatcaaacatgcgacaatttgtcaagtacagtcgattaaaacagtttgctttacgggcattggctagcacagttgatgaggaggagctggcagatgtgcgggatcagttttctgcaattgatgtggataaaaatggtgtcattagccttgaagaaatgagacaggcccttgctaaggatcttccctggaagatgaaagagtcacgggttcttgagattcttcaagcgattgatagtaactctgatgggctacttgatttcccagagtttgtcgcagccactctacatgtccatcagttggaggagcataattctataaaatggcaggaaagatcgcaagctgcttttgaggaatttgatgttgatagagatggattcataactccagaagaacttagaatgcatactggattaaagggctccatagacccacttctagaagaagcagatatcgacaaagatgggaagataagcttgtcggaatttcgtaggcttctaagaactgcaagtataagctcgcggatggtgactagtccaactgttagaggctctcggaaaagttagcttcgtaaaggtgcatagaagtgagtgtttagagaagtgaaagtcctcagtgaaaaaattttgttggaaaatcatgttcgtttacgtgttctcatgtgctgttttctgctgccattctctatatagaggtctctaagatgaatggtatttcagagacctttggcccaatggccttgtgcttgtgtagccagcggccgccatgccaagcgcgattcccacagagtttgcctttgtactccagaaaggtatttggtatgaagttgctttcttctaaacaaccagcagcaacatctgtattctggtcgttttattgtacattcttttcccctgtcctaagtctatgcatttccctttgatagtgtaactaaagctatgtcattattatagattatatcatcaatgagaatcggctttatcaaaaaaaaaaaaaaaaaaaaaaaaaa

SEQ ID NO: 19140 - protein, 572 aa, Nicotiana tabacum; identical to SEQ ID NO: 4631

SEQ ID NO: 19141 - DNA, 1800 bp, Nicotiana tabacum; identical to SEQ ID NO: 4632
  CDS (1)..(1800)

SEQ ID NO: 19142 - protein, 599 aa, Nicotiana tabacum; identical to SEQ ID NO: 4633

SEQ ID NO: 19143 - DNA, 1788 bp, Arabidopsis thaliana; identical to SEQ ID NO: 4634
  CDS (1)..(1788)

SEQ ID NO: 19144 - protein, 595 aa, Arabidopsis thaliana; identical to SEQ ID NO: 4635

SEQ ID NO: 19145 - DNA, 1732 bp, Solanum tuberosum
  CDS (12)..(1502)
tctccattaacatggaaccaaaaccagcaactgagcccaagaaatcatctgtttgggttcttccttacaagactcaaagccttcagagtctttacacaataggcaaaaagttaggccaaggtcaatttggaactacacatctttgtatagaaaaatcaagtggcaatctttacgcttgtaagacaatacccaaaaagaaactgatctgtaaagaagattatgaggatgtttggaaagagattcaaataatgcatcatttatctgaacacccaaatgtggtaagaataaagggtacttatgaagatgcattatatgtgcatatagttatggagctttgtgctggtggagagctttttgataggattgttgagaaaggacattatagtgaaagagaagctgctaagttgattaaaacaattgttggtgttgttgaggcttgtcattcattaggtgttatgcatagagatctcaagcccgagaatttcttgtttctcagttctgatgaggatgctgctctcaaggccactgattttggcctctctgttttctacaaaccaggtgaaacattttcagatgttgttggaagtccttattatgttgccccagaggttttatgcaagcactatggacatgaatcagatgtatggagtgcaggagttatcttgtacatattacttagtggtgttccccctttttgggcagaaactgatatgggaatatttcgtcagatactgcgaggcaaactagatcttgaatctgaaccttggcctggaatttcagatagtgccaaggatttgatacgtaaaattcttgataggaatccaaagaggaggttaactgcccatgaagttttgtgccatccatggattgtggatgacacagtggctcctgataaacctcttgactctgcagttctttcacgcctcaagcagttctcagcaatgaacaaactaaagaaaatggctttacgtgtgattgccgagaggctttcagaagaagaaatcggtggtctcaaggagctattcaaaatgttagacacagacaatagtggaacaataaccttcgaggaattaaaagagggtttgaggcgagtaggttctgaactgatggagtctgagatcaaggatcttatggatgcggcagacattgacaacaatggaacaatagactatggggaatttattgctgctactgttcatttgaacaaattggaaagggaagagaatctgttatcagccttctcttattttgacaaagatggtagtggatacataactatcgaagaacttcagcaagcctgcaaagaatttggtcttagcgagctcaatcttgatgaaattattaaagatattgatcaagataatgatggacagatagactataaggaattttctgcaatgatgaggaaaggcacaggtggagccgttggaaggaggaccataagaaacaatttgaatttaggagaagcactaggactcgtacagagtgaagaaatcttatgaaccaccaattaatccgaacagagttccgagtgatctttctaatttcttgttgacatgaaggtccaactatagacatttagttactactacaagtgttaggtttccttgtattaaacttgatcccttcccctgcttttattgatggctggtgtttttttaccattatttgtccccaaggttagaactttagactttgacaccagtaacaaagagcaattttcttccaaaat

SEQ ID NO: 19146 - protein, 496 aa, Solanum tuberosum; identical to SEQ ID NO: 4637

SEQ ID NO: 19147 - DNA, 2393 bp, Solanum tuberosum
  CDS (485)..(2221)
tcaagatctcattttttttctccttctcagttctttgaccttcccatgtcatagcacaaattctctttctagtaatttatcttgttctttgtgattcatgaagttttattatcaatttactatgcttgtggttttgattacttggaaactttgattaatcttttggttaatttattctattttgtatatatcaaggttagttgcagggacttggatattgtttttcagctctgtttgaatcttgatttggtgagcatagaattagtgctggatttcaattcttgttgacttgtttgtagttaatgaggggaagtttgacttttttcttggtattggattgtttggttgaagtatcaagatcttgttgatttcttgggacattatagagctctatgaaaagaaagatcttagtgtaggaaggaactacaacaaggggtagtgtgtacgcacaccttacgagtttaggaaggaactataggaacaaatggggaacacttgtgtaggaccaagcatttctaaaaatgggatctttcaatcagtttcagcagcaatgtggcgatcccggtcgcccgatgacactgcttccaccactaatggtgaaagtgctagaattgaaacaccaatttctgttaaagaacctgattcacctttgccagttcaagagccaccagaacaaatgacaatgcctaagtcagaaaagaaagaagaagaaaaagaacaaccaaaaaagcccaaaaagcctgctgaaatgaagagggtgtcaagtgctggccttaggacagattctgtgttacaaaagaaaactggaaacttaaaggagtttttcagtataggaaagaaattaggacaaggtcaatttggaactacatttaaatgtgtcgaaaaggcaacagggaaggaatatgcttgcaaatcgattgctaagaggaagttgttaacagatgatgatgtggaagatgttagaagggaagtacagataatgcaccatttggcaggacatcctcatgttatatcgataaaaggtgcttatgaggatgctgtagctgttcatgtagttatggagttttgtgctgggggtgagcttttcgataggattattcaacgggggcactatacggaaagaaaagcagctgagcttactaggactattgttggggttgtagaagcttgtcattctcttggtgtcatgcatcgtgatcttaagcctgaaaattttctctttgttgatcagaaggaggattcacttctcaaagcaattgactttgggttatcgatattcttcaaaccaggcgacagatttactgatgttgttggcagcccatactatgtcgcaccagaagttctccgaaaacgttatggtcctgaagctgatgtttggagtgctggtgttattctctacatcttattaagtggagtacctcctttctgggctgaaaatgagcaaggaatatttgaacaagtcctgcacggtgatcttgacttcaagtcagacccatggccaagtatttcagaagatgcaaaagacttgatgaggagaatgctcgttcgagatccgagaagacgtttaactgcacatgaagttttatgccatccttgggtacaagttgatggtgtggctcccgataagcctctggattctgcagttctgagtagaatgaagcaattttctgcaatgaacaagctcaagaaaatggctttgagagtcattgctgaaagcctatccgaagaagaaattgctggtcttaaagaaatgttcaagatgatagacacagacaatagcggtcaaataacttttgaggagctcaaagaagggttaaaacgatttggctctaatctgaaggagaccgagatctatgatcttatgcaggcagctgacgttgataacagtggaacaattgattatggtgaatttatagctgcaacattacatatgaacaaaattgaaagacaagatcatctttttgctgctttctgttacttcgataaagatggaagtggctacatcactgcggatgagcttcaacaagcttgtgaagaatttggcattggggatgtccgcatggaagaaatgatcagagaagctgaccaagacaatgacgggcgcattgactacaatgagtttgttgctatgatgcaaaagggaaatccagtgctaggtggtggcaagaaaggtctagagcatagtttcagcattggattcagagaagcagtaaaactatagagagccttgaagaggaatttttttcttccttagtgtttgtctattattttcttgtggaaatttttctgttactaggagtgtatagtaattagctagtgcttgctaaacagcatctttgttttccagtgcacttttcaattctttccaattttgtgcaatttttcatttaatt

SEQ ID NO: 19148 - protein, 578 aa, Solanum tuberosum; identical to SEQ ID NO: 4639

SEQ ID NO: 19149 - DNA, 1737 bp, Nicotiana tabacum; identical to SEQ ID NO: 4640
  CDS (1)..(1737)

SEQ ID NO: 19150 - protein, 578 aa, Nicotiana tabacum; identical to SEQ ID NO: 4641

SEQ ID NO: 19151 - DNA, 1746 bp, Nicotiana tabacum; identical to SEQ ID NO: 4642
  CDS (1)..(1746)

SEQ ID NO: 19152 - protein, 581 aa, Nicotiana tabacum; identical to SEQ ID NO: 4643

SEQ ID NO: 19153 - DNA, 1746 bp, Nicotiana benthamiana; identical to SEQ ID NO: 4644
  CDS (1)..(1746)

SEQ ID NO: 19154 - protein, 581 aa, Nicotiana benthamiana; identical to SEQ ID NO: 4645

SEQ ID NO: 19155 - DNA, 1590 bp, Arabidopsis thaliana; identical to SEQ ID NO: 4646
  CDS (1)..(1590)

SEQ ID NO: 19156 - protein, 529 aa, Arabidopsis thaliana; identical to SEQ ID NO: 4647

SEQ ID NO: 19157 - DNA, 1702 bp, Solanum tuberosum
  CDS (1)..(1548)
atgggtatttgtgctagtaaaggtaaacccaataatgctaataatgggcaccatggatcaggatcaggaggagttccaactcatagaaatgaaattcagtatacaaaatctccagggcctgaagctcaattgcatgtgagacctccaccaagcccaaaaccagctgtaaggtatgatacaattcttggtaagccatatgaagatgttaagttgcactatactcttggtaaagaattgggtaggggtcaatttggtgttacatatctttgtactgaaattgtaactggtcaacaatatgcttgtaaatcgatatcgaaaaagaagcttgttactaaggctgataaggatgatatgaggagggagattaagattatgcagcatttgagtggacaacctaatattgttgaatttaaaggtgcttatgaggataaaggttcagtgtatcttgtgatggagttgtgtggagggggagagctattcgatcgaattatagcaaaagggcattacagtgaaagagctgctgcaacaatgtgtagggctattgtcaatgttgtgcacgtttgcaattttatgggcgtgttgcatcgtgatctcaagcctgaaaactttttgttgtctgataagagtgaaaatgctgcactaaagattactgattttgggctgtcagtattcattcaagaaggtaagtcgtacaaggatatagttgggagtgcttactatgttgcccctgaggttttaaggaggtgttatggcaaggagatagatatttggagtgcaggtgttatgctttatatactactcagtggtgtgcctccgttttgggcagaaaccgaaaagggtatatttgatgccatacttaaagggaccattgactttgaaagcaagccttggccgtctgtatcaagtagtgccaaggacctagtacagaagatgctgactaaagatccaaagaaacggattacagctgcacaagttcttgagcatccttggctgaaagaaggtggtgttgcatcagacaaaccattagagggtgctgtcctgtcaagaatgaagcaattcagagctatgaacaaactcaagaaactcgctttgaaggtcattgccgagaatctctctgccgaagaaattcacgggctcaaagcaatgttccacaatattgatactgataatagtggcactatcacttacgaagaactgaagagtggattggctaaacttgggtcaaagctcactgaggctgaagtcaagcaattgatggaagctgctgatgtagatggaaatggctcaatcgactacactgaattcatcaccgccaccatgcataagcacaggctagaaagagacgaaaatctatatactgcatttcagtatttcgataaagatggcagtgggttcattacaagagatgaactcgaggcagctatgcaagaacatggaataggcgatccatcctgtataagggaaatcatatctgaagtggacacagacaatgatggaagaatcaattatgaggaattctgtacaatgatgagaagtggagccaaataaccaggcaaggtcttctagttgcacgagtctcctcgcgggaaagttgtagaagagctattcttgaaaatgtgcacgatgagctctgttgttgccaatcactagtgaattcgcggccgcctgcaggtcgaccatatgggagagctcccacgctgat

SEQ ID NO: 19158 - protein, 515 aa, Solanum tuberosum; identical to SEQ ID NO: 4649

SEQ ID NO: 19159 - DNA, 1997 bp, Arabidopsis thaliana
  CDS (129)..(1724)
aattccaattccagtcaaacaaaaccttcacaactcaattattcttccgattttggtttctctcttccaatcatccttcaagctcatctttttcttctacccaataacgaaagtctcctcctttactaatgggttgcttcagcagtaaacaccggaaaactcaaaacgacggcggagaaaaatcaatcccgatcaatccagttcaaacccatgtagtccccgagcatcgtaaacctcaaaccccaacaccaaaacccatgactcaaccaatccatcagcagatttcaacaccgtcttcaaatccagtctcagttcgagatccagatacgattttaggtaaaccattcgaagacatcaggaaattttacagcttggggaaagaattaggtcgaggtcaatttgggattacgtatatgtgtaaagagattggtactggtaacacttatgcttgcaaatcgattcttaagaggaagctaattagtaagcaagataaagaagatgtgaagagagagattcagataatgcagtatttgtctggacaacctaacattgttgagatcaaaggtgcttatgaagatagacaatctatacatttggttatggagttgtgtgctggtggtgagttgtttgataggattatagctcaaggtcattactctgagagagctgctgctggtatcattaggtctattgtcaatgttgttcagatttgtcattttatgggtgtggttcatcgagatctcaagcctgagaatttcttgctttcgagtaaagaggagaatgctatgcttaaagctactgatttcggtttgtccgtcttcatcgaagaaggaaaagtttaccgggatatagttgggagtgcttactacgttgctccagaagtattaaggcgaagttacggaaaagaaatcgacatttggagtgcaggtgtcattttatacatcctactcagcggtgtacctcctttttgggccgaaaatgagaaaggaatattcgatgaggtcataaaaggcgaaattgattttgtaagtgagccatggccttctatatctgaaagcgcgaaagatcttgttaggaagatgctaaccaaagacccgaagagacgaatcacggctgcacaggttcttgaacatccttggatcaaagggggagaagcaccagacaagcctattgatagcgctgtgttatcccgcatgaagcaattccgagcaatgaacaagcttaagaagctagctctaaaggttatcgcggagagtctatcagaagaggagattaaaggtcttaaaaccatgtttgcgaatatagataccgacaaaagcgggacaatcacttatgaagaactcaaaactgggctaactagacttgggtctagactctcggaaactgaagttaagcaactcatggaagccgctgacgtcgatggtaatggaacaatcgactactacgagtttatctctgcgacaatgcatagatacaaattagatcgagatgagcatgtatacaaagcattccaacactttgataaagacagcagcgggcacataactagagatgagttggaaagtgccatgaaggaatatggaatgggagatgaagctagcatcaaagaagttatatccgaagttgataccgacaatgatggaagaataaactttgaagaattttgcgcgatgatgagaagtggcagcacgcagccacaggggaaactgcttccattccattgatcaagtcggcataaatcccaacggtttatcaaccgaaagcgattcttgaacccagagtagaagagctaaaccgggggtaaaccgaggtgagcatagttgatatactgtctcaaaatgttgttctatcttctctgtgtttgaacagatttatttatccttctccttagttagtctgaaactgattttgagagactgtcatgtcttagctccttgtaacagtaacatatccacttatatttttttgaaactttcttgagaaaaaaaaaaaaaaaa

SEQ ID NO: 19160 - protein, 531 aa, Arabidopsis thaliana; identical to SEQ ID NO: 4651

SEQ ID NO: 19161 - DNA, 1794 bp, Oryza sativa; identical to SEQ ID NO: 4652
  CDS (1)..(1794)

SEQ ID NO: 19162 - protein, 597 aa, Oryza sativa; identical to SEQ ID NO: 4653

SEQ ID NO: 19163 - DNA, 1566 bp, Solanum lycopersicum; identical to SEQ ID NO: 4654
  CDS (1)..(1566)

SEQ ID NO: 19164 - protein, 521 aa, Solanum lycopersicum; identical to SEQ ID NO: 4655

SEQ ID NO: 19165 - DNA, 1910 bp, Ipomoea batatas
  CDS (124)..(1668)
gaattcggcacgaggagctctggcgtttctttcttttaatttccggagcatctgtaaaaatcctagtctgggttgttgctaaatccatttgatttgctacttttcttgtgttttctaagagaaatgggtaaccgtacaagcagacataagcatggtgaaaagcacagatcagaagctggaagccatcagactcacattgagtacacaaagtcacctgggcagggagctggactgcctgtacggccaccatcaatcccaaaatcagtttcaaagtcagatgcaattctgggtaaggcatatgaggatgttagggcacattacagtctggggaaagaactgggtaggggtcaatttggggttacctatttgtgtactgagattagaactggaaagcagtatgcctgcaagtcaatttccaagaaaaagcttgtgactaagggggataaggatgatatgaggagggaggttcagattatgcagcacttgagtgggcagcctaatattgttgagttcaagggggcttatgaggatgctaattctgtgtatcttgtgatggagttgtgtgctggtggagagcttttcgatcggattattgctaaggggcactatagcgaaagggctgctgcctctctttgcaggtctatagtgaatgttgttcatacttgccattttatgggcgtgatgcaccgcgatttgaagcccgagaatttcttgttgtctgataaaactgaaaatgctgccttgaaggctactgattttggcttatcagtgttcattgaagaaggaagggtgtataaggatttagtcgggagtgcttactatgttgctcccgaggtcttggggagaaagtatgggaaggaagcggatgtttggagtgcaggtgttatgttgtatattttactcagtggtgtgcctcccttctgggctgaaactgagcgggggatctttaatgctatacttaaaggagaactcgacttccaaacgaaaccttggccttctatatcgagcattgccaaggacctagtacgagggatgctagccccagacccgaagagacgccttactgctgcccaggttcttgagcatccatggatgcgagaagatggagaagcatctgacagaccactagatagcgctgttctctcaagaatgaagcaattcagagcaatgaacaaactcaagaaacttgccctgaagtttattgcagaaaatctctcagaagaagaaattcatggactgaaagcaatgttcacgaatatcgacactgacaacagtggtacaattacatacgaagaactgaagaagggattggcccaactcggggcaaatctcacagaggctgaagttaagcagttgatggaagctgctgatgtagatggaaatggctcgatagactacatcgaattcatcactgctacaatgcacaagcacaggctagaaagagaagaaaatctatacaaagcatttcagtattttgataaagatagcagtggatttatcacgagagatgaactagagactgctatgaaggaacacggaatagctgatgcagcaactataaaggaaataatatctgaagtcgatgcagatcatgatggaagaatcaactatgaagagttttgcacaatgatgagatcaggaaccaaacagcaagccaagctgttctaacactgtaagcctgcatgccatgaaactatcatctgcagtttgcagttccactcaagccaacttgcaatctgtagacctctaactgttgccttgtctttaatgttgacatctctgtctgatgtagaatttaacattgtcttctcagctaagtttatgttggagttaatggctacactcttgtaaaagcttgggcatttgtattttcctttggtatctaaattgtgcaaaggcaatcgctctct

SEQ ID NO: 19166 - protein, 514 aa, Ipomoea batatas; identical to SEQ ID NO: 4659

SEQ ID NO: 19167 - DNA, 1862 bp, Medicago sativa
  CDS (33)..(1661)
gttgaaacacttgaatttgagaatctgaaaaaatggggtgtttgttaagtaaagacaaagattcagaacaagaacacaacaatggtggttatagatatgctgaatcttctggtatgcacaatcataggaacaatcatgaacaagtcaacacatcaagaacagcaccaacaagttcttatcaacctcaaataccaaccaagccttcatcaatttctgctccaagtccaaaacctcttatcaagcaagacacaaacacaatcctaggaaaaggtttggaagatgtgaaacaattctacacactaggtaaagaattaggtagaggccaattcggagtaacgtttctatgcaccgagaattcaactggattgctttatgcttgcaagtcaatttccaagaggaaacttgtgagtaaatctgatagggaagatataaagagagagattcagatcatgcaacatttgagtggtcaaccaaatattgttgaatttaaaggagcttatgaagataggaattcagttcatgttgttatggaactttgtgctggtggtgaactttttgataggatcattgctaaaggacattatagtgaaaaagctgctgcttctatttgtagacagattgttaatgttgtgaatatttgtcattttatgggagttatgcatagggatctcaagccagagaatttcttgttggctagtaaagatgaaaatgcacttcttaaggccactgattttggtttgtctgttttcattgaagaaggaagggtgtatcgcgatatagttggaagtgcttattatgtggctccagaagttcttcgtccgagatgcggaaaggaaatagatatatggagtgcaggagttatactatatatcttacttagcggtgtacctccattttgggctgagactgaaaagggaatatttgatgcaatattggaaggtcatattgattttgaaagtgaaccatggcctaaaatttcagacagcgccaaggatcttgttcgtaaaatgcttatacaggaaccgaagaaacgcattactgctgcacaggttctagagcacccttggattaaaggtggaaatgcttctgataagcctatagacagtgcagttctttctagaatgaagcaattcagagctatgaataaactaaagaaacttgcattgaaggtcattgctgagaatatgtctgaagaagaaatccgaggtttgaaggcgatgtttacaaatatggacacagacaatagtggtacaatcacctatgaagaactaaaagcaggattgcaaagacttggctcaaagctttcagaagctgaggttaagcaactcatggaagctgctgatgtagatggaaatggcacaattgattgcattgaattcatcactgctacaatgcatagacacaagttagaaagagatgaccatctttataaggcatttcaatattttgataaagacagcagtgggtttattacaagagatgaactggaaactgcaatgaaagaatatggtatgggagatgatgccacaatcaaggaaattatatctgaagttgatacaattatatctgaagtcgacacagatcatgatggtagaatcaactatgaagaattctgtgcaatgatgagaagtggaaaccaacagcaagttaagctattctaaagtacttctgagaagtgcttctaaaatatcatatcattgataggcatataaagtttttgattttggattttttttttctgtttcttttttctttccatagacaattcatttttgagtcctcttcaaatttgtcttggcaccggttatagacatagcaaagttgatacttgaataagattacacaagtttgcaaaaaaaaaa

SEQ ID NO: 19168 - protein, 542 aa, Medicago sativa; identical to SEQ ID NO: 4661

SEQ ID NO: 19169 - DNA, 1915 bp, Cucumis sativus
  CDS (6)..(1550)
cctttatgggccaccccctcgaccactccgacgcccaccaccgacctccctctaacggcgtcatcaaagttctcccacccgattccgacccttctcttccaccgcccctgcccaaacaacttcccacctcctccgccccgcccgcccttggccgcgttctggctcgtcccttttccgacgtccgctccttttactccttccgtggcgaactgggtcgtggccaatttggtgttacttacttagtaacacacaaggaaacgaaacaggattttgcttgtaaatcaatcgctactagaaaattgattgatcaggacgatgttgaagatgttcgtcgtgaggttcagattatgcatcatcttactggccaccctcacattgttgagcttaaagaagtttatgaagaccggcattatgtcaatttgattatggagctttgcgccggcggtgagttgttcgatcggattattgctaaaggccactattctgaatgcaccgcagcctccctttgccgccagattgtgacggtagttcataattgtcactccatgggagttatgcacagagacttgaagcccgagaacttcttgtttctcagtgctgatgagaattcacctctcaaggctacggattttgggctttccgtcttcttcaaaccaggtgatgtttttaaagatctagttggaagtgcatactacgtagctccagaagttcttcgacgaagatatggtcctgaggcggctgtttggagtgctggtgtcatactatacatcctactcagtggagttcctcctttctgggcagagaatgatcaaggtatttttgatgctgttcttcggggacatattgacttctcatcagatccttggccttccatatcaagtggtgccaaagatctgataagaaaactcttgcattctgatcctaaagagcgattatccgccattgaagccctaaatcatccatggatgaaagaagatggggaagcttctgacaagcctcttgatattgctgttttgactagaatgaaacagtttagagcaatgaacaaactcaagaaagtcgctcttaaggtaattgctgaaaatctttctgaagaagagattgtgggactaaaggagatgttcaagtcgatggatactgataatagtggaactatcacttttgaggagttaaaggccggtcttcctaagctgggtacaaagctttctgagtctgaagtgaggcagctgatggaagcggcagatgtggatggaaatgggtcgatcgactacatcgagttcattactgctgctatgcacatgaacagagtagaaagagaggatcacttatttaaagcttttgagtactttgacaaagacaagagcggatatatcacaatggaggagttggagactgcccttaagaagtacaatatgggtgatgaaacaacaataaaggagatcattgcagaagttgacactgataatgacggacgcataaactacgatgaagtcgttgcaatgatgaggaaaggcaatcaggaattgacgacaaccagtcggcaaaaatgaagctgagttcctctatatattgtctgcttgattttatgtgcttctttggctgtttctttgttcaatttgagttgagccacctgcagagagagagattggatgttctggttgcctcatgattccatccaaatggctgcactcaaacaggaaaaatgagctttcctttgccccgatatactaaaaatttcaactattctgaccttgttgttatctgtttgattattggttataaattgagtgtatttatagaagataatgtttttgagagtgtggaaatgtattcgtttgtctgtaatccaccaaatgaccagaaataaatatgatgctttgtaaagttaaaaaaaaaaaaaaaaaaaaaaaaaaaa

SEQ ID NO: 19170 - protein, 514 aa, Cucumis sativus; identical to SEQ ID NO: 4663

SEQ ID NO: 19171 - DNA, 1656 bp, Oryza sativa subsp; identical to SEQ ID NO: 4724
  CDS (1)..(1656)

SEQ ID NO: 19172 - protein, 551 aa, Oryza sativa subsp; identical to SEQ ID NO: 4725

SEQ ID NO: 19173 - DNA, 1647 bp, Marchantia polymorpha; identical to SEQ ID NO: 4668
  CDS (1)..(1647)

SEQ ID NO: 19174 - protein, 548 aa, Marchantia polymorpha; identical to SEQ ID NO: 4669

SEQ ID NO: 19175 - DNA, 2532 bp, Dunaliella tertiolecta
  CDS (138)..(1925)
agttagtctaatctgcagacctttgcttgctgggccatccatccatccacatcaacaacaacacaacacataatttggggggccatcttgaagccgctcccctttaattccactccacaacccttcagcctcaaagcatggcgagcgtggactgcacgttggtctctgcgaggggcattaaagacgtggagatagttggcaagcagagcccctatgccgtgctgactgtgggccccaagacattcaaaagcgggacggcaaacggaggtggtagcgacccggtttggaaccagactttctcattcacaaacgtcacccccgattcatccgtcaagttggagatattcaactccaacgtagtgctgagggatgtcgctattggtggatgtaaggctcccatggacaaggcgttatcagctggcaaggacgagctcaccctccccatcatcaccaagaaaggcaagccccatggtgaagtcaagctgatactgaccctcaagcccgatgccacaaagcaaatggtgactagccacaagacaaggaaggcagctggggcctggatcctgcccacctacggcaataccgactgctggaaggattatgagcctggcacactccttgggaagggcacctttggcaccacctacctcgcgacagagaagaagacggggcagaagtgcgctgtcaaggtcatctcaaagcgcaagctgaccacaccagatgaggtagatgatgtaaagaaagaggtgcagatcatgcaccacctggctggccaccccaacgtggtcggcttaaaaggagtgtacgaggacaaaagcaatgtctgcttagcaatggaggttgccacaggtggcgagctgtttgactccatcgtcaagcgtggccactacagtgagcgcgatgcggcagagctgatacgtacgattgtgagcgttgttgcgcactgccacaacatgggcgtcatccatagggacctcaagcccgagaacttcctgctgtccgacaagtcccccagagctcagctaaaggcaacggacttcggtctcagctccttcttccaggagggccaagtattcactgacattgtgggttctgcgtattacgttgcccccgaagtcctgcgtcgctcctatggcaaggaagcggacatttggagctgcggcatcatcctgtacatcctgctgtgcgggttccccccattccatggcgacagtgagaagaagattttcgaggccatcatcagcaagtctgtggactttaacacgcagccgtggcccaggatctcagctcctgccaaggactgtgtgaagcgcatgttgcagcgcgacccgaagaagcgtgcgaccgccaacgagatcatgcagcacgactggatgcgtgagaatggtgtggccagtgatgagcctctggagatggaggtcgtgtcgcgcatcaagaacttcagtggcatgaacaagctcaagaaggaggccctcaaggtcatcgctgtaaacctgcccatcgatgaaatctctggtatgcgggagatgttcatggacatcgacaaagacaagagcggcaacatcacgattgacgaatttgcggcggcacttcacaagaagggccagattgtgacggagaaggagattgagaagatcatgaaggaggctgatgtggatggggacggcaccatcgactatgaggagttcctggctgccaccatcaacctgggcaaactgcaacgagaggaaaacctgaagactgcatttgagcactttgatttggacggcaacggtgaaatctcgcataacgagctcgtccagtgtctgtctaagctgggcatcaacgacgcgcacgttaaggatatcatcaaggaggtagatgcagatggcaacggccagatcgactacaacgagttttgcatcatgatgcgcaacctggattaaaggtaccgacgcggaaaaagtcagggcctgatcatctgcatcgctcctagccgttcagatatgttcagaaaatgttcagcacttccttgccttaagaaatgtggagtgattggttgctcagggcaacagcttgggtggtttttactcatgctgctgtggcttgttcagtagctgtgcatgttgtttgtatagacactgctgcactgaaagttaaagctctggagaggtcgtctagtgactgctctcgtgtgcttctagtgagggggtgagttgaacaggtgccttcctttaataagtctaatcgggagaatggatggcttgttcttttgctggaactgtgagcaagctcagcagagccttgtgtgctagcactttgagatgtgcacgcttgaaggggtgatggtgttcaaaattggaattgaggggaagcattcagcttaaatggccacataagaatgcaaccgataattttggaagaaagaaacagaacgtacttgctagacattttttactcgccgctccccttgtcttcctcattggtgatttcctgagctgtaagtgcactggagccaaaaaaaaaaaaaaaaaaaaaaaaaaaaaaaaaaaa

SEQ ID NO: 19176 - protein, 595 aa, Dunaliella tertiolecta; identical to SEQ ID NO: 4675

SEQ ID NO: 19177 - DNA, 1956 bp, Solanum tuberosum
  CDS (1)..(1599)
atgggtgtttgtttgagcaaaagtaaaccagcagagtctaagtctgatgggcattatagatcaggtgggagtgatgggggtggagttgggggtaaagggcataatcatggaacccatcaagctcaaattcagtatactaaatctccaggcccagaaactcaattacccttgaggcctcaagcaagtcctaaaccagttttcaagcaagaaaccattttgggtaaggcatttgaggatgttaaggcacactatacactaggtaaagaattgggtagaggtcaatatggggttacatttctttgtactgaaatagcaactggtcatcaatatgcttgtaagtcaatatcaaagaagaaacttgttactaaatctgataaagctgatatgagaagagagattcagattatgcagcatttaagtggacaaccaaatattgttgaatttaaaggtgcttatgaggataagaattcagtgtgtcttgttatggagttgtgtgctggtggagagttatttgataggatcatagctaaggggcattatactgaaagagctgctgcatcaatgtgtagagctattgttaatgttgtacatgtttgccattttatgggtgttatgcatcgtgatcttaagcctgagaactttctcttgtcagacaagagtgaaaatgctgctttgaaggcaacagattttgggctgtccgtgttcattgaagaaggtaaggtgtacaaggatatagttgggagtgcttactatgttgcccctgaagtcttacggaagagttatggcaaggaaatagatgtttggagtgcaggtgttatgttgtatatactactcagtggtgtgcctcccttttgggcagaaaccgagagaggtatatttgatgccatattaaaagaagacattgactttgaaagtcaaccttggccttctatcacaagtagtgccaaggacctggtccgaaagatgctcaataaagacccaaagcaacgtatttctgctgctcaagttcttgagcatccttggctcaaggtaggtggagtagcatcagataaaccattagataatgctgtcctctcaagaatgaagcaattcagagctatgaacaaactcaagagacttgctttaaaggtcattgctgagaatctctcagcagatgaaattcaggggctcaaatcaatgttccataacatagacaccgataatagtggaacgatcacgtatgaagaattgaagagcggattggccagacttggatcaaagctcacagaggcggaagtaaagcaattgatggaagctgctgatgtggatggaaatggctcgatcgactatattgagttcatcactgctaccatgcataaacatagacttgaaagagatgaaaatctatacaaagcatttcagtatttcgataaagatgggagcgggttcatcacaagagatgaactcgaaacatctatggaagagcatggaataggcgatccagctagtataagggagataatagctgaagtagacgctgataatgatggaagaatcaactatgaggaattttgtacaatgatgagaagtggagctaaacaaccaggcaagctcttctaataccgggccccccctcgaggtcgacggtatcgataacacgagtctcctagtcgttggaggtaaaactcgggagtgattcttcaatgaactgttgcgctgcccatatgaccgacatcaagtacatgaccaacctgaactagttggcattttgaagttctccggtcgaaacctgtaaattggtgattcctgttactataatctatgttctctgtggttctttttctcacatgttgaattgtctactcatagcacagaggaaatgagtgaacatagactcttttactatttgaatagaaacaaatgaccttgtaaagatatcttgtgttattttcaagttttttttatatgtaaaataaa

SEQ ID NO: 19178 - protein, 532 aa, Solanum tuberosum; identical to SEQ ID NO: 4681

SEQ ID NO: 19179 - DNA, 2363 bp, Mesembryanthemum crystallinum
  CDS (336)..(1940)
aacaacccattatttcaacacatgattcagctgactatttctcctcaaattctatcacctctcttctttctttgctgaatcatactagcactatttacttctctgaactttgctctttctatccataaaccagaataactttgatctgcctcaaaatcagctctgaaacaactgtttctgcattcatcatctgggttttgtccattttcccaggaactgaattgggcactgaaaaagattacttttttttgatccaaatctgcccttttttctgatttgggtgtttttaattttcaatttctgcatctgggtttgatagattttgggaacttaagatggggatttgtgctagcaaaaacaaggctacacagccagaggacaatggatacacaccagcaaatggggttggttcaaacaaccaatcaaagccaccagcccagcaaaactaccaccagcagccaccacagcaaccggtggcgccgccacaaccagcttctcacccaccagttaggatgcccagcccaaaaccagccccaaaagttgagccaaatacaattttgggtaaaccctttgaggatgtgaaggtgtactacacattggggagagaactgggtaggggtcaatttggggttacctatctgtgcactgacaaaaagactggccaacaatatgcttgcaagtcaatctctaagaagaagcttgtgaccaaggctgataaggatgatatgaggagagagattcagatcatgcagcatatgagtggtcaacctaacattgtggaatttaagggtgcttatgaggataaaacatctgtgaatcttgtgatggagctttgtgctggtggggagttgtttgataggattattgctaaggggcattatagtgaaaaggctgctgccactatgttgaggcagattgttaatgttgttcatgtgtgtcactttatgggtgtgatgcatagggatctgaagcctgagaacttcttgctctctagcaaggatgagaattctctcttgaaggccactgattttgggttgtctgtgtttattgaagaaggtaaagtctaccgggatatagtaggcagtgcttactatgtcgctcctgaggtattgcgtcgtaggtatgggaaggagattgatgtttggagtgctggagtcatgttgtacatcttactcagtggtgtgccccccttttgggcagaaacggagaaagggatctttgatgctattttgcaaggccatattgatttcgaaagcaaaccatggccatcaatttcaaatggtgccaaggacctagtgagaaaaatgttgacacaggatcccaagaaacggattactgctgctcaagttcttgagcacccatggctaagagatggtgaagcatcagacaagccaatagacagtgctgttctcctcaggatgaagcaattcagagtcatgaacaagctcaagaagctcgctctaaaggtcattgctgaaaatcttcctgatgaagagatccaagggctgaaacaaatgttcgcgaatatggacactgatggtagtgggtcaattacctatgaagaactgagggagggattggctcgacttggatcaaagcttactgaaactgaagtgaaggcgctcatggaagctgctgatcaagatggaagtggatcaatagactactatgagttcattacagccacaatgcataggtacaggttagagagagatgagcatctttacaaggcattccaatatttcgacaaagacaatagtgggtttatcacaacagatgaactagaaacagcaatgaaagagtatgggattgctgatgagaattgcattgcagagatattgttggaagtagacactgataatgatggaagaataaactatgatgagttcagcgcaatgatgagaagtgggactcaaaacccggttaccaaactcatttagtgcatgtgcatttctagcactgtataacgtaaacgctttttaagtaccaagggtattgaacaagtcacgctgttgatcagaagacaagattagcttctcagatcggaggacgcaggcggatttaagactcgtaagggagatgatttgcggttgattgagttctcttttgtaaaaagtttgtgcatacacaaaatccttttggattgatgttttcgtcatgtttttgagttggaagattctttctttcccctttttgtcttggaggttttaaggtgttttgctccagtaaagcttaaagctctcacttgtgacattggctctcagatttcctctcttgagcaactataattcatcttctcatgtcattgcatttacaaaaaaaaaaaaaaaaaaaaaaaaaaaaaaaaaaaaaaaaaaaaaaaa

SEQ ID NO: 19180 - protein, 534 aa, Mesembryanthemum crystallinum; identical to SEQ ID NO: 4683

SEQ ID NO: 19181 - DNA, 1695 bp, Solanum tuberosum; identical to SEQ ID NO: 4686
  CDS (1)..(1695)

SEQ ID NO: 19182 - protein, 564 aa, Solanum tuberosum; identical to SEQ ID NO: 4687

SEQ ID NO: 19183 - DNA, 1833 bp, Arabidopsis thaliana; identical to SEQ ID NO: 4688
  CDS (1)..(1833)

SEQ ID NO: 19184 - protein, 610 aa, Arabidopsis thaliana; identical to SEQ ID NO: 4689

SEQ ID NO: 19185 - DNA, 1605 bp, Oryza sativa subsp; identical to SEQ ID NO: 4740
  CDS (1)..(1605)

SEQ ID NO: 19186 - protein, 534 aa, Oryza sativa subsp; identical to SEQ ID NO: 4741

SEQ ID NO: 19187 - DNA, 1723 bp, Zea mays
  CDS (10)..(1551)
tccgtgccaatggttatggctattctaaccaggcaaagccggcgcaagcacctccgagtttacaaccctcctcagcaggcggccgaggtgaggtacacaccatcggcgacgaactcttcggcagtcccacccgtggctgtgccgccgaagccaacggcggacacgattcttggcaagcagtacgaggacgtgcgctctgtctactccttcgggaaggagcttggccggggccagttcggggtgacatacctctgcacagagattgcctctgggaggcagtacgcctgcaagtccatctccaagcgcaagctcgtcagcaaggcagacagggaggacattcgaagggagatccagatcatgcagcacctgtctgggcagccaaacattgtcgagttccggggagcatacgaggacaagagcaatgtccatgtggtgatggagctctgcgcaggtggggagctcttcgatcgcatcattgcaaaggggcactacacagaacgtgcggctgctacaatctgcagagcagttgtgaatgttgtcaacatttgccacttcatgggtgtgatgcatcgtgatctgaaacccgagaacttcttgcttgcgaccatggaggagaatgcaatgctcaaggccactgattttgggctttctgtcttcattgaagaaggaaagatgtacagggacattgttggaagtgcttactatgttgctcctgaagtccttaggcggagctatggaaaagagatagatgtttggagtgcaggtgttattttgtacattcttctcagtggcgtgcctccattttgggctgaaattgaaaaggggatatttgatgctattctgcatgaggagattgactttgaaagtcaaccttggccatcaatttctgagagtgctaaagacttggtgagaaagatgttgacacgagatccaaagaaaagactgacttcagcccaagttcttcaacatcagtggctcagagaaggtggggaggcatctgataagcctatcgacagtgctgttctatctagaatgaagcaattcagagcaatgaataagctgaaaaagatggccctaaaggttattgcttcaaaccttaacgaggaagagatcaaggggctaaagcaaatgttcatgaacatggacacagacaatagtggcacaatcacatacgaagaactcaaagcaggattagccaaacttggatcaaagctgtcagaagctgaagtaaagcagttgatggaggctgctgatgttgatgggaatggatctattgactatgtggagttcatcactgccacaatgcatagacacaagctcgaaagggacgagcatttgttcaaggcattccagtactttgacaaagataacagcggcttcatcacaagggatgaactggaatctgctttgattgagcatgagatgggcgacacgagtacaataagggagatcatatcagaagttgacacagataatgatgggaggattaactatgaggagttttgtgcaatgatgagaggagggatgcagcagccaatgaggctcaagtagcctgttcccttaatagaaacggtgtaccactagttactgttcactttttttcttcatgtttggtacttggtagtcggataaagcttacaatgggtgttgctttttgtattgttgagagatgattgtctatacctttttttccctgtttgctcgtgcttgttgcattgtagta

SEQ ID NO: 19188 - protein, 513 aa, Zea mays; identical to SEQ ID NO: 4691

SEQ ID NO: 19189 - DNA, 1791 bp, Daucus carota
  CDS (92)..(1690)
tcattaaagttttgagattttcgattaagaatcctgatctttagcccttttggttcaattcttgatctggggttttcttgaggtgcaaaatatgggaggttgtttcagcaagaaagagtatcaagcagatggtaatgggtatagatcagctcccactgcttaccatactgttactgaccaaagctatgaaaagtcatctcaaaggtctcagcctcaggctcagccacagcctcaggttcagcaaacagggccttcacttaagcccaggcaagttcatagacctgagtcaaacactattttaggcaagccatttgaagatattaggggtaagtatactcttgggaaagaattgggcaggggtcaatttggttgtgtatatcaatgtactgagaattcaagtggtcaattatatgcttgtaagtctattttaaagagaaagcttgttagtaagaatgataaggaggatataaagagggagattcagattttgcagcatttgagtgggcaaccgaatattgtggagtttaaaggtgtttttgaggataggcaatctgtgcaccttgtgatggagctttgtgctggtggggagttgtttgacaggattatagctcaaggacattactcggagagagcggctgctacgatttgtaggcagattgtgaatgttgtccatgtttgtcattttatgggggtgatgcatagggatcttaagcctgaaaatttcttgctttcgagtaaggataaagatgcaatgctgaaggcgactgatttcgggttatctgtcttcattgaagaaggaaaggtatatcgtaatatagttggtagtgcttactatgttgctcctgaagtactacgacgtagttatggaaaggagattgatatctggagcgctggagttattttgtatatactacttagcggggtacctccattttgggcagagaatgaaaaaggaatatttgatgcaatactggaaggagtgattgactttgaaagtgaaccatggccatcagtctcaaacagtgcaaaagaccttgttagaaagatgctgacacaggatccaaggagaaggattacttctgcacaagttcttgatcatccctggatgagagaaggtggagaagcatcagacaagccaatagatagtgcagtcctctctagaatgaagcagttcagagcaatgaacaagctcaaacaacttgcacttaaggtcatcgctgaaagtctatccgaggaagaaattaaaggtcttaaatccatgtttgcaaacatggacacggacaaaagtggtacaatcacttatgaggaattgaaatcaggtttggcacggctaggctcaaagctatcagaagtggaggtccaacaattgatggatgctgctgatgtagatggaaatggtacaattgactaccttgaatttattactgctactatgcataggcacaagcttgaaagttatgagcatcaagcatttcagtattttgacaaggataatagcggcttcattactaaagatgaactggaatctgcaatgaaagagtatggaatgggtgacgaagccactatcaaggacataatctctgaagtagattcagataatgatggaaggattaattacgatgagttctgtgcgatgatgagaagggcacgcaacagaaggaagctttttagtgtctcgctaacctcttagctgcaaaaaccctctactcgttctcaccaagtcagagtttcagtgaacagaagaatgaaaagcaatttcagggataggtacaaggttctcagctgtctata

SEQ ID NO: 19190 - protein, 532 aa, Daucus carota; identical to SEQ ID NO: 2078

SEQ ID NO: 19191 - DNA, 1768 bp, Glycine max
  CDS (132)..(1658)
cggttaatttgttgagagagagcaatcaaaaacattcatggcgtcttccaaggagagagaagaaaacaccaattaaccaccacctgataggctgatacaatacaatctcctttcctttttcgacaacaagaatggctgcgaaatctagttcgagttcgacaacaacaaacgtggtgactctgaaggcggcgtgggttctcccgcagcgcacgcagaacatccgtgaggtgtacgaggttgggcggaagctcgggcagggccaattcgggaccaccttcgagtgcacgcgccgtgcgagtggtgggaagttcgcgtgcaagtcgattccgaagcggaagctgctgtgcaaggaggactacgaggacgtgtggcgggagattcagataatgcaccacttgtcggaacacgccaacgttgtccgcatcgaagggacgtacgaggattccacggccgtgcacctggtcatggagttgtgcgagggtggagagttgtttgacaggatcgtgcagaagggacactacagcgagagacaggcggcgaggttgataaagacgattgttgaggttgttgaggcgtgtcactcgctaggggtcatgcatagggaccttaagcctgagaatttcttgtttgataccattgatgaggatgctaagcttaaggccaccgatttcggcttgtctgttttttacaagcctggtgaatccttttgtgatgttgtcgggagcccatactatgtcgcaccagaggtcttgcgcaagctctatggacctgaatcagatgtttggagtgcaggggttattctgtacatcttattaagtggggtgccaccattttgggccgaatctgaaccggggatcttccgacagattttactaggaaaacttgattttcattctgagccttggcctagcatttcagacagtgccaaggatctaattcggaaaatgcttgatcaaaatccaaaaacaaggcttacagcacatgaagtactccgccacccatggattgttgatgacaacattgcacctgataaacctcttgattctgcagttttatcacgtctgaaacaattctctgccatgaataaattgaaaaagatggcattgcgtgttattgctgagaggctatctgaagaagaaattggtggactgaaagagttattcaagatgattgacacagacaacagtggaaccataacgtttgatgagttaaaagatggtttgaagcgagtaggatctgaacttatggagtctgaaatcaaggatcttatggatgctgcggatattgataaaagtgggacaattgattatggtgaattcattgctgccactgttcatttaaataagctggagagagaggaaaacctagtgtcggccttctcctattttgacaaagatggcagtggttacataacccttgatgagatacaacaagcttgtaaggactttggtttagatgatatccatattgacgacatgatcaaggaaattgatcaagataacgatgggcaaatagattatggggaatttgctgccatgatgagaaagggcaatggaggaattggaaggcgaactatgagaaaaacactaaatttaagagatgctcttggattagtagacaatgggtccaatcaagttattgagggctactttaagtaataattacttggagacaaaattgaccaaatattaatttagtaaatttctacgttgtttgtagttgcttgaccaaattttgcgtatcttttaaattatagacccacttcagg

SEQ ID NO: 19192 - protein, 508 aa, Glycine max; identical to SEQ ID NO: 2258

SEQ ID NO: 19193 - DNA, 1809 bp, Daucus carota; identical to SEQ ID NO: 4696
  CDS (1)..(1809)

SEQ ID NO: 19194 - protein, 602 aa, Daucus carota; identical to SEQ ID NO: 4697

SEQ ID NO: 19195 - DNA, 1344 bp, Saccharomyces cerevisiae
  CDS (1)..(1344)
atgcccaaggagtcagaggtcataaattctgaatttcatgtagatgtccaagatccagagcgtctaaacggccaccctgtagcaaaatttatcaataaattaagcggtcaacctgaatcttacgtcaacaggactaattatattttcggtcgaacactgggtgccggttccttcggtgttgtgagacaagccagaaagttgtccacaaatgaagatgttgctataaagatcttattgaagaaggcattgcagggaaacaatgtgcaattacagatgctgtacgaagagctgtccattcttcaaaaattgagtcatccgaacattgtgtcattcaaggattggtttgaatcgaaggataagttctatattgtcactcagctggcaacaggaggtgaattatttgatagaattctgtctagagggaagttcacagaagtggatgctgttgaaatcatagttcagattcttggtgccgtggagtatatgcattccaagaatgttgttcatagggatttgaaacctgagaacgttttgtatgttgataagtcagaaaattcgcctctggtaattgcggacttcggtatagctaaacaattgaagggggaggaggatttgatatacaaagcagccggatcgttgggttatgtggcaccagaagtcctcacacaagatggacatggtaagccttgtgatatatggtccattggtgtgatcacatatactttactgtgcggttattctccttttattgccgaaagcgttgaaggattcatggaggaatgtacagcttcgagatacccggtaaccttccatatgccatattgggataacatatctattgatgttaagcgtttcatcttgaaggcattgagattgaatccagctgacagaccaactgctacggaattgctggacgatccatggattacttcaaagagagttgaaactagtaatattttaccagacgttaagaaagggttttctttgcgtaagaaattacgtgacgctattgaaattgtgaagcttaataatagaattaagaggttaagaaatatgtattcattaggggacgatggcgataacgatatagaagagaattccctcaatgaaagtcttctggacggcgtcacacattcgttggatgatttacgtctgcaatctcagaagaaagggggagaactaacagaagagcaaatgaaattgaagtctgcattaacaaaggatgcctttgttcaaattgtcaaagctgcaacaaagaataaacataaagttttggctggtgaagaggaagacgatagcaagaaaacactgcatgatgatcgggagtcgaagtcagaagactaa

SEQ ID NO: 19196 - protein, 447 aa, Saccharomyces cerevisiae
MPKESEVINSEFHVDVQDPERLNGHPVAKFINKLSGQPESYVNRTNYIFGRTLGAGSFGVVRQARKLSTNEDVAIKILLKKALQGNNVQLQMLYEELSILQKLSHPNIVSFKDWFESKDKFYIVTQLATGGELFDRILSRGKFTEVDAVEIIVQILGAVEYMHSKNVVHRDLKPENVLYVDKSENSPLVIADFGIAKQLKGEEDLIYKAAGSLGYVAPEVLTQDGHGKPCDIWSIGVITYTLLCGYSPFIAESVEGFMEECTASRYPVTFHMPYWDNISIDVKRFILKALRLNPADRPTATELLDDPWITSKRVETSNILPDVKKGFSLRKKLRDAIEIVKLNNRIKRLRNMYSLGDDGDNDIEENSLNESLLDGVTHSLDDLRLQSQKKGGELTEEQMKLKSALTKDAFVQIVKAATKNKHKVLAGEEEDDSKKTLHDDRESKSED

SEQ ID NO: 19197 - DNA, 1569 bp, Oryza sativa; identical to SEQ ID NO: 4702
  CDS (1)..(1569)

SEQ ID NO: 19198 - protein, 522 aa, Oryza sativa; identical to SEQ ID NO: 4703

SEQ ID NO: 19199 - DNA, 1563 bp, Oryza sativa; identical to SEQ ID NO: 4580
  CDS (1)..(1563)

SEQ ID NO: 19200 - protein, 520 aa, Oryza sativa; identical to SEQ ID NO: 4581

SEQ ID NO: 19201 - DNA, 1569 bp, Oryza sativa; identical to SEQ ID NO: 4728
  CDS (1)..(1569)

SEQ ID NO: 19202 - protein, 522 aa, Oryza sativa; identical to SEQ ID NO: 4729

SEQ ID NO: 19203 - DNA, 1626 bp, Oryza sativa; identical to SEQ ID NO: 4742
  CDS (1)..(1626)

SEQ ID NO: 19204 - protein, 541 aa, Oryza sativa; identical to SEQ ID NO: 4743

SEQ ID NO: 19205 - DNA, 1542 bp, Oryza sativa; identical to SEQ ID NO: 4744
  CDS (1)..(1542)

SEQ ID NO: 19206 - protein, 513 aa, Oryza sativa; identical to SEQ ID NO: 4745

SEQ ID NO: 19207 - DNA, 1581 bp, Oryza sativa; identical to SEQ ID NO: 4748
  CDS (1)..(1581)

SEQ ID NO: 19208 - protein, 526 aa, Oryza sativa; identical to SEQ ID NO: 4749

SEQ ID NO: 19209 - DNA, 1737 bp, Brassica napus; identical to SEQ ID NO: 4754
  CDS (1)..(1737)

SEQ ID NO: 19210 - protein, 578 aa, Brassica napus; identical to SEQ ID NO: 4755

SEQ ID NO: 19211 - DNA, 1725 bp, Brassica napus; identical to SEQ ID NO: 4756
  CDS (1)..(1725)

SEQ ID NO: 19212 - protein, 574 aa, Brassica napus; identical to SEQ ID NO: 4757

SEQ ID NO: 19213 - DNA, 1632 bp, Brassica napus; identical to SEQ ID NO: 4762
  CDS (1)..(1632)

SEQ ID NO: 19214 - protein, 543 aa, Brassica napus; identical to SEQ ID NO: 4763

SEQ ID NO: 19215 - DNA, 1599 bp, Brassica napus; identical to SEQ ID NO: 4764
  CDS (1)..(1599)

SEQ ID NO: 19216 - protein, 532 aa, Brassica napus; identical to SEQ ID NO: 4765

SEQ ID NO: 19217 - DNA, 1746 bp, Glycine max; identical to SEQ ID NO: 4766
  CDS (1)..(1746)

SEQ ID NO: 19218 - protein, 581 aa, Glycine max; identical to SEQ ID NO: 4767

SEQ ID NO: 19219 - DNA, 1647 bp, Triticum aestivum; identical to SEQ ID NO: 4768
  CDS (1)..(1647)

SEQ ID NO: 19220 - protein, 548 aa, Triticum aestivum; identical to SEQ ID NO: 4769

SEQ ID NO: 19221 - DNA, 1599 bp, Linum usitatissimum; identical to SEQ ID NO: 4770
  CDS (1)..(1599)

SEQ ID NO: 19222 - protein, 532 aa, Linum usitatissimum; identical to SEQ ID NO: 4771

SEQ ID NO: 19223 - DNA, 1596 bp, Zea mays; identical to SEQ ID NO: 2207
  CDS (1)..(1596)

SEQ ID NO: 19224 - protein, 531 aa, Zea mays; identical to SEQ ID NO: 2208

SEQ ID NO: 19225 - DNA, 1650 bp, Brassica napus; identical to SEQ ID NO: 4774
  CDS (1)..(1650)

SEQ ID NO: 19226 - protein, 549 aa, Brassica napus; identical to SEQ ID NO: 4775

SEQ ID NO: 19227 - DNA, 1590 bp, Brassica napus; identical to SEQ ID NO: 4776
  CDS (1)..(1590)

SEQ ID NO: 19228 - protein, 529 aa, Brassica napus; identical to SEQ ID NO: 4777

SEQ ID NO: 19229 - DNA, 1608 bp, Brassica napus; identical to SEQ ID NO: 2223
  CDS (1)..(1608)

SEQ ID NO: 19230 - protein, 535 aa, Brassica napus; identical to SEQ ID NO: 2224

SEQ ID NO: 19231 - DNA, 1743 bp, Brassica napus; identical to SEQ ID NO: 4780
  CDS (1)..(1743)

SEQ ID NO: 19232 - protein, 580 aa, Brassica napus; identical to SEQ ID NO: 4781

SEQ ID NO: 19233 - DNA, 1341 bp, Brassica napus; identical to SEQ ID NO: 2225
  CDS (1)..(1341)

SEQ ID NO: 19234 - protein, 446 aa, Brassica napus; identical to SEQ ID NO: 2226

SEQ ID NO: 19235 - DNA, 1650 bp, Brassica napus; identical to SEQ ID NO: 4758
  CDS (1)..(1650)

SEQ ID NO: 19236 - protein, 549 aa, Brassica napus; identical to SEQ ID NO: 4759

SEQ ID NO: 19237 - DNA, 1599 bp, Brassica napus
  CDS (1)..(1599)
atgggacacagacacagcaagtccaaatcctccggtccgccaccgtcctcctcctcctcctcttcctccaccaacgtcgtccaccatgtccaaccttccggagaacgccgcggatcttccggttctggccccacacccgtcggatcttcctcaaccggcggatcccgctccgccgcatctgctcagcagaacggtcggatcttaggccgtccgatggagaatgtcaggggaacgtacgacttcggcaaggagcttggtcgtggccagttcggagtcacgtatctcgtcactcacaaagagaccaaaaaactcttcgcctgcaagtcgatccccacgcgccgcctcgtccaccgtgacgacattgaagacgtccgccgtgaagtccagattatgcaccatctcagtggtcacaggaacatagtggacttgaagggagcttacgaggacagacactcggtgaatctgataatggagctgtgcgaaggaggggagcttttcgacaggatcatagcgaaaggccattacacggagagagccgctgcggatttgtgcaggcagatggtgatggttgtgcatagttgccactctatgggtgtgatgcaccgtgatttgaagcctgagaactttctctttctcagcaaagatgagaactctccgttgaaagctacagactttggtctatccgtcttctttaaaccaggagataagtttaaggatcttgttgggagtgcatactatgtggccccggaggttttgaaacggaactatggaccagaggctgatatctggagtgccggtgtgattctcttcatccttatcagcggtgttccgccgttttggggagaaaatgagacagggatctttgatgctattctaaaaggagagcttgacttctcagctgatccgtggccaacggtgtcggctggtgccaaagatcttgtgaagaaaatgttgaagtatgatcctaaagaccggcttacagctagcgaagtgctgaaccatccgtggattaaagaagatggagaggcctcagacaaaccgcttgacaatgctgtgttgtccaggatgaaacagttcagagccatgaacaaactaaagaaaatggcactgaatgtaattgcagagaacctgtctgaagaagaaatcattggtctgaaagagatgttcaaagctctagacaccgataaaaacggaatagtcaccttggaggaattgagaaccggtctcccaaagcttggcaataagatctctgaggctgaaataaaacagttaatggaagcagctgatatggatggagatggatcgatagattacttggagtttatatcagcgacaatgcatatgaacagaatcgaacgtgaggatcatttgtacactgctttccagtacttcgacaaggacaacagcgggtacataacaatggaagagctagagcaggccatgaagaaatacaacatgggtgatgacaaatccattaaagagatcattgctgaagttgacaccgatcgtgacgggaaaataaactacgaagagttcgtagcgatgatgaagaagggaaatccagaactggtgacgaaccgacgcagagtcaacatgtaa

SEQ ID NO: 19238 - protein, 532 aa, Brassica napus; identical to SEQ ID NO: 4761

SEQ ID NO: 19239 - DNA, 1599 bp, Brassica napus; identical to SEQ ID NO: 4782
  CDS (1)..(1599)

SEQ ID NO: 19240 - protein, 532 aa, Brassica napus; identical to SEQ ID NO: 4783

SEQ ID NO: 19241 - DNA, 1590 bp, Brassica napus; identical to SEQ ID NO: 4784
  CDS (1)..(1590)

SEQ ID NO: 19242 - protein, 529 aa, Brassica napus; identical to SEQ ID NO: 4785

SEQ ID NO: 19243 - DNA, 1791 bp, Brassica napus; identical to SEQ ID NO: 4786
  CDS (1)..(1791)

SEQ ID NO: 19244 - protein, 596 aa, Brassica napus; identical to SEQ ID NO: 4787

SEQ ID NO: 19245 - DNA, 1461 bp, Brassica napus; identical to SEQ ID NO: 4788
  CDS (1)..(1461)

SEQ ID NO: 19246 - protein, 486 aa, Brassica napus; identical to SEQ ID NO: 4789

SEQ ID NO: 19247 - DNA, 1638 bp, Brassica napus; identical to SEQ ID NO: 4790
  CDS (1)..(1638)

SEQ ID NO: 19248 - protein, 545 aa, Brassica napus; identical to SEQ ID NO: 4791

SEQ ID NO: 19249 - DNA, 1503 bp, Brassica napus; identical to SEQ ID NO: 4792
  CDS (1)..(1503)

SEQ ID NO: 19250 - protein, 500 aa, Brassica napus; identical to SEQ ID NO: 4793

SEQ ID NO: 19251 - DNA, 1590 bp, Brassica napus; identical to SEQ ID NO: 4794
  CDS (1)..(1590)

SEQ ID NO: 19252 - protein, 529 aa, Brassica napus; identical to SEQ ID NO: 4795

SEQ ID NO: 19253 - DNA, 1791 bp, Brassica napus; identical to SEQ ID NO: 4796
  CDS (1)..(1791)

SEQ ID NO: 19254 - protein, 596 aa, Brassica napus; identical to SEQ ID NO: 4797

SEQ ID NO: 19255 - DNA, 1596 bp, Brassica napus; identical to SEQ ID NO: 4798
  CDS (1)..(1596)

SEQ ID NO: 19256 - protein, 531 aa, Brassica napus; identical to SEQ ID NO: 4799

SEQ ID NO: 19257 - DNA, 1626 bp, Zea mays; identical to SEQ ID NO: 4800
  CDS (1)..(1626)

SEQ ID NO: 19258 - protein, 541 aa, Zea mays; identical to SEQ ID NO: 4801

SEQ ID NO: 19259 - DNA, 1518 bp, Glycine max; identical to SEQ ID NO: 4802
  CDS (1)..(1518)

SEQ ID NO: 19260 - protein, 505 aa, Glycine max; identical to SEQ ID NO: 4803

SEQ ID NO: 19261 - DNA, 1746 bp, Glycine max; identical to SEQ ID NO: 4804
  CDS (1)..(1746)

SEQ ID NO: 19262 - protein, 581 aa, Glycine max; identical to SEQ ID NO: 4805

SEQ ID NO: 19263 - DNA, 1650 bp, Glycine max; identical to SEQ ID NO: 4806
  CDS (1)..(1650)

SEQ ID NO: 19264 - protein, 549 aa, Glycine max; identical to SEQ ID NO: 4807

SEQ ID NO: 19265 - DNA, 1884 bp, Zea mays; identical to SEQ ID NO: 4808
  CDS (1)..(1884)

SEQ ID NO: 19266 - protein, 627 aa, Zea mays; identical to SEQ ID NO: 4809

SEQ ID NO: 19267 - DNA, 1524 bp, Glycine max; identical to SEQ ID NO: 2251
  CDS (1)..(1524)

SEQ ID NO: 19268 - protein, 507 aa, Glycine max; identical to SEQ ID NO: 2252

SEQ ID NO: 19269 - DNA, 1587 bp, Glycine max; identical to SEQ ID NO: 4812
  CDS (1)..(1587)

SEQ ID NO: 19270 - protein, 528 aa, Glycine max; identical to SEQ ID NO: 4813

SEQ ID NO: 19271 - DNA, 1602 bp, Glycine max; identical to SEQ ID NO: 4814
  CDS (1)..(1602)

SEQ ID NO: 19272 - protein, 533 aa, Glycine max; identical to SEQ ID NO: 4815

SEQ ID NO: 19273 - DNA, 1587 bp, Glycine max; identical to SEQ ID NO: 4816
  CDS (1)..(1587)

SEQ ID NO: 19274 - protein, 528 aa, Glycine max; identical to SEQ ID NO: 4817

SEQ ID NO: 19275 - DNA, 1656 bp, Glycine max; identical to SEQ ID NO: 4818
  CDS (1)..(1656)

SEQ ID NO: 19276 - protein, 551 aa, Glycine max; identical to SEQ ID NO: 4819

SEQ ID NO: 19277 - DNA, 1491 bp, Glycine max; identical to SEQ ID NO: 2263
  CDS (1)..(1491)

SEQ ID NO: 19278 - protein, 496 aa, Glycine max; identical to SEQ ID NO: 2264

SEQ ID NO: 19279 - DNA, 1620 bp, Glycine max; identical to SEQ ID NO: 4822
  CDS (1)..(1620)

SEQ ID NO: 19280 - protein, 539 aa, Glycine max; identical to SEQ ID NO: 4823

SEQ ID NO: 19281 - DNA, 1599 bp, Glycine max; identical to SEQ ID NO: 4824
  CDS (1)..(1599)

SEQ ID NO: 19282 - protein, 532 aa, Glycine max; identical to SEQ ID NO: 4825

SEQ ID NO: 19283 - DNA, 1590 bp, Glycine max; identical to SEQ ID NO: 4826
  CDS (1)..(1590)

SEQ ID NO: 19284 - protein, 529 aa, Glycine max; identical to SEQ ID NO: 4827

SEQ ID NO: 19285 - DNA, 1656 bp, Glycine max; identical to SEQ ID NO: 4828
  CDS (1)..(1656)

SEQ ID NO: 19286 - protein, 551 aa, Glycine max; identical to SEQ ID NO: 4829

SEQ ID NO: 19287 - DNA, 1602 bp, Glycine max; identical to SEQ ID NO: 4830
  CDS (1)..(1602)

SEQ ID NO: 19288 - protein, 533 aa, Glycine max; identical to SEQ ID NO: 4831

SEQ ID NO: 19289 - DNA, 1587 bp, Glycine max; identical to SEQ ID NO: 4832
  CDS (1)..(1587)

SEQ ID NO: 19290 - protein, 528 aa, Glycine max; identical to SEQ ID NO: 4833

SEQ ID NO: 19291 - DNA, 1527 bp, Glycine max; identical to SEQ ID NO: 4834
  CDS (1)..(1527)

SEQ ID NO: 19292 - protein, 508 aa, Glycine max; identical to SEQ ID NO: 4835

SEQ ID NO: 19293 - DNA, 1617 bp, Glycine max; identical to SEQ ID NO: 4836
  CDS (1)..(1617)

SEQ ID NO: 19294 - protein, 538 aa, Glycine max; identical to SEQ ID NO: 4837

SEQ ID NO: 19295 - DNA, 1620 bp, Glycine max; identical to SEQ ID NO: 4838
  CDS (1)..(1620)

SEQ ID NO: 19296 - protein, 539 aa, Glycine max; identical to SEQ ID NO: 4839

SEQ ID NO: 19297 - DNA, 1524 bp, Glycine max; identical to SEQ ID NO: 2287
  CDS (1)..(1524)

SEQ ID NO: 19298 - protein, 507 aa, Glycine max; identical to SEQ ID NO: 2288

SEQ ID NO: 19299 - DNA, 1587 bp, Glycine max; identical to SEQ ID NO: 4842
  CDS (1)..(1587)

SEQ ID NO: 19300 - protein, 528 aa, Glycine max; identical to SEQ ID NO: 4843

SEQ ID NO: 19301 - DNA, 1770 bp, Oryza sativa
  CDS (1)..(1770)
atggggaactgctgccgctcgccggccgccgcggcgcgggaggacgtcaagtcgtctcacttccccgcatcggccgggaagaagaagccccaccaagcgcggaacggcggcgtggggggaggcggcggcgggggcggcggcggcggaggaggaggaggagcggggcagaagcggctccccgtgctcggggaggaagggtgcgagctgatcggagggatcgacgacaagtacgcgctggaccgggagctcgggcggggggagttcggggtgacgtacctgtgcatggatcgggacaccaaggagctgctcgcctgcaagtccatctccaagcggaagctgaggacggcggtcgacgtggaggacgtgcgccgggaggtcgccatcatgcgccacctccccaagagcgccagcatcgtgtcgctgcgggaggcgtgcgaggacgagggcgccgtgcacctcgtcatggagctctgcgaaggcggggagctcttcgaccgcatcgtcgcgcggggccactacacggagcgcgccgccgccaatgtcacccgcaccatcgtggaggtcgtccagctctgccaccgccacggcgttatccaccgggacctcaagcccgagaacttcctcttcgccaacaagaaggagaactcgccgctcaaggccatcgatttcggcctctccatcttcttcaagcccggtgagaagttttctgaaattgtgggaagcccatattacatggctccagaggtattgaagagaaactatggtccggaaatagatatttggagtgcaggagttatcttgtatattttgttatgtggagttcctccattttgggctgagactgagcaaggggtggcacaagccattcttcgtggaaatatcgatttcaaacgcgaaccctggccaaatgtttcagaaaatgctaaagatttggttcgacgcatgttggagcctgatccaaaactcaggttaactgcaaagcaagttcttgaacatccatggcttcaaaatgctaagaaagctccaaatgttcctcttggagatattgtgaagtcaaggctcaaacaattttctagaatgaatagattcaaaagaagagcactaagggtcattgccgatcatttatctgctgaggaagttgaggacataaaggagatgttcaaggctatggacactgataacgatggcattgtatcttatgaagaattaaagagcgggatagcaaaatttggttctcatctggcagaatcggaagtgcagatgcttatcgaagcttgttgcttaggtgtaggagctgaacctgcacttgtagattgtaggactaggaaactagctgcaataggagtggttttacttttcaccatatgtgtatcaagaaacttatgtgtagtggatacaaatggtaaggatgctctagattatggtgaatttttggctgtctctcttcatttgcaaaggatggcaaatgatgagcacctccggcgagccttcctattttttgacaaggatggcaatggctacatagagcctgaagagcttcgagaggctctagtggacgatggagcacctgacagcatggaactgctgaacgacatattgcaagaagttgacactgacaaggatggcaaaattagctatgaagaatttgtagcaatgatgaagactggcacagattggagaaaggcgtcacggcattattcaagaggacgtttcaacagccttagcataaggcttataaaggatggatctgtaaaattgggcaacgagtga

SEQ ID NO: 19302 - protein, 589 aa, Oryza sativa
MGNCCRSPAAAAREDVKSSHFPASAGKKKPHQARNGGVGGGGGGGGGGGGGGGAGQKRLPVLGEEGCELIGGIDDKYALDRELGRGEFGVTYLCMDRDTKELLACKSISKRKLRTAVDVEDVRREVAIMRHLPKSASIVSLREACEDEGAVHLVMELCEGGELFDRIVARGHYTERAAANVTRTIVEVVQLCHRHGVIHRDLKPENFLFANKKENSPLKAIDFGLSIFFKPGEKFSEIVGSPYYMAPEVLKRNYGPEIDIWSAGVILYILLCGVPPFWAETEQGVAQAILRGNIDFKREPWPNVSENAKDLVRRMLEPDPKLRLTAKQVLEHPWLQNAKKAPNVPLGDIVKSRLKQFSRMNRFKRRALRVIADHLSAEEVEDIKEMFKAMDTDNDGIVSYEELKSGIAKFGSHLAESEVQMLIEACCLGVGAEPALVDCRTRKLAAIGVVLLFTICVSRNLCVVDTNGKDALDYGEFLAVSLHLQRMANDEHLRRAFLFFDKDGNGYIEPEELREALVDDGAPDSMELLNDILQEVDTDKDGKISYEEFVAMMKTGTDWRKASRHYSRGRFNSLSIRLIKDGSVKLGNE

SEQ ID NO: 19303 - DNA, 1386 bp, Oryza sativa; identical to SEQ ID NO: 2093
  CDS (1)..(1386)

SEQ ID NO: 19304 - protein, 461 aa, Oryza sativa; identical to SEQ ID NO: 2094

SEQ ID NO: 19305 - DNA, 1539 bp, Zea mays; identical to SEQ ID NO: 4860
  CDS (1)..(1539)

SEQ ID NO: 19306 - protein, 512 aa, Zea mays; identical to SEQ ID NO: 4861

SEQ ID NO: 19307 - DNA, 1614 bp, Zea mays; identical to SEQ ID NO: 4846
  CDS (1)..(1614)

SEQ ID NO: 19308 - protein, 537 aa, Zea mays; identical to SEQ ID NO: 4847

SEQ ID NO: 19309 - DNA, 1542 bp, Triticum aestivum; identical to SEQ ID NO: 4848
  CDS (1)..(1542)

SEQ ID NO: 19310 - protein, 513 aa, Triticum aestivum; identical to SEQ ID NO: 4849

SEQ ID NO: 19311 - DNA, 1671 bp, Zea mays; identical to SEQ ID NO: 4850
  CDS (1)..(1671)

SEQ ID NO: 19312 - protein, 556 aa, Zea mays; identical to SEQ ID NO: 4851

SEQ ID NO: 19313 - DNA, 1608 bp, Zea mays
  CDS (1)..(1608)
atgggcaactgctgcgccacgccgtcgacgacggaggagagcggcaagagccgccagaagaaaccgaagcagaagacgaacccctacaacgtggcgtacaaccgcggggcggcgccggcgccggcgcgcccgggcctggtggtgcttcgggacccgacggggcgggacctcggcgcgcagtacgagctgggcggcgagctgggccgcggcgagttcggcgtcacgtacctgtgcacggagtccgccacgggggcgcgctacgcgtgcaagtccatctccaagcgcaagctgcgcacgcccgtggacgtggaggacgtgcgccgggaggtggacatcatgcgccacatgccgccgcaccccaacatcgtcagcctccgcgccgcctacgaggacgaggacgccgtgcacctcgtcatggagctctgcgagggaggcgagctcttcgacaggatcgtcgcccggggccactacaccgagcgcgccgccgccgccgtcacgcgcaccatcgtcgaggtcgtccagatgtgccacaggcatggcgtcatgcaccgggatcttaaaccagagaactttttatatgcaaacaagaaggagagttcccctctgaaagcaatcgattttgggctgtcagtgttcttcaggcctggtgagcgatttactgaaatcgtaggcagtccatactacatggctccagaggttctaaagcgaaactatggccctgaagttgatgtttggagtgctggagtgatactttacatacttctctgtggtgtaccaccattttgggcagaaactgaacagggagtagcacaggcaattatacgatctgtggtagatttcaaaagagaaccatggcccagagtatctgagcctgctaaagatcttgtcaggcggatgctggacccaaatccattgacacggtttactgcagcacaagtacttgagcatccatggttacatgactctaaaaagatgccagacatttctcttggtgatactgtccgagcaagactgcaacaatttgctgcgatgaacaagttaaagaagaaagcattaagggtgattgccgagcatctgtcagtggaggaagtagctgacataaagcaaatgtttgacaagatggacgtgagcaagaatggcaagctaacattcgaggaattcaaggcgggccttcgtaaactggggaaccaaatgcctgattcagatcttcagataatgatggatgccgctgacatcgataaaaacgggaccctagattacgaggaattcgtcaccgtgtctgttcatgtgagaaaaataggcaacgatgagcacatccaaaaggccttcacatacttcgaccggaacaagagcgggtacatagagatcgaagagcttagagaggcactggctgatgaactggagggaaccgatgaagacatcatcaatggcatcatccgagacgtggacacagataaggacgggaaaataagctacgacgagttcgcggcgatgatgaaggccggcactgactggaggaaggcatcacggcagtactcgaggcagcggttcagcaacctgagcctgaagcttcagaaggacgggtccctcggcgccgagacacggtag

SEQ ID NO: 19314 - protein, 535 aa, Zea mays; identical to SEQ ID NO: 4877

SEQ ID NO: 19315 - DNA, 1653 bp, Zea mays; identical to SEQ ID NO: 4852
  CDS (1)..(1653)

SEQ ID NO: 19316 - protein, 550 aa, Zea mays; identical to SEQ ID NO: 4853

SEQ ID NO: 19317 - DNA, 1614 bp, Zea mays; identical to SEQ ID NO: 4856
  CDS (1)..(1614)

SEQ ID NO: 19318 - protein, 537 aa, Zea mays; identical to SEQ ID NO: 4857

SEQ ID NO: 19319 - DNA, 1620 bp, Zea mays
  CDS (1)..(1620)
atgggcaactgctgcgtgacgccgaaagcagccgacgacgccggcggcggcaagaagcccaaggagccgaagcagaagaagggtaagaagccgaaccccttctcgatcgagtacaaccgctcggggcaggcgagcgcgccaaagctggtggtgctgcgggatcccacggggcgggacatcgcggcgcggtacgagctcggcgcggagctcgggcgcggcgagttcggggttacctacctctgcacagaccgcgcctcaggggaggcgctggcctgcaagtccatctccaagaagaagctccgcaccgccgtcgacctcgaggacgtgcgccgggaggtggagatcatgcgccacctccccaagcaccccaacgtcgtcacgctcagggacacgtacgaggacgacaatgccgtgcacctcgtcatggagctctgcgagggcggtgagctcttcgaccgcatcgtggcgcggggacactacactgagcgtgctgccgccttggtcttacgcactatcgttgaggtcgtgcagatgtgccataagcatggagtgatgcacagggatctcaaaccagaaaattttttgtttgcaaacaagaaagaatcagcggcacttaaggccattgattttggcctgtctgtatttttcactccaggcgaacggttttctgagattgttggaagtccttattacatggctccagaggtgctaaagagaaactatggcccagaggttgatgtttggagtgcaggagtgattctgtacattcttctttgtggtgtccccccattctgggcagaaacggaacagggtgttgctcaggcaatcattcgatctgtcattgatttcaaaagagatccatggccaagggtgtctgataacgccaaagaccttgtcagaggaatgctgaatccggacccaaaacgacgattgacagctcaccaagtgcttggtcacccatggttgcagaacattaagaaggctccaaatgtcaatttgggtgaaactgttaaggccagactccaacaattctctgtgatgaacaagttcaagaagcatgcacttagggttatagctgagcatctttcggtagaagaggctgctgacataaaggatatgtttgagaagatggatcttaacaaggatcaaatgcttagtttcgaggagctgaagcttggtctgcataagtttggtcaccaaatgcctgatgcagatgttcaaacactaatggaagcggcggatgctgatggaaatgggtccttgaattatggagaatttgttacattatttgttcatctaagaaagattggaaacgatgagcatctgcataaggcattcgcatacttcgaccggaaccagagtggttatattgaaattgatgaactccgtgagtcattagctgatgaccttggacaaaaccgtgaagagattatcaatgccatcatccgtgatgtagacaccgataaggatggcaagataagctacgatgagtttgcgacgatgatgaaggctggaacagactggaggaaagcatccagacagtactcgagagagcggttcacaagcctgagccttaagctgcaaaaggatggatcgctgcagatgacgagtacacggtag

SEQ ID NO: 19320 - protein, 539 aa, Zea mays; identical to SEQ ID NO: 4873

SEQ ID NO: 19321 - DNA, 1356 bp, Zea mays; identical to SEQ ID NO: 2319
  CDS (1)..(1356)

SEQ ID NO: 19322 - protein, 451 aa, Zea mays; identical to SEQ ID NO: 2320

SEQ ID NO: 19323 - DNA, 1602 bp, Zea mays; identical to SEQ ID NO: 4862
  CDS (1)..(1602)

SEQ ID NO: 19324 - protein, 533 aa, Zea mays; identical to SEQ ID NO: 4863

SEQ ID NO: 19325 - DNA, 1614 bp, Zea mays; identical to SEQ ID NO: 4864
  CDS (1)..(1614)

SEQ ID NO: 19326 - protein, 537 aa, Zea mays; identical to SEQ ID NO: 4865

SEQ ID NO: 19327 - DNA, 1590 bp, Zea mays; identical to SEQ ID NO: 4866
  CDS (1)..(1590)

SEQ ID NO: 19328 - protein, 529 aa, Zea mays; identical to SEQ ID NO: 4867

SEQ ID NO: 19329 - DNA, 1824 bp, Zea mays; identical to SEQ ID NO: 4868
  CDS (1)..(1824)

SEQ ID NO: 19330 - protein, 607 aa, Zea mays; identical to SEQ ID NO: 4869

SEQ ID NO: 19331 - DNA, 1575 bp, Zea mays; identical to SEQ ID NO: 4870
  CDS (1)..(1575)

SEQ ID NO: 19332 - protein, 524 aa, Zea mays; identical to SEQ ID NO: 4871

SEQ ID NO: 19333 - DNA, 1674 bp, Zea mays; identical to SEQ ID NO: 4874
  CDS (1)..(1674)

SEQ ID NO: 19334 - protein, 557 aa, Zea mays; identical to SEQ ID NO: 4875

SEQ ID NO: 19335 - DNA, 1593 bp, Zea mays; identical to SEQ ID NO: 4858
  CDS (1)..(1593)

SEQ ID NO: 19336 - protein, 530 aa, Zea mays; identical to SEQ ID NO: 4859

SEQ ID NO: 19337 - DNA, 1356 bp, Zea mays; identical to SEQ ID NO: 18847
  CDS (1)..(1356)

SEQ ID NO: 19338 - protein, 451 aa, Zea mays; identical to SEQ ID NO: 2298

SEQ ID NO: 19339 - DNA, 1635 bp, Zea mays; identical to SEQ ID NO: 4878
  CDS (1)..(1635)

SEQ ID NO: 19340 - protein, 544 aa, Zea mays; identical to SEQ ID NO: 4879

SEQ ID NO: 19341 - DNA, 1662 bp, Zea mays; identical to SEQ ID NO: 4880
  CDS (1)..(1662)

SEQ ID NO: 19342 - protein, 553 aa, Zea mays; identical to SEQ ID NO: 4881

SEQ ID NO: 19343 - DNA, 1596 bp, Zea mays; identical to SEQ ID NO: 2351
  CDS (1)..(1596)

SEQ ID NO: 19344 - protein, 531 aa, Zea mays; identical to SEQ ID NO: 2352

SEQ ID NO: 19345 - DNA, 1635 bp, Zea mays; identical to SEQ ID NO: 4884
  CDS (1)..(1635)

SEQ ID NO: 19346 - protein, 544 aa, Zea mays; identical to SEQ ID NO: 4885

SEQ ID NO: 19347 - DNA, 1644 bp, Zea mays; identical to SEQ ID NO: 4886
  CDS (1)..(1644)

SEQ ID NO: 19348 - protein, 547 aa, Zea mays; identical to SEQ ID NO: 4887

SEQ ID NO: 19349 - DNA, 1527 bp, Zea mays; identical to SEQ ID NO: 4888
  CDS (1)..(1527)

SEQ ID NO: 19350 - protein, 508 aa, Zea mays; identical to SEQ ID NO: 4889

SEQ ID NO: 19351 - DNA, 1620 bp, Zea mays; identical to SEQ ID NO: 4890
  CDS (1)..(1620)

SEQ ID NO: 19352 - protein, 539 aa, Zea mays; identical to SEQ ID NO: 4891

SEQ ID NO: 19353 - DNA, 1779 bp, Zea mays; identical to SEQ ID NO: 4844
  CDS (1)..(1779)

SEQ ID NO: 19354 - protein, 592 aa, Zea mays; identical to SEQ ID NO: 4845

SEQ ID NO: 19355 - DNA, 22 bp, Artificial sequence
  primer
atgggatgtctctgcatcaatc

SEQ ID NO: 19356 - DNA, 23 bp, Artificial sequence
  primer
ttaattcggttgaaccaattttg

SEQ ID NO: 19357 - protein, 710 aa, Artificial sequence
  consensus sequence
  Variant (3)..(13): Xaa in position 3 to 13 is any amino acid
  Variant (14)..(185): Xaa in position 14 to 185 is any or no amino acid
  Variant (187)..(187): Xaa in position 187 is any amino acid
  Variant (188)..(188): Xaa in position 188 is any or no amino acid
  Variant (190)..(191): Xaa in position 190 to 191 is any amino acid
  Variant (194)..(194): Xaa in position 194 is any amino acid
  Variant (196)..(196): Xaa in position 196 is any amino acid
  Variant (199)..(199): Xaa in position 199 is any amino acid
  Variant (201)..(203): Xaa in position 201 to 203 is any amino acid
  Variant (204)..(215): Xaa in position 204 to 215 is any or no amino acid
  Variant (217)..(217): Xaa in position 217 is any amino acid
  Variant (219)..(219): Xaa in position 219 is any amino acid
  Variant (221)..(221): Xaa in position 221 is any amino acid
  Variant (223)..(223): Xaa in position 223 is any amino acid
  Variant (225)..(226): Xaa in position 225 to 226 is any amino acid
  Variant (228)..(233): Xaa in position 228 to 233 is any amino acid
  Variant (234)..(235): Xaa in position 234 to 235 is any or no amino acid
  Variant (239)..(239): Xaa in position 239 is any amino acid
  Variant (242)..(243): Xaa in position 242 to 243 is any amino acid
  Variant (245)..(247): Xaa in position 245 to 247 is any amino acid
  Variant (249)..(251): Xaa in position 249 to 251 is any amino acid
  Variant (252)..(256): Xaa in position 252 to 256 is any or no amino acid
  Variant (258)..(258): Xaa in position 258 is any amino acid
  Variant (260)..(265): Xaa in position 260 to 265 is any amino acid
  Variant (268)..(270): Xaa in position 268 to 270 is any amino acid
  Variant (272)..(273): Xaa in position 272 to 273 is any amino acid
  Variant (279)..(279): Xaa in position 279 is any amino acid
  Variant (288)..(289): Xaa in position 288 to 289 is any amino acid
  Variant (290)..(290): Xaa in position 290 is any or no amino acid
  Variant (292)..(292): Xaa in position 292 is any amino acid
  Variant (293)..(296): Xaa in position 293 to 296 is any or no amino acid
  Variant (298)..(298): Xaa in position 298 is any amino acid
  Variant (300)..(301): Xaa in position 300 to 301 is any amino acid
  Variant (304)..(311): Xaa in position 304 to 311 is any amino acid
  Variant (314)..(315): Xaa in position 314 to 315 is any amino acid
  Variant (318)..(319): Xaa in position 318 to 319 is any amino acid
  Variant (322)..(322): Xaa in position 322 is any amino acid
  Variant (333)..(338): Xaa in position 333 to 338 is any amino acid
  Variant (339)..(342): Xaa in position 339 to 342 is any or no amino acid
  Variant (345)..(346): Xaa in position 345 to 346 is any amino acid
  Variant (352)..(352): Xaa in position 352 is any amino acid
  Variant (354)..(356): Xaa in position 354 to 356 is any amino acid
  Variant (357)..(359): Xaa in position 357 to 359 is any or no amino acid
  Variant (361)..(365): Xaa in position 361 to 365 is any amino acid
  Variant (366)..(366): Xaa in position 366 is any or no amino acid
  Variant (370)..(370): Xaa in position 370 is any amino acid
  Variant (373)..(373): Xaa in position 373 is any amino acid
  Variant (379)..(381): Xaa in position 379 to 381 is any amino acid
  Variant (382)..(383): Xaa in position 382 to 383 is any or no amino acid
  Variant (386)..(386): Xaa in position 386 is any amino acid
  Variant (388)..(388): Xaa in position 388 is any amino acid
  Variant (390)..(390): Xaa in position 390 is any amino acid
  Variant (393)..(393): Xaa in position 393 is any amino acid
  Variant (397)..(397): Xaa in position 397 is any amino acid
  Variant (402)..(402): Xaa in position 402 is any amino acid
  Variant (404)..(405): Xaa in position 404 to 405 is any amino acid
  Variant (410)..(411): Xaa in position 410 to 411 is any amino acid
  Variant (412)..(417): Xaa in position 412 to 417 is any or no amino acid
  Variant (419)..(419): Xaa in position 419 is any amino acid
  Variant (421)..(425): Xaa in position 421 to 425 is any amino acid
  Variant (426)..(432): Xaa in position 426 to 432 is any or no amino acid
  Variant (434)..(437): Xaa in position 434 to 437 is any amino acid
  Variant (440)..(441): Xaa in position 440 to 441 is any amino acid
  Variant (442)..(442): Xaa in position 442 is any or no amino acid
  Variant (446)..(447): Xaa in position 446 to 447 is any amino acid
  Variant (449)..(450): Xaa in position 449 to 450 is any amino acid
  Variant (454)..(458): Xaa in position 454 to 458 is any amino acid
  Variant (460)..(462): Xaa in position 460 to 462 is any amino acid
  Variant (464)..(465): Xaa in position 464 to 465 is any amino acid
  Variant (467)..(468): Xaa in position 467 to 468 is any amino acid
  Variant (470)..(472): Xaa in position 470 to 472 is any amino acid
  Variant (474)..(474): Xaa in position 474 is any amino acid
  Variant (478)..(481): Xaa in position 478 to 481 is any amino acid
  Variant (482)..(483): Xaa in position 482 to 483 is any or no amino acid
  Variant (485)..(487): Xaa in position 485 to 487 is any amino acid
  Variant (488)..(492): Xaa in position 488 to 492 is any or no amino acid
  Variant (494)..(497): Xaa in position 494 to 497 is any amino acid
  Variant (499)..(499): Xaa in position 499 is any amino acid
  Variant (501)..(506): Xaa in position 501 to 506 is any amino acid
  Variant (509)..(509): Xaa in position 509 is any amino acid
  Variant (512)..(514): Xaa in position 512 to 514 is any amino acid
  Variant (516)..(517): Xaa in position 516 to 517 is any amino acid
  Variant (519)..(520): Xaa in position 519 to 520 is any amino acid
  Variant (523)..(527): Xaa in position 523 to 527 is any amino acid
  Variant (528)..(529): Xaa in position 528 to 529 is any or no amino acid
  Variant (531)..(532): Xaa in position 531 to 532 is any amino acid
  Variant (533)..(533): Xaa in position 533 is any or no amino acid
  Variant (535)..(537): Xaa in position 535 to 537 is any amino acid
  Variant (538)..(538): Xaa in position 538 is any or no amino acid
  Variant (540)..(544): Xaa in position 540 to 544 is any amino acid
  Variant (547)..(548): Xaa in position 547 to 548 is any amino acid
  Variant (549)..(549): Xaa in position 549 is any or no amino acid
  Variant (551)..(569): Xaa in position 551 to 569 is any amino acid
  Variant (570)..(607): Xaa in position 570 to 607 is any or no amino acid
  Variant (609)..(611): Xaa in position 609 to 611 is any amino acid
  Variant (612)..(612): Xaa in position 612 is any or no amino acid
  Variant (614)..(615): Xaa in position 614 to 615 is any amino acid
  Variant (617)..(618): Xaa in position 617 to 618 is any amino acid
  Variant (621)..(634): Xaa in position 621 to 634 is any amino acid
  Variant (635)..(644): Xaa in position 635 to 644 is any or no amino acid
  Variant (647)..(648): Xaa in position 647 to 648 is any amino acid
  Variant (651)..(654): Xaa in position 651 to 654 is any amino acid
  Variant (656)..(656): Xaa in position 656 is any amino acid
  Variant (658)..(660): Xaa in position 658 to 660 is any amino acid
  Variant (663)..(668): Xaa in position 663 to 668 is any amino acid
  Variant (669)..(690): Xaa in position 669 to 690 is any or no amino acid
  Variant (692)..(693): Xaa in position 692 to 693 is any amino acid
  Variant (694)..(701): Xaa in position 694 to 701 is any or no amino acid
  Variant (704)..(704): Xaa in position 704 is any amino acid
  Variant (706)..(706): Xaa in position 706 is any amino acid
  Variant (707)..(708): Xaa in position 707 to 708 is any or no amino acid
MGXXXXXXXXXXXXXXXXXXXXXXXXXXXXXXXXXXXXXXXXXXXXXXXXXXXXXXXXXXXXXXXXXXXXXXXXXXXXXXXXXXXXXXXXXXXXXXXXXXXXXXXXXXXXXXXXXXXXXXXXXXXXXXXXXXXXXXXXXXXXXXXXXXXXXXXXXXXXXXXXXXXXXXXXXXXXXXXXXXXXXXXYXXGXXLGXGXFGXTXXXXXXXXXXXXXXXAXKXIXKXKXXLXXXXXXXXEDVXREXXIXXXLXXXXXXXXNXVXXXXXXEDXXXVXXVMELCXGGELFDRIXXXGXXXXXYXEXXAAXXXXXXXXVVXXCHXXGVXHRDLKPENFLXXXXXXXXXXLKXXDFGLSXFXXXXXXGXXXXXXVGSXYYXAPEVLXXXXXYGXEXDXWSXGVIXYILLXGXXPFWAXXXXXXXXEXGXXXXXXXXXXXXLXXXXDFXXXPWPXXSXXAKDXXXXXLXXXPXXRXXAXXXLXHPWXXXXXXAXXXXXXXXVXXXXKXFXXXXXXKKXALXXXAXXLXXEEXXXXXXXFXXXDXXXXGXXXXXELXXXLXXXXXXXXXXXXXXXXXXXXXXXXXXXXXXXXXXXXXXXXXXXXXXXXXXXXXXXXXDXXXXGXXDXXEFXXXXXXXXXXXXXXXXXXXXXXXXAFXXFDXXXXGXIXXXELXXXXXXXXXXXXXXXXXXXXXXXXXXXXDXXXXXXXXXXDGXIXXXEF

SEQ ID NO: 19358 - protein, 11 aa, Artificial sequence
  protein pattern
  Variant (11)..(11): Xaa in position 11 is Phe or Leu
HRDLKPENFLX

SEQ ID NO: 19359 - protein, 21 aa, Artificial sequence
  protein pattern
  Variant (2)..(4): Xaa in position 2 to 4 is any amino acid
  Variant (5)..(5): Xaa in position 5 is Ile or Val
  Variant (6)..(6): Xaa in position 6 is any amino acid
  Variant (7)..(7): Xaa in position 7 is Ile, Leu or Val
  Variant (13)..(13): Xaa in position 13 is any amino acid
  Variant (18)..(18): Xaa in position 18 is Phe or Leu
  Variant (20)..(20): Xaa in position 20 is any amino acid
DXXXXXXVMELCXGGELXDXI

SEQ ID NO: 19360 - protein, 14 aa, Artificial sequence
  protein pattern
  Variant (4)..(4): Xaa in position 4 is Ala or Pro
  Variant (7)..(7): Xaa in position 7 is Met or Val
  Variant (13)..(13): Xaa in position 13 is any amino acid
  Variant (14)..(14): Xaa in position 14 is Lys or Arg
VGSXYYXAPEVLXX

SEQ ID NO: 19361 - protein, 31 aa, Artificial sequence
  protein pattern
  Variant (2)..(2): Xaa in position 2 is Cys or Val
  Variant (4)..(4): Xaa in position 4 is any amino acid
  Variant (6)..(8): Xaa in position 6 to 8 is any amino acid
  Variant (10)..(10): Xaa in position 10 is Leu or Met
  Variant (11)..(14): Xaa in position 11 to 14 is any amino acid
  Variant (15)..(15): Xaa in position 15 is Ala, Asp, Glu or Ser
  Variant (16)..(16): Xaa in position 16 is any amino acid
  Variant (17)..(17): Xaa in position 17 is Ala, Asp or Glu
  Variant (19)..(19): Xaa in position 19 is Ile, Met or Val
  Variant (20)..(20): Xaa in position 20 is any amino acid
  Variant (23)..(24): Xaa in position 23 to 24 is any or no amino acid
  Variant (26)..(28): Xaa in position 26 to 28 is any amino acid
  Variant (29)..(30): Xaa in position 29 to 30 is any or no amino acid
AXKXIXXXKXXXXXXXXDXXREXXIXXXXXL

SEQ ID NO: 19362 - protein, 15 aa, Artificial sequence
  protein pattern
  Variant (2)..(3): Xaa in position 2 to 3 is any amino acid
  Variant (4)..(4): Xaa in position 4 is Leu or Val
  Variant (6)..(6): Xaa in position 6 is any amino acid
  Variant (8)..(8): Xaa in position 8 is any amino acid
  Variant (11)..(11): Xaa in position 11 is any amino acid
  Variant (13)..(14): Xaa in position 13 to 14 is any amino acid
  Variant (15)..(15): Xaa in position 15 is Ala, Cys or Val
GXXXGXGXFGXTXXX

SEQ ID NO: 19363 - protein, 13 aa, Artificial sequence
  protein pattern
  Variant (3)..(4): Xaa in position 3 to 4 is any amino acid
  Variant (7)..(7): Xaa in position 7 is any amino acid
  Variant (8)..(8): Xaa in position 8 is Asp or Asn
  Variant (9)..(9): Xaa in position 9 is any amino acid
  Variant (10)..(10): Xaa in position 10 is Asp, Asn or Ser
  Variant (12)..(12): Xaa in position 12 is any amino acid
AFXXFDXXXXGXI

SEQ ID NO: 19364 - DNA, 1140 bp, Arabidopsis thaliana
  CDS (1)..(1140)
atgttaccctcaagaaaaactaagagagtcttctcctgtgactttactccgggaagaaaacgccgacgatgtgttgttgttccttcctctgtttctccggtaccggaaaacacaaccggagccgatttgctagattcaattccagacgatcttgttatctctatactttgtaaacttggctctacttctcgatgtcctgctgatttcatcaacgttttgctgacatgtaagagattaaaaggattagctatgaatcctattgtgttgtcgagattatctcctaaagctatcgctgttaaagctcataattggtcggaatattctcaccggtttttaaaaaggtgtgtcgacgccggaagtctcgaagcttgttacactctaggaatgattcggttttattgtttacaaaacagaggaaacggcgcgtcgttaatggctaaagccgcgattagttctcacgcgccggcgttatattccttagcagtgattcagttcaacggaagcggtggttcaaagaatgataaagatcttagagccggtgtggctttatgcgcgcgtgccgcttttcttggacacgtcgacgcgctacgtgagctaggtcactgtcttcaagatggttatggagttcctcaaaacgtctctgaaggtaggaggtttttagttcaagccaacgctcgtgaactcgccgccgttttatcttccggtatacaagctaggtcaacgtggctttctttatcacagccaccacctccggttgttcctaaccatggtcaacaaacttgtcctttgcttagtgattttggatgtaatgtaccggcaccggaaacacatcccgcgaataggtttttagcggattggttcgctgttcgcggcggagattgtcccggagatgggttgagattgtgttcacacgctggttgtggacgaccggagacgaggaagcatgagtttaggagatgttcggtttgtggcgttgttaattattgttcacgcgcttgtcaagctttagattggaaactccggcataaaatggattgtgctccggtgcaacggtggctagaggaaggtgacggtggtgaaggtaacgttcagattgacggaaatggtaacggtgataatgttttgcttccaatgagttaa

SEQ ID NO: 19365 - protein, 379 aa, Arabidopsis thaliana
MLPSRKTKRVFSCDFTPGRKRRRCVVVPSSVSPVPENTTGADLLDSIPDDLVISILCKLGSTSRCPADFINVLLTCKRLKGLAMNPIVLSRLSPKAIAVKAHNWSEYSHRFLKRCVDAGSLEACYTLGMIRFYCLQNRGNGASLMAKAAISSHAPALYSLAVIQFNGSGGSKNDKDLRAGVALCARAAFLGHVDALRELGHCLQDGYGVPQNVSEGRRFLVQANARELAAVLSSGIQARSTWLSLSQPPPPVVPNHGQQTCPLLSDFGCNVPAPETHPANRFLADWFAVRGGDCPGDGLRLCSHAGCGRPETRKHEFRRCSVCGVVNYCSRACQALDWKLRHKMDCAPVQRWLEEGDGGEGNVQIDGNGNGDNVLLPMS

SEQ ID NO: 19366 - DNA, 1901 bp, Glycine max
  CDS (182)..(1225)
  misc_feature (1874)..(1874): n is a, g, c or t
  misc_feature (1875)..(1875): n is a, g, c or t
  misc_feature (1878)..(1878): n is a, g, c or t
  misc_feature (1879)..(1879): n is a, g, c or t
  misc_feature (1880)..(1880): n is a, g, c or t
tttttactttatctctctctctcttcaaagttcaaagttccaagttccaagttccaagtttcaagttccattacacaacacacctattttagttgtagacaaagccacataaatagacccaagaggtttaacttaggcaacgaggagacgcctctcttatcctccacttccagtttcaaccatgtcctgccggaaaagacaaaagacttcgccggacaaaacctccgacgacttcttcgactctctccccgacgaccttgtcctctctatcctctgcaagctcagctccaccgcaacttccccctccgatttcattagtgtcttaataacgtgcaagagactaaactccttaggccttcactctcttgtgttatcaaaagcttcccacaaaacattctcagtcaaagccaaaaactggtgcgactctcttcaccgtttcctcaaacattgtgcagacgccggaaacattgaagcctgttacactctcggcatgattcggttttactgcttgcaaaacagagggagcggcgcgtcgctgatggcgaaggcggcgatgaactctcacgcgccggcgctgtactcgctcgcggtgatacagttcaacggaagcggcggcaccaaaaacgacaaggaccttcgagcgggtgtggcgctttgcgcacgcgctgcgttcctcggtcatatcgacgcgctgcgtgagcttggtcattgcttgcaagacggttacggcgttaagctaaacgtaacggagggacgacggtttttggtgcaagcaaacgctcgtgaactcgccgccgtgctctccgccgggaataccaagcgcccctggctgacctggagccaccaccctgtcacccacccgcggctccggtcgggttgcccgttgatgagtgattacgggtgcaatgttccggcgccggatgctcacccggcgagtcagtttatgtcggagtggtttgatatccggggcgggtttccgggtccggatatgaggctttgttctcattcgggttgcgggcgacccgagacaaggaggcacgagtttcgaaggtgttcggtttgtggtgtggtgaactattgctcacgcgcgtgtcaggcgcttgattggaagtttcggcacaaggcggaatgtgctcccgttgagaggtggctcgatgacgacgacgaagatgtcgccggcgagaatgacggcggagatgacggagtaatgatggttgatagttagaaaactagactatttttacaaacgttaacggtgacggtaagcctgcttggaagtttcgacgggtatgaatctatttttaacatggggtaaaatggggggaaaaatctcatttattaccgtggctttgcaagtgcaacttcaatgacagggttttgcttcgacctcttttccttttacttttactgttgtatagaaccgtaaattaattctcctgaaaaacaaaatgaaggggatattttttattatagagcaactatcatccttaattaattgttaattctggaaaattataatatatgaactttttatgtttgttcttccaatttatttaattactttttatttgcttgattacattcttgcctccctgcagactccgccatccccgtgtcctccaagtgttggtggcttctggctattttttgcggccacccttcttggccccgtcccttccgtggatatttatttctcgcgtgctgggtggagctgcgtccaatcttctgggggggtttttcttatataattgcatacagaaaagaatgtccaggaaagtgttaaccggaaagtaaagagtgttggaatattaataatctcatttggaatcatagagtcacttttctacatataaaatgtattcttatcttaattnnatnnngtcataaataatatttccccc

SEQ ID NO: 19367 - protein, 347 aa, Glycine max
MSCRKRQKTSPDKTSDDFFDSLPDDLVLSILCKLSSTATSPSDFISVLITCKRLNSLGLHSLVLSKASHKTFSVKAKNWCDSLHRFLKHCADAGNIEACYTLGMIRFYCLQNRGSGASLMAKAAMNSHAPALYSLAVIQFNGSGGTKNDKDLRAGVALCARAAFLGHIDALRELGHCLQDGYGVKLNVTEGRRFLVQANARELAAVLSAGNTKRPWLTWSHHPVTHPRLRSGCPLMSDYGCNVPAPDAHPASQFMSEWFDIRGGFPGPDMRLCSHSGCGRPETRRHEFRRCSVCGVVNYCSRACQALDWKFRHKAECAPVERWLDDDDEDVAGENDGGDDGVMMVDS

SEQ ID NO: 19368 - DNA, 2052 bp, Glycine max
  CDS (145)..(1320)
gcggcgcgcccgtgccgttttggagattcattacattaccctcttatatataacttgttacttagatttttcttcttctttttttatctctcaacggagagacagaaaaaaagaaagaacgagagagtgattaattagagggacatgagaacaaggagaggtgcgtgttatcctggtgtagtctcaaggatgtgctccaatgtgagggttacgaagaaaaaaagcaaggatctgcacatgcatatgcatgttcctgccggagactccattatttatagccggaaaaagcagaagaaaacgccggaaaaactcgccgccggtcgttacgattttttcgagtccttgccggatgacctcgtaatctccatcttctgcaagcttagttccaccgccactaaaccttccgatttcgtcaatgttttaatcacgtccaaaagattaaacagattagcacttcattcgcttgtattatccaaagcctcgccgagaactttcactattaaagcaaaatattggtgcgattcggcacacaaattcctcaaacactgtgccgatgccggaaacgttgaagcttgctatactttaggtatgattcggttctactgtttgcaaaaccgagggagcggcgcgtcgtttatggcgaaggcggcgattaactctcacgcgcgggctctgtatgcgctggccgtgattcagttcaacggcagcgggggcacgaagagcgacaaggacctacgcgccggcgtggcgctatgcgccagagcggcgtttctcggccacgtcgacgcgctgcgcgagctcggccactgcctgcaggacggttacggcgtgcggcagaacatcgccgagggacggcggttcctcgtgcaggccaacgcgcgtgagctcgccgccgtgctgtccaccggcgccgccgcgcgtaccttgctgagttggaatcttcagccgcagcagctccggcaggggtccgggtgtccgcttctcagcgatttcggatgcaacgtgccggcgccggatgtgatggcggagtggttcgtcgcgcggggcggttcgccgggaccggggctgagactctgttctcacgcggggctctgttctaacgcggggtgcgggaggcccgagacgaggaagcacgagtttcgaaggtgttctgtgtgcggcgaggtgaattattgctcacgcgcgtgccaagcgcttgattggaagttccggcacaaagcggagtgcgcccccgtggagcgatggctcgacgaggacggcgaagatgtcggtaacgacgacggtgacggagaggtcgaggttgttatggtagatagttagacaatttttacaacagtaacggcaacggaagtcgctttggacggaaaatgaatctatttttggcgaagagaaattacttgtcgtgatttattcgccgtctcaaaaaggtagagagaatatggcttcttttcgttttttccttgtatagtttgaaaattctcccgaaaaaaaaaaaagacgaggggagattatttttctttttttttttgttgcaatttcggagtttaacgttaattagaaattagaaattcaatgctaagaggttactagttactaatttttgttattaatttaatcgatttgaacgtaattagtagctttgaagttttcttttattatatgagtagcttttattaaaacttgagattcacttaaatatattttacgtttttttttaatttaaatgtagtactatactcccctcttatattattataatatatattttacagtttaatagttactctattttgtttggatttgagattttagcggatacgacaaaattaaatgtgatttggtgagctgtgatttgtctctattgatttaatgcggcgccatcgcataaggttgaaaaatgaatagttgtgaaaataaatctaatcagttcacggacatcagattttgctttcatacaattttacctctcccctcacatgcatgagatgattacagagggttgattgattctatgcgatccaacaacttgttagtggcgtaaagaaaatatta

SEQ ID NO: 19369 - protein, 391 aa, Glycine max
MRTRRGACYPGVVSRMCSNVRVTKKKSKDLHMHMHVPAGDSIIYSRKKQKKTPEKLAAGRYDFFESLPDDLVISIFCKLSSTATKPSDFVNVLITSKRLNRLALHSLVLSKASPRTFTIKAKYWCDSAHKFLKHCADAGNVEACYTLGMIRFYCLQNRGSGASFMAKAAINSHARALYALAVIQFNGSGGTKSDKDLRAGVALCARAAFLGHVDALRELGHCLQDGYGVRQNIAEGRRFLVQANARELAAVLSTGAAARTLLSWNLQPQQLRQGSGCPLLSDFGCNVPAPDVMAEWFVARGGSPGPGLRLCSHAGLCSNAGCGRPETRKHEFRRCSVCGEVNYCSRACQALDWKFRHKAECAPVERWLDEDGEDVGNDDGDGEVEVVMVDS

SEQ ID NO: 19370 - DNA, 1647 bp, Sorghum bicolor
  CDS (119)..(1303)
  misc_feature (1645)..(1645): n is a, g, c or t
gcacgaggcgcgctccctgtcgtctcccccgctcgtccgccccgcgcggccgtttcacctttctccccaccgcttcccatctctccagcggcgacgactcctgcggagatacacagagatgaggacgaggagcgggtcccggtattctaacggcggcgaggtcgttgccttggtggggcagaagaggaagaggtcggcgttggccgtcgccggtgagtgcgcctgcggcgggcgcaggaagcggcttgccggtgggccggactacctggacgcgctccccgatgaccttgtcctctccatcctgaccaagctcgccgcctcctcctcggcgccgtccgacctgctgcccgtccatctcacgtgcaagaggctcaacgagctcggcggccatgacatggtgttcgccaaggcctcgccggcgtcgctggccgtcaaggcggcggcgtggtccgagccggcgcagaggttcctcaagcgctgcgccgacgccggcaacctcgaggcctgctacattctcggcatgattcggttctactgccagggcagccgcagcggcggcgcggcgctgctggcgagagcggccgttggcgggcacgccgcggcgctctactcgctggcggtgatccagttcaacggcagcggcggcgctaagtcggaccgcgacctgcgcgcgggggcggcgctgtgcgcgcgcgcggccgcgctgggtcacgtcgacgcgcttcgcgagctgggccactgcctccaggacggctacggcgtgcggcgggaccccgctgaaggccgccgcctcctggtcgccgcgaacgcccgcgagctcaccctcgcactctccgcggcgaccgcctcgcgccacgccgtcaccgcgctacccttcgccgcggctgctgctgctgccgccgccgcgggcggcgtcggtggcggcgggtgcccgctcctgtcggactttgggtggagcctccccgaggcggagccccacgcggcgaaccagttcatggtggactggtgggcctcccgctgcgccgcccaggccggcgggaagaagcccgacggcgacagcagcggcgtggacggcagcgacggcgcggagctccgtctgtgctcccacgtacggtgcgggcggcgcgagacgcggcggcacgagttccggcggtgctccgtgtgcggcgcggccaactactgctcccgcgcgtgccaggcgctggactggaagcgcgcgcacaaggcgcagtgcgtggccatggaccggtggctcctcgccggcgttggcggcggcggcgaggtcccgcaaccgcagcagtgaggaaacgccgtttctcccaacggctgacatgacgtaccagcactcccctaaaccggggccggaccacggctccgccgcagcggccgtgccggtcggcccaccgtagaccgggcgtagcgaaaaggcgcgcaggaggaggaaggcgtttcacggctgtttttttctctctttccaccgcaccagctgatgaattgaatgaggtttactcgctgccgtttgggcccgggtgtcgtctttgtacagatgtacgtattctactaggaaaaagcagtagagatcctcttttgtttttgtaatcttctggtatttctaaaagctagaagcggagtactagtagaattncc

SEQ ID NO: 19371 - protein, 394 aa, Sorghum bicolor
MRTRSGSRYSNGGEVVALVGQKRKRSALAVAGECACGGRRKRLAGGPDYLDALPDDLVLSILTKLAASSSAPSDLLPVHLTCKRLNELGGHDMVFAKASPASLAVKAAAWSEPAQRFLKRCADAGNLEACYILGMIRFYCQGSRSGGAALLARAAVGGHAAALYSLAVIQFNGSGGAKSDRDLRAGAALCARAAALGHVDALRELGHCLQDGYGVRRDPAEGRRLLVAANARELTLALSAATASRHAVTALPFAAAAAAAAAAGGVGGGGCPLLSDFGWSLPEAEPHAANQFMVDWWASRCAAQAGGKKPDGDSSGVDGSDGAELRLCSHVRCGRRETRRHEFRRCSVCGAANYCSRACQALDWKRAHKAQCVAMDRWLLAGVGGGGEVPQPQQ

SEQ ID NO: 19372 - DNA, 1534 bp, Glycine max
  CDS (63)..(1247)
accttctttatctctcaaaagagagacacaacaaaaggaaccagagtggattaattagggacatgagaacaaggagaggagcgtgttactctggagtagtctcaaggatgtgttccgatgcgagggtttccaagaaaaaaaacaaggatctgcacatgcacatgcatatgcatatgcatgtccccgccggagactccattatttacagccggaaaaggcagaagaaaacgccggagaaaaccgccggcgctgattacgaatttttcgagtctttgccggacgacctcgtaatctccatcttctgcaaacttagttccaccgccactaaaccttccgatttcgtcaatattttaatcacgtgcaaaagattaaacagattagcacttcattcgcttgtattatccaaagcctcgccgaaaactttcactattaaagcaagagattggtgcgattcggcacacaaattcctcaaacactgtgccgatgccggaaacgttgaagcttgctatactttaggcatgattcggttctactgtttgcaaaaccgagggagcggcgcgtcgtttatggcgaaggcggccattaactctcacgcgcgggctctgtatgcgctggccgtgattcagttcaacggcagcggtggcacgaagagcgacaaggacctacgcgccggcgtggcgctgtgcgccagagcggcgtttcttggccacgtcgatgcgatgcgcgaactcggccactgcctgcaggacggttacggcgtgcggcagaacatcgccgagggacggcggttcctcgtgcaggcaaacgcgcgcgagctcgccgccgtgctgtctaccggcgccgccgcgcgcacctggctgagttggaatcttcagccgcagcagctccggcaggggtccgggtgtccgcttctcagcgatttcggatgcaacgtaccggcgccggaggtgcaccccgcgagcctgttcatggcggagtggttcgccgcgcggggcggttcgccgggaccggggctgagactctgttctcacgcggggtgcgggaggcccgagacgaggaagcacgagtttcgaaggtgttctgtgtgcggcgtggtgaattattgctcacgcgcgtgccaagcgcttgattggaagttccggcacaaggcggagtgctcccccgtgcaacggtggctcgaggaggacggcgaagatgtcggtaacgacgacggtgacggagaggtggaggttatggtagatagttagacaatttttacaacagtaacggtaacggaagtcgctttggacggaaaaatgaatatttttggcgaagtgaaagaaaaaaaggaattacttgtgatgatttattcgccgtctcaaaaaggtagaaaagagtatatggcttcttttcttttttccttgtataggtcgaaaattctcccgaaaaaaacgagaggagattatttttctttttttattttattttgcaatttcggagtttaaagttaatttagaaattcaatgctaaaactaagaggttactagttactgct

SEQ ID NO: 19373 - protein, 394 aa, Glycine max
MRTRRGACYSGVVSRMCSDARVSKKKNKDLHMHMHMHMHVPAGDSIIYSRKRQKKTPEKTAGADYEFFESLPDDLVISIFCKLSSTATKPSDFVNILITCKRLNRLALHSLVLSKASPKTFTIKARDWCDSAHKFLKHCADAGNVEACYTLGMIRFYCLQNRGSGASFMAKAAINSHARALYALAVIQFNGSGGTKSDKDLRAGVALCARAAFLGHVDAMRELGHCLQDGYGVRQNIAEGRRFLVQANARELAAVLSTGAAARTWLSWNLQPQQLRQGSGCPLLSDFGCNVPAPEVHPASLFMAEWFAARGGSPGPGLRLCSHAGCGRPETRKHEFRRCSVCGVVNYCSRACQALDWKFRHKAECSPVQRWLEEDGEDVGNDDGDGEVEVMVDS

SEQ ID NO: 19374 - DNA, 1534 bp, Glycine max; identical to SEQ ID NO: 19372
  CDS (108)..(1247)

SEQ ID NO: 19375 - protein, 379 aa, Glycine max
MCSDARVSKKKNKDLHMHMHMHMHVPAGDSIIYSRKRQKKTPEKTAGADYEFFESLPDDLVISIFCKLSSTATKPSDFVNILITCKRLNRLALHSLVLSKASPKTFTIKARDWCDSAHKFLKHCADAGNVEACYTLGMIRFYCLQNRGSGASFMAKAAINSHARALYALAVIQFNGSGGTKSDKDLRAGVALCARAAFLGHVDAMRELGHCLQDGYGVRQNIAEGRRFLVQANARELAAVLSTGAAARTWLSWNLQPQQLRQGSGCPLLSDFGCNVPAPEVHPASLFMAEWFAARGGSPGPGLRLCSHAGCGRPETRKHEFRRCSVCGVVNYCSRACQALDWKFRHKAECSPVQRWLEEDGEDVGNDDGDGEVEVMVDS

SEQ ID NO: 19376 - DNA, 1167 bp, Oryza sativa (japonica cultivar-group)
  CDS (1)..(1167)
atgaggacgaggagtggatctctctaccgcagcggcggcggcggcggggagacggccatggttgggcagaagaggaagaggtcgtcgttgccgccgcagtacgccaccgccggtgactgctgcggcggaggaggccgccggaagaggctggccggtggtggcccggattacctcgacgagctccccgacgacctcgtcctcgccgtgctctccaagctcgccgcctccgcctcctccccttccgacctcctctccgttcacctcacgtgcaagaggctgaatgggctggggcgccatgacatggtcttcgcaaaggcctcgccggcgtcgctcgccgtcaaggcggcgtcgtggtcggagcccgtgcagcgattcctcaagctctgcgccgacgccggcaacctcgaggcctgctacattctcggcatgattcggttctactgtcttggcaaccggagcggcggcgcggcgctgctggcgagggcggcggtcggcgggcacgcggcggcgctctactcgctggcggttatccagttcaacgggagcggcggcgccaagtcggaccgcgacctccgcgccggggcggcgctgtgcgcgcgcgccgccgcgctggggcacgtcgacgcgctccgcgagctcgggcactgcctccaggacggctacggcgtgcgccgcgaccccgccgagggccgccgcttcctcgtcgccgccaacgcgcgggagctcacgctcgcgctcgccgccgcggcgtcgcaccgccccttcgccgccctccccctcgccggcggcgccgccgccggcgccatcggctgcccgctcctctccgacttcgggtggagcctcccggaggcggagccccacccggccaacctcttcatggccgactggtgggcgtcccgcggcgtgcaggcgacggccaagaaacccggcctcgaggctcccgctgccgccaccggcgacagcgacggcggcggcgagctccgcctctgctcccacgtgcggtgcggccggagggagacccgccgccacgagttccggcggtgctccgtctgcggcgcggccaactactgctcccgcgcgtgccaggcgctggactggaagcgcgcgcacaaggcgcagtgcgtgcccatggaccggtggctcctcgccgccggcgaggcccagtga

SEQ ID NO: 19377 - protein, 388 aa, Oryza sativa (japonica cultivar-group)
MRTRSGSLYRSGGGGGETAMVGQKRKRSSLPPQYATAGDCCGGGGRRKRLAGGGPDYLDELPDDLVLAVLSKLAASASSPSDLLSVHLTCKRLNGLGRHDMVFAKASPASLAVKAASWSEPVQRFLKLCADAGNLEACYILGMIRFYCLGNRSGGAALLARAAVGGHAAALYSLAVIQFNGSGGAKSDRDLRAGAALCARAAALGHVDALRELGHCLQDGYGVRRDPAEGRRFLVAANARELTLALAAAASHRPFAALPLAGGAAAGAIGCPLLSDFGWSLPEAEPHPANLFMADWWASRGVQATAKKPGLEAPAAATGDSDGGGELRLCSHVRCGRRETRRHEFRRCSVCGAANYCSRACQALDWKRAHKAQCVPMDRWLLAAGEAQ

SEQ ID NO: 19378 - DNA, 1011 bp, Arabidopsis thaliana
  CDS (1)..(1011)
atgacgcatctcaacaaaaaacagaggttagagaataaccataacaatactgtgaacaaccatttcgaagacttacatgacgatctcatcatctctatcctccgcaaactcgctacctccgcttcttctccttccgatttcctcaccgttctctccacatgcaagagattgaatcggttaggattacatcctctggttttatctaaagccggtactcaaaccctagccgtcacggcggagaaatggtcagattcttctcataaattcctcaaactctgtgttaatgccggaaacatcgacgcttcgtactctctcggaatgatccgattttactgtctacaaaatccagtgagcggcgcgtcattaatggctaaagcggcgattaaatcacacgcgccggcgctttattcgttatcggtgattcagtttaacggaagcggcggttcaaaaaccgataagaatctacgcgccggcgttgctctttgtgcacgctctgcttatttaggccacgtcgatgcgttacgagagcttggtcactgtcttcaagacggttacggtgttcctcgtgacgtctccgaaggtcgtcgtcttttgattcaagctaacgcgcgtgagctcgcgtgttctctacgctcttacctctctctgaaatctggggacgagaacgagaccttaactgatttaagcgtggttccggttcaggagattcatccggttaaccggtttttaaaagagtggtttagttcgggtcgggttgatttagcggaagggttaaggatgtgttcgcatggtggttgtggaaggccggagactcgggctcatgagtttcggcgatgttctgtttgtgggaaggttaattattgctcgcgtggttgtcaggcgttggattggagagcgaagcataaggttgaatgtacgccgttggatttgtgggttgcggcagcggcggagattggcgacgacggtgaagcggtggcggtggagattgatgataatcatggtgagcggtaa

SEQ ID NO: 19379 - protein, 336 aa, Arabidopsis thaliana
MTHLNKKQRLENNHNNTVNNHFEDLHDDLIISILRKLATSASSPSDFLTVLSTCKRLNRLGLHPLVLSKAGTQTLAVTAEKWSDSSHKFLKLCVNAGNIDASYSLGMIRFYCLQNPVSGASLMAKAAIKSHAPALYSLSVIQFNGSGGSKTDKNLRAGVALCARSAYLGHVDALRELGHCLQDGYGVPRDVSEGRRLLIQANARELACSLRSYLSLKSGDENETLTDLSVVPVQEIHPVNRFLKEWFSSGRVDLAEGLRMCSHGGCGRPETRAHEFRRCSVCGKVNYCSRGCQALDWRAKHKVECTPLDLWVAAAAEIGDDGEAVAVEIDDNHGER

SEQ ID NO: 19380 - DNA, 1170 bp, Oryza sativa subsp
  CDS (1)..(1170)
atgaggacgaggagtggatctctctaccgcagcggcggcggcggcggggagacggccatggttgggcagaagaggaagaggtcgtcgttgccgccgcagtacgccaccgccggtgactgctgcggcggaggaggaggccgccggaagaggctggccggtggtggcccggattacctcgacgagctccccgacgacctcgtcctcgccgtgctctccaagctcgccgcctccgcctcctccccttccgacctcctctccgttcacctcacgtgcaagaggctgaatgggctggggcgccatgacatggtcttcgccaaggcctcgccggcgtcgctcgccgtcaaggcggcgtcgtggtcggagcccgtgcagcgattcctcaagctctgcgccgacgccggcaacctcgaggcctgctacattctcggcatgattcggttctactgtcttggcaaccggagcggcggcgcggcgctgctggcgagggcggcggtcggcgggcacgcggcggcgctctactcgctggcggttatccagttcaacgggagcggcggcgccaagtcggaccgcgacctccgcgccggggcggcgctgtgcgcgcgcgccgccgcgctggggcacgtcgacgcgctccgcgagctcgggcactgcctccaggacggctacggcgtgcgccgcgaccccgccgagggccgccgcttcctcgtcgccgccaacgcgcgggagctcacgctcgcgctcgccgccgcggcgtcgcaccgccccttcgccgccctccccctcgccggcggcgccggcgccggcgccatcggctgcccgctcctctccgacttcgggtggagcctcccggaggcggagccccacccggccaacctcttcatggccgactggtgggcgtcccgcggcgtgcaggcgacggccaagaaacccggcctcgaggctcccgctgccgccaccggcgacagcgacggcggcggcgagctccgcctctgctcccacgtgcggtgcggccggagggagacccgccgccacgagttccggcggtgctccgtctgcggcgcggccaactactgctcccgcgcgtgccaggcgctggactggaagcgcgcgcacaaggcgcagtgcgtgcccatggaccggtggctcctcgccgccggcgaggcccagtga

SEQ ID NO: 19381 - protein, 389 aa, Oryza sativa subsp
MRTRSGSLYRSGGGGGETAMVGQKRKRSSLPPQYATAGDCCGGGGGRRKRLAGGGPDYLDELPDDLVLAVLSKLAASASSPSDLLSVHLTCKRLNGLGRHDMVFAKASPASLAVKAASWSEPVQRFLKLCADAGNLEACYILGMIRFYCLGNRSGGAALLARAAVGGHAAALYSLAVIQFNGSGGAKSDRDLRAGAALCARAAALGHVDALRELGHCLQDGYGVRRDPAEGRRFLVAANARELTLALAAAASHRPFAALPLAGGAGAGAIGCPLLSDFGWSLPEAEPHPANLFMADWWASRGVQATAKKPGLEAPAAATGDSDGGGELRLCSHVRCGRRETRRHEFRRCSVCGAANYCSRACQALDWKRAHKAQCVPMDRWLLAAGEAQ

SEQ ID NO: 19382 - DNA, 1140 bp, Oryza sativa subsp
  CDS (1)..(1140)
atggtggcgaagcgcggcgccggcgcttgtgccctctcctgggatgaggagggcgaggtgtcccgcggcgagaagaggaggagggcggatggggatggctcgtcggacgttggcggcggcggcggcatgggggcgttcgacgcgctgcacgacgagctggtcgtgtccatcctcgccgacgtggccgcctccgccggctcgccggctgacctcgccgccgccatgctcacgtgcaggagattcagggagctggggaagcacgggctggtgctcgcccgggcctcgccgtcggccgtcgccgtgcgcgccgcggcatggtgcgacgacgcgcaccgcttcctcgtccgttgcgcggaagccggaaacgtcgaagcctcctaccttctcggcatgatcatgttctactgcttcgagaatcgcaagctgggggcggagctgctcggcgcggcggcgcggcgcgggcacggcgaggcgctctactcgatggcgatcatccagttcaacggcagcggcctccccaaggacgggcgcaacctccaggccggtgcccagctgtgcgcgcgcgccgcgtcgcgcggccacaacgacgcgctccgcgagctcggccactgcgtctcggacggctacggcgtccgccgctccctctccggcgggcggcgcctcctcatccaggccaacttccgtgagctgtgcgccgcggtggcgaacggcggggccaggttcgccgcggcgctggggcgcagcggcgagtgcaagccgccgggcccgcacatgtgcctcctgagcgactacgggtgccacgtcgccggcgcggcggggcggcgcgcgcacgcggcgaacgcgttcctggccgggtggtacgcgtcgcggccgctggcgtccggcgccggcgccgcggcgctccggatgtgctcgcagcccacctgcgggcggccggagacgcggaagcacgagttccggcggtgctccgtgtgcagcggggtgatctactgctcccgcgcgtgccaggcgctgcactggaaggtggcgcacaagagcgcgtgcgtgccgatggcgcactggctcgtcgccgccaacgccggcgccggcaatgcggtcggggccgcggcggcggcggcggcgcagatggcgatgccgtga

SEQ ID NO: 19383 - protein, 379 aa, Oryza sativa subsp
MVAKRGAGACALSWDEEGEVSRGEKRRRADGDGSSDVGGGGGMGAFDALHDELVVSILADVAASAGSPADLAAAMLTCRRFRELGKHGLVLARASPSAVAVRAAAWCDDAHRFLVRCAEAGNVEASYLLGMIMFYCFENRKLGAELLGAAARRGHGEALYSMAIIQFNGSGLPKDGRNLQAGAQLCARAASRGHNDALRELGHCVSDGYGVRRSLSGGRRLLIQANFRELCAAVANGGARFAAALGRSGECKPPGPHMCLLSDYGCHVAGAAGRRAHAANAFLAGWYASRPLASGAGAAALRMCSQPTCGRPETRKHEFRRCSVCSGVIYCSRACQALHWKVAHKSACVPMAHWLVAANAGAGNAVGAAAAAAAQMAMP

SEQ ID NO: 19384 - DNA, 1188 bp, Oryza sativa subsp
  CDS (1)..(1188)
atgaggacgaggcgaggcgcgtgctactcgccggcgtcgtgccaggacgggcggcggaagaggcggaggatcgccggcggcggcggggagggatcggctgcggcggccgcggcggtggccggcggcgccgaggggcctgccaatgatatgttcgaggagttgccggatgatcttgtggtgtcgatcctcgccgacgtcgcggcgtccgcccggtcgcccggtgacctcgccggcgccatgctcacgtgcaagcggttcagggagctcgggcagagcaaggtggtgctcgcgagggcgtcgccgcggtgcctcgccgtgcgggccaaggcgtggtcggacgctgcgcaccgcttcctgcagcgctgcgccgacgccggcaacctcgacgcgtgctaccttcttggcatgatccggttttattgtctcgggagccgcgggtcgggagcggcgctgatggcggcggcggcggtgggcgggcaccgggaggcgctgtactcgctggcggtgatccagttcaacggcagcggcggaagcaaggacgaccgcgacctccgcgccggggcggcgctgtgcgcgcgcgcggcgtcgctggggcacgtcgacgcgctccgggagctcgggcactgcctgcaggacggctacggcgtgcgccgctccgtgctcgacgggcgccgcctcctcatccaggccaacgcccgcgagctcgccgccgcggtcgccgcctcggcctcgctcctccgcgcggccaccggcaagccggcggcggccgcctcccgccgccactcgtgcctcctcagcgacttcggctgccacgccgcggcgcccaaggccggcgccgaggcgcacgccgccaaccgcttcctcgtcgactggttcgcgtcgcgcccgctcgccggctccaccgccgccgccgccgcggcgccaacgccagggagcgccgcggaggacgaggcggccgggctgcgcctgtgctcgcacgcgctgtgcgggcggccggagacgcggcgccacgagttccggcgctgctcggtgtgcggcgtggtgaactactgctcccgggcgtgccaggcgctgcactggaagacggcgcacaaggcggagtgcacgcccatggaccggtggctcgacaacgccgccgccggcgccgccaaccccaatgccgccgccatggccgcgcccgccccatga

SEQ ID NO: 19385 - protein, 395 aa, Oryza sativa subsp
MRTRRGACYSPASCQDGRRKRRRIAGGGGEGSAAAAAAVAGGAEGPANDMFEELPDDLVVSILADVAASARSPGDLAGAMLTCKRFRELGQSKVVLARASPRCLAVRAKAWSDAAHRFLQRCADAGNLDACYLLGMIRFYCLGSRGSGAALMAAAAVGGHREALYSLAVIQFNGSGGSKDDRDLRAGAALCARAASLGHVDALRELGHCLQDGYGVRRSVLDGRRLLIQANARELAAAVAASASLLRAATGKPAAAASRRHSCLLSDFGCHAAAPKAGAEAHAANRFLVDWFASRPLAGSTAAAAAAPTPGSAAEDEAAGLRLCSHALCGRPETRRHEFRRCSVCGVVNYCSRACQALHWKTAHKAECTPMDRWLDNAAAGAANPNAAAMAAPAP

SEQ ID NO: 19386 - DNA, 1008 bp, Oryza sativa subsp
  CDS (1)..(1008)
atggcgagcggcgcggcgagccctcgctcgccgccggcggcgaagaagcgggcggtggtggtggctggcgacggcgacgactccgacgtgttcgaccggctccccgacgacatcgtcctcgtcgtgctctccaggctcgccgccaacgccgcgtcccccgccgacgtcgcctcggcggcactcacgtgcaggaggttccgggagctcgcggcgcacccggcggtgctgtcgcgcgcgtcggcggcggccgtcgcggtgcggtggggcgcgtggtcggaggcggcgcaccggttcttgcggcggtgcgcggccgccggcagcctccacgcctgctacttcctcggcatggtgaggttctactgcctggggagcagggcgacgggggcggcgctgctggggcgcgcggcgggcggcgggcacgcgccggcgctgtacgcgctggcggtggtgcagttcaacggcagcggcgggggcaaggcggacaaggacgcgcgcgcgggcgtcgcgctgtgcgcgcgcgccgcgtggctcggccacaccccggcgctccgcgagctcggccactggctccaggacggctacggcgcccgccgcgacgcccccgccggccgccgcctcctcctccacgccgccgcccgcgagcacctctcctggaagaagcacaaccacggacaccacgacggcagcgccgccgaggacgcggtgagccggttcatggtcgcgtggtgggactcgcaccgcgccaaggcggcggcgcgggggtgcctccctggcgaacacggcgacggcgagcacgacggcggcgaggacctgcggctgtgctcgcacgcgcggtgcgggcggcgggagacgcggcggcacgagttccggcgatgctcggtgtgcggcgccgccagctactgctcgcgcgcgtgccaggcgctcgactggaagcgcgcccaccgcgcccagtgcgccgccgcgcgctggctcgccgcggccgccgccgccgacggcgtcgcgcactga

SEQ ID NO: 19387 - protein, 335 aa, Oryza sativa subsp
MASGAASPRSPPAAKKRAVVVAGDGDDSDVFDRLPDDIVLVVLSRLAANAASPADVASAALTCRRFRELAAHPAVLSRASAAAVAVRWGAWSEAAHRFLRRCAAAGSLHACYFLGMVRFYCLGSRATGAALLGRAAGGGHAPALYALAVVQFNGSGGGKADKDARAGVALCARAAWLGHTPALRELGHWLQDGYGARRDAPAGRRLLLHAAAREHLSWKKHNHGHHDGSAAEDAVSRFMVAWWDSHRAKAAARGCLPGEHGDGEHDGGEDLRLCSHARCGRRETRRHEFRRCSVCGAASYCSRACQALDWKRAHRAQCAAARWLAAAAAADGVAH

SEQ ID NO: 19388 - DNA, 1191 bp, Oryza sativa subsp
  CDS (1)..(1191)
atgaggacgaggcgaggcgcgtgctactcgccggcgtcgtgccaggacgggcggcggaagaggcggaggatcgccggcggcggcggggagggatcggctgcggcggccgcggcggtggccggcggcgccgaggggcctgccaatgatatgttcgaggagttgccggatgatcttgtggtgtcgatcctcgccgacgtcgcggcgtccgcccggtcgcccggtgacctcgccggcgccatgctcacgtgcaagcggttcagggagctcgggcagagcaaggtggtgctcgcgagggcgtcgccgcggtgcctcgccgtgcgggccaaggcgtggtcggacgctgcgcaccgcttcctgcagcgctgcgccgacgccggcaacctcgacgcgtgctaccttcttggcatgatccggttttattgtctcgggagccgcgggtcgggagcggcgctgatggcggcggcggcggtgggcgggcaccgggaggcgctgtactcgctggcggtgatccagttcaacggcagcggcggaagcaaggacgaccgcgacctccgcgccggggcggcgctgtgcgcgcgcgcggcgtcgctggggcacgtcgacgcgctccgggagctcgggcactgcctgcaggacggctacggcgtgcgccgctccgtgctcgacgggcgccgcctcctcatccaggccaacgcccgcgagctcgccgccgcggtcgccgcctcggcctcgctcctccgcgcggccacccggcaagcccggcggcggccgcctcccgccgccactcgtgcctcctcagcgacttcggctgccacgccgcggcgcccaaggccggcggcgaggcgcacggccgccaaccgcttcctcgtcgactggttcgcgtcgcgcccgctcgccggctccaccgtcgcctccgccgcggcgccaacgccagggagcgccgcggaggacgaggcggccgggctgcgcctgtgctcgcacgcgctgtgcgggcggccggagacgcggcgccacgagttccggcgctgctcggtgtgcggcgtggtgaactactgctcccgggcgtgccaggcgctgcactggaagacggcgcacaaggcggagtgcacgcccatggaccggtggctcgacaacgccgccgccggcgccgccaaccccaatgccgccgccatggccgcgcccgccccatga

SEQ ID NO: 19389 - protein, 396 aa, Oryza sativa subsp
MRTRRGACYSPASCQDGRRKRRRIAGGGGEGSAAAAAAVAGGAEGPANDMFEELPDDLVVSILADVAASARSPGDLAGAMLTCKRFRELGQSKVVLARASPRCLAVRAKAWSDAAHRFLQRCADAGNLDACYLLGMIRFYCLGSRGSGAALMAAAAVGGHREALYSLAVIQFNGSGGSKDDRDLRAGAALCARAASLGHVDALRELGHCLQDGYGVRRSVLDGRRLLIQANARELAAAVAASASLLRAATRQARRRPPPAATRASSATSAATPRRPRPAARRTAANRFLVDWFASRPLAGSTVASAAAPTPGSAAEDEAAGLRLCSHALCGRPETRRHEFRRCSVCGVVNYCSRACQALHWKTAHKAECTPMDRWLDNAAAGAANPNAAAMAAPAP

SEQ ID NO: 19390 - DNA, 1056 bp, Medicago truncatula
  CDS (1)..(1056)
atgagaagaccaatgaaacacccacacaagaagaatcacaatcaagacttctttgaagattttcccgatgatatcgtcgtctttatcctcaccaagctcagctctactgcctcttctccttcccatttctttaacacccttttaacatgcaagagactgaaccgtttgggttttcatcctatggttttatcgaaagctgggccaaaagtactcgccgttaagcccaaaaactggtctgagaactctcaccattttcttaaacgctgtgttaacgtcggtaacgtcgatgcttgttatactcttggaatgatccgattttactgtctacgaaatcgaagaagtggagtatctctaatagccaaggcggcgatgaagttacacgcgccggcgctatactcactcgcggtaattcagttcaacggaagcggaggcactaaacaagacaaagatctacgtgctggagtagcactttctgcacgcgcgtcacttctcggccatatcgacgcgcttcgtgagttaggccattgtcttcaagacggttacggcgtcaaacagaatgtcacggagggacgacggttgttggtgcaagctaacgtgagagagattttactagtctatcgctttcttgagttagcgtcaccttcacgcgctggttcttgtgaagggatactgagtcgcctgagtaacatggcggtgccgttgataaaagagaataggtacaacgtgaaggtgccggaggtgcatccggtgaactggtttttgagagagtggtttgaatctggtttagggattctggaagatgggttgaggctgtgtgcgcatatcggttgtggacgggcggagacgcggccgcatgagttccggcggtgttcggtttgtgggaaggttaactattgttctagggcatgtcaggcactggattggaaattgcggcataagatggagtgttcgccgatggaatggtggttggatgagaatggtggtggtggtgatggttttgtagttggcggcggcggggatatgaacatgggagatgatgcggtggcagctgattag

SEQ ID NO: 19391 - protein, 351 aa, Medicago truncatula
MRRPMKHPHKKNHNQDFFEDFPDDIVVFILTKLSSTASSPSHFFNTLLTCKRLNRLGFHPMVLSKAGPKVLAVKPKNWSENSHHFLKRCVNVGNVDACYTLGMIRFYCLRNRRSGVSLIAKAAMKLHAPALYSLAVIQFNGSGGTKQDKDLRAGVALSARASLLGHIDALRELGHCLQDGYGVKQNVTEGRRLLVQANVREILLVYRFLELASPSRAGSCEGILSRLSNMAVPLIKENRYNVKVPEVHPVNWFLREWFESGLGILEDGLRLCAHIGCGRAETRPHEFRRCSVCGKVNYCSRACQALDWKLRHKMECSPMEWWLDENGGGGDGFVVGGGGDMNMGDDAVAAD

SEQ ID NO: 19392 - DNA, 1110 bp, Oryza sativa
  CDS (1)..(1110)
atggttgggcagaagaggaagaggtcgtcgttgccgccgcagtacgccaccgccggtgactgctgcggcggaggaggccgccggaagaggctggccggtggtggcccggattacctcgacgagctccccgacgacctcgtcctcgccgtgctctccaagctcgccgcctccgcctcctccccttccgacctcctctccgttcacctcacgtgcaagaggctgaatgggctggggcgccatgacatggtcttcgcaaaggcctcgccggcgtcgctcgccgtcaaggcggcgtcgtggtcggagcccgtgcagcgattcctcaagctctgcgccgacgccggcaacctcgaggcctgctacattctcggcatgattcggttctactgtcttggcaaccggagcggcggcgcggcgctgctggcgagggcggcggtcggcgggcacgcggcggcgctctactcgctggcggttatccagttcaacgggagcggcggcgccaagtcggaccgcgacctccgcgccggggcggcgctgtgcgcgcgcgccgccgcgctggggcacgtcgacgcgctccgcgagctcgggcactgcctccaggacggctacggcgtgcgccgcgaccccgccgagggccgccgcttcctcgtcgccgccaacgcgcgggagctcacgctcgcgctcgccgccgcggcgtcgcaccgccccttcgccgccctccccctcgccggcggcgccgccgccggcgccatcggctgcccgctcctctccgacttcgggtggagcctcccggaggcggagccccacccggccaacctcttcatggccgactggtgggcgtcccgcggcgtgcaggcgacggccaagaaacccggcctcgaggctcccgctgccgccaccggcgacagcgacggcggcggcgagctccgcctctgctcccacgtgcggtgcggccggagggagacccgccgccacgagttccggcggtgctccgtctgcggcgcggccaactactgctcccgcgcgtgccaggcgctggactggaagcgcgcgcacaaggcgcagtgcgtgcccatggaccggtggctcctcgccgccggcgaggcccagtga

SEQ ID NO: 19393 - protein, 369 aa, Oryza sativa
MVGQKRKRSSLPPQYATAGDCCGGGGRRKRLAGGGPDYLDELPDDLVLAVLSKLAASASSPSDLLSVHLTCKRLNGLGRHDMVFAKASPASLAVKAASWSEPVQRFLKLCADAGNLEACYILGMIRFYCLGNRSGGAALLARAAVGGHAAALYSLAVIQFNGSGGAKSDRDLRAGAALCARAAALGHVDALRELGHCLQDGYGVRRDPAEGRRFLVAANARELTLALAAAASHRPFAALPLAGGAAAGAIGCPLLSDFGWSLPEAEPHPANLFMADWWASRGVQATAKKPGLEAPAAATGDSDGGGELRLCSHVRCGRRETRRHEFRRCSVCGAANYCSRACQALDWKRAHKAQCVPMDRWLLAAGEAQ

SEQ ID NO: 19394 - DNA, 1140 bp, Oryza sativa
  CDS (1)..(1140)
atggtggcgaagcgcggcgccggcgcttgtgccctctcctgggatgaggagggcgaggtgtcccgcggcgagaagaggaggagggcggatggggatggctcgtcggacgttggcggcggcggcggcataggggcgttcgacgcgctgcacgacgagctggtcgtgtccatcctcgccgacgtggccgcctccgccggctcgccggctgacctcgccgccgccatgctcacgtgcaggagattcagggagctggggaagcacgggctggtgctcgcccgggcctcgccgtcggccgtcgccgtgcgcgccgcggcatggtgcgacgacgcgcaccgcttcctcgtccgttgcgcggaagccggaaacgtcgaagcctcctaccttctcggcatgatcatgttctactgcttcgagaatcgcaagctgggggcggagctgctcggcgcggcggcgcggcgcgggcacggcgaggcgctctactcgatggcgatcatccagttcaacggcagcggcctccccaaggacgggcgcaacctccaggctggtgcccagctgtgcgcgcgcgccgcgtcgcgcggccacaccgacgcgctccgcgagctcggccactgcgtctcggacggctacggcgtccgccgctccctctccggcgggcggcgcctcctcatccaggccaacttccgcgagctgtgcgccgcggtggcgaacggcggggccaggttcgccgcggcgctggggcgcagcggcgagtgcaagccgccgggcccgcacatgtgcctcctgagcgactacgggtgccacgtcgccggcgcggcggggcggcgcgcgcacgcggcgaacgcgttcctggccgggtggtacgcgtcgcggccgctggcgtccggcgccggcgccgcggcgctccggatgtgctcgcagcccacctgcgggcggccggagacgcggaagcacgagttccggcggtgctccgtgtgcagcggggtgatctactgctcccgcgcgtgccaggcgatgcactggaaggtggcgcacaagagcgcgtgcgtgccgatggcgcactggctcgtcgccgccaacgccggcgccggcaatgcggtcggggccgcggcggcggcggcggcgcagatggcgatgccgtga

SEQ ID NO: 19395 - protein, 379 aa, Oryza sativa
MVAKRGAGACALSWDEEGEVSRGEKRRRADGDGSSDVGGGGGIGAFDALHDELVVSILADVAASAGSPADLAAAMLTCRRFRELGKHGLVLARASPSAVAVRAAAWCDDAHRFLVRCAEAGNVEASYLLGMIMFYCFENRKLGAELLGAAARRGHGEALYSMAIIQFNGSGLPKDGRNLQAGAQLCARAASRGHTDALRELGHCVSDGYGVRRSLSGGRRLLIQANFRELCAAVANGGARFAAALGRSGECKPPGPHMCLLSDYGCHVAGAAGRRAHAANAFLAGWYASRPLASGAGAAALRMCSQPTCGRPETRKHEFRRCSVCSGVIYCSRACQAMHWKVAHKSACVPMAHWLVAANAGAGNAVGAAAAAAAQMAMP

SEQ ID NO: 19396 - DNA, 1188 bp, Oryza sativa
  CDS (1)..(1188)
atgaggacgaggcgaggcgcgtgctactcgccggcgtcgtgccaggacgggcggcggaagaggcggaggatcgccggcggcggcggggagggatcggctgcggcggccgcggcggtggccggcggcgccgaggggcctgccaatgatatgttcgaggagttgccggatgatcttgtggtgtcgatcctcgccgacgtcgcggcgtccgcccggtcgcccggtgacctcgccggcgccatgctcacgtgcaagcggttcagggagctcgggcagagcaaggtggtgctcgcgagggcgtcgccgcggtgcctcgccgtgcgggccaaggcgtggtcggacgctgcgcaccgcttcctgcagcgctgcgccgacgccggcaacctcgacgcgtgctaccttcttggcatgatccggttttattgtctcgggagccgcgggtcgggagcggcgctgatggcggcggcggcggtgggcgggcaccgggaggcgctgtactcgctggcggtgatccagttcaacggcagcggcggaagcaaggacgaccgcgacctccgcgccggggcggcgctgtgcgcgcgcgcggcgtcgctggggcacgtcgacgcgctccgggagctcgggcactgcctgcaggacggctacggcgtgcgccgctccgtgctcgacgggcgccgcctcctcatccaggccaacgcccgcgagctcgccgccgcggtcgccgcctcggcctcgctcctccgcgcggccaccggcaagccggcggcggccgcctcccgccgccactcgtgcctcctcagcgacttcggctgccacgccgcggcgcccaaggccggcggcgaggcgcacgccgccaaccgcttcctcgtcgactggttcgcgtcgcgcccgctcgccggctccaccgccgccgccgccgcggcgccaacgccagggagcgccgcggaggacgaggcggccgggctgcgcctgtgctcgcacgcgctgtgcgggcggccggagacgcggcgccacgagttccggcgctgctcggtgtgcggcgtggtgaactactgctcccgggcgtgccaggcgctgcactggaagacggcgcacaaggcggagtgcacgcccatggaccggtggctcgacaacgccgccgccggcgccgccaaccccaatgccgccgccatggccgcgcccgccccatga

SEQ ID NO: 19397 - protein, 395 aa, Oryza sativa
MRTRRGACYSPASCQDGRRKRRRIAGGGGEGSAAAAAAVAGGAEGPANDMFEELPDDLVVSILADVAASARSPGDLAGAMLTCKRFRELGQSKVVLARASPRCLAVRAKAWSDAAHRFLQRCADAGNLDACYLLGMIRFYCLGSRGSGAALMAAAAVGGHREALYSLAVIQFNGSGGSKDDRDLRAGAALCARAASLGHVDALRELGHCLQDGYGVRRSVLDGRRLLIQANARELAAAVAASASLLRAATGKPAAAASRRHSCLLSDFGCHAAAPKAGGEAHAANRFLVDWFASRPLAGSTAAAAAAPTPGSAAEDEAAGLRLCSHALCGRPETRRHEFRRCSVCGVVNYCSRACQALHWKTAHKAECTPMDRWLDNAAAGAANPNAAAMAAPAP

SEQ ID NO: 19398 - DNA, 1077 bp, Oryza sativa
  CDS (1)..(1077)
atgaggagccctaggaggcggcgcggcgtccacccggcggcggcgacggcgccgccgtgttccgccatggcgagcggcgcggcgagccctcgctcgccgccagcggcgaagaagcgggcggtggtggtggctggcgacggcgacgactccgacgtgttcgaccggctccccgacgacatcgtcctcgtcgtgctctccaggctcgccgccaacgccgcgtcccccgccgacgtcgcctcggcggcactcacgtgcaggaggttccgggagctcgcgacgcacccggcggtgctgtcgcgcgcgtcggcggcggccgtcgcggtgcggtggggcgcgtggtcggaggcggctcaccggttcttgcggcggtgcgcggccgccggcagcctccacgcctgctacttcctcggcatggtgaggttctactgcctggggagcagggcgacgggggcggcgctgctggggcgcgcggcgggcggcgggcacgcgccggcgctgtacgcgctggcggtggtgcagttcaacggcagcggcgggggcaaggcggacaaggacgcgcgcgcgggcgtcgcgctgtgcgcgcgcgccgcgtggctaggccacaccccggcgctccgcgagctcggccactgcctccaggacggctacggcgcccgccgcgacgcccccgccggccgccgcctcctcctccacgccgccgcccgcgagcacctctcctggaagaagcacaaccacggacaccacgacggcagcgccgccgaggacgcggtgagccggttcatggtcgcgtggtgggactcgcaccgcgccaaggcggcggcgcgggggtgcctccctggcgaacacggcgacggcgagcacgacggcggcgaggacctgcggctgtgctcgcacgcgcggtgcgggcggcgggagacgcggcggcacgagttccggcggtgctcggtgtgcggcgccgccagctactgctcgcgcgcgtgccaggcgctcgactggaagcgcgcccaccgcgcccagtgcgccgccgcgcgctggctcgccgcggccgccgccgccgccgacggcgtcgcgcactga

SEQ ID NO: 19399 - protein, 358 aa, Oryza sativa
MRSPRRRRGVHPAAATAPPCSAMASGAASPRSPPAAKKRAVVVAGDGDDSDVFDRLPDDIVLVVLSRLAANAASPADVASAALTCRRFRELATHPAVLSRASAAAVAVRWGAWSEAAHRFLRRCAAAGSLHACYFLGMVRFYCLGSRATGAALLGRAAGGGHAPALYALAVVQFNGSGGGKADKDARAGVALCARAAWLGHTPALRELGHCLQDGYGARRDAPAGRRLLLHAAAREHLSWKKHNHGHHDGSAAEDAVSRFMVAWWDSHRAKAAARGCLPGEHGDGEHDGGEDLRLCSHARCGRRETRRHEFRRCSVCGAASYCSRACQALDWKRAHRAQCAAARWLAAAAAAADGVAH

SEQ ID NO: 19400 - DNA, 1047 bp, Glycine max
  CDS (1)..(1047)
atgagaaggccatggaagcattctaagaacaaacatgatctctttgaatgtcttccggacgatctcgttgttcttattctttccaagctcagcgccaccgcttcatctccttccgatttcatcaacatcatcttaacatgcaagaggctaaaccgctcaggcctgcaccgtcttgtgttgtctaaagctgggcccaaagtattcgccataaagccgaaaaattggtcagaatatgctcactcttttctcaaacactgcgtcaatgccggtaacgtggatgcctgttacactctcggaatgatccgattttactgtttgaaaaaccgagggagcgggctctcgttaatggcgaaggcggctatgaagctgcacgcgccggcgctgtactcgctggcagtgattcagttcaacggtagcggcggttcaaagcgcgataaagatctacgcgctggcgtggccttgtcggcgcgtgcatctttactcggccacatcgacgcgcttcgggagttaggccattgccttcaagacggatacggcgtgcggcagaacgtcaccgaggggagaaggctcctcgtgcaggccaacgtgcgcgagctcgcgtatgtcctacgcgccgtggcgcctccttcgcgctgctgcgacgagtcctcctcgctgctgacgtggggcgcgctgagatgtcagagaaaaaacaacaacgcggtgtcatcactggcgtgtccgttgctgagtgattacggttacagcgtggcgccgccggaagtgcaaccggcgaattggtttctgagagagtggtttgagtcaggtaaggggaaattagaagaaggactgaggctttgcgcgcacattgggtgcggtcgaccggagacgcggccacacgagtttcgccggtgttcggtttgcggcaaagtgaattactgttcacgtggatgtcaggcgctggattggaagttgcggcataagattgagtgttcgccggtggaaatgtacggtgatggtggtgttgatgtggagaatgagtttgtggtcccaaacgatgccgtttga

SEQ ID NO: 19401 - protein, 348 aa, Glycine max
MRRPWKHSKNKHDLFECLPDDLVVLILSKLSATASSPSDFINIILTCKRLNRSGLHRLVLSKAGPKVFAIKPKNWSEYAHSFLKHCVNAGNVDACYTLGMIRFYCLKNRGSGLSLMAKAAMKLHAPALYSLAVIQFNGSGGSKRDKDLRAGVALSARASLLGHIDALRELGHCLQDGYGVRQNVTEGRRLLVQANVRELAYVLRAVAPPSRCCDESSSLLTWGALRCQRKNNNAVSSLACPLLSDYGYSVAPPEVQPANWFLREWFESGKGKLEEGLRLCAHIGCGRPETRPHEFRRCSVCGKVNYCSRGCQALDWKLRHKIECSPVEMYGDGGVDVENEFVVPNDAV

SEQ ID NO: 19402 - DNA, 1044 bp, Glycine max
  CDS (1)..(1044)
atgtcctgccggaaaagacaaaagacttcgccggacaaaacctccgacgacttcttcgactctctccccgacgaccttgtcctctctatcctctgcaagctcagctccaccgcaacttccccctccgatttcattagtgtcttaataacgtgcaagagactaaactccttaggccttcactctcttgtgttatcaaaagcttcccacaaaacattctcagtcaaagccaaaaactggtgcgactctcttcaccgtttcctcaaacattgtgcagatgccggaaacattgaagcctgttacactctcggcatgattcggttttactgcttgcaaaacagagggagcggcgcgtcgctgatggcgaaggcggcgatgaactctcacgcgccggcgctgtactcgctcgcggtgatacagttcaacggaagcggcggcaccaaaaacgacaaggaccttcgagcgggtgtggcgctttgcgcacgcgctgcgttcctcggtcatatcgacgcgctgcgtgagcttggtcattgcttgcaagacggttacggcgttaagctaaacgtaacggagggacgacggtttttggtgcaagcaaacgctcgtgaactcgccgccgtgctctccgccgggaataccaagcgcccctggctgacctggagccaccaccctgtcacccacccgcggctccggtcgggttgcccgttgatgagtgattacgggtgcaatgttccggcgccggatgctcacccggcgagtcagtttatgtcggagtggattgatatacggggcggggttacgggtccggatatgaggctatgttctcattcgggttgcgggcgacccgagacaaggaggcacgagtatcgaaagtgttcggtttgcggtttggtgaattattgctcacgcgcgtgccaagcgcttgattggaagttccggcacaaagcggagtgcgcccccgtggagcgatggctcgacgaggacggcgaagatgtcggtaacgacgacggtgacggagaggtcgaggttgttatggtagatagttag

SEQ ID NO: 19403 - protein, 347 aa, Glycine max
MSCRKRQKTSPDKTSDDFFDSLPDDLVLSILCKLSSTATSPSDFISVLITCKRLNSLGLHSLVLSKASHKTFSVKAKNWCDSLHRFLKHCADAGNIEACYTLGMIRFYCLQNRGSGASLMAKAAMNSHAPALYSLAVIQFNGSGGTKNDKDLRAGVALCARAAFLGHIDALRELGHCLQDGYGVKLNVTEGRRFLVQANARELAAVLSAGNTKRPWLTWSHHPVTHPRLRSGCPLMSDYGCNVPAPDAHPASQFMSEWIDIRGGVTGPDMRLCSHSGCGRPETRRHEYRKCSVCGLVNYCSRACQALDWKFRHKAECAPVERWLDEDGEDVGNDDGDGEVEVVMVDS

SEQ ID NO: 19404 - DNA, 1035 bp, Glycine max
  CDS (1)..(1035)
atgagaaggccttgcaaacattctaagaagaaacatgatctctttgaatgtctccctgacgatctccttgtccttattctttctaagctcagctccaccgcttcttctccttctgatttcatcaacatcatcttaacatgcaagaggttaaaccggttaggcctgcaccgtcttgtgttatccaaagctgcctctaaactattcgccataaaaccgaaaaattggtcggaatatgctcactcttttctcaaacactgcgctaacgccggtaacgtggatgcctgttacactctcggaatgatccgattttactgtttgaaaaatcgagggagcggactctcgttaatggcgaaggcggccatgaagctgcacgcgccggctctgtactcgctggcggtgattcagttcaacggcagcggcggttcgaagcgcgacaaggatctacgcgcgggcgtggccttgtcggcgcgtgcgtcgttactcggccacatcgacgcgcttcgggagttaggccattgccttcaagacggttacggcgtgcggcagaacgtcacggaggggaggcggctactcgtgcaggccaacgtgcgcgagctcgcgtacgtcctacgcgccgtggcgccttcgcgctgctacgagacctcgctgctgacgtggcgcgcgctgagatgtcagagaaacaacaacaacaacaacgcggtggtggcatgtcctttgctgagtgattatggttacaacgtggcggcgccggaggtgcagccggcgaattggtttctgagagagtggtttgagtccggtaagggaaaattggaggaaggactaaggctttgcgcgcacattgggtgtggccgaccggagacgcggccgcacgagtttcgccggtgttcggtttgcggcaaagtgaattactgttctcgtggatgtcaggcgctggattggaagttgcggcataagatggagtgttcgccggtggaaatgtacgatggtggtgtggatggagagaatgagtttgtggtcccaaacgatgccgtttga

SEQ ID NO: 19405 - protein, 344 aa, Glycine max
MRRPCKHSKKKHDLFECLPDDLLVLILSKLSSTASSPSDFINIILTCKRLNRLGLHRLVLSKAASKLFAIKPKNWSEYAHSFLKHCANAGNVDACYTLGMIRFYCLKNRGSGLSLMAKAAMKLHAPALYSLAVIQFNGSGGSKRDKDLRAGVALSARASLLGHIDALRELGHCLQDGYGVRQNVTEGRRLLVQANVRELAYVLRAVAPSRCYETSLLTWRALRCQRNNNNNNAVVACPLLSDYGYNVAAPEVQPANWFLREWFESGKGKLEEGLRLCAHIGCGRPETRPHEFRRCSVCGKVNYCSRGCQALDWKLRHKMECSPVEMYDGGVDGENEFVVPNDAV

SEQ ID NO: 19406 - DNA, 1044 bp, Glycine max
  CDS (1)..(1044)
atgtcctgccggaaaagacaaaagacttcgccggacaaaacctccgacgacttcttcgactctctccccgacgaccttgtcctctctatcctctgcaagctcagctccaccgcaacttccccctccgatttcattagtgtcttaataacgtgcaagagactaaactccttaggccttcactctcttgtgttatcaaaagcttcccacaaaacattctcagtcaaagccaaaaactggtgcgactctcttcaccgtttcctcaaacattgtgcagatgccggaaacattgaagcctgttacactctcggcatgattcggttttactgcttgcaaaacagagggagcggcgcgtcgctgatggcgaaggcggcgatgaactctcacgcgccggcgctgtactcgctcgcggtgatacagttcaacggaagcggcggcaccaaaaacgacaaggaccttcgagcgggtgtggcgctttgcgcacgcgctgcgttcctcggtcatatcgacgcgctgcgtgagcttggtcattgcttgcaagacggttacggcgttaagctaaacgtaacggagggacgacggtttttggtgcaagcaaacgctcgtgaactcgccgccgtgctctccgccgggaataccaagcgcccctggctgacctggagccaccaccctgtcacccacccgcggctccggtcgggttgcccgttgatgagtgattacgggtgcaatgttccggcgccggatgctcacccggcgagtcagtttatgtcggagtggtttgatatccggggcgggtttccgggtccggatatgaggctttgttctcattcgggttgcgggcgacccgagacaaggaggcacgagtttcgaaggtgttcggtttgcggtttggtgaattattgctcacgcgcgtgccaagcgcttgattggaagttccggcacaaagcggagtgcgcccccgtggagcgatggctcgacgaggacggcgaagatgtcggtaacgacgacggtgacggagaggtcgaggttgttatggtagatagttag

SEQ ID NO: 19407 - protein, 347 aa, Glycine max
MSCRKRQKTSPDKTSDDFFDSLPDDLVLSILCKLSSTATSPSDFISVLITCKRLNSLGLHSLVLSKASHKTFSVKAKNWCDSLHRFLKHCADAGNIEACYTLGMIRFYCLQNRGSGASLMAKAAMNSHAPALYSLAVIQFNGSGGTKNDKDLRAGVALCARAAFLGHIDALRELGHCLQDGYGVKLNVTEGRRFLVQANARELAAVLSAGNTKRPWLTWSHHPVTHPRLRSGCPLMSDYGCNVPAPDAHPASQFMSEWFDIRGGFPGPDMRLCSHSGCGRPETRRHEFRRCSVCGLVNYCSRACQALDWKFRHKAECAPVERWLDEDGEDVGNDDGDGEVEVVMVDS

SEQ ID NO: 19408 - DNA, 1152 bp, Triticum aestivum
  CDS (1)..(1152)
atgaggacgaggagcggctctctctatacctgcggaggtgtcggcgagccagcggctcccgtggccgggcagaagaggaagaggtcgcccgccgccgccggcgaagcatccggcgggcgccggaagaggcaggctaccgggccggactacttggacggcatccctgacgacctcgtgctgtccatcttctccaaactcgccgcatctgcgaactccccctccgacctgctgtccgtccacctaacgtgcaagaggctcaacggcctgggacagcaggacatggtgttcgccaaggcctcgccggcgtcgctcgccgtcaaggcggcggcgtggtcggagcccgtgcagcggtttctcaagcgctgcgccgacgccggtaatcttgaggcgtgctacattctaggcatgatccggttctactgccttggcagccggagcggtggcgcggctctgctcgcgaaggcggctgtcggcgggcacccggcggcgctctactcgctggccgtcatccagttcaacggcagcgggggcgccaagtcggaccgcgacctgcgcgccggggcggcgctctgcgcgcgctccgctgcgctgggccatgtcgacgcgctccgcgagctcgggcactgcctccaggacggctacggcgtgcgccgcgaccccgccgagggacgccgcctcctcgtcgccgcgaacgcccgcgagctctccctcgcgctcgccgccgcggcggccagcgcgacctaccccttcgcctccctccccatcagcgccgtcgcaggcggcgccggcggcgtcagcagcagcccactcctctccgacttcgggtggagcctgccggaggcggagcctcacacggcgaaccagttcatgtcagactggtgggcgtcgcgcggcgtgcaggcgtgcgccaagaagaccgacgcggcggccaccggcggagacggcgagggcgagctacggctgtgctcccacatacggtgcgggcgcaaggagacgcggcggcacgagttccggcgctgctccgtgtgcggcgcggccaactactgctcccgcgcgtgccaggccctggactggaagcgcgcccacaaggcccagtgcgtgcccatggaccgctggctcgtcggcgccgccgccgccgcgccccagcagtga

SEQ ID NO: 19409 - protein, 383 aa, Triticum aestivum
MRTRSGSLYTCGGVGEPAAPVAGQKRKRSPAAAGEASGGRRKRQATGPDYLDGIPDDLVLSIFSKLAASANSPSDLLSVHLTCKRLNGLGQQDMVFAKASPASLAVKAAAWSEPVQRFLKRCADAGNLEACYILGMIRFYCLGSRSGGAALLAKAAVGGHPAALYSLAVIQFNGSGGAKSDRDLRAGAALCARSAALGHVDALRELGHCLQDGYGVRRDPAEGRRLLVAANARELSLALAAAAASATYPFASLPISAVAGGAGGVSSSPLLSDFGWSLPEAEPHTANQFMSDWWASRGVQACAKKTDAAATGGDGEGELRLCSHIRCGRKETRRHEFRRCSVCGAANYCSRACQALDWKRAHKAQCVPMDRWLVGAAAAAPQQ

SEQ ID NO: 19410 - DNA, 20 bp, Artificial sequence
  primer
atgttaccctcaagaaaaac

SEQ ID NO: 19411 - DNA, 21 bp, Artificial sequence
  primer
ttaactcattggaagcaaaac

SEQ ID NO: 19412 - protein, 343 aa, Artificial sequence
  consensus sequence
  Variant (7)..(9): Xaa in position 7 to 9 is any amino acid
  Variant (11)..(16): Xaa in position 11 to 16 is any amino acid
  Variant (18)..(19): Xaa in position 18 to 19 is any amino acid
  Variant (21)..(21): Xaa in position 21 is any amino acid
  Variant (23)..(28): Xaa in position 23 to 28 is any amino acid
  Variant (33)..(35): Xaa in position 33 to 35 is any amino acid
  Variant (37)..(41): Xaa in position 37 to 41 is any amino acid
  Variant (43)..(45): Xaa in position 43 to 45 is any amino acid
  Variant (48)..(57): Xaa in position 48 to 57 is any amino acid
  Variant (59)..(64): Xaa in position 59 to 64 is any amino acid
  Variant (67)..(68): Xaa in position 67 to 68 is any amino acid
  Variant (71)..(71): Xaa in position 71 is any amino acid
  Variant (75)..(76): Xaa in position 75 to 76 is any amino acid
  Variant (80)..(80): Xaa in position 80 is any amino acid
  Variant (90)..(91): Xaa in position 90 to 91 is any amino acid
  Variant (93)..(94): Xaa in position 93 to 94 is any amino acid
  Variant (97)..(97): Xaa in position 97 is any amino acid
  Variant (99)..(99): Xaa in position 99 is any amino acid
  Variant (101)..(101): Xaa in position 101 is any amino acid
  Variant (104)..(106): Xaa in position 104 to 106 is any amino acid
  Variant (108)..(109): Xaa in position 108 to 109 is any amino acid
  Variant (113)..(113): Xaa in position 113 is any amino acid
  Variant (125)..(125): Xaa in position 125 is any amino acid
  Variant (127)..(127): Xaa in position 127 is any amino acid
  Variant (129)..(129): Xaa in position 129 is any amino acid
  Variant (135)..(135): Xaa in position 135 is any amino acid
  Variant (143)..(143): Xaa in position 143 is any amino acid
  Variant (147)..(147): Xaa in position 147 is any amino acid
  Variant (164)..(169): Xaa in position 164 to 169 is any amino acid
  Variant (173)..(173): Xaa in position 173 is any amino acid
  Variant (175)..(176): Xaa in position 175 to 176 is any amino acid
  Variant (179)..(179): Xaa in position 179 is any amino acid
  Variant (183)..(189): Xaa in position 183 to 189 is any amino acid
  Variant (190)..(224): Xaa in position 190 to 224 is any or no amino acid
  Variant (226)..(226): Xaa in position 226 is any amino acid
  Variant (227)..(227): Xaa in position 227 is any or no amino acid
  Variant (229)..(229): Xaa in position 229 is any amino acid
  Variant (231)..(238): Xaa in position 231 to 238 is any amino acid
  Variant (239)..(247): Xaa in position 239 to 247 is any or no amino acid
  Variant (249)..(251): Xaa in position 249 to 251 is any amino acid
  Variant (253)..(263): Xaa in position 253 to 263 is any amino acid
  Variant (264)..(282): Xaa in position 264 to 282 is any or no amino acid
  Variant (289)..(290): Xaa in position 289 to 290 is any amino acid
  Variant (291)..(296): Xaa in position 291 to 296 is any or no amino acid
  Variant (300)..(300): Xaa in position 300 is any amino acid
  Variant (304)..(304): Xaa in position 304 is any amino acid
  Variant (315)..(316): Xaa in position 315 to 316 is any amino acid
  Variant (327)..(327): Xaa in position 327 is any amino acid
  Variant (330)..(331): Xaa in position 330 to 331 is any amino acid
  Variant (334)..(335): Xaa in position 334 to 335 is any amino acid
  Variant (337)..(337): Xaa in position 337 is any amino acid
  Variant (339)..(340): Xaa in position 339 to 340 is any amino acid
  Variant (341)..(341): Xaa in position 341 is any or no amino acid
LPDDLVXXXLXXXXXXAXXPXDXXXXXXTCKRXXXLXXXXXVXXXASXXXXXXXXXXWXXXXXXFLXXCAXAGNXXACYXLGMIRFYCLXXRXXGAXLXAXAAXXXHXXALYXLAVIQFNGSGGXKXDXDLRAGXALCARAAXLGHXDALRELGHCLQDGYGVXXXXXXGRRXLXXANXRELXXXXXXXXXXXXXXXXXXXXXXXXXXXXXXXXXXXXXXXXXXLXXDXGXXXXXXXXXXXXXXXXXFXXXWXXXXXXXXXXXXXXXXXXXXXXXXXXXXXXLRLCSHXXXXXXXXCGRXETRXHEFRRCSVCGXXNYCSRACQALXWKXXHKXXCXPXXXWL

SEQ ID NO: 19413 - protein, 61 aa, Artificial sequence
  protein pattern
  Variant (2)..(3): Xaa in position 2 to 3 is any amino acid
  Variant (7)..(7): Xaa in position 7 is Ala or Ser
  Variant (9)..(9): Xaa in position 9 is Ala or Ser
  Variant (19)..(19): Xaa in position 19 is Ala, Ser or Thr
  Variant (21)..(21): Xaa in position 21 is any amino acid
  Variant (23)..(23): Xaa in position 23 is Lys or Arg
  Variant (24)..(24): Xaa in position 24 is Asp or Asn
  Variant (29)..(29): Xaa in position 29 is Ala or Val
  Variant (32)..(32): Xaa in position 32 is Cys or Ser
  Variant (35)..(35): Xaa in position 35 is any or no amino acid
  Variant (37)..(37): Xaa in position 37 is any amino acid
  Variant (38)..(38): Xaa in position 38 is any or no amino acid
  Variant (42)..(42): Xaa in position 42 is Ile or Val
  Variant (45)..(45): Xaa in position 45 is Leu or Met
  Variant (59)..(60): Xaa in position 59 to 60 is any amino acid
  Variant (61)..(61): Xaa in position 61 is Asp, Asn or Ser
HXXALYXLXVIQFNGSGGXKXDXXLRAGXALXARXAXXLGHXDAXRELGHCLQDGYGVXXX

SEQ ID NO: 19414 - protein, 49 aa, Artificial sequence
  protein pattern
  Variant (4)..(4): Xaa in position 4 is Ala or Ser
  Variant (6)..(7): Xaa in position 6 to 7 is any amino acid
  Variant (11)..(11): Xaa in position 11 is any amino acid
  Variant (15)..(15): Xaa in position 15 is any amino acid
  Variant (18)..(18): Xaa in position 18 is Phe or Tyr
  Variant (20)..(20): Xaa in position 20 is Lys or Arg
  Variant (26)..(26): Xaa in position 26 is any amino acid
  Variant (27)..(27): Xaa in position 27 is Ala or Val
  Variant (28)..(28): Xaa in position 28 is Asn or Ser
  Variant (33)..(33): Xaa in position 33 is Ala or Gly
  Variant (38)..(38): Xaa in position 38 is Asp or His
  Variant (41)..(42): Xaa in position 41 to 42 is any amino acid
  Variant (44)..(44): Xaa in position 44 is Lys or Arg
  Variant (45)..(45): Xaa in position 45 is any amino acid
  Variant (46)..(46): Xaa in position 46 is Asp, Glu or Gln
  Variant (48)..(48): Xaa in position 48 is Ala, Ser, Thr or Val
  Variant (49)..(49): Xaa in position 49 is Ala or Pro
RLCXHXXCGRXETRXHEXRXCSVCGXXXYCSRXCQALXWKXXHXXXCXX

SEQ ID NO: 19415 - protein, 58 aa, Artificial sequence
  protein pattern
  Variant (3)..(3): Xaa in position 3 is Phe or Leu
  Variant (4)..(6): Xaa in position 4 to 6 is any amino acid
  Variant (7)..(7): Xaa in position 7 is Ala or Gly
  Variant (8)..(10): Xaa in position 8 to 10 is any amino acid
  Variant (11)..(11): Xaa in position 11 is Ile, Leu, Met or Val
  Variant (13)..(13): Xaa in position 13 is Phe or Leu
  Variant (14)..(14): Xaa in position 14 is Ala or Ser
  Variant (15)..(15): Xaa in position 15 is Lys or Arg
  Variant (16)..(16): Xaa in position 16 is Ala or Leu
  Variant (17)..(17): Xaa in position 17 is Ala, Gly or Ser
  Variant (18)..(20): Xaa in position 18 to 20 is any amino acid
  Variant (21)..(21): Xaa in position 21 is Phe, Ile or Leu
  Variant (22)..(22): Xaa in position 22 is Ala, Ser or Thr
  Variant (23)..(23): Xaa in position 23 is Ile or Val
  Variant (24)..(24): Xaa in position 24 is any amino acid
  Variant (25)..(25): Xaa in position 25 is Ala or Pro
  Variant (26)..(27): Xaa in position 26 to 27 is any amino acid
  Variant (29)..(29): Xaa in position 29 is Cys or Ser
  Variant (30)..(30): Xaa in position 30 is Asp or Glu
  Variant (31)..(34): Xaa in position 31 to 34 is any amino acid
  Variant (37)..(38): Xaa in position 37 to 38 is any amino acid
  Variant (40)..(40): Xaa in position 40 is Ala or Val
  Variant (41)..(41): Xaa in position 41 is Asp or Asn
  Variant (42)..(42): Xaa in position 42 is Ala or Val
  Variant (44)..(44): Xaa in position 44 is Asn or Ser
  Variant (45)..(45): Xaa in position 45 is Ile, Leu or Val
  Variant (46)..(46): Xaa in position 46 is Asp or Glu
  Variant (48)..(48): Xaa in position 48 is Cys or Ser
  Variant (50)..(50): Xaa in position 50 is any amino acid
KRXXXXXXXXXVXXXXXXXXXXXXXXXWXXXXXXFLXXCXXXGXXXAXYXLGMIRFYC

SEQ ID NO: 19416 - protein, 32 aa, Artificial sequence
  protein pattern
  Variant (2)..(5): Xaa in position 2 to 5 is any or no amino acid
  Variant (9)..(9): Xaa in position 9 is Ile or Leu
  Variant (10)..(10): Xaa in position 10 is Leu or Val
  Variant (11)..(11): Xaa in position 11 is Ile, Leu or Val
  Variant (12)..(12): Xaa in position 12 is any amino acid
  Variant (13)..(13): Xaa in position 13 is Ile or Val
  Variant (14)..(14): Xaa in position 14 is Phe or Leu
  Variant (15)..(15): Xaa in position 15 is Ala, Cys, Ser or Thr
  Variant (16)..(16): Xaa in position 16 is Asp, Lys or Arg
  Variant (17)..(17): Xaa in position 17 is Leu or Val
  Variant (18)..(18): Xaa in position 18 is Ala, Gly or Ser
  Variant (19)..(19): Xaa in position 19 is Ala or Ser
  Variant (20)..(20): Xaa in position 20 is Asn, Ser or Thr
  Variant (21)..(21): Xaa in position 21 is Ala or Ser
  Variant (22)..(23): Xaa in position 22 to 23 is any amino acid
  Variant (25)..(25): Xaa in position 25 is Ala, Gly or Ser
  Variant (27)..(27): Xaa in position 27 is Phe, Leu or Val
  Variant (28)..(28): Xaa in position 28 is Ala, Ile, Leu or Val
  Variant (29)..(29): Xaa in position 29 is Gly, Asn, Pro or Ser
  Variant (30)..(30): Xaa in position 30 is Ala, Ile or Val
  Variant (31)..(31): Xaa in position 31 is any amino acid
  Variant (32)..(32): Xaa in position 32 is Ile or Leu
LXXXXPDDXXXXXXXXXXXXXXXPXDXXXXXX

SEQ ID NO: 19417 - protein, 15 aa, Artificial sequence
  protein pattern
  Variant (3)..(3): Xaa in position 3 is Phe or Leu
  Variant (5)..(5): Xaa in position 5 is Ile or Val
  Variant (6)..(6): Xaa in position 6 is Ala or Gln
  Variant (9)..(9): Xaa in position 9 is any amino acid
  Variant (13)..(14): Xaa in position 13 to 14 is any or no amino acid
RRXLXXANXRELXXA

SEQ ID NO: 19418 - protein, 14 aa, Artificial sequence
  protein pattern
  Variant (2)..(3): Xaa in position 2 to 3 is any or no amino acid
  Variant (5)..(6): Xaa in position 5 to 6 is any or no amino acid
  Variant (8)..(8): Xaa in position 8 is Ala, Glu or Ser
  Variant (9)..(9): Xaa in position 9 is Phe or Leu
  Variant (10)..(10): Xaa in position 10 is Leu or Met
  Variant (11)..(11): Xaa in position 11 is Ala or Gly
  Variant (12)..(12): Xaa in position 12 is any amino acid
RXXGXXAXXXXXAA

SEQ ID NO: 19419 - DNA, 1536 bp, Arabidopsis thaliana; identical to SEQ ID NO: 5342
  CDS (1)..(1536)

SEQ ID NO: 19420 - protein, 511 aa, Arabidopsis thaliana; identical to SEQ ID NO: 5343

SEQ ID NO: 19421 - DNA, 1404 bp, Oryza sativa (japonica cultivar-group); identical to SEQ ID NO: 5322
  CDS (1)..(1404)

SEQ ID NO: 19422 - protein, 467 aa, Oryza sativa (japonica cultivar-group); identical to SEQ ID NO: 5323

SEQ ID NO: 19423 - DNA, 1212 bp, Oryza sativa (japonica cultivar-group); identical to SEQ ID NO: 5324
  CDS (1)..(1212)

SEQ ID NO: 19424 - protein, 403 aa, Oryza sativa (japonica cultivar-group); identical to SEQ ID NO: 5325

SEQ ID NO: 19425 - DNA, 1245 bp, Oryza sativa (japonica cultivar-group); identical to SEQ ID NO: 5326
  CDS (1)..(1245)

SEQ ID NO: 19426 - protein, 414 aa, Oryza sativa (japonica cultivar-group); identical to SEQ ID NO: 5327

SEQ ID NO: 19427 - DNA, 1338 bp, Oryza sativa (japonica cultivar-group); identical to SEQ ID NO: 5334
  CDS (1)..(1338)

SEQ ID NO: 19428 - protein, 445 aa, Oryza sativa (japonica cultivar-group); identical to SEQ ID NO: 5335

SEQ ID NO: 19429 - DNA, 1536 bp, Arabidopsis thaliana; identical to SEQ ID NO: 5338
  CDS (1)..(1536)

SEQ ID NO: 19430 - protein, 511 aa, Arabidopsis thaliana; identical to SEQ ID NO: 5339

SEQ ID NO: 19431 - DNA, 1242 bp, Arabidopsis thaliana; identical to SEQ ID NO: 5350
  CDS (1)..(1242)

SEQ ID NO: 19432 - protein, 413 aa, Arabidopsis thaliana; identical to SEQ ID NO: 5351

SEQ ID NO: 19433 - DNA, 1251 bp, Nicotiana tabacum; identical to SEQ ID NO: 5352
  CDS (1)..(1251)

SEQ ID NO: 19434 - protein, 416 aa, Nicotiana tabacum; identical to SEQ ID NO: 5353

SEQ ID NO: 19435 - DNA, 1167 bp, Oryza sativa subsp; identical to SEQ ID NO: 5362
  CDS (1)..(1167)

SEQ ID NO: 19436 - protein, 388 aa, Oryza sativa subsp; identical to SEQ ID NO: 5363

SEQ ID NO: 19437 - DNA, 1218 bp, Oryza sativa subsp; identical to SEQ ID NO: 5368
  CDS (1)..(1218)

SEQ ID NO: 19438 - protein, 405 aa, Oryza sativa subsp; identical to SEQ ID NO: 5369

SEQ ID NO: 19439 - DNA, 1134 bp, Oryza sativa subsp; identical to SEQ ID NO: 5370
  CDS (1)..(1134)

SEQ ID NO: 19440 - protein, 377 aa, Oryza sativa subsp; identical to SEQ ID NO: 5371

SEQ ID NO: 19441 - DNA, 1617 bp, Populus tremula
  CDS (1)..(1617)
atggaggagatgtatccggcggttgcagtgctatttagagtaggtaattcagcctgtgaaagtccatccatagatacccaaatggatatcacaagaattttaatggcagacacggctagcttattatctgatactgtaactaaggttcctactgctggggataaggattgtaattgtgcggctccggcttcaaaagaggacaggggaggaagaggagcccctttgttggatatgatctctgaaactgaaagaaattgggttgttggcgatgatgggataacacgggaaagtgaggaagaggattctttgtcgttggagggtgatccaattcttgatagttcttgttctctttcagtggctagtgagacaagtagcttatgtggagaggatctcttgagtttggagaccacctctgaggtaggaacactgagttctgtagaaattcaaaagagcattggtggtgttgatattgttgccaagacagcagatttgggggattcaaacgttgacactgttgtgagcgatcccccttcggtggcaggaagtgttgaggaagaggctggggatggatctgatgcaaagacatcttctgtggttcttcagttgactctggaaagagggaccagtggaacagtctcaagaagtgtttttgaagtggactatgtacccctttggggatttacatctgtttgtggaaggagaccggagatggaagatgcagttgctactgtgccttatttattaaaatttcctattcaaatgctgattggcgaccgattacttgatggaatgagcaagtatttgcctcaccagactgctcatttctttggagtttatgatggtcatggaggctcgcaagtggcaaattattgtcatgatcgtatccattcggctttgtccgaggagatagaatttgttaagaatggcctgagtgatggaagtattaaggatagttgccaggagcagtggaaaaaggctttcaccaattgttttctcaaggttgatgctgaagtcggaggaaaggctggtgccgaaccagttgccccagaaactgttggttctactgctgttgtggccattatttgttcatcccacatcatagtagcaaactgtggagactcacgagcagttctttgtcgcgggaaagaaccaatggcattatcagtggatcataaaccaaaccgagaagatgagtatgcaaggatagaagcagctggaggcaaggtcatacagtggaatgggcatcgtgtctttggtgttctagcaatgtcaaggtctattggtgatagatatttgaaaccatggattattccagaacccgaagttatgtttattcctagggcaagagaagatgaatgtctcattctggcaagtgatggtttgtgggatgtcatgtcaaatgaagaagcatgtgatctggcacgcaaacgaatacttgtctggcacaaaaagaatggcgttgcgctctcgtcctcaaggagcgagggaattgatcctgcagctcaagcagcagctgagttcctctcaaaccgtgcccttcaaaaaggaagcaaggataacatcactgtaatcgtggtggatctgaaagcgcaaaggaagttcaaaaccaaaacatga

SEQ ID NO: 19442 - protein, 538 aa, Populus tremula
MEEMYPAVAVLFRVGNSACESPSIDTQMDITRILMADTASLLSDTVTKVPTAGDKDCNCAAPASKEDRGGRGAPLLDMISETERNWVVGDDGITRESEEEDSLSLEGDPILDSSCSLSVASETSSLCGEDLLSLETTSEVGTLSSVEIQKSIGGVDIVAKTADLGDSNVDTVVSDPPSVAGSVEEEAGDGSDAKTSSVVLQLTLERGTSGTVSRSVFEVDYVPLWGFTSVCGRRPEMEDAVATVPYLLKFPIQMLIGDRLLDGMSKYLPHQTAHFFGVYDGHGGSQVANYCHDRIHSALSEEIEFVKNGLSDGSIKDSCQEQWKKAFTNCFLKVDAEVGGKAGAEPVAPETVGSTAVVAIICSSHIIVANCGDSRAVLCRGKEPMALSVDHKPNREDEYARIEAAGGKVIQWNGHRVFGVLAMSRSIGDRYLKPWIIPEPEVMFIPRAREDECLILASDGLWDVMSNEEACDLARKRILVWHKKNGVALSSSRSEGIDPAAQAAAEFLSNRALQKGSKDNITVIVVDLKAQRKFKTKT

SEQ ID NO: 19443 - DNA, 1617 bp, Populus tremula
  CDS (1)..(1617)
atggaggagatgtatccggcggttgcagtgccatttagagtaggtaattcagcctgtgaaagtccatccataaatacccaaatggatatcacaagaattttaatggcagacacggctagcttattatctgatactgtaactaaggttcctactgctggggataaggattgtaattgtgcggctccggcttcaaaagaggacaggggaggaagaggagcccctttgttggatatgatctctgaaactgaaagaaattgggttgttggcgatgatgggataacacgggaaagtgaggaagaggattctttgtcgttggagggtgatccaattcttgatagttcttgttctctttcagtggctagtgagacaagtagcttatgtggagaggatctcttgagtttggagaccgcctctgaggtaggaacactgagttctgtagaaattaaaaagagcattggtggtgttgatattgttgccaagacagcagatttgggggattcaaacgttgacactgttgtgagcgatcgcccttcggtggcaggaagtgttgaggaagaggctggggatggatctgatgcaaagacatcttctgtggttcttcagttgactctggaaagagggaccagtggaacagtctcaagaagtgtttttgaagtggactatgtacccctttggggatttacatctgtttgtggaaggagaccggagatggaagatgcagttgctactgtgccttatttattaaaatttcctattcaaatgctgattggcgaccgattacttgatggaatgagcaagtatttgcctcaccagactgctcatttctttggagtttatgatggtcatggaggctcgcaagtggcaaattattgtcatgatcgtatccattcggctttgtccgaggagatagaatttgttaagaatggcctgagtgatggaagtattaaggatagttgccagaagcagtggaaaaatgctttcaccaattgttttctcaaggttgatgctgaagtcggaggaaaggctggtgccgaaccagttgccccagaaactgttggttctactgctgttgtggccattatttgttcatcccacatcatagtagcaaactgtggagactcacgagcagttctttgtcgcgggaaagaaccaatggcattatcagtggatcataaaccaaaccgagaagatgagtatgcaaggatagaagcagctggaggcaaggtcatacagtggaatgggcatcgtgtctttggtgttctagcaatgtcaaggtctattggtgatagatatttgaaaccatggattattccagaacccgaagttatgtttattcctagggcaagagaagatgaatgcctcattctggcaagtgatggtttgtgggatgtcatgtcaaatgaagaagcatgtgatctggcacgcaaacgaatacttgtctggcacaaaaagaatggcgttgcgctctcgtcctcaaggagcgagggaattgatcctgcagctcaagcagcagctgagttcctctcaaaccgtgcccttcaaaaaggaagcaaggataacatcactgtaatcgtggtggatctgaaagcgcaaaggaagttcaaaaccaaaacatga

SEQ ID NO: 19444 - protein, 538 aa, Populus tremula
MEEMYPAVAVPFRVGNSACESPSINTQMDITRILMADTASLLSDTVTKVPTAGDKDCNCAAPASKEDRGGRGAPLLDMISETERNWVVGDDGITRESEEEDSLSLEGDPILDSSCSLSVASETSSLCGEDLLSLETASEVGTLSSVEIKKSIGGVDIVAKTADLGDSNVDTVVSDRPSVAGSVEEEAGDGSDAKTSSVVLQLTLERGTSGTVSRSVFEVDYVPLWGFTSVCGRRPEMEDAVATVPYLLKFPIQMLIGDRLLDGMSKYLPHQTAHFFGVYDGHGGSQVANYCHDRIHSALSEEIEFVKNGLSDGSIKDSCQKQWKNAFTNCFLKVDAEVGGKAGAEPVAPETVGSTAVVAIICSSHIIVANCGDSRAVLCRGKEPMALSVDHKPNREDEYARIEAAGGKVIQWNGHRVFGVLAMSRSIGDRYLKPWIIPEPEVMFIPRAREDECLILASDGLWDVMSNEEACDLARKRILVWHKKNGVALSSSRSEGIDPAAQAAAEFLSNRALQKGSKDNITVIVVDLKAQRKFKTKT

SEQ ID NO: 19445 - DNA, 1617 bp, Populus tremula; identical to SEQ ID NO: 5376
  CDS (1)..(1617)

SEQ ID NO: 19446 - protein, 538 aa, Populus tremula; identical to SEQ ID NO: 5377

SEQ ID NO: 19447 - DNA, 1536 bp, Arabidopsis thaliana; identical to SEQ ID NO: 5382
  CDS (1)..(1536)

SEQ ID NO: 19448 - protein, 511 aa, Arabidopsis thaliana; identical to SEQ ID NO: 5383

SEQ ID NO: 19449 - DNA, 1613 bp, Mesembryanthemum crystallinum; identical to SEQ ID NO: 5384
  CDS (59)..(1201)

SEQ ID NO: 19450 - protein, 380 aa, Mesembryanthemum crystallinum; identical to SEQ ID NO: 5385

SEQ ID NO: 19451 - DNA, 1047 bp, Musa balbisiana; identical to SEQ ID NO: 5386
  CDS (1)..(1047)

SEQ ID NO: 19452 - protein, 348 aa, Musa balbisiana; identical to SEQ ID NO: 5387

SEQ ID NO: 19453 - DNA, 1251 bp, Oryza sativa subsp; identical to SEQ ID NO: 5388
  CDS (1)..(1251)

SEQ ID NO: 19454 - protein, 416 aa, Oryza sativa subsp; identical to SEQ ID NO: 5389

SEQ ID NO: 19455 - DNA, 1164 bp, Oryza sativa subsp; identical to SEQ ID NO: 5392
  CDS (1)..(1164)

SEQ ID NO: 19456 - protein, 387 aa, Oryza sativa subsp; identical to SEQ ID NO: 5393

SEQ ID NO: 19457 - DNA, 1281 bp, Prunus avium; identical to SEQ ID NO: 940
  CDS (1)..(1281)

SEQ ID NO: 19458 - protein, 426 aa, Prunus avium; identical to SEQ ID NO: 941

SEQ ID NO: 19459 - DNA, 1536 bp, Arabidopsis thaliana; identical to SEQ ID NO: 5398
  CDS (1)..(1536)

SEQ ID NO: 19460 - protein, 511 aa, Arabidopsis thaliana; identical to SEQ ID NO: 5399

SEQ ID NO: 19461 - DNA, 1251 bp, Nicotiana tabacum
  CDS (1)..(1251)
atggctgggatgtgttgtggtgttaatttagctgaaacagaagctacaactccagttgagccaagttcagaagctgcaagacgacgtcgtatggaaatccatcagttccgtttagctccgccgttggaaaacggaacaaaacgccacaaagtggagaaagttgtagatcaaagcaagagacggaagttggaaactagtgtaacgatttcattgacgtctccgttaagtgtaacggagaaggtagtagagaaagaatttgaagctaaacctttggatctgttggaatctgatgtttcgtctgttaaaattgagcgtcctgaggttgtttctggtaataataatccacctaagtttggtacaacttctgtatgtggaagacgacgtgatatggaagatgcagtagcagttcacccttcgttttgcaaggaagaaaatgaaaattcaaacagtttacatttctatggtgtatacgacgggcacggctgttcacatgtggctatgaaatgcaaagatagaatgcacgagatagtgaaaaacgaggtggagaaaggggaaacccagtggaaagaagtgatgacccaaagcttctctcaaatggataatgaagttgtccactattcgagtggagctttaggtggatcgaggtcaaattgtaggtgcgaacttcagactccacagtgtgatgccgttgggtcaactgctgttgttgcagtggttactcctgagaagatcatcgtctccaattgcggtgattctcgtgctgtcctttgcagaaatggcgtcgcgattcctctttccatcgatcataagccggatcgaccagatgaattgaatcgtatacaagaagcaggtggtcgtgttatatattgggatggaccaagggttcttggagttttagccatgtcacgagcaattggtgacaattacttgaaaccatatgttatatcggaaccggaggtgactataacggaaagaaccgaagaggacgagtgtttgatattagctagcgatggattgtgggatgtcgtctcgaacgagaccgcttgtggtgtggctcgtatgtgcttgcaatcaaggaagccaccatccccgcatggttcgccggaaaatgacgtcactgtgaccggagccggagaaagctccgaccagttgtgttcagatgcgtcaattcttttgactaaattggccttggctaggcacagtactgataatgttagcgttgtcgtggttgatttaagaaaagatttataa

SEQ ID NO: 19462 - protein, 416 aa, Nicotiana tabacum; identical to SEQ ID NO: 5403

SEQ ID NO: 19463 - DNA, 1385 bp, Fagus sylvatica; identical to SEQ ID NO: 5410
  CDS (106)..(1347)

SEQ ID NO: 19464 - protein, 413 aa, Fagus sylvatica; identical to SEQ ID NO: 5411

SEQ ID NO: 19465 - DNA, 1305 bp, Arabidopsis thaliana; identical to SEQ ID NO: 958
  CDS (1)..(1305)

SEQ ID NO: 19466 - protein, 434 aa, Arabidopsis thaliana; identical to SEQ ID NO: 959

SEQ ID NO: 19467 - DNA, 1272 bp, Arabidopsis thaliana
  CDS (1)..(1272)
atggacgaagtttctcctgcagtcgctgttccattcagaccattcactgaccctcacgccggacttagaggctattgcaacggtgaatctagggttactttaccggaaagttcttgttctggcgacggagctatgaaagattcttcctttgagatcaatacaagacaagattcattgacatcatcatcatctgctatggcaggtgtggatatctccgccggagatgaaatcaacggttcagatgagtttgatccgagatcgatgaatcagagtgagaagaaagtacttagtagaacagagagtagaagtctgtttgagttcaagtgtgttcctttatatggagtgacttcgatttgtggtagacgaccagagatggaagattctgtctcaacgattcctagattccttcaagtttcttctagttcgttgcttgatggtcgagtcactaatggatttaatcctcacttgagtgctcatttctttggtgtttacgatggccatggcggttctcaggtagcgaattattgtcgtgagaggatgcatctggctttgacggaggagatagtgaaggagaagccggagttttgtgacggtgacacgtggcaagagaagtggaagaaggctttgttcaactcttttatgagagttgactcggagattgaaactgtggctcatgctccggaaactgttgggtctacctcggtggttgcggttgtctttccgactcacatctttgtcgcgaattgcggcgactctagggcggttttgtgtcgcggcaaaacgccactcgcgttgtcggttgatcacaaaccggatagggatgatgaagcggcgaggatagaagctgccggtgggaaagtaatccggtggaacggggctcgtgtatttggtgttctcgcaatgtcaagatccattggcgatagataccttaaaccgtcagtaattccggatccagaagtgacttcagtgcggcgagtaaaagaagatgattgtctcatcttagcaagtgatggtctttgggatgtaatgacaaacgaagaagtgtgcgatttggctcggaaacggattttactatggcataagaagaacgcgatggccggagaggctttgcttccggcggagaaaagaggagaaggaaaagatcctgcagcaatgtccgcggcagagtatttgtcgaagatggctttgcaaaaaggaagcaaagacaatataagtgtggtagtggttgatttgaagggaataaggaaattcaagagcaaatccttgaattga

SEQ ID NO: 19468 - protein, 423 aa, Arabidopsis thaliana; identical to SEQ ID NO: 5319

SEQ ID NO: 19469 - DNA, 1200 bp, Arabidopsis thaliana; identical to SEQ ID NO: 964
  CDS (1)..(1200)

SEQ ID NO: 19470 - protein, 399 aa, Arabidopsis thaliana; identical to SEQ ID NO: 965

SEQ ID NO: 19471 - DNA, 1269 bp, Brassica napus; identical to SEQ ID NO: 972
  CDS (1)..(1269)

SEQ ID NO: 19472 - protein, 422 aa, Brassica napus; identical to SEQ ID NO: 973

SEQ ID NO: 19473 - DNA, 1206 bp, Brassica napus; identical to SEQ ID NO: 1444
  CDS (1)..(1206)

SEQ ID NO: 19474 - protein, 401 aa, Brassica napus; identical to SEQ ID NO: 1445

SEQ ID NO: 19475 - DNA, 1236 bp, Brassica napus; identical to SEQ ID NO: 974
  CDS (1)..(1236)

SEQ ID NO: 19476 - protein, 411 aa, Brassica napus; identical to SEQ ID NO: 975

SEQ ID NO: 19477 - DNA, 1209 bp, Brassica napus; identical to SEQ ID NO: 1478
  CDS (1)..(1209)

SEQ ID NO: 19478 - protein, 402 aa, Brassica napus; identical to SEQ ID NO: 1479

SEQ ID NO: 19479 - DNA, 1206 bp, Brassica napus; identical to SEQ ID NO: 1486
  CDS (1)..(1206)

SEQ ID NO: 19480 - protein, 401 aa, Brassica napus; identical to SEQ ID NO: 1487

SEQ ID NO: 19481 - DNA, 1071 bp, Glycine max; identical to SEQ ID NO: 1004
  CDS (1)..(1071)

SEQ ID NO: 19482 - protein, 356 aa, Glycine max; identical to SEQ ID NO: 1005

SEQ ID NO: 19483 - DNA, 1617 bp, Glycine max; identical to SEQ ID NO: 1518
  CDS (1)..(1617)

SEQ ID NO: 19484 - protein, 538 aa, Glycine max; identical to SEQ ID NO: 1519

SEQ ID NO: 19485 - DNA, 1191 bp, Glycine max; identical to SEQ ID NO: 1020
  CDS (1)..(1191)

SEQ ID NO: 19486 - protein, 396 aa, Glycine max; identical to SEQ ID NO: 1021

SEQ ID NO: 19487 - DNA, 1191 bp, Glycine max; identical to SEQ ID NO: 1026
  CDS (1)..(1191)

SEQ ID NO: 19488 - protein, 396 aa, Glycine max; identical to SEQ ID NO: 1027

SEQ ID NO: 19489 - DNA, 1674 bp, Glycine max; identical to SEQ ID NO: 1558
  CDS (1)..(1674)

SEQ ID NO: 19490 - protein, 557 aa, Glycine max; identical to SEQ ID NO: 1559

SEQ ID NO: 19491 - DNA, 20 bp, Artificial sequence
  primer
atggaggagatgactcccgc

SEQ ID NO: 19492 - DNA, 23 bp, Artificial sequence
  primer
tcaggttctggtcttgaactttc

SEQ ID NO: 19493 - protein, 596 aa, Artificial sequence
  consensus sequence
  Variant (2)..(54): Xaa in position 2 to 54 is any amino acid
  Variant (55)..(240): Xaa in position 55 to 240 is any or no amino acid
  Variant (242)..(242): Xaa in position 242 is any amino acid
  Variant (243)..(243): Xaa in position 243 is any or no amino acid
  Variant (245)..(246): Xaa in position 245 to 246 is any amino acid
  Variant (248)..(249): Xaa in position 248 to 249 is any amino acid
  Variant (251)..(251): Xaa in position 251 is any amino acid
  Variant (253)..(254): Xaa in position 253 to 254 is any amino acid
  Variant (259)..(269): Xaa in position 259 to 269 is any amino acid
  Variant (270)..(293): Xaa in position 270 to 293 is any or no amino acid
  Variant (296)..(296): Xaa in position 296 is any amino acid
  Variant (299)..(299): Xaa in position 299 is any amino acid
  Variant (304)..(306): Xaa in position 304 to 306 is any amino acid
  Variant (309)..(310): Xaa in position 309 to 310 is any amino acid
  Variant (312)..(313): Xaa in position 312 to 313 is any amino acid
  Variant (315)..(315): Xaa in position 315 is any amino acid
  Variant (317)..(328): Xaa in position 317 to 328 is any amino acid
  Variant (329)..(343): Xaa in position 329 to 343 is any or no amino acid
  Variant (345)..(351): Xaa in position 345 to 351 is any amino acid
  Variant (353)..(355): Xaa in position 353 to 355 is any amino acid
  Variant (357)..(357): Xaa in position 357 is any amino acid
  Variant (359)..(365): Xaa in position 359 to 365 is any amino acid
  Variant (366)..(390): Xaa in position 366 to 390 is any or no amino acid
  Variant (399)..(406): Xaa in position 399 to 406 is any amino acid
  Variant (408)..(408): Xaa in position 408 is any amino acid
  Variant (418)..(418): Xaa in position 418 is any amino acid
  Variant (420)..(425): Xaa in position 420 to 425 is any amino acid
  Variant (428)..(428): Xaa in position 428 is any amino acid
  Variant (433)..(433): Xaa in position 433 is any amino acid
  Variant (435)..(435): Xaa in position 435 is any amino acid
  Variant (438)..(439): Xaa in position 438 to 439 is any amino acid
  Variant (442)..(444): Xaa in position 442 to 444 is any amino acid
  Variant (447)..(447): Xaa in position 447 is any amino acid
  Variant (450)..(450): Xaa in position 450 is any amino acid
  Variant (452)..(452): Xaa in position 452 is any amino acid
  Variant (454)..(454): Xaa in position 454 is any amino acid
  Variant (457)..(457): Xaa in position 457 is any amino acid
  Variant (465)..(465): Xaa in position 465 is any amino acid
  Variant (469)..(469): Xaa in position 469 is any amino acid
  Variant (474)..(475): Xaa in position 474 to 475 is any amino acid
  Variant (476)..(481): Xaa in position 476 to 481 is any or no amino acid
  Variant (483)..(484): Xaa in position 483 to 484 is any amino acid
  Variant (488)..(491): Xaa in position 488 to 491 is any amino acid
  Variant (493)..(495): Xaa in position 493 to 495 is any amino acid
  Variant (497)..(497): Xaa in position 497 is any amino acid
  Variant (510)..(511): Xaa in position 510 to 511 is any amino acid
  Variant (513)..(515): Xaa in position 513 to 515 is any amino acid
  Variant (517)..(518): Xaa in position 517 to 518 is any amino acid
  Variant (521)..(527): Xaa in position 521 to 527 is any amino acid
  Variant (528)..(571): Xaa in position 528 to 571 is any or no amino acid
  Variant (574)..(575): Xaa in position 574 to 575 is any amino acid
  Variant (577)..(579): Xaa in position 577 to 579 is any amino acid
  Variant (581)..(584): Xaa in position 581 to 584 is any amino acid
  Variant (586)..(586): Xaa in position 586 is any amino acid
  Variant (589)..(590): Xaa in position 589 to 590 is any amino acid
  Variant (592)..(592): Xaa in position 592 is any amino acid
  Variant (594)..(594): Xaa in position 594 is any amino acid
MXXXXXXXXXXXXXXXXXXXXXXXXXXXXXXXXXXXXXXXXXXXXXXXXXXXXXXXXXXXXXXXXXXXXXXXXXXXXXXXXXXXXXXXXXXXXXXXXXXXXXXXXXXXXXXXXXXXXXXXXXXXXXXXXXXXXXXXXXXXXXXXXXXXXXXXXXXXXXXXXXXXXXXXXXXXXXXXXXXXXXXXXXXXXXXXXXXXXXXXXXXXXXXXXXXXXXXXXXXXXXXXXXXXXXXXXXXXXXXXPXXGXXSXXGXRXXMEDAXXXXXXXXXXXXXXXXXXXXXXXXXXXXXXXXXXXHFXGVXDGHGXXXVAXXCXXRXHXXXXXXXXXXXXXXXXXXXXXXXXXXXWXXXXXXXFXXXDXEXXXXXXXXXXXXXXXXXXXXXXXXXXXXXXXXVGSTAVVAXXXXXXXXVXNCGDSRAVLXRXXXXXXLSXDHKPXRXDEXXRIXXXGGXVIXWXGXRVXGVLAMSRXIGDXYLKPXXXXXXXXIXXPEVXXXXRXXXDXCLILASDGLWDVXXNXXXCXXARXXXXXXXXXXXXXXXXXXXXXXXXXXXXXXXXXXXXXXXXXXXXXXXXXXXAAXXLXXXAXXXXSXDNXXVXVXDL

SEQ ID NO: 19494 - protein, 26 aa, Artificial sequence
  protein pattern
  Variant (4)..(7): Xaa in position 4 to 7 is any amino acid
  Variant (9)..(9): Xaa in position 9 is Ala, Ser, Thr or Val
  Variant (10)..(11): Xaa in position 10 to 11 is any amino acid
  Variant (13)..(13): Xaa in position 13 is Asp or Glu
  Variant (14)..(14): Xaa in position 14 is any amino acid
  Variant (22)..(22): Xaa in position 22 is Leu or Val
  Variant (26)..(26): Xaa in position 26 is Ile, Met or Val
PEVXXXXRXXXDXXLILASDGXWDVX

SEQ ID NO: 19495 - protein, 39 aa, Artificial sequence
  protein pattern
  Variant (2)..(2): Xaa in position 2 is Cys or Ser
  Variant (7)..(7): Xaa in position 7 is any amino acid
  Variant (8)..(8): Xaa in position 8 is Leu, Met or Val
  Variant (10)..(10): Xaa in position 10 is any amino acid
  Variant (12)..(12): Xaa in position 12 is any or no amino acid
  Variant (14)..(17): Xaa in position 14 to 17 is any amino acid
  Variant (18)..(18): Xaa in position 18 is any or no amino acid
  Variant (20)..(20): Xaa in position 20 is Ser or Thr
  Variant (21)..(21): Xaa in position 21 is any amino acid
  Variant (26)..(26): Xaa in position 26 is Asp or Asn
  Variant (28)..(28): Xaa in position 28 is any amino acid
  Variant (31)..(32): Xaa in position 31 to 32 is any amino acid
  Variant (34)..(34): Xaa in position 34 is Ile or Val
  Variant (35)..(37): Xaa in position 35 to 37 is any amino acid
NXGDSRXXLXRXGXXXXXLXXDHKPXRXDEXXRXXXXGG

SEQ ID NO: 19496 - protein, 30 aa, Artificial sequence
  protein pattern
  Variant (2)..(2): Xaa in position 2 is Phe or Tyr
  Variant (3)..(3): Xaa in position 3 is Ala or Gly
  Variant (5)..(5): Xaa in position 5 is Phe or Tyr
  Variant (10)..(10): Xaa in position 10 is Cys or Gly
  Variant (11)..(12): Xaa in position 11 to 12 is any amino acid
  Variant (15)..(16): Xaa in position 15 to 16 is any amino acid
  Variant (18)..(19): Xaa in position 18 to 19 is any or no amino acid
  Variant (21)..(21): Xaa in position 21 is any amino acid
  Variant (22)..(23): Xaa in position 22 to 23 is any or no amino acid
  Variant (25)..(26): Xaa in position 25 to 26 is any amino acid
  Variant (27)..(27): Xaa in position 27 is Ile, Leu or Val
  Variant (28)..(29): Xaa in position 28 to 29 is any amino acid
  Variant (30)..(30): Xaa in position 30 is Ala, Asp or Glu
FXXVXDGHGXXXVAXXCXXRXXXHXXXXXX

SEQ ID NO: 19497 - protein, 29 aa, Artificial sequence
  protein pattern
  Variant (2)..(2): Xaa in position 2 is Ala or Ser
  Variant (3)..(4): Xaa in position 3 to 4 is any amino acid
  Variant (6)..(8): Xaa in position 6 to 8 is any amino acid
  Variant (10)..(10): Xaa in position 10 is Ile or Leu
  Variant (11)..(13): Xaa in position 11 to 13 is any amino acid
  Variant (15)..(15): Xaa in position 15 is any amino acid
  Variant (18)..(18): Xaa in position 18 is Ile or Val
  Variant (19)..(19): Xaa in position 19 is Ser or Thr
  Variant (20)..(21): Xaa in position 20 to 21 is Ile or Val
  Variant (23)..(23): Xaa in position 23 is Ile or Val
  Variant (26)..(28): Xaa in position 26 to 28 is any or no amino acid
AXXXLXXXAXXXXSXDNXXXXVXDLXXXR

SEQ ID NO: 19498 - protein, 19 aa, Artificial sequence
  protein pattern
  Variant (2)..(3): Xaa in position 2 to 3 is any amino acid
  Variant (4)..(4): Xaa in position 4 is Ala or Ser
  Variant (5)..(6): Xaa in position 5 to 6 is any amino acid
  Variant (8)..(8): Xaa in position 8 is any amino acid
  Variant (9)..(9): Xaa in position 9 is Arg or Ser
  Variant (10)..(10): Xaa in position 10 is any amino acid
  Variant (11)..(11): Xaa in position 11 is Asp or Glu
  Variant (16)..(18): Xaa in position 16 to 18 is any or no amino acid
GXXXXXGXXXXMEDAXXXV

SEQ ID NO: 19499 - protein, 14 aa, Artificial sequence
  protein pattern
  Variant (6)..(6): Xaa in position 6 is Ala or Ser
  Variant (10)..(10): Xaa in position 10 is any amino acid
  Variant (13)..(13): Xaa in position 13 is Glu or Lys
LAMSRXIGDXYLXP

SEQ ID NO: 19500 - protein, 18 aa, Artificial sequence
  protein pattern
  Variant (2)..(2): Xaa in position 2 is any amino acid
  Variant (5)..(5): Xaa in position 5 is Ala or Ser
  Variant (8)..(8): Xaa in position 8 is Ala or Ser
  Variant (9)..(10): Xaa in position 9 to 10 is Ile, Leu or Val
  Variant (11)..(11): Xaa in position 11 is any amino acid
  Variant (12)..(12): Xaa in position 12 is Ala, Gly, Pro or Ser
  Variant (13)..(14): Xaa in position 13 to 14 is any amino acid
  Variant (15)..(15): Xaa in position 15 is Ile or Val
  Variant (16)..(16): Xaa in position 16 is Phe, Ile or Val
  Variant (17)..(17): Xaa in position 17 is Leu or Val
  Variant (18)..(18): Xaa in position 18 is Ala or Ser
VXSTXVVXXXXXXXXXXX

SEQ ID NO: 19501 - protein, 11 aa, Artificial sequence
  protein pattern
  Variant (3)..(3): Xaa in position 3 is any amino acid
  Variant (5)..(5): Xaa in position 5 is Asp, Asn or Gln
  Variant (7)..(7): Xaa in position 7 is any amino acid
  Variant (10)..(10): Xaa in position 10 is any amino acid
VIXWXGXRVXG

SEQ ID NO: 19502 - DNA, 417 bp, Arabidopsis thaliana
  CDS (1)..(417)
atgaaaggcggcgaatccaaagctgaagcaacgagcactgatcagagactcaaaaccagaggtagaaaggctgggaagaagacgaagaaggatccaaatcaacctaagagacctccaagtgctttcttcgtcttccttgaggatttccgaaaagagtttaacctagcgaatcctaataacaaatccgtcgctactgttggtaaggctgctggagctagatggaaggcaatgactgatgaagataaagctccttacgtcgctaaggctgagagcagaaagactgaatatattaagaatgtgcaacagtacaacttgaaactggctagtggaaccaatagagaagaggatgactctgacaaatccaagtctgaagttgatgaagcagtaagcgaagaggaggcagaagacgacgattga

SEQ ID NO: 19503 - protein, 138 aa, Arabidopsis thaliana
MKGGESKAEATSTDQRLKTRGRKAGKKTKKDPNQPKRPPSAFFVFLEDFRKEFNLANPNNKSVATVGKAAGARWKAMTDEDKAPYVAKAESRKTEYIKNVQQYNLKLASGTNREEDDSDKSKSEVDEAVSEEEAEDDD

SEQ ID NO: 19504 - DNA, 426 bp, Glycine max
  CDS (1)..(426)
atgccgaaagctaaatccgacgccaaagccgccgatagcaggttgaagcggaagggcgctggtgctgggaggaagcaatcgaggaaagctgctaaggaccctaacaagccgaagagacctccaagcgctttcttcgttttcatgtccgagttcagagagcagttcaagaaggagcatcctaacaacaaatccgtcgctgttgtcggcaaagctggtggtgaaaaatggaaatcgctatctgatgctgaaaaggcccctttcgttgctactgctgagaagaagaaacaggagtatgagaaaactatttcggcttacaataagcaattggagggaaagaattcagaggaagacgagtctgacaagtcaaagtctgaagtcaatgatgacgaggaagatgaggaggaggatgatgatgacgacgagtga

SEQ ID NO: 19505 - protein, 141 aa, Glycine max
MPKAKSDAKAADSRLKRKGAGAGRKQSRKAAKDPNKPKRPPSAFFVFMSEFREQFKKEHPNNKSVAVVGKAGGEKWKSLSDAEKAPFVATAEKKKQEYEKTISAYNKQLEGKNSEEDESDKSKSEVNDDEEDEEEDDDDDE

SEQ ID NO: 19506 - DNA, 683 bp, Triticum aestivum
  CDS (75)..(497)
aaaaaagagagatctgaatccgtcaaacaaacaaacaaaaaaaaccccaaacgttcgttcacagatctcgagagatgaaaggtggtgaaagcaaagcgcaagcgaagagcactgacgagagattgaagacgagagggaagaaagcagggaagaaggtgaaggatccgaacaagcctaagaggcctccaagtgctttcttcgtcttcctggagggattccgaaaggagttcaatctagctaaccctgacaacaaatccgttggagctgttggtaaagctgctggagccaaatggaaatcaatgactgctgaagataaagctccttatgtagccaaggctgagaccaagaagactgaatacgccaagactatgcaaaaatacaacatgaaattggctaatggaacgagtacagctggagatgatgactctgacaagtccaagtctgaggtcaacgacgaggaagatgctgcaagtgatgaggaggaagatgatgattaaaatgatggatcagcagcagcagtttgtttaattgaagtatcttctcttctgttatgtgttagctttactagttttagggagaaagttgttatgtcttccccccccttttatgttttaactgggattaattcacatctctctacttccaacttcctcatgataactttggatttagctttgaactcc

SEQ ID NO: 19507 - protein, 140 aa, Triticum aestivum
MKGGESKAQAKSTDERLKTRGKKAGKKVKDPNKPKRPPSAFFVFLEGFRKEFNLANPDNKSVGAVGKAAGAKWKSMTAEDKAPYVAKAETKKTEYAKTMQKYNMKLANGTSTAGDDDSDKSKSEVNDEEDAASDEEEDDD

SEQ ID NO: 19508 - DNA, 760 bp, Glycine max
  CDS (114)..(551)
tcttaatctctcggcctctcacttgaatctcctcacaacacacgtacgatccttttgctctcctctctctctctctctagaaaccctgcaatcctcttcttcaagattcgagtatgaaaggaggtaaatcaaagactgaaaccaggagctccaagctctctgtggccaagaagcctgctaaagcagcaggtcgcagcaaagcggcggctaaggatcctaacaaacctaagaggccagccagtgccttcttcgttttcatggaggactttcgccagacttacaagaaggaacaccccagcaacaaatctgttgccgctgttggtaaagctggtggagaaaagtggaagtccttgtccgactctgagaaggctcccttcgtagctaaggctgataagcgcaaggttgagtatgagaagaccatgaaagcctacaacaagaagctggaggaaggtccaaaggaggacgaggaggaatctgacaagtctgtgtccgaggtgaatgatgaggatgatgccgatgatggtagtgatgaggaggaagacgatgactaaagaagttgaagctggtagcacaatataggacgctacatcaaggatctcggatgttttttattttctttctttttactgatgttttcaacttagtaaagctgccactatctctctgattatgattctaccggtaatggaaaaagtgtgtgtagaatgtttgaattagagatatgcacctctatgtaacgatttagcttttttatcattct

SEQ ID NO: 19509 - protein, 145 aa, Glycine max
MKGGKSKTETRSSKLSVAKKPAKAAGRSKAAAKDPNKPKRPASAFFVFMEDFRQTYKKEHPSNKSVAAVGKAGGEKWKSLSDSEKAPFVAKADKRKVEYEKTMKAYNKKLEEGPKEDEEESDKSVSEVNDEDDADDGSDEEEDDD

SEQ ID NO: 19510 - DNA, 711 bp, Glycine max
  CDS (84)..(497)
aaggtaatcaactcgctcctactgactcagtccgagtcacccgattcactaacgaatcttcactcttgttcacagaacttgagatgaaaggcggccaatcgaaagcagaagcaacgagcacagatcaaagactcaaaaccagaggaaggaagaagaagacggcgacgaaggacccaaacaaacctaagagacctccaagcgctttcttcgtcttcttagatgattttcgacgggagttcaaagaggcgaaccctaacaacaagtccgtcgccgccgttggtaaggctgctggagctaagtggaagtctatgactgaggaagagaaagctccttatgcttccaaggcagagaccaggaagagtgaatataataagagtatgcaacagtacaacatgaaactggctaatggaaccagtagaggtgaagatgatgagtccaagtctgaagttgacgaagctggaggagcaagcgaagcggaggaagaagacgatgattaaggaggctttctcgtctaggttactgccattgactgactcagatttgtggatgggattagtaatttaaatgtgtcccaaaaaaaaactgaaaaactggttatgctttgtgtttgtaatattaagaacctcagttgctacttcttcgtgtttaggtcagttgtatggtcggataggatcacttggatgctatgtctccttattaccttctgtgttt

SEQ ID NO: 19511 - protein, 137 aa, Glycine max
MKGGQSKAEATSTDQRLKTRGRKKKTATKDPNKPKRPPSAFFVFLDDFRREFKEANPNNKSVAAVGKAAGAKWKSMTEEEKAPYASKAETRKSEYNKSMQQYNMKLANGTSRGEDDESKSEVDEAGGASEAEEEDDD

SEQ ID NO: 19512 - DNA, 742 bp, Eucalyptus grandis
  CDS (49)..(477)
ccgcgaggaaaccctaaagggtcgtcgtcgtcgtcgaggttttcagccatgaagggaggcaactcgaagtcgcagtcgaggaacgctgcgctttcggtgaacaagaggaaagtgactaagaaggagaagaaggtgaaggatcctaacaagcctaagaggcctgccagtgccttcttcgtcttcatggaagagttcaggaagcagtacaaggagaaacaccctaataataaatccgttgctgctgttggcaaagctgggggagacaagtggaagtcgttgtctgatgatgagaaagctccttacatcgccaaggccgagaaaaggaaggttgagtatgagaagaccatgaaagcttacaacaaaagacaagctgaaggtaccaaagcagatgaagaggagtctgagaaatctatgtccgaggtgaacaatgaggaggaagatgaagatggcagcgaggaggatgaggacgatgattagacttctgggaagggaagatagtttttatctaggtcatcaaaaagcggtttagctatcttttgtcaaggcatctgtagttcgatgctcatttatttttttggtgccctctgattttgttccctttgaggaatgaagacaagtacttgtggaagggggagagcacagcgacttgtattgtgccttgatgacttttagatgggggcttttatattgtgtagagctatcattaagtaaattcgatttgtgattttatccaaaaaaaaaa

SEQ ID NO: 19513 - protein, 142 aa, Eucalyptus grandis
MKGGNSKSQSRNAALSVNKRKVTKKEKKVKDPNKPKRPASAFFVFMEEFRKQYKEKHPNNKSVAAVGKAGGDKWKSLSDDEKAPYIAKAEKRKVEYEKTMKAYNKRQAEGTKADEEESEKSMSEVNNEEEDEDGSEEDEDDD

SEQ ID NO: 19514 - DNA, 474 bp, Pinus radiata
  CDS (1)..(474)
atgaagggagctaaagcaaaaaacgaagcgtctagcacgctgaagaaaattgaagacaagcctattggaaagcggaaagcggcaaccaaggaagtgaagccaactagtaagaaggagaaaaaggggggcaaggctgccaaggatcccaacaagccaaagagacctgcgagtgccttcttcgtatttatggaagagtttaggaaaacctacaaggaaaagaatcctaatgtcaaatccgtatcagttgttggaaaagctggaggtgacaaatggaagtcaatgtcagaagccgataaggctccatttgttgccaaggctgcaaaaaggaaaacagagtatgaaaagaacatggcagcatataacaacaaacaaaccagcactgcaggtgacagtgctgaagagtcagataagtccaagtccgaggtaaatgacgaggacgatgatgaaagtggagaggatgacgatcaagagtag

SEQ ID NO: 19515 - protein, 157 aa, Pinus radiata
MKGAKAKNEASSTLKKIEDKPIGKRKAATKEVKPTSKKEKKGGKAAKDPNKPKRPASAFFVFMEEFRKTYKEKNPNVKSVSVVGKAGGDKWKSMSEADKAPFVAKAAKRKTEYEKNMAAYNNKQTSTAGDSAEESDKSKSEVNDEDDDESGEDDDQE

SEQ ID NO: 19516 - DNA, 429 bp, Arabidopsis thaliana
  CDS (1)..(429)
atgaaaggagctaaatcaaagactgaaaccaggagctccaagctctctgtgaccaagaagccggctaaaggagcagggcgtggcaaagctgctgctaaggaccccaacaaaccaaagaggccagccagtgctttcttcgttttcatggaagatttccgtgagactttcaagaaggaaaaccccaagaacaagtctgtagctactgttggaaaagctgctggagacaagtggaagtccttgtctgattctgagaaagctccttatgttgctaaggctgagaaacgcaaggttgaatatgagaagaacattaaagcttacaacaagaaactggaggaaggtccaaaagaagatgaggaatctgacaagtcagtgtcagaggtcaatgacgaggatgatgctgaggatggtagtgaagaggacgatgactaa

SEQ ID NO: 19517 - protein, 142 aa, Arabidopsis thaliana
MKGAKSKTETRSSKLSVTKKPAKGAGRGKAAAKDPNKPKRPASAFFVFMEDFRETFKKENPKNKSVATVGKAAGDKWKSLSDSEKAPYVAKAEKRKVEYEKNIKAYNKKLEEGPKEDEESDKSVSEVNDEDDAEDGSEEDDD

SEQ ID NO: 19518 - DNA, 444 bp, Arabidopsis thaliana
  CDS (1)..(444)
atgaaaggagctaaatctaaggctgaaaccaggagcacaaagctctctgtgactaagaagcctgctaagggagccaaaggtgctgctaaagatccaaacaaacctaagaggccttccagtgccttcttcgttttcatggaagatttccgtgtgacgtacaaggaggagcaccctaagaacaagtctgttgctgctgttggcaaagctggtggtgaaaagtggaaatccttgtctgactctgagaaggctccttatgtggctaaggctgacaagcgcaaggttgagtatgagaagaacatgaaagcctacaacaagaaattggtaattgccctaaggaagatgaggaatctgacaagtcagtttcagaggttaacgatgaggatgatgctgaggatggcagtgaagaggaggaagacgatgattaagaagttgaagttgtggtag

SEQ ID NO: 19519 - protein, 147 aa, Arabidopsis thaliana
MKGAKSKAETRSTKLSVTKKPAKGAKGAAKDPNKPKRPSSAFFVFMEDFRVTYKEEHPKNKSVAAVGKAGGEKWKSLSDSEKAPYVAKADKRKVEYEKNMKAYNKKLVIALRKMRNLTSQFQRLTMRMMLRMAVKRRKTMIKKLKLW

SEQ ID NO: 19520 - DNA, 459 bp, Arabidopsis thaliana
  CDS (1)..(459)
atgacgaagagagctcccaagtcagggcctttgtctccgtcgtgcagcggaggctctagtcggaacttagagttggctgtgaagtcaagtgaaggtgcaaggaggtctacaagactgagacttcagcctttgagaaagccaaagacaagccccaagaagaaacccgttaaactccaaacgaagatgcccaagaaacctgccactgctttcttctttttcctggatgatttccggaagcaatatcaagaggagaatccagatgtcaagtccatgcgcgaggttattgggaagacatgtggagagaaatggaaaacaatgacttacgaggaaaaggtaaagtattatgatatagctactgagaagagggaagaatttcaccgagcaatgacagaatataccaagagaatggaatcaggtgcccacgatgaatcagagaccgactcagactattctgaatag

SEQ ID NO: 19521 - protein, 152 aa, Arabidopsis thaliana
MTKRAPKSGPLSPSCSGGSSRNLELAVKSSEGARRSTRLRLQPLRKPKTSPKKKPVKLQTKMPKKPATAFFFFLDDFRKQYQEENPDVKSMREVIGKTCGEKWKTMTYEEKVKYYDIATEKREEFHRAMTEYTKRMESGAHDESETDSDYSE

SEQ ID NO: 19522 - DNA, 438 bp, Oryza sativa (japonica cultivar-group)
  CDS (1)..(438)
atgaagggcaaggccgacgcctccaagaagggcgagggcaggctcaaggccgccggcggcgccgggaagcggaagaaggccgccgctagcggcaagccgaagcgcccgccgtctgctttcttcgtcttcatgtctgagttcaggcaggagtaccaggcagcgcatcctgacaacaagagtgtcgccgccgtgagcaaggctgcaggggagaagtggcgagctatgtctgagcaagagaaggcaccttatgtggacaaggctggccaaaagaagcaggactacgagaagaccaaggccaacttcgataagaaggagagcacaagctcaaagaaagctaagacccatgatgatggagaaggctctgacaagtccaagtctgaggtcgacgatgaccaggatggtggtagcgatgaggaaaatgaggacgatgaagagtaa

SEQ ID NO: 19523 - protein, 145 aa, Oryza sativa (japonica cultivar-group)
MKGKADASKKGEGRLKAAGGAGKRKKAAASGKPKRPPSAFFVFMSEFRQEYQAAHPDNKSVAAVSKAAGEKWRAMSEQEKAPYVDKAGQKKQDYEKTKANFDKKESTSSKKAKTHDDGEGSDKSKSEVDDDQDGGSDEENEDDEE

SEQ ID NO: 19524 - DNA, 399 bp, Oryza sativa (japonica cultivar-group)
  CDS (1)..(399)
atgggcaaggccgacgccgacgccgagttcaaggccgccggcaagcgcaagaaggccggaggcgccggcaagcccaagcgcggcctcaccccgttcttcgccttcctggctgagttcaggccgcagtacatggagaagcacccaaacaccaagggcgtcgcagcggtgaccaaggctgccggggagaagtggcgcgctatgtcggacgaggagaaagcgcaatatgggggcaagaagccagatggcgagagcaagcccgcggccgctagcaagaagaaggagagcactagctctaagaaggctaaaactgatggtgcggaacaggagggagaaggttctgacaagtcgaagtctgatgttgaggatgatgagaatgatggcagtggcgaggacgagtag

SEQ ID NO: 19525 - protein, 132 aa, Oryza sativa (japonica cultivar-group)
MGKADADAEFKAAGKRKKAGGAGKPKRGLTPFFAFLAEFRPQYMEKHPNTKGVAAVTKAAGEKWRAMSDEEKAQYGGKKPDGESKPAAASKKKESTSSKKAKTDGAEQEGEGSDKSKSDVEDDENDGSGEDE

SEQ ID NO: 19526 - DNA, 474 bp, Oryza sativa (japonica cultivar-group)
  CDS (1)..(474)
atgaagggggccaaatccaagggcgccgccaagcccgacgccaagttggctgtgaagagtaagggcgcggagaagcccgccgccaagggcaggaaggggaaggccggcaaggaccccaacaagcccaagagggctccctccgctttcttcgtttttatggaggagttccgtaaggagttcaaggagaagaaccccaagaataaatctgtcgctgctgtaggaaaagcagccggtgataggtggaaatccctgaccgaagcggacaaggctccctatgtagccaaggccaacaagctcaaggccgagtacaacaaggccattgctgcctacaacaagggcgagagcactgccaagaaggcacccgccaaggaggaagaggaggacgacgaggaggaatctgacaagtccaagtccgaggtcaatgatgaggatgacgacgagggcagcgaagaggatgaagacgatgacgagtga

SEQ ID NO: 19527 - protein, 157 aa, Oryza sativa (japonica cultivar-group)
MKGAKSKGAAKPDAKLAVKSKGAEKPAAKGRKGKAGKDPNKPKRAPSAFFVFMEEFRKEFKEKNPKNKSVAAVGKAAGDRWKSLTEADKAPYVAKANKLKAEYNKAIAAYNKGESTAKKAPAKEEEEDDEEESDKSKSEVNDEDDDEGSEEDEDDDE

SEQ ID NO: 19528 - DNA, 612 bp, Oryza sativa (japonica cultivar-group)
  CDS (1)..(612)
atggcggggaaatccggcgcacgcacgaggaagcgcgtggaggcgacggattccgccgtcctgaagcgcgcgcgcgacggcagcgccttcacccgctgcgaggcttgcggcaagagcgtctccgtggtcctcatcgacatgcacaactgcagcctcgacgacaagatccgcatcagcctagaggctcaggtggtggagcaggccgtggaggtggcagcgagcaagaagaagagcggcaagaacaacaacaacaatggcgagggggccaaaaagggcaagcgcccacccactgcctttttcctcttcatgagtgacttcaggaaggagtacaaggcggagcaccctgacaacaagagcgtctccgctgtcgccaaggaaggaggggagaggtggaaatccatgtctgacgaggacaagaagccttacttggacaaggctgcagagctcaaggccgagtaccacaatggcgagcgcagcgacgagaacaatgttggtggcaacgcaggcgagcaggaggtagatcagccacccaagaaaggcactgatgaagacgaccaagaagatgaagatggtgcagaggaagagaagaacgagctagacgacgacatctag

SEQ ID NO: 19529 - protein, 203 aa, Oryza sativa (japonica cultivar-group)
MAGKSGARTRKRVEATDSAVLKRARDGSAFTRCEACGKSVSVVLIDMHNCSLDDKIRISLEAQVVEQAVEVAASKKKSGKNNNNNGEGAKKGKRPPTAFFLFMSDFRKEYKAEHPDNKSVSAVAKEGGERWKSMSDEDKKPYLDKAAELKAEYHNGERSDENNVGGNAGEQEVDQPPKKGTDEDDQEDEDGAEEEKNELDDDI

SEQ ID NO: 19530 - DNA, 384 bp, Oryza sativa (japonica cultivar-group)
  CDS (1)..(384)
atgaaggcgaggtcgaggtccagcaatggcgactccaggctctcggtgaggaagaccaaggcggagaaggacccgaacaagccgaagaggccaccgagcgcgttcttcgtgttcatggagcagttcaggaaggactacaaggagaagcaccccaacgtcaagcaggtctcggtgattggcaaggctggtggtgacaagtggaagtccatgactgatgctgacaaggctcctttcgtgaccaaggctgagaagctcaaggctgagtacaccaagaagattgacgcctacaacaacaagcaggcaggaggcccggctacctcaggcgactctgacaagtccaagtccgaggtgaacgacgaggacgagggcagcggtgacgagtga

SEQ ID NO: 19531 - protein, 127 aa, Oryza sativa (japonica cultivar-group)
MKARSRSSNGDSRLSVRKTKAEKDPNKPKRPPSAFFVFMEQFRKDYKEKHPNVKQVSVIGKAGGDKWKSMTDADKAPFVTKAEKLKAEYTKKIDAYNNKQAGGPATSGDSDKSKSEVNDEDEGSGDE

SEQ ID NO: 19532 - DNA, 432 bp, Arabidopsis thaliana
  CDS (1)..(432)
atgaaaggagctaaatcaaagactgaaaccaggagctccaagctctctgtgaccaagaagccggctaaaggagcagggcgtggcaaagctgctgctaaggaccccaacaaaccaaagaggccagccagtgctttcttcgttttcatggaagatttccgtgagactttcaagaaggaaaaccccaagaacaagtctgtagctactgttggaaaagctgctggagacaagtggaagtccttgtctgattctgagaaagctccttatgttgctaaggctgagaaacgcaaggttgaatatgagaagaacattaaagcttacaacaagaaactggaggaaggtccaaaagaagatgaggaatctgacaagtcagtgtcagaggtcaatgacgaggatgatgctgaggatggtagtgaagaggaggacgatgactaa

SEQ ID NO: 19533 - protein, 143 aa, Arabidopsis thaliana
MKGAKSKTETRSSKLSVTKKPAKGAGRGKAAAKDPNKPKRPASAFFVFMEDFRETFKKENPKNKSVATVGKAAGDKWKSLSDSEKAPYVAKAEKRKVEYEKNIKAYNKKLEEGPKEDEESDKSVSEVNDEDDAEDGSEEEDDD

SEQ ID NO: 19534 - DNA, 423 bp, Arabidopsis thaliana
  CDS (1)..(423)
atgaaaggagctaaatctaaggctgaaaccaggagcacaaagctctctgtgactaagaagcctgctaagggagccaaaggtgctgctaaagatccaaacaaacctaagaggccttccagtgccttcttcgttttcatggaagatttccgtgtgacgtacaaggaggagcaccctaagaacaagtctgttgctgctgttggcaaagctggtggtgaaaagtggaaatccttgtctgactctgagaaggctccttatgtggctaaggctgacaagcgcaaggttgagtatgagaagaacatgaaagcctacaacaagaaattggaggaaggccctaaggaagatgaggaatctgacaagtcagtttcagaggttaacgatgaggatgatgctgaggatggcagtgaagaggtaagaagacgatga

SEQ ID NO: 19535 - protein, 140 aa, Arabidopsis thaliana
MKGAKSKAETRSTKLSVTKKPAKGAKGAAKDPNKPKRPSSAFFVFMEDFRVTYKEEHPKNKSVAAVGKAGGEKWKSLSDSEKAPYVAKADKRKVEYEKNMKAYNKKLEEGPKEDEESDKSVSEVNDEDDAEDGSEEVRRR

SEQ ID NO: 19536 - DNA, 405 bp, Arabidopsis thaliana
  CDS (1)..(405)
atgaaaggcggcgaatccaaagctgaagcaacgagcactgatcagagactcaaaaccagaggtagaaaggctgggaagaagacgaagaaggatccaaatcaacctaagagacctccaagtgctttcttcgtcttccttgaggatttccgaaaagagtttaacctagcgaatcctaataacaaatccgtcgctactgttggtaaggctgctggagctagatggaaggcaatgactgatgaagataaagctccttacgtcgctaaggctgagagcagaaagactgaatatattaagaatgtgcaacagtacaacttgaaactggctagtggaaccaatagagaagaggatgactctgacaaatccaagtctgaagttgatgaagcagaggcagaagacgacgattga

SEQ ID NO: 19537 - protein, 134 aa, Arabidopsis thaliana
MKGGESKAEATSTDQRLKTRGRKAGKKTKKDPNQPKRPPSAFFVFLEDFRKEFNLANPNNKSVATVGKAAGARWKAMTDEDKAPYVAKAESRKTEYIKNVQQYNLKLASGTNREEDDSDKSKSEVDEAEAEDDD

SEQ ID NO: 19538 - DNA, 537 bp, Arabidopsis thaliana
  CDS (1)..(537)
atgaaaacagcaaaggggaaagataaagttaagaccacaaaggaagccttgaagccagttgatgacagaaaggtgggaaagaggaaggcaccggctgagaagcctactaaacgagagactcgtaaagagaagaaggctaaaaaggacccaaacaaaccaaaaagagctcctagtgccttctttgtctttctagaagattttagggtcacgttcaagaaagaaaatccaaatgtgaaggccgtctctgctgttgggaaagctggagggcagaaatggaagtcaatgtctcaagctgaaaaagctccatatgaagagaaagctgcaaaaaggaaagctgaatatgagaagcaaatggatgcatacaacaaaaacttggaggaagggagtgatgaatctgaaaagtctagatctgagataaatgatgaagatgaagccagtggggaggaagaactattagagaaggaagcggcaggtgatgatgaagaagaagaagaggaagaagatgacgatgatgatgacgacgaggaagaagactaa

SEQ ID NO: 19539 - protein, 178 aa, Arabidopsis thaliana
MKTAKGKDKVKTTKEALKPVDDRKVGKRKAPAEKPTKRETRKEKKAKKDPNKPKRAPSAFFVFLEDFRVTFKKENPNVKAVSAVGKAGGQKWKSMSQAEKAPYEEKAAKRKAEYEKQMDAYNKNLEEGSDESEKSRSEINDEDEASGEEELLEKEAAGDDEEEEEEEDDDDDDDEEED

SEQ ID NO: 19540 - DNA, 378 bp, Arabidopsis thaliana
  CDS (1)..(378)
atgaaagataaccaaacggaagttgaatcgaggagcactgatgatagattgaaagttagagggaacaaagttggaaagaaaacaaaggatccaaacaggcctaagaaaccaccaagtcctttcttcgtcttcctggacgatttccgaaaggagtttaatctggctaaccctgacaacaaatccgtcggtaatgttggtagagcagctggaaagaaatggaaaaccatgactgaagaagaaagagcaccttttgtagcaaaatcacagagcaaaaagactgagtatgctgtgactatgcaacagtataacatggaactggctaatggaaacaagacaactggagatgatgagaaacaagagaaagctgctgatgattag

SEQ ID NO: 19541 - protein, 125 aa, Arabidopsis thaliana
MKDNQTEVESRSTDDRLKVRGNKVGKKTKDPNRPKKPPSPFFVFLDDFRKEFNLANPDNKSVGNVGRAAGKKWKTMTEEERAPFVAKSQSKKTEYAVTMQQYNMELANGNKTTGDDEKQEKAADD

SEQ ID NO: 19542 - DNA, 435 bp, Arabidopsis thaliana
  CDS (1)..(435)
atgaaaggagctaaatcaaagactgaaaccaggagctccaagctctctgtgaccaagaagccggctaaaggagcagggcgtggcaaagctgctgctaaggaccccaacaaaccaaagaggccagccagtgctttcttcgttttcatggaagatttccgtgagactttcaagaaggaaaaccccaagaacaagtctgtagctactgttggaaaagctgctggagacaagtggaagtccttgtctgattctgagaaagctccttatgttgctaaggctgagaaacgcaaggttgaatatgagaagaacattaaagcttacaacaagaaactggaggaaggtccaaaagaagatgaggaatctgacaagtcagtgtcagaggtcaatgacgaggatgatgctgaggatggtagtgaagaggaggaggacgatgactaa

SEQ ID NO: 19543 - protein, 144 aa, Arabidopsis thaliana
MKGAKSKTETRSSKLSVTKKPAKGAGRGKAAAKDPNKPKRPASAFFVFMEDFRETFKKENPKNKSVATVGKAAGDKWKSLSDSEKAPYVAKAEKRKVEYEKNIKAYNKKLEEGPKEDEESDKSVSEVNDEDDAEDGSEEEEDDD

SEQ ID NO: 19544 - DNA, 426 bp, Arabidopsis thaliana
  CDS (1)..(426)
atgaaaggagctaaatctaaggctgaaaccaggagcacaaagctctctgtgactaagaagcctgctaagggagccaaaggtgctgctaaagatccaaacaaacctaagaggccttccagtgccttcttcgttttcatggaagatttccgtgtgacgtacaaggaggagcaccctaagaacaagtctgttgctgctgttggcaaagctggtggtgaaaagtggaaatccttgtctgactctgagaaggctccttatgtggctaaggctgacaagcgcaaggttgagtatgagaagaacatgaaagcctacaacaagaaattggaggaaggccctaaggaagatgaggaatctgacaagtcagtttcagaggttaacgatgaggatgatgctgaggatggcagtgaagaggaggaagacgatgattaa

SEQ ID NO: 19545 - protein, 141 aa, Arabidopsis thaliana
MKGAKSKAETRSTKLSVTKKPAKGAKGAAKDPNKPKRPSSAFFVFMEDFRVTYKEEHPKNKSVAAVGKAGGEKWKSLSDSEKAPYVAKADKRKVEYEKNMKAYNKKLEEGPKEDEESDKSVSEVNDEDDAEDGSEEEEDDD

SEQ ID NO: 19546 - DNA, 456 bp, Arabidopsis thaliana
  CDS (1)..(456)
atgacgaagagagctcccaagtcagggcctttgtctccgtcgtgcagcggaggctctagtcggaacttagagttggctgtgaagtcaagtgaaggtgcaaggaggtctacaagactgagacttcagcctttgagaaagccaaagacaagccccaagaagaaacccgttaaactccaaacgaagatgcccaagaaacctgccactgctttcttctttttcctggatgatttccggaagcaatatcaagaggagaatccagatgtcaagtccatgcgcgagattgggaagacatgtggagagaaatggaaaacaatgacttacgaggaaaaggtaaagtattatgatatagctactgagaagagggaagaatttcaccgagcaatgacagaatataccaagagaatggaatcaggtgcccacgatgaatcagagaccgactcagactattctgaatag

SEQ ID NO: 19547 - protein, 151 aa, Arabidopsis thaliana
MTKRAPKSGPLSPSCSGGSSRNLELAVKSSEGARRSTRLRLQPLRKPKTSPKKKPVKLQTKMPKKPATAFFFFLDDFRKQYQEENPDVKSMREIGKTCGEKWKTMTYEEKVKYYDIATEKREEFHRAMTEYTKRMESGAHDESETDSDYSE

SEQ ID NO: 19548 - DNA, 726 bp, Arabidopsis thaliana
  CDS (1)..(726)
atggctggaccatcgacaacttcaaacgcaccaaagcagaggaagagagtcgaagccgagactagcagcaacacttctactaccttacgtcgcgctaaagacggaagcgctttcgctctctgtgaaggatgtaacaagagtgtagctgtagcgcttataagcatgcacaattgcagtctcgatgctaagatcagagtgaatctcgaagcacaagttgtggagacacaagcagaggctaagaagaagcctgcagagaagaagaagacaacatctgatggacctaagccaaagagacttaagaaaaccaatgatgagaagaagagctcgtctacttcaaacaagcccaagcgacctcttaccgctttctttatcttcatgagtgacttccgtaaaacgtttaagtcagagcataatggttcgttagctaaggatgctgcaaagatcggtggtgagaagtggaagtctttgactgaggaagagaagaaagtttatctggataaagctgctgaacttaaggcagagtataacaagtcactggaaagtaatgatgctgatgaggaagaggaagatgaggagaagcaatctgatgatgttgatgatgctgaggagaaacaagttgacgatgatgatgaagttgaggagaaagaagttgagaacacagatgatgacaagaaagaagctgagggtaaagaagaggaggaagaagagattttggatgactactag

SEQ ID NO: 19549 - protein, 241 aa, Arabidopsis thaliana
MAGPSTTSNAPKQRKRVEAETSSNTSTTLRRAKDGSAFALCEGCNKSVAVALISMHNCSLDAKIRVNLEAQVVETQAEAKKKPAEKKKTTSDGPKPKRLKKTNDEKKSSSTSNKPKRPLTAFFIFMSDFRKTFKSEHNGSLAKDAAKIGGEKWKSLTEEEKKVYLDKAAELKAEYNKSLESNDADEEEEDEEKQSDDVDDAEEKQVDDDDEVEEKEVENTDDDKKEAEGKEEEEEEILDDY

SEQ ID NO: 19550 - DNA, 558 bp, Arabidopsis thaliana
  CDS (1)..(558)
atgaaaacagcaaaggggaaagataaagttaagaccacaaaggaagccttgaagccagttgatgacagaaaggtgggaaagaggaaggcaccggctgagaagcctactaaacgagagactcgtaaagagaagaaggctaaaaaggacccaaacaaaccaaaaagagctcctagtgccttctttgtctttctagaagattttagggtcacgttcaagaaagaaaatccaaatgtgaaggccgtctctgctgttgggaaagctggagggcagaaatggaagtcaatgtctcaagctgaaaaagctccatatgaagagaaagctgcaaaaaggaaagctgaatatgagaagcaaatggatgcatacaacaaaaacttggaggaagggagtgatgaatctgaaaagtctagatctgagataaatgatgaagatgaagccagtggggaggtaacaattccactaagcaatgaagaactattagagaaggaagcggcaggtgatgatgaagaagaagaagaggaagaagatgacgatgatgatgacgacgaggaagaagactaa

SEQ ID NO: 19551 - protein, 185 aa, Arabidopsis thaliana
MKTAKGKDKVKTTKEALKPVDDRKVGKRKAPAEKPTKRETRKEKKAKKDPNKPKRAPSAFFVFLEDFRVTFKKENPNVKAVSAVGKAGGQKWKSMSQAEKAPYEEKAAKRKAEYEKQMDAYNKNLEEGSDESEKSRSEINDEDEASGEVTIPLSNEELLEKEAAGDDEEEEEEEDDDDDDDEEED

SEQ ID NO: 19552 - DNA, 402 bp, Oryza sativa subsp
  CDS (1)..(402)
atgaagacgaggtcgcagacggcgccgaagccgctgaagacggtgcggctgcctcctgtcaagccgcggcccaagccgccgccgccgcagccgcagccgccgccgtcccggaagaaggggcagcccctcgtcgaccggcgccgccccaagaagccgcccaccgccttcttctacttcatggaggattttcggaaaacttacaaggaagaaaatccaagtgtaaaatcaatgcaagaagtagggaaggcatgtggcgagaaatggaatacaatgacatttgaggaaagagtgaagtattatgatatagcaaccgagaagcgtgcagagtatgagaagccggtggctgaatttgacaagaaaaaggaaagcggtgaattgtccgaggaatcagattacgactag

SEQ ID NO: 19553 - protein, 133 aa, Oryza sativa subsp
MKTRSQTAPKPLKTVRLPPVKPRPKPPPPQPQPPPSRKKGQPLVDRRRPKKPPTAFFYFMEDFRKTYKEENPSVKSMQEVGKACGEKWNTMTFEERVKYYDIATEKRAEYEKPVAEFDKKKESGELSEESDYD

SEQ ID NO: 19554 - DNA, 438 bp, Oryza sativa subsp
  CDS (1)..(438)
atgaagggcaaggccgacgcctccaagaagggcgagggcaggctcaaggccgccggcggcgccgggaagcggaagaaggccgccgctagcggcaagccgaagcgcccgccgtctgctttcttcgtcttcatgtctgagttcaggcaggagtaccaggcagcgcatcctggcaacaagagtgtcgccgccgtgagcaaggctgcaggggagaagtggcgagctatgtctgagcaagagaaggcaccttatgtggacaaggctggccaaaagaagcaggactacgagaagaccaaggccaacttcgataagaaggagagcacaagctcaaagaaagctaagacccatgatgatggagaaggctctgacaagtccaagtctgaggtcgacgatgaccaggatggtggtagcgatgaggaaaatgaggacgatgaagagtaa

SEQ ID NO: 19555 - protein, 145 aa, Oryza sativa subsp
MKGKADASKKGEGRLKAAGGAGKRKKAAASGKPKRPPSAFFVFMSEFRQEYQAAHPGNKSVAAVSKAAGEKWRAMSEQEKAPYVDKAGQKKQDYEKTKANFDKKESTSSKKAKTHDDGEGSDKSKSEVDDDQDGGSDEENEDDEE

SEQ ID NO: 19556 - DNA, 615 bp, Oryza sativa subsp
  CDS (1)..(615)
atggcggggaaatccggcgcacgcacgaggaagcgcgtggaggcgacggattccgccgtcctgaagcgcgcgcgcgacggcagcgccttcacccgctgcgaggcttgcggcaagagcgtctccgtggtcctcatcgacatgcacaactgcagcctcgacgacaagatccgcatcagcctagaggctcaggtggtggagcaggccgtggaggtggcggcgagcaagaagaagagcggcaagaacaacaacaacaatggcgagggggccaaaaagggcaagcgcccacccaccgcctttttcctcttcatgagtgacttcaggaaggagtacaaggcggagcaccctgacaacaagagtgtctccgctgtcgccaaggaaggaggggagaggtggaaatccatgtctgacgaggacaagaagccttacttggacaaggctgcagagctcaaggccgagtaccacaatggcgagcgcagcgacgagaacaatgttggtggcaacgcaggcgagcaggaggtagatcagtcacccaagaaaggcactgatgaagacgaccaagaagatgaagatggtgcagaggaggaagagaagaacgagctagacgacgacatctag

SEQ ID NO: 19557 - protein, 204 aa, Oryza sativa subsp
MAGKSGARTRKRVEATDSAVLKRARDGSAFTRCEACGKSVSVVLIDMHNCSLDDKIRISLEAQVVEQAVEVAASKKKSGKNNNNNGEGAKKGKRPPTAFFLFMSDFRKEYKAEHPDNKSVSAVAKEGGERWKSMSDEDKKPYLDKAAELKAEYHNGERSDENNVGGNAGEQEVDQSPKKGTDEDDQEDEDGAEEEEKNELDDDI

SEQ ID NO: 19558 - DNA, 715 bp, Zea mays
  CDS (66)..(446)
gcctacaaccgttttcgtgctcacacacccaaaccttagtcgcgatcaggccccaaggactcgagatgaagtcgagggcacggtccaccgccggcgactccaggctctcggtgaggaagaccaaggcagagaaggacccaaacaagcccaagaggcctccgagcgcgttcttcgtcttcatggaggagttcaggaaggactacaaggagaagcaccccaatgtgaagcaagtctccgtgattggcaaggctggtggtgacaagtggaagtccctgtctgatgccgagaaggctccctacgtgtctaaggcagagaagctcaaggctgagtacaccaagaagatcgacgcttacaacaacaagcagtctggagaccccacggcgtctggtgattccgacaagtccaagtccgaggtgaacgacgaggacgaggagggtgacgagtgatgtatgacggatgaaactctgtccaagtgtttgcagtcagggaaaaaaatcttcgtcgttgtcggcctaaccgggctttctcgaaggactttctagatgcagtagattagtgccgtcttctctgagtagtttccttgcaagtgtcgtcccgtccctggagtgaggcagtttagtttgtagtttcttcgcttcatcggcactcgaccgttgttggattgggatgtttagcctgcagtctgtacttaccccaagcatctatggtgcctgtt

SEQ ID NO: 19559 - protein, 126 aa, Zea mays
MKSRARSTAGDSRLSVRKTKAEKDPNKPKRPPSAFFVFMEEFRKDYKEKHPNVKQVSVIGKAGGDKWKSLSDAEKAPYVSKAEKLKAEYTKKIDAYNNKQSGDPTASGDSDKSKSEVNDEDEEGDE

SEQ ID NO: 19560 - DNA, 759 bp, Nicotiana tabacum
  CDS (26)..(454)
gttttttctctctagaggtttcgtcatgaaaggaggtaaatctaaggctggagctgattccaagctcggagtaaggaagaaggctaccgagacgaagaaagcgaagaaagctgcgaaggatccaaacaagcctaagaggcctccaagtgccttcttcgttttcatggaggagttcaggaagacgtacaaggaaaagcacccaaacaacaaatctgttgccgctgttggtaaagctggtggagacgcgtggaaaaaattgtcagaggctgagaaagcaccttaccaggcaaaggctgagaaaagaaaggctgaataccaaaagaacatggatgcctataacagaaaacaggctggtgatgctgaagaggatgaatcagacaagtcaaagtctgaggttcatgatgatgatgacgaggacgatgatggaagcgaagaggaggaggacgatgattaaaaactgaatagctgttgaattgcagaaaattatggcaaagttgatgtaggaatccctttcagccctttccttgataaatagatgccctctttttaaggtttcgtttctttttctttttgtttttggggggtttagttgggaccgggataagggtaatttagacgagctgacttgatagctcgaacggcttatgtatttttattttggtggtgtttaatggaaaattcagctacggatttccttttaaaaaaaaaaaaaaaaaaaaaaaaaaaaaaaaaaaaaaaaaaaaaaaaaaaaaaaaaaaa

SEQ ID NO: 19561 - protein, 142 aa, Nicotiana tabacum
MKGGKSKAGADSKLGVRKKATETKKAKKAAKDPNKPKRPPSAFFVFMEEFRKTYKEKHPNNKSVAAVGKAGGDAWKKLSEAEKAPYQAKAEKRKAEYQKNMDAYNRKQAGDAEEDESDKSKSEVHDDDDEDDDGSEEEEDDD

SEQ ID NO: 19562 - DNA, 417 bp, Arabidopsis thaliana
  CDS (1)..(417)
atgaaaggcggcgaatccaaagctggagcaacgagcactgatcagagactcaaaaccagaggtagaaaggctgggaagaagacgaagaaggatccaaatcaacctaagagacctccaagtgctttcttcgtcttccttgaggatttccggaaagagtttaacctagcgaatcctaataacaaatccgtcgctactgttggtaaggctgctggagctagatggaagtcaatgactgatgaagataaagctccttacgtcgctaaggctgagagcagaaagactgaatatattaagaatgtgcaacagtacaacttgaaactggctagtggaaccaatagagaagaggatgactctgacaaatccaagtctgaagttgatgaagcagtaagcgaagaggaggcagaagacgacgattga

SEQ ID NO: 19563 - protein, 138 aa, Arabidopsis thaliana
MKGGESKAGATSTDQRLKTRGRKAGKKTKKDPNQPKRPPSAFFVFLEDFRKEFNLANPNNKSVATVGKAAGARWKSMTDEDKAPYVAKAESRKTEYIKNVQQYNLKLASGTNREEDDSDKSKSEVDEAVSEEEAEDDD

SEQ ID NO: 19564 - DNA, 734 bp, Solanum tuberosum
  CDS (93)..(518)
cccactcacaactcaacacacacaaagcaacgcaccaaatccacacaaacgaataatatctctctgtttctacgctctctagaggtttcatcatgaaaggagctaaatcaaaggctaaagctgataccaagcttggtgtaaggaagaaggctactgagagtaagaaagcgaagaacgctgctaaggatccaaacaagcctaagaggcctccaagtgccttcttcgttttcatggaggagttcaggaagacctacaaggagaagcacccaaacaacaaatctgttgctgttgttggcaaagctggtggagacaagtggaaacagttgtcagatgaagagaaagcaccttaccaagccaaggctgagaagaggaaggctgagtaccaaaagaacatggatgcatataacaaaaaactggctgctggtgatgctgatgatgaggaatctgacaagtccaagtctgaggtacatgatgatgatgaggacgatgatggaagtgaacaggaggatgatgattaaacaatcagtaggctgttgaaattcataaaatggtggagaagttcatgtaggaattgctatcagtccttaccttttataaatagatgccctcttttttacatttttttttagtttttgttctttgggggtttagtttggacagaaaagtgaaattcagatgacttgccttgaaagctcaagtagtttatgtaatttctctattatgttggtgttaat

SEQ ID NO: 19565 - protein, 141 aa, Solanum tuberosum
MKGAKSKAKADTKLGVRKKATESKKAKNAAKDPNKPKRPPSAFFVFMEEFRKTYKEKHPNNKSVAVVGKAGGDKWKQLSDEEKAPYQAKAEKRKAEYQKNMDAYNKKLAAGDADDEESDKSKSEVHDDDEDDDGSEQEDDD

SEQ ID NO: 19566 - DNA, 784 bp, Zea mays
  CDS (89)..(508)
cccaccaccaccaccctctgtcttcgcctccgctgccgattcgaaagcacccgtcctgtcccctcgcaaaaccctagctccagccaccatgaagggcaaggctgacacctccaagaaggacgagggcaggctccgggcgggcggcgccgccggaaagcgcaagaaggccgccgcgagcggcaagcccaagcgcccgccctccgccttcttcgtcttcatgtctgaattcaggcaggagtatcaggcgctgcaccctggcaacaagagcgttgcgaccgtgagcaaggcagcaggggaaaagtggcgtgctatgtcagatcaagagaagcaaccatatgtggaccaagctggacagaagaagcaggactatgagaagactaaggcaaactttgataagaaggagagcacaagctcaaagaaggctaagactgaggatgaggatggctcgaagtcagaggttgatgacgaggatggcagcagtgacgaggaaaacgatgacgatgagtaaacagtctccaaggtcacgaggtagcaaatcgagtgttaggtccccaattagcttactgttttgctgcctttaaatgttaagttgtttcaaacaggtgtttatgaaggggatctattagtttcgcgatgtcgttagtttagtgcattagcaaagaaaaagccgaatgctgctagctgttctgttgcttttcttttgctaaccacttgtgtcacaactttctgtacctgcttcattgattaatctagtgactagtcagttattggttcaaaaaaaaaa

SEQ ID NO: 19567 - protein, 139 aa, Zea mays
MKGKADTSKKDEGRLRAGGAAGKRKKAAASGKPKRPPSAFFVFMSEFRQEYQALHPGNKSVATVSKAAGEKWRAMSDQEKQPYVDQAGQKKQDYEKTKANFDKKESTSSKKAKTEDEDGSKSEVDDEDGSSDEENDDDE

SEQ ID NO: 19568 - DNA, 828 bp, Zea mays
  CDS (1)..(417)
atgaagggcaaggccaacgcctccaagaaggatgaggccaggctccgggccggcggcggcggcgccggaaagcgcaagaaggccgccgcgagcggcaagcccaagcgccctccctccgccttcttcgtcttcatgtctgaattcaggcaggagtaccaggcgcagcaccctggcaacaagagcgttgcggccgtgagcaaggcagcaggggaaaagtggcgctctatgtcagagcaagagaagcaaccctatgtggaccaagctgggcagaagaagcaggactatgagaagactaaggcaaatattgagaagagcacaagctcaaagaaggctaagactgatgacgacgatggctcgaagtccgaggtcgatgatgaggatggcggtagtgacgaggataacgacgacgacgagtaaatagtatttccgctgttgtgaggtagcaaatcgattgttaggtccccaattagctcactggtttgctatctttaatgttaagttgtttggaacaggtgtttatgaaggggatctattagtttcgtgaggttgttagtttagtgcattagcaaagaaaaagccgaatgctgctagctattatgttgcttttcttttgctaatcacttgtgtcacaactttctgtacctgtttcattgactaatctagtgactagtcagttatgggtttaatgtttggttttggttttatatatttctttgttgcattctgtgcggtctacggaagtcatctgtgctgtatgaatgatgaatatctgcttgtggctcgtttcagtttagtgagtttttgtttaaaaaaaaaaaaaaaaaaaaa

SEQ ID NO: 19569 - protein, 138 aa, Zea mays
MKGKANASKKDEARLRAGGGGAGKRKKAAASGKPKRPPSAFFVFMSEFRQEYQAQHPGNKSVAAVSKAAGEKWRSMSEQEKQPYVDQAGQKKQDYEKTKANIEKSTSSKKAKTDDDDGSKSEVDDEDGGSDEDNDDDE

SEQ ID NO: 19570 - DNA, 736 bp, Canavalia gladiata
  CDS (20)..(445)
tattgtctgcggtatcgccatgccgaaggttaaagctgacgccaaagccgccgataaccggttgaagcgcaagggtgctggtgccggaaggaagcagtcgaagaaagctgctaaggatcctaacaagccaaagaggcctccaagtgcttttttcgtttttatgtctgagttcagagaacagtacaagaaggagcatccgaccaacaaatctgtggcagttgttggtaaggctggtggtgacaaatggaaatccttgtctgatgcagagaaggctcccttcgttgctagggcggagaagaaaaaggaggagtatgataaaagtattttagcctacaacaggaaactggagggcaagaatccatctgaggaagaaaaatctgacaagtcaaagtctgaagtcaatgacgaggatgaagatgaggaggaggaccaggatgatgagtgaagttcctggacacaagatgaagcttacgtggatgtggggataaaaattgttttgcatagtttgggttagaatttgataggatgaatcccaacccacatctctttctgattagtttccgaatttttattttgtcatctaggtttagattagtgcacaatccccaatagggttcagtatcatgattctgttcctaaagtccaatgctatgatacgttttaattcccattatccgacgaaatgtcagactccttccaattcctaattttgtttgtcctcccccaattaaccatt

SEQ ID NO: 19571 - protein, 141 aa, Canavalia gladiata
MPKVKADAKAADNRLKRKGAGAGRKQSKKAAKDPNKPKRPPSAFFVFMSEFREQYKKEHPTNKSVAVVGKAGGDKWKSLSDAEKAPFVARAEKKKEEYDKSILAYNRKLEGKNPSEEEKSDKSKSEVNDEDEDEEEDQDDE

SEQ ID NO: 19572 - DNA, 835 bp, Ipomoea nil
  CDS (141)..(581)
ggcacgagttctctctctctctctcaaccctagaggtaaactcgctacccctgcggcgctgactcgcccgagtcttaccgatttccgtcactcccccaccgattctcaccggttttcgtcgtttcttcacaggtttcgccatgaagggaggtaaatccaaggccaaatctgataacaagcttgccgtgaaaaagagaggctgtgagactaagaaatcgaagaaatctgtcaaggatccaaacaagccgaagaggcctccgagtgctttcttcgtgttcatggaggacttccgcaagacgtacaaggaaaagcatccaaacaacaagtccgttgcagccgtcggtaaagctggaggagacaaatggaaacagctcactgatgctgagaaagctcctttcatagccaaggctgagaaaaggaagcaggaatacgaaaagagcatgcaggcctacaatagaaaacaggccggggaagctgccgatgaggaggaatctgacaagtcaaggtcagaggtgaacgacgatgaggaggatgaggacgggagtgcagaggatgatgatgatgacgatgatgatgagtaaaggaaatatgtgtcagctttgtgtagggggatctgaagaaatatgtgatgatgacctttccattagtttatagcagtttctctttcctgttttgctttcttttgttttatgtttttttcggaaggagggttagatgggaaggggaaagatttacttcttagacaagttagagctgttgggagaaatccactgctctgtgtactttattattatgatgatgattacgtttcttcaatccattatggttaatgata

SEQ ID NO: 19573 - protein, 146 aa, Ipomoea nil
MKGGKSKAKSDNKLAVKKRGCETKKSKKSVKDPNKPKRPPSAFFVFMEDFRKTYKEKHPNNKSVAAVGKAGGDKWKQLTDAEKAPFIAKAEKRKQEYEKSMQAYNRKQAGEAADEEESDKSRSEVNDDEEDEDGSAEDDDDDDDDE

SEQ ID NO: 19574 - DNA, 807 bp, Pisum sativum
  CDS (21)..(485)
cttcaccgttcggtttcatcatgaaaggaggaaagtccaagggtgaatcgaagaaagctgaaacgaagcttgcggtgaataagaagggtgctcccgccacaaagggcggaaagaaaccagccaagggaaaggaaccaaaggaccctaacaagccgaagagacctccaagtgctttcttcgttttcatggaggactttaggaagcagttcaaaaaaggaaacgctgacaacaaagctgtgtctgcagtgggcaaagctgctggggcaaaatggaagtcaatgactgaagctgagaaagcaccatatgctgctaaggcagagaaaaggaaggctgaatatgagaaaagcatgaagtcctataacaagaaacaagctgaaggtccagctgctgttgaagaagaagaagaatccgagaaatcagaatctgaggtgcatgatgagaatgatgatgaggaagaaagtgaggaggaggatgatgacgagtagaaaattggatgatgataacatttatgtaggatgctatgctgatgatttgatcatcttatgtggatgattgtcattttatgataaaaatgtcttgctacccaaatattttgctgctcttggctaatgttttgtctgttcaaaacgtgaatagttaaaaatgagggagcaaacttttatttgtactttaaggccaactctttagttaagagatgtttatcttttgtagagcttttagattttcatgatggaatctcttgatgtttgtattaacataatttccttattagcttttcatatcctttgtgctgtatcaaaaaaaaaa

SEQ ID NO: 19575 - protein, 154 aa, Pisum sativum
MKGGKSKGESKKAETKLAVNKKGAPATKGGKKPAKGKEPKDPNKPKRPPSAFFVFMEDFRKQFKKGNADNKAVSAVGKAAGAKWKSMTEAEKAPYAAKAEKRKAEYEKSMKSYNKKQAEGPAAVEEEEESEKSESEVHDENDDEEESEEEDDDE

SEQ ID NO: 19576 - DNA, 483 bp, Hordeum vulgare
  CDS (1)..(483)
atgaagggggccaaatccaagggcgccgccaaggccgacaccaagttggcggtgaagagcaagggggcggagaagccggccgccaaggggaagaagggaaaggcaggcaaggaccccaacaagcccaagagggcgcccagcgccttcttcgtcttcatgggcgagttccgcgaggagttcaagcagaagaaccccaagaacaagtccgtcgccgccgtcggcaaagcggccggtgagaggtggaagagcttgagcgaatccgaaaaggccccctttgttgccaaggccaacaagctcaagggcgagtacaacaaggccattgcttcctacaacaagggcgagagcactactgctgccccaaagaaggcctcttccaaggaggtagaggaggaagatgaggaggaatccgacaagtccaagtcggagatcaatgacgacgatgacgatgagggtagcgatgaggccgaggatgccgccgagtga

SEQ ID NO: 19577 - protein, 160 aa, Hordeum vulgare
MKGAKSKGAAKADTKLAVKSKGAEKPAAKGKKGKAGKDPNKPKRAPSAFFVFMGEFREEFKQKNPKNKSVAAVGKAAGERWKSLSESEKAPFVAKANKLKGEYNKAIASYNKGESTTAAPKKASSKEVEEEDEEESDKSKSEINDDDDDEGSDEAEDAAE

SEQ ID NO: 19578 - DNA, 441 bp, Cucumis sativus
  CDS (1)..(441)
atgaagggcggaaaatccaagggggcgcctaaaaagaccgataccaagttgaaaagcaaaagtgctggagctagtaagaaatcagcgaaggctgcaaaggatcctaacaagccaaagaggcctgctagtgctttcttcgttttcatggaagagttcaggaagcaatacaagaaggaacatcctaacaacaaatccgtcgctgctgttggaaaggctggtggtgataaatggaagtcaatgtccgacgctgagaaagcaccttacataaacaaggctgagaaaaggaagactgagtataacaagagcatgcaggcttataataagagaattgcggagggagggaatggagctgaagaagaagaatcagataaatccaaatcagaagtcaatgatgacgatgaagatgatgatgagagtggagaggacgaagatgatgagtaa

SEQ ID NO: 19579 - protein, 146 aa, Cucumis sativus
MKGGKSKGAPKKTDTKLKSKSAGASKKSAKAAKDPNKPKRPASAFFVFMEEFRKQYKKEHPNNKSVAAVGKAGGDKWKSMSDAEKAPYINKAEKRKTEYNKSMQAYNKRIAEGGNGAEEEESDKSKSEVNDDDEDDDESGEDEDDE

SEQ ID NO: 19580 - DNA, 402 bp, Oryza sativa subsp
  CDS (1)..(402)
atgaagacgaggtcgcagacggcgccgaagccgctgaaaacggtgcggctgcctcctgtcaagccgcggcccaagccgccgccgccgcagccgcagccgccgccgtcccggaagaaggggcagcccctcgtcgaccggcgccgccccaagaagccgcccaccgccttcttctacttcatggaggattttcggaaaacttacaaggaagaaaatccaagtgtaaaatcaatgcaagaagtagggaaggcatgtggcgagaaatggaatacaatgacatttgaggaaagagtgaagtattatgatatagcaaccgagaagcgtgcagagtatgagaaggcggtggctgaatttgacaagaaaaaggaaagcggtgaattgtccgaggaatcagattacgactag

SEQ ID NO: 19581 - protein, 133 aa, Oryza sativa subsp
MKTRSQTAPKPLKTVRLPPVKPRPKPPPPQPQPPPSRKKGQPLVDRRRPKKPPTAFFYFMEDFRKTYKEENPSVKSMQEVGKACGEKWNTMTFEERVKYYDIATEKRAEYEKAVAEFDKKKESGELSEESDYD

SEQ ID NO: 19582 - DNA, 669 bp, Branchiostoma belcheri tsingtauense
  CDS (1)..(669)
  misc_feature (288)..(288): y is t or c
  misc_feature (363)..(363): r is g or a
atgccaaaggacaagaacaagcctaaggggaagatgtcggcgtacgcctgcttcgtgcaggagtgccgccgcgagcacgagaagaagtaccccaacaagcaggttgtcttcacggagttctcccagaagtgtgcttcgagatggaagaccatgaatgatgacgagaagaagcgcttccaggcccttgccgaagcagacaagaggcggtacgaacaggacatggccaagtacgtcccacccaagggtgccgagggtggccgcaggaagaggaagaagaaggaccccaaygcaccaaagagggccatgtctgccttcttcatgtattgtgctgatgcgcgtcccaaggtccgtgcagcacatccrgatttccaagtgggggatatcgcgaagatcctggggaagcagtggaaggaaatctcagattcagacaaggccaagtatgaaaagaaggcccaaactgaaaaggctcgctaccagaaggagcttgcggagtacaagagaagtgggggtggtgccagccctgccaagaagggccgtccagccaagaaggcgccaccaccaaagagggtagaggaggaagatgatgatgatgaggacgaggatgaggaggaagaagaggaggaggaggatgaagatgaggacgatgaggaagatgaggaggacgagtag

SEQ ID NO: 19583 - protein, 222 aa, Branchiostoma belcheri tsingtauense
MPKDKNKPKGKMSAYACFVQECRREHEKKYPNKQVVFTEFSQKCASRWKTMNDDEKKRFQALAEADKRRYEQDMAKYVPPKGAEGGRRKRKKKDPNAPKRAMSAFFMYCADARPKVRAAHPDFQVGDIAKILGKQWKEISDSDKAKYEKKAQTEKARYQKELAEYKRSGGGASPAKKGRPAKKAPPPKRVEEEDDDDEDEDEEEEEEEEDEDEDDEEDEEDE

SEQ ID NO: 19584 - DNA, 627 bp, Dermacentor variabilis
  CDS (1)..(627)
atgggcaaaggagacaagcctcgcggccggatgtctgcgtacgccttctttgtgcagacctgccgggaggagcacaagaagaagcacccgaacgagaacgtggtgttcgccgagttctcgaagaaatgtgccgagcgctggaagaccatgagcgagagcgagaagaagcgcttccatcagatggccgacaaggacaagaagcgcttcgacaccgagatggccgactacaagccgcccaagggcgacaagtccaagaagcgcaagcgcgcaaaggatcccaatgcacctaagcgccccttgtctgctttcttctggttctgcaatgacgagagacccaacgtgcgccaggagagcccagatgcctctgtcggtgaggtggcgaaagagctgggccggcgatggaatgaggttggcgacgacgtcaagtcaaagtacgagggcctggctgccaaggacaaggcgcgttacgagaaggaactgaaggcctacaagggaaagaagcccaaggctgcatctccaccaaaggagaaggccaaaaagaaggaagaggatgatgacgaagatgatgacgatgaagaagatgaggttgaggatgctgaagatgatgatgacgacgacgaggattga

SEQ ID NO: 19585 - protein, 208 aa, Dermacentor variabilis
MGKGDKPRGRMSAYAFFVQTCREEHKKKHPNENVVFAEFSKKCAERWKTMSESEKKRFHQMADKDKKRFDTEMADYKPPKGDKSKKRKRAKDPNAPKRPLSAFFWFCNDERPNVRQESPDASVGEVAKELGRRWNEVGDDVKSKYEGLAAKDKARYEKELKAYKGKKPKAASPPKEKAKKKEEDDDEDDDDEEDEVEDAEDDDDDDED

SEQ ID NO: 19586 - DNA, 648 bp, Biomphalaria glabrata
  CDS (1)..(648)
atgggtcgtccaaagggttcacttggaaaaaacagcaaaaagaaggtcaaggatgttaacaagcccaaacgtgcaacatctgcatatttctttttcctggcccagtgtcgtaaagaagcagccaaggcaggaaaggccccaacaaagattgcagagtttaccaaagaagcatcagaaaaatggaaagctcttagtgcagataagaaaaagccttttgaggctgcagctgcagatgacaagaggagatatgagactgagatggcggtatacaaaggaaagtcagttgatcccaacaaaccaaaaaggccaccaacagcttacttcctgtttttggcagactatagaattaggatggctaacaagggtattgaacacaaggaacttttgaaaatggctggtgaagaatggaggtcacttagtaatgaagataaaaagccctatgaaaagaaagctcttgaggaatcaaaaaaatatgaatcagcaatgacagaatacagaaagactggtggagcaagtggtggtccagctgccaagaaagctaaagttgtggaggaagaagaggatgatgatgatgaggaggatgaagatgatgatgaggatgatgatgaattaaaccttgtgacacaagttcctgtaaatactttttaa

SEQ ID NO: 19587 - protein, 215 aa, Biomphalaria glabrata
MGRPKGSLGKNSKKKVKDVNKPKRATSAYFFFLAQCRKEAAKAGKAPTKIAEFTKEASEKWKALSADKKKPFEAAAADDKRRYETEMAVYKGKSVDPNKPKRPPTAYFLFLADYRIRMANKGIEHKELLKMAGEEWRSLSNEDKKPYEKKALEESKKYESAMTEYRKTGGASGGPAAKKAKVVEEEEDDDDEEDEDDDEDDDELNLVTQVPVNTF

SEQ ID NO: 19588 - DNA, 417 bp, Arabidopsis thaliana
  CDS (1)..(417)
atgaaaggcggcgaatccaaagctgaagcaacgagcactgatcagagactcaaaaccagaggtagaaaggctgggaacaagacgaagaaggatccaaatcaacctaagagacctccaagtgctttcttcgtcttccttgaggatttccggaaagagtttaacctagcgaatcctaataacaaatccgtcgctactgttggtaaggctgctggagctagatggaagtcaatgactgatgaagataaagctccttacgtcgccaaggctgagagcagaaagactgaatatattaagaatgtgcaacagtacaacttgaaactggctagtggaaccaatagagaagaggatgactctgacaaatccaagtctgaagttgatgaagcagtaagcgaagaggaggcagaagacgacgattga

SEQ ID NO: 19589 - protein, 138 aa, Arabidopsis thaliana
MKGGESKAEATSTDQRLKTRGRKAGNKTKKDPNQPKRPPSAFFVFLEDFRKEFNLANPNNKSVATVGKAAGARWKSMTDEDKAPYVAKAESRKTEYIKNVQQYNLKLASGTNREEDDSDKSKSEVDEAVSEEEAEDDD

SEQ ID NO: 19590 - DNA, 625 bp, Zea mays
  CDS (19)..(483)
cacgaggagaagatcaggatgacgctcgaggcgcaggtcgtcgagaagaccgtcgaggtcgccagtgcggaccgcaagaagtcctccgccaagggaggtggtaacaaggacgccaagcgcaagcgctcgcccaccgccttcttcctcttcatggacgacttcaggaaggagttcaaggccacccatcctgacaacaagagtgtcgccaccgttgcaaaggaaggaggggagaggtggaagtccatgacagacgaggagaagaagccttacattgaaaaggccgcggagctcaaggctgaggccgagaatggcgagggcagtggtgagaacaatgttgccactaagaaagccaagacagatgaccaggaggtggatcagccagcaaagaagctcagaaagtgcaaggctcttcacgaggacgaggatgacgatggtgaccaggaagacgaggatgagaagaacgagttggatgacgacatgtagatggcagaggccactctcccatctctgtaaatggatggcagatgtgagcgtctagttagaaatgtcacttgtttcaagctagagggaagaggaagatagtcagtagtgaatatcccccgttatcgttgctacatgaatgaac

SEQ ID NO: 19591 - protein, 154 aa, Zea mays
MTLEAQVVEKTVEVASADRKKSSAKGGGNKDAKRKRSPTAFFLFMDDFRKEFKATHPDNKSVATVAKEGGERWKSMTDEEKKPYIEKAAELKAEAENGEGSGENNVATKKAKTDDQEVDQPAKKLRKCKALHEDEDDDGDQEDEDEKNELDDDM

SEQ ID NO: 19592 - DNA, 795 bp, Zea mays
  CDS (92)..(511)
gcacgagccaccaccaccctctgtcttcgcctccgctgccgattcgaaagcacccgtcctgtcccctcgcaaaaccctagctccagccaccatgaagggcaaggctgacacctccaagaaggacgagggcaggctccgggcgggcggcgccgccggaaagcgcaagaaggccgccgcgagcggcaagcccaagcgcccgccctccgccttcttcgccttcatgtctgaattcaggcaggagtatcaggcgctgcaccctggcaacaagagcgttgcgaccgtgagcaaggcagcaggggaaaagtggcgtgctatgtcagatcaagagaagcaaccatatgtggaccaagctggacagaagaagcaggactatgagaagactaaggcaaactttgataagaaggagagcacaagctcaaagaaggctaagactgaggatgaggatggctcgaagtcagaggttgatgacgaggatggcagcagtgacgaggaaaacgatgacgatgagtaaacagtctccaaggtcacgaggtagcaaatcgagtgttaggtccccaattagcttactgttttgctgcctttaaatgttaagttgtttcaaacaggtgtttatgaaggggatctattagtttcgcgatgtcgttagtttagtgcattagcaaagaaaaagccgaatgctgctagctgttctgttgcttttcttttgctaaccacttgtgtcacaactttctgtacctgcttcattgattaatctagtgactagtcagttattggttcaaaaaaaaaaaaaaaaaa

SEQ ID NO: 19593 - protein, 139 aa, Zea mays
MKGKADTSKKDEGRLRAGGAAGKRKKAAASGKPKRPPSAFFAFMSEFRQEYQALHPGNKSVATVSKAAGEKWRAMSDQEKQPYVDQAGQKKQDYEKTKANFDKKESTSSKKAKTEDEDGSKSEVDDEDGSSDEENDDDE

SEQ ID NO: 19594 - DNA, 381 bp, Zea mays
  CDS (1)..(381)
atgaagtcgagggcacggtccaccgccggcgactccaggctctcggtgaggaagaccaaggctgagaaggacccaaacaagcccaagaggcctccgagcgcgttcttcgtcttcatggaggagttcaggaaggactacaaggagaagcaccccaatgtgaagcaagtctccctgattggcaaggctggtggtgacaagtggaagtccctgtctgatgccgagaaggctccctacgtgtctaaggcagagaagctcaaggctgagtacaccaagaagatcgacgcttacaacaacaagcagtctggagaccccacggcgtctggtgattccgacaagtccaagtccgaggtgaacgacgaggacgaggagggtgacgagtga

SEQ ID NO: 19595 - protein, 126 aa, Zea mays
MKSRARSTAGDSRLSVRKTKAEKDPNKPKRPPSAFFVFMEEFRKDYKEKHPNVKQVSLIGKAGGDKWKSLSDAEKAPYVSKAEKLKAEYTKKIDAYNNKQSGDPTASGDSDKSKSEVNDEDEEGDE

SEQ ID NO: 19596 - DNA, 417 bp, Arabidopsis thaliana
  CDS (1)..(417)
atgaaaggcggcgaatccaaagctgaagcaacgagcactgatcagagactcaaaaccagaggtagaaaggctgggaagaagacgaagaaggatccaaatcaacctaagagacctccaagtgctttcttcgtcttccttgaggatttccgaaaagagtttaacctagcgaatcctaataacaaatccgtcgctactgttggtaaggctgctggagctagatggaaggcaatgactgatgaagataaagctccttacgtcgctaaggctgagagcataaagactgaatatattaagaatgtgcaacagtacaacttgaaactggctagtggaaccaatagagaagaggatgactctgacaaatccaagtctgaagttgatgaagcagtaagcgaagaggaggcagaagacgacgattga

SEQ ID NO: 19597 - protein, 138 aa, Arabidopsis thaliana
MKGGESKAEATSTDQRLKTRGRKAGKKTKKDPNQPKRPPSAFFVFLEDFRKEFNLANPNNKSVATVGKAAGARWKAMTDEDKAPYVAKAESIKTEYIKNVQQYNLKLASGTNREEDDSDKSKSEVDEAVSEEEAEDDD

SEQ ID NO: 19598 - DNA, 681 bp, Arabidopsis thaliana
  CDS (1)..(681)
atggctggaccatcgacaacttcaaacgcaccaaagcagaggaagagagtcgaagccgagactagcagcaacacttctactaccttacgtcgcgctaaagacggaagcgctttcgctctctgtctctgtgtatttggttgttgttgttgttgttgttcagaagcacaagttgtggagacacaagcagaggctaagaagaagcctgcagagaagaagaagacaacatctgatggacctaagccaaagagacttaagaaaaccaatgatgagaagaagagctcgtctacttcaaacaagcccaagcgacctcttaccgctttctttatcttcatgagtgacttccgtaaaacgtttaagtcagagcataatggttcgttagctaaggatgctgcaaagatcggtggtgagaagtggaagtctttgactgaggaagagaagaaagtttatctggataaagctgctgaacttaaggcagagtataacaagtcactggaaagtaatgatgctgatgaggaagaggaagatgaggagaagcaatctgatgatgttgatgatgctgaggagaaacaagttgacgatgatgatgaagttgaggagaaagaagttgagaacacagatgatgacaagaaagaagctgagggtaaagaagaggaggaagaagagattttggatgactactag

SEQ ID NO: 19599 - protein, 226 aa, Arabidopsis thaliana
MAGPSTTSNAPKQRKRVEAETSSNTSTTLRRAKDGSAFALCLCVFGCCCCCCSEAQVVETQAEAKKKPAEKKKTTSDGPKPKRLKKTNDEKKSSSTSNKPKRPLTAFFIFMSDFRKTFKSEHNGSLAKDAAKIGGEKWKSLTEEEKKVYLDKAAELKAEYNKSLESNDADEEEEDEEKQSDDVDDAEEKQVDDDDEVEEKEVENTDDDKKEAEGKEEEEEEILDDY

SEQ ID NO: 19600 - DNA, 372 bp, Zea mays
  CDS (1)..(372)
atgaaggacacctcgttcaaggccaccggcgccaagcgcaagaaggtcggcggcgccaagcgcgggctcacccccttcttcgcgtttttggctgagtttaggccgcagtacctggagaagcaccctgagctcaagggcgtaaaggaggtgagcaaggcggctggggagaagtggcgctctatgtcggatgaggagaaggcgaagtatggcagtagcaagaagcaggatggcaaagcaagcaagaaggagaacactagctccaagaaggccaaagctgatgttcgggagggagatgaagcagaaggttctaacaagtcaaaatctgaggttgaggatgatgagcaggatggtaatgaggatgaggatgagtaa

SEQ ID NO: 19601 - protein, 123 aa, Zea mays
MKDTSFKATGAKRKKVGGAKRGLTPFFAFLAEFRPQYLEKHPELKGVKEVSKAAGEKWRSMSDEEKAKYGSSKKQDGKASKKENTSSKKAKADVREGDEAEGSNKSKSEVEDDEQDGNEDEDE

SEQ ID NO: 19602 - DNA, 726 bp, Ipomoea nil
  CDS (81)..(515)
gaccacacaacgcacatatccaaagcatatctctctatctatagtactcttctctgtctcaaccctagagaggtttcgccatgaaagggggtaaatccaaggccaagtccgataacaagctcgctgtgaagaaacaggctgcggatactaagaaaacgaagaaggccgtcaaggatcctaataagccgaaaaggcctcctagtgcattcttcgttttcatggaggacttccggaagacgtacaaggagaagcatccaaacaacaaatctgtggccgttgtcggtaaggctggaggagacaagtggaaacaactcactgccgctgagaaagctcctttcatctccaaggcggagaaaaggaagcaggagtacgagaagaacttgcaggcgtacaataagaaacaggctgctggagccgcagaagaggaagaatctgacaagtcgaggtccgaagtgaacgatgacgatgaggatcaggacggcagcggagaggatgacagtgaagatgacgattaaagcattgattcgaaggtgatttgaatgccgtgaaggaaggatttgccgaatatatcctgaccctttggaatattgcctgatggatagtttacttttcctttttattaatttggtagtttatgctgatatgcttaaaggacactagcaaatgggttactactctttctatgtaccttcagtcttccatcccaacttatgataattcgaatgt

SEQ ID NO: 19603 - protein, 144 aa, Ipomoea nil
MKGGKSKAKSDNKLAVKKQAADTKKTKKAVKDPNKPKRPPSAFFVFMEDFRKTYKEKHPNNKSVAVVGKAGGDKWKQLTAAEKAPFISKAEKRKQEYEKNLQAYNKKQAAGAAEEEESDKSRSEVNDDDEDQDGSGEDDSEDDD

SEQ ID NO: 19604 - DNA, 761 bp, Glycine max
  CDS (37)..(495)
cctaactcccgaccctgttcccctctcgtatccgtcatgaaaggaggaaagtccaagaccgaatctaagagagccgatcccaaacttgctgtgaataagaagggagccgccaccaaggctaggaaacccgccggcaaggggaaggcagcgaaagaccctaacaagccaaagaggcctccaagtgctttcttcgttttcatggaggagttcaggaaggtattcaacaaagaacatcctgaaaacaaagcagtgtctgctgtgggcaaagctgctggagcaaaatggaagaccatgtctgatgctgaaaaagcaccttatgtggcaaagtctgagaaaaggaaagtggagtacgagaagaacatgagagcctataacaagaaacaggcggaaggtcctactggtggggatgaagaagaatctgagaagtctgtatctgaggtgaatgatgaagatgatgatgaggaaggcagtggcgaggaagaggatgacgattagagaatggactgataattgcatttatgtaggttctgatgattttgatcatctgttgtaggtggtctggtcatttcctgataaacatatttcttgcttccaaaaaatatttccctgctccctccgtaaattggttgtctttccaaaacgtgaatagtttaaagaagggagttctttatttgtacttctaaatccaactgtttagttaaggggtgtttatctcttgtagagcttttagtttgatttagagttttcttgttgaaatctgg

SEQ ID NO: 19605 - protein, 152 aa, Glycine max
MKGGKSKTESKRADPKLAVNKKGAATKARKPAGKGKAAKDPNKPKRPPSAFFVFMEEFRKVFNKEHPENKAVSAVGKAAGAKWKTMSDAEKAPYVAKSEKRKVEYEKNMRAYNKKQAEGPTGGDEEESEKSVSEVNDEDDDEEGSGEEEDDD

SEQ ID NO: 19606 - DNA, 823 bp, Vicia faba
  CDS (109)..(558)
acgtcatagtctcattcacaacaaacgcatatctcaaaagcacgttctctctctccttctctcccaaaccctagtctctcatatctctcttcaccgttcggtttcatcatgaaaggaggcaagtccaagggtgaatcgaagaaagctgaaaccaagcttgcggtgaataagaagggtgctgccgccacgaagggcggaaagaaaccagccaagggaaaggaaccaaaggaccctaacaaaccaaagaggcctcccagtgctttcttcgttttcatggctgattttagagaacagtataagaaggatcatcctaacaacaaatctgttgccgctgttggaaaagcttgcggtgaggaatggaaatccttgtctgaagaggagaaggctccttatgttgatagggctttgaagaagaaagaggagtatgagataactcttcaggcctataataagaaactggaggggaaagatgatgaagagggttctgacaagtcaaaatctgaagtcaatgatgaggatgaagatgaggaggatgaggaggatgaagatgatgattaaaaatgataataaggaagaaggttctgacaagcttaggaaagttggggaaacatatgttatgtttagattggcttataatatgttgggaagtttactaatgcgttgttatttttaagatagtttatggatttttattgtcttttctagagggttagatagtggtgaacaatcctaattttatcttcactatcattgtatcattatcctgtacttaaagtcgatgttatgatacttctcaattctcttcccaaaaaaaaaaaaaaaa

SEQ ID NO: 19607 - protein, 149 aa, Vicia faba
MKGGKSKGESKKAETKLAVNKKGAAATKGGKKPAKGKEPKDPNKPKRPPSAFFVFMADFREQYKKDHPNNKSVAAVGKACGEEWKSLSEEEKAPYVDRALKKKEEYEITLQAYNKKLEGKDDEEGSDKSKSEVNDEDEDEEDEEDEDDD

SEQ ID NO: 19608 - DNA, 885 bp, Zea mays
  CDS (40)..(513)
ggcacgagcgctgcgctccgtgtcgcgctcgaatccgccatgaagggggccaaatccaagggcgccgccaaggccgatgccaagctggcggtgaagagcaagggggcggagaagcccgccaagggcaggaaagggaaggccggcaaggaccccaacaagcctaagagggctcccagcgctttcttcgtgttcatggaggaatttcgcaaggagttcaaggagaagaaccctaagaacaagtctgtcgctgcggtggggaaagctgctggcgacaggtggaaatccctgagcgagtcggacaaggctccctatgtagccaaggctaacaagctcaagctcgagtacaacaaggccatcgctgcctacaacaagggcgagagcactgcagctaagaaggctcctgccaaggaggaagaggaggaagatgaagaggagtctgacaagtccaagtcggaggtcaatgacgaggatgatgaagagggtagtgaggaggatgaagatgatgacgagtgatggagctcctcgagacaatggaccgtgcttcatccaacaatggagcggctacacaaggccccgtggcgatcacaaaaaaggagcctatatccatgtactagaattattcagtttcactccacatcgtgatgttttatttttacttttgtcgtgctataacggatagcgctcctcgttggcgccactggcgggtggttctgcctctggtctggtgatgtttgtgtgtggtcacacttgccagccagcagaggcgcctgcttctacctagattactgtttccattgtcgtcatcatcggctaacattgtcataatgtcagtttgggtaatgttagattaagtaattattgtgttcaaaaaaaaaaaaaaaaaaa

SEQ ID NO: 19609 - protein, 157 aa, Zea mays
MKGAKSKGAAKADAKLAVKSKGAEKPAKGRKGKAGKDPNKPKRAPSAFFVFMEEFRKEFKEKNPKNKSVAAVGKAAGDRWKSLSESDKAPYVAKANKLKLEYNKAIAAYNKGESTAAKKAPAKEEEEEDEEESDKSKSEVNDEDDEEGSEEDEDDDE

SEQ ID NO: 19610 - DNA, 501 bp, Oryza sativa
  CDS (1)..(501)
atgaagggggccaaatccaagggcgccgccaagcccgacgccaagttggctgtgaagagtaagggcgcggagaagcccgccgccaagggcaggaaggggaaggccggcaaggaccccaacaagcccaagagggctccctccgctttcttcgtttttatggaggagttccgtaaggagttcaaggagaagaaccccaagaataaatctgtcgctgctgtaggaaaagcagccggtgataggtggaaatccctgaccgaagcggacaaggctccctatgtagccaaggccaacaagctcaaggccgagtacaacaaggccattgctgcctacaacaagggcgagagcactgccaagaaggcacccgccaaggaggaagaggaggacgacgaggaggaatctgacaagtccaagtccgaggtcaatgatgaggatgacgacgagggcagcgaagaggatgaagacgatgacgagagcctatccatcatcatcatcgtctactag

SEQ ID NO: 19611 - protein, 166 aa, Oryza sativa
MKGAKSKGAAKPDAKLAVKSKGAEKPAAKGRKGKAGKDPNKPKRAPSAFFVFMEEFRKEFKEKNPKNKSVAAVGKAAGDRWKSLTEADKAPYVAKANKLKAEYNKAIAAYNKGESTAKKAPAKEEEEDDEEESDKSKSEVNDEDDDEGSEEDEDDDESLSIIIIVY

SEQ ID NO: 19612 - DNA, 399 bp, Oryza sativa
  CDS (1)..(399)
atgaagggggccaaatccaagggcgccgccaagcccgacgccaagttggctgtgaagagtaagggcgcggagaagcccgccgccaagggcaggaaggggaaggccggcaaggaccccaacaagcccaagagggctccctccgctttcttcgtttttatggaggagttccgtaaggagttcaaggagaagaaccccaagaataaatctgtcgctgctgtaggaaaagcagccggtgataggtggaaatccctgaccgaagcggacaaggctccctatgtagccaaggccaacaagctcaaggccgagtacaacaaggccattgctgcctacaacaagggcgagcactgccaagaaggcacccgccaaggaggaagaggaggacgacgaggaggaatctga

SEQ ID NO: 19613 - protein, 132 aa, Oryza sativa
MKGAKSKGAAKPDAKLAVKSKGAEKPAAKGRKGKAGKDPNKPKRAPSAFFVFMEEFRKEFKEKNPKNKSVAAVGKAAGDRWKSLTEADKAPYVAKANKLKAEYNKAIAAYNKGEHCQEGTRQGGRGGRRGGI

SEQ ID NO: 19614 - DNA, 420 bp, Oryza sativa
  CDS (1)..(420)
atgaaggcgaggtcgaggtccagcaatggcgactccaggctctcggtgaggaagaccaaggcggagaaggacccgaacaagccgaagaggccaccgagcgcgttcttcgtgttcatggagcagttcaggaaggactacaaggagaagcaccccaacgtcaagcaggtctcggtgattggcaaggctggtggtgacaagtggaagtccatgactgatgctgacaaggctcctttcgtgaccaaggctgagaagctcaaggctgagtacaccaagaagattgacgcctacaacaacaagcaggcaggaggcccggctacctcaggcgactctgacaagtccaagtccgaggtgaacgacgaggacgagggcagcgtaagacctccctccaatccgcaacaccgtgtctccattaactcataa

SEQ ID NO: 19615 - protein, 139 aa, Oryza sativa
MKARSRSSNGDSRLSVRKTKAEKDPNKPKRPPSAFFVFMEQFRKDYKEKHPNVKQVSVIGKAGGDKWKSMTDADKAPFVTKAEKLKAEYTKKIDAYNNKQAGGPATSGDSDKSKSEVNDEDEGSVRPPSNPQHRVSINS

SEQ ID NO: 19616 - DNA, 360 bp, Oryza sativa
  CDS (1)..(360)
atgaaggcgaggtcgaggtccagcaatggcgactccaggctctcggtgaggaagaccaaggcggagaaggacccgaacaagccgaagaggccaccgagcgcgttcttcgtgttcatggagcagttcaggaaggactacaaggagaagcaccccaacgtcaagcaggtctcggtgattggcaaggctggtggtgacaagtggaagtccatgactgatgctgacaaggctcctttcgtgaccaaggctgagaagctcaaggctgagtacaccaagaagattgacgcctacaacaacaagcaggcaggaggcccggctacctcaggcgactctgacaagtccaagtccgagggtgacgagtga

SEQ ID NO: 19617 - protein, 119 aa, Oryza sativa
MKARSRSSNGDSRLSVRKTKAEKDPNKPKRPPSAFFVFMEQFRKDYKEKHPNVKQVSVIGKAGGDKWKSMTDADKAPFVTKAEKLKAEYTKKIDAYNNKQAGGPATSGDSDKSKSEGDE

SEQ ID NO: 19618 - DNA, 501 bp, Oryza sativa
  CDS (1)..(501)
atgaagaatgcaaagggcaagggagcagcaagggcctcaaaagaatcactgaagcccgttgatgaccgaaaggttggaaagcggaaggcttccggtaagcctgggagaagtagtgcaccaaagaaggagaagaaggccaagaaagaccccaacaagcctaaaagaccacccagtgctttctttgtgttccttgaggagttcaggaagacctttaaggctgagaatcctaatgtgaaggctgtatcagttgttgggaaagctggaggagagaaatggaaatccttgtccagtgctgagaaagctccatatgaagccaaggctgcgaaaaggaaagctgagtatgaaaaacttatcaaagcttatgataaaaagcaggcaagctccgcagatgatgaagaatcagacaagtccaaatctgaagtgaatgatgaagatgatgccagtggagaggaggaggaagaggatgatgaggaggaagaggacgatgaagatgatgactga

SEQ ID NO: 19619 - protein, 166 aa, Oryza sativa
MKNAKGKGAARASKESLKPVDDRKVGKRKASGKPGRSSAPKKEKKAKKDPNKPKRPPSAFFVFLEEFRKTFKAENPNVKAVSVVGKAGGEKWKSLSSAEKAPYEAKAAKRKAEYEKLIKAYDKKQASSADDEESDKSKSEVNDEDDASGEEEEEDDEEEEDDEDDD

SEQ ID NO: 19620 - DNA, 453 bp, Glycine max
  CDS (1)..(453)
atggcgaaaaaggcaaaagggtctcactctgcttcttctgcctctgcatcttcttcgtccgacaaactagtgctgaggattaaatcaaatgaggggaccaagagatcagtgcggcaaactaattcaagaaagaaacttaaagcaaagcaaaagaagaacaaacaaaagtttgatgctatgaaacccaggaaacctcctacagctttcttctacttcttggaggattttcgtaaagaatttcaagagcagaatccagatgtaaagtcaatgcgtgatattggcaaggcatgtggagagaagtggaaaacaatgacttatgaggagaaggtacaatactatgatatagcaacaaaaaaacgtgaagaatttgatagcgcaatggcagaatttaacaagaaaatggaaaatggcgagtttgacgaaactgatgatgaatcagagtttgatgagtaa

SEQ ID NO: 19621 - protein, 150 aa, Glycine max
MAKKAKGSHSASSASASSSSDKLVLRIKSNEGTKRSVRQTNSRKKLKAKQKKNKQKFDAMKPRKPPTAFFYFLEDFRKEFQEQNPDVKSMRDIGKACGEKWKTMTYEEKVQYYDIATKKREEFDSAMAEFNKKMENGEFDETDDESEFDE

SEQ ID NO: 19622 - DNA, 366 bp, Triticum aestivum
  CDS (1)..(366)
atgaggtccaaggccaacggagacaccgcgttcaaggcctccggcaagaacaagacggccaccggcggcgtcgccaagccgaagcgcgcccccacccccttcttcgccttcctggctgagttcaggccacagtacatggagaagcaccccgaggcaaagggcgtcgcggccgtcaccaaggcggctggggagaagtggcgcagcatgtcggatgaggagaaggcaaagtatggcggcaagaaggcagatgccccagcaagcaaggcggtgaacaagaaggagagcactagctccaagaaggccaagactgacgctgacgaagaaggttctgacgttgaggatgatggcgaggaggacgaggagtaa

SEQ ID NO: 19623 - protein, 121 aa, Triticum aestivum
MRSKANGDTAFKASGKNKTATGGVAKPKRAPTPFFAFLAEFRPQYMEKHPEAKGVAAVTKAAGEKWRSMSDEEKAKYGGKKADAPASKAVNKKESTSSKKAKTDADEEGSDVEDDGEEDEE

SEQ ID NO: 19624 - DNA, 384 bp, Zea mays
  CDS (1)..(384)
atgaagtcgagggcgaggtccggcggtggcgactccaggctctcggtgaggaagaccaaggttgagaaggacccaaacaagcccaagaggcctccgaccacgttcttcgtcttcatggaggagttcaggaaggactacaaggagaagcaccccaatgtgaagcaagtctcagtcattggcaaggctggtggtgacatgtggaagtccttgtctgatgccgagaaggctccctacgtatctaaggccgagaagctgaaggttgagtacacaaagaagatggacgcctataacaacaagcagtctggaggaggacccacattgtctggtgattctgacaagtccaagtccgaggtcaacgacggggacgaggagggtgatgagtga

SEQ ID NO: 19625 - protein, 127 aa, Zea mays
MKSRARSGGGDSRLSVRKTKVEKDPNKPKRPPTTFFVFMEEFRKDYKEKHPNVKQVSVIGKAGGDMWKSLSDAEKAPYVSKAEKLKVEYTKKMDAYNNKQSGGGPTLSGDSDKSKSEVNDGDEEGDE

SEQ ID NO: 19626 - DNA, 420 bp, Triticum aestivum
  CDS (1)..(420)
atgaagggcaaggctgacacctccaagaagggcgagggcaggctcaaggccgccggcggcgccagcaagaggaagaaggacgccgctgccgctggcaagcccaagcgcccgccctccgcctttttcgtcttcatgtctgagttcaggcagcagtacaacgcggagaaccccaacaacaagagtgtcgccaacgtgagcaaggcggcgggtgagaagtggagagctatgtctgatgaggagaaagcaccttatgtggaaaaggctgaacagaagaagaaggattatgagaagaccaaagccacctttgataacaaggagagtgcgagctccaagaaggccaagactcagaacgatgaggaggtcaaatctgaggtcgaagatgagggtagcgatgaggaaaatgaggacgatgacgagtaa

SEQ ID NO: 19627 - protein, 139 aa, Triticum aestivum
MKGKADTSKKGEGRLKAAGGASKRKKDAAAAGKPKRPPSAFFVFMSEFRQQYNAENPNNKSVANVSKAAGEKWRAMSDEEKAPYVEKAEQKKKDYEKTKATFDNKESASSKKAKTQNDEEVKSEVEDEGSDEENEDDDE

SEQ ID NO: 19628 - DNA, 417 bp, Helianthus annuus
  CDS (1)..(417)
atgaaaggaggcaaatcaaccggtgctggaacaaaaaccgatgctaagttgactgtgaagaaaactggagctaaggggaaagctaataaggatcctaacaagcctaagaggcctgctagcgctttcttcgtgtttatggaggagtttaggaagcagtttaaagaggagcatcctgataataagtctgttgctgctgttgggaaagctggtggtgtaaaatggaagtctatgtctgatgctgacaaagcaccttatgtagccaaagctgagaaaaggaaggctgagtacgagaagaacatgacagcctacaacaaaaagcaggctgctggtggtaccgacgaggatgatgcttctgacaaatccaaatccgaggtcaacgagggagaggacagtgatgatgaggaagatgacgagtga

SEQ ID NO: 19629 - protein, 138 aa, Helianthus annuus
MKGGKSTGAGTKTDAKLTVKKTGAKGKANKDPNKPKRPASAFFVFMEEFRKQFKEEHPDNKSVAAVGKAGGVKWKSMSDADKAPYVAKAEKRKAEYEKNMTAYNKKQAAGGTDEDDASDKSKSEVNEGEDSDDEEDDE

SEQ ID NO: 19630 - DNA, 426 bp, Brassica napus
  CDS (1)..(426)
atgaaaggtggtgaaaccaaagctcaatcgaagagcaccgatgaaagattgaaaacgagaggaaagaaagctggaaagaaagcagccaaggatcctaacaagcctaagaggcctccaagtgccttcttcgtcttcctggagggattccgtaaggagttcaatctagctaaccctgacaacaaatccgtcggagctgttggtaaagctgctggagctaaatggaaatcaatgactgatgaagacaaagctccttatgtggccaaggcagagagcaagaagactgaatataccaagactatgcaaaagtacaacatgaaactggctaatggaactagcacagctggagatgatgactctgacaagtccaagtccgaagtcaacgatgaagcagaaggtggaagtgaagaggaggaagatgatgattag

SEQ ID NO: 19631 - protein, 141 aa, Brassica napus
MKGGETKAQSKSTDERLKTRGKKAGKKAAKDPNKPKRPPSAFFVFLEGFRKEFNLANPDNKSVGAVGKAAGAKWKSMTDEDKAPYVAKAESKKTEYTKTMQKYNMKLANGTSTAGDDDSDKSKSEVNDEAEGGSEEEEDDD

SEQ ID NO: 19632 - DNA, 534 bp, Brassica napus
  CDS (1)..(534)
atgaagacagcaaaggggaaaggtaaagctaagaccactaaggaagccttgaagccagttgatgacagaagggtgggaaagaggaaggcaccggctgagaagcctagcaagcgggagaagaaggccaagaaggaccctaacaaacccaaaagagctcctagtgccttctttgtcttcctggaagattttaggcaaacgtttaagaaagagaatccagatgtgaaggctgtctctgctgttgggaaagctggagggcagaaatggaagtcaatgtctcaggccgaaaaagctccatatgaagagcaagctgcaaagaggaaagctgaatacgaaaagcaaatggatgcatacaacaaaagcttggaggaagggagtgatgaatctgaaaattctctatccgaagtgaatgatgaagatgaagctagtgaggaggaagagaaggtggagaagggaaaggcaggtgaggacgacgatgatgatgatgatgatgatgatgatgatgatgatgaagaagacgaggaggaagaagactaa

SEQ ID NO: 19633 - protein, 177 aa, Brassica napus
MKTAKGKGKAKTTKEALKPVDDRRVGKRKAPAEKPSKREKKAKKDPNKPKRAPSAFFVFLEDFRQTFKKENPDVKAVSAVGKAGGQKWKSMSQAEKAPYEEQAAKRKAEYEKQMDAYNKSLEEGSDESENSLSEVNDEDEASEEEEKVEKGKAGEDDDDDDDDDDDDDDEEDEEEED

SEQ ID NO: 19634 - DNA, 525 bp, Brassica napus
  CDS (1)..(525)
atgaagacagcaaaggggaaagataaagctaagaacaccaaggaagccttgaagcctgttgatgacagaaaggtgggaaagaggaaggcaccggctgagaagggagagactcgtaaagagaagaaggccaagaaggatcctaacaaacccaaaagagctcctagtgccttctttgtcttcctagaagattttaggataactttcaagaaagataatccaaatgtgaaggctgtatctgctgttgggaaagctgcaggtcagaaatggaagtcaatgtctcaagatgaaaaagctccatatgaagagaaagctgcgaagaggaaagctgaatatgaaaagcttatggatgcatacaacaaaaacttggaggaagggagtgatgaatctgaaaagtctaggtctgaggtgaatgatgaagatgaagctagtgaggaggaagcgcagccagataagggaaaggcaggagatgacgatgatgctgaagatgacgatgatgatgctgatgatgacgaggaagaagactaa

SEQ ID NO: 19635 - protein, 174 aa, Brassica napus
MKTAKGKDKAKNTKEALKPVDDRKVGKRKAPAEKGETRKEKKAKKDPNKPKRAPSAFFVFLEDFRITFKKDNPNVKAVSAVGKAAGQKWKSMSQDEKAPYEEKAAKRKAEYEKLMDAYNKNLEEGSDESEKSRSEVNDEDEASEEEAQPDKGKAGDDDDAEDDDDDADDDEEED

SEQ ID NO: 19636 - DNA, 525 bp, Brassica napus
  CDS (1)..(525)
atgaagacagcaaaggggaaagataaagctaagaacaccaaggaagccttgaagcctgttgatgacagaaaggtgggaaagaggaaggcaccggctgagaagggagagactcgtaaagagaagaaggccaagaaggatcctaacaaacccaaaagagctcctagtgccttctttgtcttcctagaagattttaggataactttcaagaaagataatccaaatgtgaaggctgtatctgctgttgggaaagctgcaggtcagaaatggaagtcaatgtctcaagatgaaaaagctccatatgaagagaaagctgcgaagaggaaagctgaatatgaaaagcttatggatgcatacaacaaaaacttggaggaagggagtgatgaatctgaaaagtctaggtctgaggtgaatgatgaagatgaagctagtgaggaggaagcgcagccagataagggaaaggcaggagatgacgatgatgctgaagatggcgatgatgatgctgatgatgacgaggaagaagactaa

SEQ ID NO: 19637 - protein, 174 aa, Brassica napus
MKTAKGKDKAKNTKEALKPVDDRKVGKRKAPAEKGETRKEKKAKKDPNKPKRAPSAFFVFLEDFRITFKKDNPNVKAVSAVGKAAGQKWKSMSQDEKAPYEEKAAKRKAEYEKLMDAYNKNLEEGSDESEKSRSEVNDEDEASEEEAQPDKGKAGDDDDAEDGDDDADDDEEED

SEQ ID NO: 19638 - DNA, 426 bp, Brassica napus
  CDS (1)..(426)
atgaaaggaggtaattcgaagtctgactccagaaactccaagctctctgtgaacaagaagcctacgaaggcgagcaaagctgctgctaaagatcctaacaaacctaagaggccggccagtgctttcttcgtcttcatggaggacttccgtcagacttacaagaaggaacaccccgacaacaaatctgttgctgctgttgggaaagctggtggagagaagtggaaatcactgtctgactctgagaaagctccctacgtagctaaggctgataagcgcaaggttgagtatgagaagaccatgaaggcctacaacaagaagctggaggaaggtccgaaggaggacgaggaatctgacgacaagtcagtgtctgaggttagtgaagaggaggatgcggatgatgggagtgatgaggaggaagacgattga

SEQ ID NO: 19639 - protein, 141 aa, Brassica napus
MKGGNSKSDSRNSKLSVNKKPTKASKAAAKDPNKPKRPASAFFVFMEDFRQTYKKEHPDNKSVAAVGKAGGEKWKSLSDSEKAPYVAKADKRKVEYEKTMKAYNKKLEEGPKEDEESDDKSVSEVSEEEDADDGSDEEEDD

SEQ ID NO: 19640 - DNA, 423 bp, Brassica napus
  CDS (1)..(423)
atgaaaggtggtgaaggcaaagctcaagcgaagagcagtgacgagagattgaagacgagagggaagaaagcagggaagaaagtgaaggatccgaacaagcctaagaggcctccaagtgccttcttcgtcttcctggagggattccgaaaggagttcaatctagctaaccctgacaacaaatccgtcggagctgttggtaaagctgctggagccaaatggaaatcaatgactgctgaagataaagctccttatgtagccaaggctgagaccaaaaagactgaatacgccaagactatgcaaaaatacaacatgaaattggctaatggaacgagtacagctggagatgatgactctgacaagtccaagtctgaagtcaacgacgaggaagatgctgcaagtgatgaggaggaagatgatgattaa

SEQ ID NO: 19641 - protein, 140 aa, Brassica napus
MKGGEGKAQAKSSDERLKTRGKKAGKKVKDPNKPKRPPSAFFVFLEGFRKEFNLANPDNKSVGAVGKAAGAKWKSMTAEDKAPYVAKAETKKTEYAKTMQKYNMKLANGTSTAGDDDSDKSKSEVNDEEDAASDEEEDDD

SEQ ID NO: 19642 - DNA, 435 bp, Brassica napus
  CDS (1)..(435)
atgaagggaggtaaatcaaaggctgataccaagagctccaagctcgcggtgaacaagaagcctgcaaaggcaagcaaagcggctgcggctgctaaggatcctaacaaacctaagaggccttccagtgccttcttcgttttcatggaggatttccgtcagacttacaagaaggatcatcccaataacaaatctgttgctgctgttgggaaagctggtggacacaagtggaaatccttgtctgacactgagaaggctccctacgttgctaaggctgacacgcgcaaggttgactacgagaagaacatgaaagcctacaacaagaagctggaggaaggtccaaaggaggatgaggaggaatctgacaagtccgtgtctgaggttaatgatgaggatgatgccgatgatgggagtgatgaggaggaagacgatgactaa

SEQ ID NO: 19643 - protein, 144 aa, Brassica napus
MKGGKSKADTKSSKLAVNKKPAKASKAAAAAKDPNKPKRPSSAFFVFMEDFRQTYKKDHPNNKSVAAVGKAGGHKWKSLSDTEKAPYVAKADTRKVDYEKNMKAYNKKLEEGPKEDEEESDKSVSEVNDEDDADDGSDEEEDDD

SEQ ID NO: 19644 - DNA, 630 bp, Glycine max
  CDS (1)..(630)
atggcatcatctcagtcgaggaagagagttgacgccgtcgattctcgcgctgcttccgttctcgttcgcgccaaagatggcagtgcttttgctcgttgcgacgattgcaagaagaatgtgccggttgcactcatcgacatgcacagttgcagccttgaagctaaaattaaaatgaacctagacgctcaagttgtggaacaggctgctgaagctaagaagccggagaggaagaagcccaaatctaaagagcctatggcaaaaaaagctaaagttgggaaggggaagaaagtcaaggatcctaacatgcctaagcgtcctcccacagctttctttgtcttcttggatgattttagaaaatctttcaaagaagctaatcctgattctaaggatgttaaaagggttggtaaagaggctggtgaaaagtggaggtctatgactgatgaagagaagaagccatatcttgacaaagttgctgagcttaaggaagagtacgagaaggctatggaaagctatgaagctggtcaagatgaagaagatcaaactgtgtctgataaggaaacttctgataaggaagctgctgcaaaagaagttgcaatagaagttgaagaggagctaactgacgaggactaa

SEQ ID NO: 19645 - protein, 209 aa, Glycine max
MASSQSRKRVDAVDSRAASVLVRAKDGSAFARCDDCKKNVPVALIDMHSCSLEAKIKMNLDAQVVEQAAEAKKPERKKPKSKEPMAKKAKVGKGKKVKDPNMPKRPPTAFFVFLDDFRKSFKEANPDSKDVKRVGKEAGEKWRSMTDEEKKPYLDKVAELKEEYEKAMESYEAGQDEEDQTVSDKETSDKEAAAKEVAIEVEEELTDED

SEQ ID NO: 19646 - DNA, 429 bp, Glycine max
  CDS (1)..(429)
atgccgaaagccaaatccgacgccaaagccgccgatagccggttgaagcgcaagggcgctggtgctggaaggaagcaatcgaagaaagctgctaaggatcctaacaagccaaagagacctccaagcgctttcttcgttttcatgtccgagttcagagagcagtttaagaaggagcatcctaacaacaaatccgtcgctgttgtcggtaaagctggtggtgacaaatggaaatcgctgtctgatgctgaaaaggcccccttcgttgccacggccgaaaagaagaaacaagagtatgagaaaactattttggcttacaataagaaattggaggggaagaattcagaggaagacgagtctgacaagtcaaagtctgaagtcaatgacgatgaggaagatgaggaggaggaggatgatgatgacgacgagtga

SEQ ID NO: 19647 - protein, 142 aa, Glycine max
MPKAKSDAKAADSRLKRKGAGAGRKQSKKAAKDPNKPKRPPSAFFVFMSEFREQFKKEHPNNKSVAVVGKAGGDKWKSLSDAEKAPFVATAEKKKQEYEKTILAYNKKLEGKNSEEDESDKSKSEVNDDEEDEEEEDDDDDE

SEQ ID NO: 19648 - DNA, 459 bp, Glycine max
  CDS (1)..(459)
atgaaaggaggaaagtccaagaccgaatctaagagagccgatgccaaacttgctgtgaataagaagggcgccgccaccaagactaggaaacccgccggaaaggggaaggcagcgaaagatcctaacaagccaaagaggcctccaagtgctttcttcgttttcatggaggaattcaggaaggtgttcaacaaggaacatcccgacaacaaagcagtgtctgctgtgggcaaagctgctggagcaaaatggaagacgatgtctgatgctgaaaaagcaccttatgtggcaaagtctgagaaaaggaaagtggagtacgagaagaacatgagagcttataacaagaaacaggcggaaggtcctactggtggggatgaagaagaatctgagaagtctgtatctgaggtgaatgatgaggatgatgacgaggaaggcagtggcgaggaggaggatgacgattag

SEQ ID NO: 19649 - protein, 152 aa, Glycine max
MKGGKSKTESKRADAKLAVNKKGAATKTRKPAGKGKAAKDPNKPKRPPSAFFVFMEEFRKVFNKEHPDNKAVSAVGKAAGAKWKTMSDAEKAPYVAKSEKRKVEYEKNMRAYNKKQAEGPTGGDEEESEKSVSEVNDEDDDEEGSGEEEDDD

SEQ ID NO: 19650 - DNA, 420 bp, Glycine max
  CDS (1)..(420)
atgccgaaagctaaatccgacgccaaagccgccgatagcaggttgaagcggaagggcgctggtgctgggaggaagcaatcgaggaaagctgctaaggaccctaacaagccgaagagacctccaagcgctttcttcgttttcatgtccgagttcagagagcagttcaagaaggagcatcctaacaacaaatccgtcgctgttgtcggcaaagctggtggtgaaaaatggaaatcgctatctgatgctgaaaaggcccctttcgttgctactgctgagaagaagaaacaggagtatgagaaaactatttcggcttacaataagcaattggagggaaagaattcagaggaagacgagtctgacaagtcaaagtctgaagtcaatgatgacgaggaagatgaggaggaggatgatgatgagtaa

SEQ ID NO: 19651 - protein, 139 aa, Glycine max
MPKAKSDAKAADSRLKRKGAGAGRKQSRKAAKDPNKPKRPPSAFFVFMSEFREQFKKEHPNNKSVAVVGKAGGEKWKSLSDAEKAPFVATAEKKKQEYEKTISAYNKQLEGKNSEEDESDKSKSEVNDDEEDEEEDDDE

SEQ ID NO: 19652 - DNA, 630 bp, Glycine max
  CDS (1)..(630)
atggcatcatctcagtcgaggaagagagttgacgctgtcgattctcgcgctgcttccgttctccttcgcgccaaagatggaagtgcttttgctcgatgcgacgactgcaagaagaatgtgccggttgcactcatcgacatgcacagttgcagccttgaagctaaaattaaaatgaacctagatgctcaagttgtggaacaggctgctgaagctaagaagccggagaggaagaagcccaaatccaaagagcctatggcaaaaaaggctaaagttgggaaggggaagaaagtcaaggatcctaacatgcctaagcgtcctcccacagctttctttgtcttcttggatgattttagaaaatctttcaaagaagctaatcctgattctaaggatgttaaaagggttggtaaagaggctggtgaaaagtggaggtctatgactgatgaagagaagaagccatatcttgacaaagttgctgagcttaaggaagagtacgagaaggctatggaaagctatgaagctggtcaagatgaagaagatcaaactgtgtctgataaggaaacttctgataaggaagctgctgcaaaagaagttgcaatagaagttgaagaggagctaactgacgaggactaa

SEQ ID NO: 19653 - protein, 209 aa, Glycine max
MASSQSRKRVDAVDSRAASVLLRAKDGSAFARCDDCKKNVPVALIDMHSCSLEAKIKMNLDAQVVEQAAEAKKPERKKPKSKEPMAKKAKVGKGKKVKDPNMPKRPPTAFFVFLDDFRKSFKEANPDSKDVKRVGKEAGEKWRSMTDEEKKPYLDKVAELKEEYEKAMESYEAGQDEEDQTVSDKETSDKEAAAKEVAIEVEEELTDED

SEQ ID NO: 19654 - DNA, 510 bp, Glycine max
  CDS (1)..(510)
atgaagactgcaaagggcaagggagcagcgaggccctcaaaagaatcactgaagcctgttgatgaccgaaaggttggaaagcggaaggcttctggtaagcctgagaaaagcagagcaccaaagaaggagaagaaggccaagaaagaccccaacaagcctaaaagaccaccgagtgctttcttcgtgttccttgaggagttcaggaagacctttaaggctgagaatcctctcgtgaaggctgtatcagttgttggaaaagctggaggagagaaatggaaatccctgtccagtgctgagaaagctccatatgaagccaaggctgcaaaaaggaaagctgagtatgaaaaacttatcaaagcttatgagaaaaagcaggcaagctctgcagatgatgatgaatcagacaagtccaaatctgaagtgaatgatgaagatgatgccagtggagaggaggaccaccaagaggacgaggatgatgaggaggaagaggacgatgaagatgatgactga

SEQ ID NO: 19655 - protein, 169 aa, Glycine max
MKTAKGKGAARPSKESLKPVDDRKVGKRKASGKPEKSRAPKKEKKAKKDPNKPKRPPSAFFVFLEEFRKTFKAENPLVKAVSVVGKAGGEKWKSLSSAEKAPYEAKAAKRKAEYEKLIKAYEKKQASSADDDESDKSKSEVNDEDDASGEEDHQEDEDDEEEEDDEDDD

SEQ ID NO: 19656 - DNA, 420 bp, Zea mays
  CDS (1)..(420)
atgaagggcaaggccaacgcctccaagaaggatgagggcaggctccgggccggcagcggcggcgccggaaagcgcaagaaggccgccgcgagcggcaagcccaagcgccctccctccgccttcttcgtcttcatgtctgaattcaggcaggagtaccaggcgcagcaccctggcaacaagagcgttgcggccgtgagcaaggcagcaggggaaaagtggcgctctatgtcagagcaagagaagcaaccctatgtggaccaagctgggcagaagaagcaggactatgagaagaccaaggcaaatattgagaaggagagcacaagctcaaagaaggctaagactgatgacgacgatggctcgaagtctgaggtcgatgatgaggatggcggtagtgacgaggataacgacgacgacgagtaa

SEQ ID NO: 19657 - protein, 139 aa, Zea mays
MKGKANASKKDEGRLRAGSGGAGKRKKAAASGKPKRPPSAFFVFMSEFRQEYQAQHPGNKSVAAVSKAAGEKWRSMSEQEKQPYVDQAGQKKQDYEKTKANIEKESTSSKKAKTDDDDGSKSEVDDEDGGSDEDNDDDE

SEQ ID NO: 19658 - DNA, 384 bp, Zea mays
  CDS (1)..(384)
atgaagtcgagggcgaggtccggcggtggcgactccaggctctcggtgaggaagaccaaggttgagaaggacccaaacaagcccaagaggcctccgaccgcgttcttcgtcttcatggaggagttcaggaaggactacaaggagaagcaccccaatgtgaaacaagtctcagtgattggcaaggctggtggtgacatgtggaagtccttgtctgatgccgagaaggctccctacgtatctaaggccgagaagctgaaggttgagtacacaaagaagatggacgcctataacaacaagcagtctggaggaggacccacattgtctggtgattctgacaagtccaagtccgaggtcaacgacggggacgaggagggtgatgagtga

SEQ ID NO: 19659 - protein, 127 aa, Zea mays
MKSRARSGGGDSRLSVRKTKVEKDPNKPKRPPTAFFVFMEEFRKDYKEKHPNVKQVSVIGKAGGDMWKSLSDAEKAPYVSKAEKLKVEYTKKMDAYNNKQSGGGPTLSGDSDKSKSEVNDGDEEGDE

SEQ ID NO: 19660 - DNA, 420 bp, Zea mays
  CDS (1)..(420)
atgaagggcaaggccaacgcctccaagaaggatgaggccaggctccgggccggcggcggcggcgccggaaagcgcaagaaggccgccgcgagcggcaagcccaagcgccctccctccgccttcttcgtcttcatgtctgaattcaggcaggagtaccaggcgcagcaccctggcaacaagagcgttgcggccgtgagcaaggcagcaggggaaaagtggcgctctatgtcagagcaagagaagcaaccctatgtggaccaagctgggcagaagaagcaggactatgagaagactaaggcaaatattgagaaggagagcacaagctcaaagaaggctaagactgatgacgacgatggctcgaagtccgaggtcgatgatgaggatggcggtagtgacgaggataacgacgacgacgagtaa

SEQ ID NO: 19661 - protein, 139 aa, Zea mays
MKGKANASKKDEARLRAGGGGAGKRKKAAASGKPKRPPSAFFVFMSEFRQEYQAQHPGNKSVAAVSKAAGEKWRSMSEQEKQPYVDQAGQKKQDYEKTKANIEKESTSSKKAKTDDDDGSKSEVDDEDGGSDEDNDDDE

SEQ ID NO: 19662 - DNA, 420 bp, Zea mays
  CDS (1)..(420)
atgaagggcaaggccaacgcctccaagaaggatgagggcaggctccgggccggcggcggcggcgccggaaagcgcaagaaggccgccgcgagcggcaagcccaagcgccctccctccgctttcttcgtcttcatgtctgaattcaggcaggagtaccaggcgcagcaccctagcaacaagagcgttgcggccgtgagcaaggcagcaggggaaaagtggcgctctatgtcagagcaagagaagcaaccctatgtggaccaagctgggcagaagaagcaggactatgagaagaccaaggcaaatattgagaaggagagcacaagctcaaagaaggctaagactgatgacgacgatggctcgaagtccgaggtcgatgatgaggatggcggtagtgacgaggaaaacgacgacgacgagtaa

SEQ ID NO: 19663 - protein, 139 aa, Zea mays
MKGKANASKKDEGRLRAGGGGAGKRKKAAASGKPKRPPSAFFVFMSEFRQEYQAQHPSNKSVAAVSKAAGEKWRSMSEQEKQPYVDQAGQKKQDYEKTKANIEKESTSSKKAKTDDDDGSKSEVDDEDGGSDEENDDDE

SEQ ID NO: 19664 - DNA, 639 bp, Zea mays
  CDS (1)..(639)
atggcgggaggcaagtccaccggcaatgccgcgcgcagcaggaagcgcgtcgaggcaaccgtcctcaagcgctccagggacgggagcgccttcaccagatgcgaggcctgcaacaaggacgtccccgtcgtcctcatcgacatgcacagctgcagcctcgacgagaagatcaggatgacgctcgaggcgcaggtcgtcgagaagaccgtcgaggtcgccagtgcggaccgcaagaagtcctccgccaagggaggtggtaacaaggacgccaagcgcaagcgctcgcccaccgccttcttcctcttcatggacgacttcaggaaggagttcaaggccacccatcctgacaacaagagtgtcgccaccgttgcaaaggaaggaggggagaggtggaagtccatgacagacgaggagaagaagccttacattgaaaaggccgcggagctcaaggctgaggccgagaatggcgagggcagtggtgagaacaatgttgccactaagaaagccaagacagatgaccaggaggtggatcagccagcaaagaagctcagaaagtgcaaggctcttcacgaggacgaggatgacgatggtgaccaggaagacgaggatgagaagaacgagttggatgacgacatgtag

SEQ ID NO: 19665 - protein, 212 aa, Zea mays
MAGGKSTGNAARSRKRVEATVLKRSRDGSAFTRCEACNKDVPVVLIDMHSCSLDEKIRMTLEAQVVEKTVEVASADRKKSSAKGGGNKDAKRKRSPTAFFLFMDDFRKEFKATHPDNKSVATVAKEGGERWKSMTDEEKKPYIEKAAELKAEAENGEGSGENNVATKKAKTDDQEVDQPAKKLRKCKALHEDEDDDGDQEDEDEKNELDDDM

SEQ ID NO: 19666 - DNA, 22 bp, Artificial sequence
  primer
atgaaaggcggcgaatccaaag

SEQ ID NO: 19667 - DNA, 21 bp, Artificial sequence
  primer
tcaatcgtcgtcttctgcctc

SEQ ID NO: 19668 - protein, 111 aa, Artificial sequence
  consensus sequence
  Variant (5)..(6): Xaa in position 5 to 6 is any amino acid
  Variant (10)..(10): Xaa in position 10 is any amino acid
  Variant (12)..(14): Xaa in position 12 to 14 is any amino acid
  Variant (17)..(21): Xaa in position 17 to 21 is any amino acid
  Variant (22)..(23): Xaa in position 22 to 23 is any or no amino acid
  Variant (25)..(25): Xaa in position 25 is any amino acid
  Variant (26)..(26): Xaa in position 26 is any or no amino acid
  Variant (28)..(28): Xaa in position 28 is any amino acid
  Variant (30)..(31): Xaa in position 30 to 31 is any amino acid
  Variant (32)..(32): Xaa in position 32 is any or no amino acid
  Variant (34)..(34): Xaa in position 34 is any amino acid
  Variant (37)..(37): Xaa in position 37 is any amino acid
  Variant (39)..(40): Xaa in position 39 to 40 is any amino acid
  Variant (42)..(48): Xaa in position 42 to 48 is any amino acid
  Variant (50)..(50): Xaa in position 50 is any amino acid
  Variant (53)..(54): Xaa in position 53 to 54 is any amino acid
  Variant (55)..(55): Xaa in position 55 is any or no amino acid
  Variant (57)..(57): Xaa in position 57 is any amino acid
  Variant (58)..(59): Xaa in position 58 to 59 is any or no amino acid
  Variant (61)..(61): Xaa in position 61 is any amino acid
  Variant (64)..(64): Xaa in position 64 is any amino acid
  Variant (66)..(81): Xaa in position 66 to 81 is any amino acid
  Variant (82)..(110): Xaa in position 82 to 110 is any or no amino acid
PKRPXXAFFXFXXXFRXXXXXXXPXXKXVXXXVXKAXGXXWXXXXXXXKXPYXXXAXXXKXEYXKXXXXXXXXXXXXXXXXXXXXXXXXXXXXXXXXXXXXXXXXXXXXXE

SEQ ID NO: 19669 - protein, 26 aa, Artificial sequence
  protein pattern
  Variant (3)..(3): Xaa in position 3 is any or no amino acid
  Variant (5)..(5): Xaa in position 5 is any amino acid
  Variant (6)..(6): Xaa in position 6 is any or no amino acid
  Variant (10)..(10): Xaa in position 10 is Ala, Leu or Val
  Variant (12)..(12): Xaa in position 12 is Leu or Met
  Variant (13)..(13): Xaa in position 13 is Ala, Asp, Glu, Gly or Ser
  Variant (14)..(14): Xaa in position 14 is Asp, Glu, Gly or Gln
  Variant (17)..(18): Xaa in position 17 to 18 is any amino acid
  Variant (19)..(19): Xaa in position 19 is Phe or Tyr
  Variant (20)..(23): Xaa in position 20 to 23 is any amino acid
  Variant (25)..(25): Xaa in position 25 is any amino acid
  Variant (26)..(26): Xaa in position 26 is Asn, Ser or Val
KRXPXXAFFXFXXXFRXXXXXXXPXX

SEQ ID NO: 19670 - protein, 34 aa, Artificial sequence
  protein pattern
  Variant (2)..(2): Xaa in position 2 is any amino acid
  Variant (3)..(3): Xaa in position 3 is any or no amino acid
  Variant (5)..(5): Xaa in position 5 is any amino acid
  Variant (6)..(6): Xaa in position 6 is any or no amino acid
  Variant (8)..(8): Xaa in position 8 is Ala or Glu
  Variant (9)..(9): Xaa in position 9 is Ala or Gly
  Variant (11)..(12): Xaa in position 11 to 12 is any amino acid
  Variant (14)..(14): Xaa in position 14 is Lys or Arg
  Variant (15)..(15): Xaa in position 15 is any amino acid
  Variant (16)..(16): Xaa in position 16 is Leu or Met
  Variant (17)..(17): Xaa in position 17 is Ser or Thr
  Variant (18)..(18): Xaa in position 18 is Ala, Asp, Glu, Gln or Ser
  Variant (19)..(19): Xaa in position 19 is Ala, Asp, Glu, Gln, Ser or Thr
  Variant (20)..(20): Xaa in position 20 is Asp or Glu
  Variant (22)..(22): Xaa in position 22 is any amino acid
  Variant (24)..(24): Xaa in position 24 is Phe or Tyr
  Variant (25)..(25): Xaa in position 25 is any amino acid
  Variant (26)..(26): Xaa in position 26 is Ala, Asp, Glu, Asn, Ser or Thr
  Variant (27)..(27): Xaa in position 27 is any amino acid
  Variant (28)..(28): Xaa in position 28 is Ala, Ser or Val
  Variant (29)..(29): Xaa in position 29 is Ala, Asp, Glu, Gly or Asn
  Variant (30)..(31): Xaa in position 30 to 31 is any amino acid
  Variant (33)..(33): Xaa in position 33 is any amino acid
  Variant (34)..(34): Xaa in position 34 is Asp or Glu
VXXVXXKXXGXXWXXXXXXXKXPXXXXXXXXKXX

SEQ ID NO: 19671 - DNA, 1170 bp, Arabidopsis thaliana
  CDS (1)..(1170)
atggagttaggaaaatcaattgagaaccaaaacaacgtcgtggcaagactagcaaagaaagtcattgaaacagatgtcgccaatggctccaatgttgtcttttcaccgatgtcaatcaacgttttgctcagcctcatcgccgctggttctaatcccgtcaccaaagaagaaatcctctcattcctcatgtcaccgtctacggatcaccttaacgcggtcttggccaagatcgcggacggcggcaccgagagaagtgatttgtgcttatctacggctcacggtgtctggatcgacaagtcttcttatttgaagccttcctttaaagagcttttggagaattcctacaaggcttcttgtagtcaagttgacttcgcaaccaagcctgttgaagtgattgatgaggtaaatatatgggctgacgtccacacaaatggactcatcaagcagattctttcacgcgattgtaccgatactatcaaggagatccgtaatagcacacttattctagcaaatgcagtgtacttcaaagcagcatggagtagaaaatttgatgcaaaactaacaaaagataacgattttcatcttcttgacggtaacacggtaaaagtccccttcatgatgagttataaggaccaatatctaagaggctatgatggtttccaagttttgcgcctaccttatgtagaggataaacgtcatttctccatgtacatttatcttcctaatgacaaagacggactagctgctctgcttgagaaaataagcactgaaccaggatttcttgatagccatattccacttcaccgtacaccagtcgatgctttgagaattccgaagttgaacttctcttttgagtttaaagcttcagaagttttgaaagacatggggcttacttctccatttacttccaaaggtaatttaactgagatggttgattcgccttcgaacggtgataaactgcacgtctcaagcattattcataaagcttgcattgaggtggatgaagagggaaccgaagctgcagcggtctctgttgccatcatgatgccccaatgtttgatgcggaacccggattttgtagctgaccatccatttctgttcactgtgagagaagacaatagtggagtaattttgttcattggtcaagttcttgatccttctaaacattga

SEQ ID NO: 19672 - protein, 389 aa, Arabidopsis thaliana
MELGKSIENQNNVVARLAKKVIETDVANGSNVVFSPMSINVLLSLIAAGSNPVTKEEILSFLMSPSTDHLNAVLAKIADGGTERSDLCLSTAHGVWIDKSSYLKPSFKELLENSYKASCSQVDFATKPVEVIDEVNIWADVHTNGLIKQILSRDCTDTIKEIRNSTLILANAVYFKAAWSRKFDAKLTKDNDFHLLDGNTVKVPFMMSYKDQYLRGYDGFQVLRLPYVEDKRHFSMYIYLPNDKDGLAALLEKISTEPGFLDSHIPLHRTPVDALRIPKLNFSFEFKASEVLKDMGLTSPFTSKGNLTEMVDSPSNGDKLHVSSIIHKACIEVDEEGTEAAAVSVAIMMPQCLMRNPDFVADHPFLFTVREDNSGVILFIGQVLDPSKH

SEQ ID NO: 19673 - DNA, 1955 bp, Glycine max
  CDS (142)..(1311)
acggctgcgagaagacgacagaagggggtgaaatgaaatgtcaaagtggaggcgccacacggacacggttgtcctcctgatagttatattaataagttgagcgtcttcggagactgacttaattcaaaaatccaaacaacaatggacctccgtgaatcgataagcaaccaaaccgacgtcgctctgagcatcacaaagctcctgttgtcgaaagaagctcgggacagtaacctcgtgtactcgccgctgtcgttgcacgttgttctgagcatcatcgcttctggctccaagggccccacactcgatcagcttctctccttcctccgatccaaatccaccgatcatctcaactccttcgcctctcagctcgtcgccgtcgtgctctccgacgccgctcccgccggcgggcctcgcctctccttcgccgacggcgtgtgggttgagcaatccctctctcttcacccttccttcaaacaacttgtcagtgctcaatacaaggccactttggcttcagttgatttccagaccaaggctgttgaagtgacaaatgaagttaattcatgggctgaaaaggagacaaatggacttgttaaagaccttcttcctcctggatcagttgacaattcaaccagacttatctttgcaaatgcactgtacttcaaaggagcatggaatgagaagtttgattcttcgataacaaaagactatgattttcaccttcttgatggccgttcaatcagggttcccttcatgacgagcaggaagaatcagtttattagggcttttgatggtttcaaagtccttggtcttccctacaagcaaggtgaagataagcgccaattcaccatgtactttttccttccagaaacaaaagatgggctgttagctttggctgagaagttggcttctgaatctgggttcttggaacgcaagcttcctaataacaaattggaagtaggagacttcaggatcccaagattcaaaatttcttttgggtttgaagcctctaatgtgctgaaggagctgggagtggttttgcctttctccgttggaggtttgacagaaatggtggactctgctgtgggtcaaaacttgtttgtttccgatatatttcataagtcttttatagaagtaaatgaagaaggcactgaagctgcagcggccaccgctgcaactatacaatttgggtgtgcgatgtttccaactgaaatagactttgtagctgaccaccctttcttgttcctgatcagagaagatttaactggaacagtactctttatcggacaggtgttgaatcctcaggctgaataatattaacattggtagcaaaacttatgctcctattctgttgtcttgatttacctatggttggatgatccaaaatttctggcagtttcacatgtggcttaagaaggtaaaaaggtacatatggatcaccgttttaagttttgaacacttacgagtatggcgttgtctaactaatttcgtcttccaagggtgatatgcgaatagccaaatatcatagtgcgatgctggtactaaaaataatgtgtgatttgtaatcaggaaattttctacaatttgttaatgcatttcagggattttctcttatctctccttgattgaattggatcctctacagagtttggaattcaaccgcgcctcatacagttctaatctaacggttattggttgacgccaacatatttaaccgttttatattagctaacaatttaaccgttttatacatttgttgacgctaatgaactgttgtgagttatttagccccgagtgtaatagccgtgtgtgattcgcaaataaccaaatgttaatgctatagtaggatagtagaagagtagtaaaaagttgatgatatgtgatttgaaatctggaaattttctataatttgttaatgcatttcagttttcagggattttctcttgaaaaaaaagaaa

SEQ ID NO: 19674 - protein, 389 aa, Glycine max
MDLRESISNQTDVALSITKLLLSKEARDSNLVYSPLSLHVVLSIIASGSKGPTLDQLLSFLRSKSTDHLNSFASQLVAVVLSDAAPAGGPRLSFADGVWVEQSLSLHPSFKQLVSAQYKATLASVDFQTKAVEVTNEVNSWAEKETNGLVKDLLPPGSVDNSTRLIFANALYFKGAWNEKFDSSITKDYDFHLLDGRSIRVPFMTSRKNQFIRAFDGFKVLGLPYKQGEDKRQFTMYFFLPETKDGLLALAEKLASESGFLERKLPNNKLEVGDFRIPRFKISFGFEASNVLKELGVVLPFSVGGLTEMVDSAVGQNLFVSDIFHKSFIEVNEEGTEAAAATAATIQFGCAMFPTEIDFVADHPFLFLIREDLTGTVLFIGQVLNPQAE

SEQ ID NO: 19675 - DNA, 1451 bp, Arabidopsis thaliana
  CDS (44)..(1219)
gaaattcgtttaccagtcatcaccaccacaacctccggcgaaaatggacgtgcgtgaatcaatctcactgcaaaaccaagtctccatgaatctcgcaaaacacgtaatcaccaccgtctctcaaaactccaacgtcatcttctcaccggcttcaatcaacgtcgtactcagtataatcgccgctggatccgccggcgctaccaaagatcagatcctctcgtttctcaaattctcttccactgatcaacttaattcattctcttccgaaatcgtctccgctgttctcgctgacggtagtgctaacggtggtcctaagctctcggtggctaatggcgcctggatcgataagtctctctcctttaaaccttcctttaaacagctcttggaagattcgtataaagctgcttcgaatcaagctgattttcaatcgaaggctgtggaggtgattgctgaagtgaattcatgggctgaaaaggagacaaatggtctcatcactgaggttcttccagaaggatcagctgatagtatgaccaaactgatatttgcaaatgcattgtacttcaagggaacatggaacgagaaattcgatgagtcgttaacacaagaaggcgagtttcaccttcttgacggtaacaaagtgactgcaccattcatgaccagcaagaagaaacaatacgtaagtgcttacgatggtttcaaagttttgggacttccttacgtacaaggacaggataagcgacaattctccatgtacttttatcttcccgatgcaaacaacggactgtctgatcttctggacaaaatagtttccactcctgggttcttagacaaccacatcccacgcagacaagttaaagtccgcgaattcaagattccaaagtttaaattctctttcgggttcgatgcttcaaatgttttaaaaggattgggactgacttcgcctttcagcggtgaagaaggtttaactgagatggttgaatctcctgagatggggaagaatctatgcgtatcgaacattttccataaagcgtgtatcgaagtgaatgaagaaggaacagaagctgcagctgcatcagctggagttataaagctaagaggattgcttatggaggaagatgaaatagattttgttgcagaccatccgtttctattggtggtcacagagaacataacaggagtggttctgttcattggccaagttgttgatccgttgcattaatctaaagctaatgtggaagtttttggttttacttaaaataaatgagtcattggttttgaggactcatctttatgtaacatcctttgtcttgactctttgatgtgtgtaagaataatagtgatacataacagcttttcttctgtatttgggtcacatgtactgaactgatagacatacatacatgtgatgcatcttaatgattcactgtattgggtcattcatggttacatac

SEQ ID NO: 19676 - protein, 391 aa, Arabidopsis thaliana
MDVRESISLQNQVSMNLAKHVITTVSQNSNVIFSPASINVVLSIIAAGSAGATKDQILSFLKFSSTDQLNSFSSEIVSAVLADGSANGGPKLSVANGAWIDKSLSFKPSFKQLLEDSYKAASNQADFQSKAVEVIAEVNSWAEKETNGLITEVLPEGSADSMTKLIFANALYFKGTWNEKFDESLTQEGEFHLLDGNKVTAPFMTSKKKQYVSAYDGFKVLGLPYVQGQDKRQFSMYFYLPDANNGLSDLLDKIVSTPGFLDNHIPRRQVKVREFKIPKFKFSFGFDASNVLKGLGLTSPFSGEEGLTEMVESPEMGKNLCVSNIFHKACIEVNEEGTEAAAASAGVIKLRGLLMEEDEIDFVADHPFLLVVTENITGVVLFIGQVVDPLH

SEQ ID NO: 19677 - DNA, 1236 bp, Oryza sativa (japonica cultivar-group)
  CDS (1)..(1236)
atggagctcgcggaggccgtccgggacgagacagccatggccatgcgcctgctcggccacctcgcgcgcgccccacgcggcggcggcggcgacaaaaacctggccgtctccccgctctcgctccacgcggcgctggcgctcctcggcgcgggggcccgcggcgaaacgctcgaccagatcatcgccttcctcggccccgcgggtggccccgcccacgcggcgctcgcgtcccacgtcgcgctgtgctccctcgccgacgacagcggccccggcgatgaccgcggcgggcccaaggtgcggttcgccaacggcgtctgggtcgacgccgcgctccgcctcaaggccgcgtacgcgcgcgtcgtcgccgacaagtaccgcgcggaggcgcgcccggtgtccttccgagacaagctagaggaagcgaggcgagagatcaacgagtggttcgagagcgcgacggccggccggatcaaggacttcctgcccaaagacgccgtggaccgcgcgacgccggccgtcctcggcaacgcgctctacttcaagggcgactgggaaagcaagttcgacgcccggtccacgagcgacgacgtcttctacctccccgacggcggccatgtctccgcgccgttcatgtcgagcggcaagtggcagtacatcgcctgccgcgccggctacaaggtcctcaggctcccgtacgcgcgcggcggccgcggccgcggccgcgacaccggccgcctcttctcgatgtacatctacctccccgacgagcgccacggcctgcctgacatgctgcgcaagctgtgctccgacccggcggcgctgatcgagagctccgccgccctgacggagaaggtccccgtgggcgccttcatggtgccgaggttcaccctgtcgtacaagacgaacgcggcggagacgctgcgacagctcgggctgcgcctgccgttcgagtaccccggcgccgacctgtcggagatggtggagtcatcgccggaggcggagaagatcgtcgtgtcggccgtctaccacgagtccttcgtcgaggtgaacgaggaaggcaccgaggcggcggcggcgaccgccgtcgtcatgacccttggctgcgcggcgccatcggcgccggttcacgtcgtggacttcgtcgccgaccaccccttcatgttcctgatcaaggaggacctcaccggcgtggtggtcttcgccgggcaagtcaccaatccttcgtcctcgacctag

SEQ ID NO: 19678 - protein, 411 aa, Oryza sativa (japonica cultivar-group)
MELAEAVRDETAMAMRLLGHLARAPRGGGGDKNLAVSPLSLHAALALLGAGARGETLDQIIAFLGPAGGPAHAALASHVALCSLADDSGPGDDRGGPKVRFANGVWVDAALRLKAAYARVVADKYRAEARPVSFRDKLEEARREINEWFESATAGRIKDFLPKDAVDRATPAVLGNALYFKGDWESKFDARSTSDDVFYLPDGGHVSAPFMSSGKWQYIACRAGYKVLRLPYARGGRGRGRDTGRLFSMYIYLPDERHGLPDMLRKLCSDPAALIESSAALTEKVPVGAFMVPRFTLSYKTNAAETLRQLGLRLPFEYPGADLSEMVESSPEAEKIVVSAVYHESFVEVNEEGTEAAAATAVVMTLGCAAPSAPVHVVDFVADHPFMFLIKEDLTGVVVFAGQVTNPSSST

SEQ ID NO: 19679 - DNA, 1218 bp, Oryza sativa (japonica cultivar-group)
  CDS (1)..(1218)
atggacgccactgccaccgacctccgcgtctccatagctcaccaaacccgcttcgcgttccgcctcgccgccgcgctctcctccccgcgggcgcacccggcggcaggcggcgccgccggcgccggcgggagcaacgtggccttctccccgctctccctccacgtcgcgctcagcctcgtcgcggccggcgcgggcggcgccacgcgcgatcagctcgtctccctcctcggtgtcccaggacgagggacggctgaggggctgcacgcgttcgccgagcaggtggtgcagctcgtgctcgccgactcgtctcccgccggcggccctcgcgtcgccttcgccgacggcgtcttcatcgactcgtcgctgtcgctcatgaaaagcttcaaggacgttgccgtgggcaagtacaaggctgagacccactcggtcgacttccaaactaaggccgctgaagttgctagtcaggtgaactcatgggtagacagagtcacatcaggcctcatcaaagaaatactccctccaggatctgttgaccatactaccaggctggttctgggtaatgccctttatttcaaaggagcatggactgagaagtttgatgcatctaaaaccaaagatggcgaatttcgtcttcttgatggcaagtcggttctagcaccattcatgtccacttcaaagaagcaatatctttcgtcttacgacagcttaaaggtactgaagctcccataccagaaaggcagggacctgaggcagttctccatgtacatacttcttccggaagcacaggatggcctctggagcttggctgcgaagctgaactctgaaccagagttcctggagaagcgtatcccgacgcggcaagttactgtcggcaagttcaagctccccaagttcaagatatcgtttggatttgaagcgtctgatttgctcaaaattttggggctccaactgccattcagttcgaaggctgatcttactgggatggtgggttctccagagagacataacctgttcgtttcatcccttttccacaagtcgttcgtccaggtggatgaggaaggcaccgaggctgctgctgcatctgcagcagtggtcagttttaggtcagctccagtaaccgtggacttcgttgcggatcatccgttcctgttcttgatcagggaggacatgacaggtgtggtgctgttcatcggccatgtggtgaatccacttctgtga

SEQ ID NO: 19680 - protein, 405 aa, Oryza sativa (japonica cultivar-group)
MDATATDLRVSIAHQTRFAFRLAAALSSPRAHPAAGGAAGAGGSNVAFSPLSLHVALSLVAAGAGGATRDQLVSLLGVPGRGTAEGLHAFAEQVVQLVLADSSPAGGPRVAFADGVFIDSSLSLMKSFKDVAVGKYKAETHSVDFQTKAAEVASQVNSWVDRVTSGLIKEILPPGSVDHTTRLVLGNALYFKGAWTEKFDASKTKDGEFRLLDGKSVLAPFMSTSKKQYLSSYDSLKVLKLPYQKGRDLRQFSMYILLPEAQDGLWSLAAKLNSEPEFLEKRIPTRQVTVGKFKLPKFKISFGFEASDLLKILGLQLPFSSKADLTGMVGSPERHNLFVSSLFHKSFVQVDEEGTEAAAASAAVVSFRSAPVTVDFVADHPFLFLIREDMTGVVLFIGHVVNPLL

SEQ ID NO: 19681 - DNA, 1206 bp, Oryza sativa (japonica cultivar-group)
  CDS (1)..(1206)
atggagcaggaagctgccgtgagagaccaggtggagctcaccatgcgcctcctccaccacctcctcctcgacgacaagcacggcaccaccaccaacctcgccttctcgccgctgtcgctccacgccgccctcaccctcctcgcctccggcgcggctggcgccacccgcgagcagatcgtcgccttcctcggcccagccggcgcagacgcccacacggcgctcgcgaggcttccgtcggcgtccagcaatcccgaggtccgctccgccatggccgtctgggtcgacgcctctctccgcctcaaccccgccttcgccgacaccgccgcctccgtgttcaaggctgccgtgcggtcagccggcaaccccgcggcagcgagggccgagatcaacgagtggttcagtagccagaccggcggcttcgtcaaggacatcctctccaactccatcgacgacgacgacgacggcagcggcggcggcggcggcgccatctccgcctcggtcttcctcgccaactcactctacttcaacgcctactgggaccaccccttcttcccgcacctcacggaggaaggcgacttccacgtctcgccggaccacgacgtccgcgtgccattcatggcggggagccaccagcacgccttcatggacgtcggctgccacccgggcttcaacgtcctgcgcatgatgtaccgcacgggcggcgccgccggcggggacaagatgttcgcgatgtacatctacctccccgacgaccgcgacggcctcccggagctcgcgcgcaagctcgcctccaacccggccgcgttcctgcgcaggacgatcgtgccggcgcagcctgttgcggtcggcgagctcaagatccccaaattcgaggtgtcgctcaaggtggaggcgtcgcgtctcctccgggaattcggcctcgacctgccattcctccccgccgccgacaactcgttctcggggatgctgctggacccgcctcaggggacagccgtctcgtcccttctccaccagtgcttcgtcaatgtgaatgaggaagggaccgtggctgctgcgggcaccgtcggggagatcatgggcttcgccatgccggacgatcaaatcgtcgatttcgtcgccgatcaccccttccttttcttcatcgtggaggaggtgagtggcctcgtggtgttcgccggtcaagtcgtcaacccattgctccattga

SEQ ID NO: 19682 - protein, 401 aa, Oryza sativa (japonica cultivar-group)
MEQEAAVRDQVELTMRLLHHLLLDDKHGTTTNLAFSPLSLHAALTLLASGAAGATREQIVAFLGPAGADAHTALARLPSASSNPEVRSAMAVWVDASLRLNPAFADTAASVFKAAVRSAGNPAAARAEINEWFSSQTGGFVKDILSNSIDDDDDGSGGGGGAISASVFLANSLYFNAYWDHPFFPHLTEEGDFHVSPDHDVRVPFMAGSHQHAFMDVGCHPGFNVLRMMYRTGGAAGGDKMFAMYIYLPDDRDGLPELARKLASNPAAFLRRTIVPAQPVAVGELKIPKFEVSLKVEASRLLREFGLDLPFLPAADNSFSGMLLDPPQGTAVSSLLHQCFVNVNEEGTVAAAGTVGEIMGFAMPDDQIVDFVADHPFLFFIVEEVSGLVVFAGQVVNPLLH

SEQ ID NO: 19683 - DNA, 1176 bp, Arabidopsis thaliana
  CDS (1)..(1176)
atggacgtgcgtgaatcaatctcactgcaaaaccaagtctccatgaatctcgcaaaacacgtaatcaccaccgtctctcaaaactccaacgtcatcttctcaccggcttcaatcaacgtcgtactcagtataatcgccgctggatccgccggcgctaccaaagatcagatcctctcgtttctcaaattctcttccactgatcaacttaattcattctcttccgaaatcgtctccgctgttctcgctgacggtagtgctaacggtggtcctaagctctcggtggctaatggcgcctggatcgataagtctctctcctttaaaccttcctttaaacagctcttggaagattcgtataaagctgcttcgaatcaagctgattttcaatcgaaggctgtggaggtgattgctgaagtgaattcatgggctgaaaaggagacaaatggtctcatcactgaggttcttccagaaggatcagctgatagtatgaccaaactgatatttgcaaatgcattgtacttcaagggaacatggaacgagaaattcgatgagtcgttaacacaagaaggcgagtttcaccttcttgacggtaacaaagtgactgcaccattcatgaccagcaagaagaaacaatacgtaagtgcttacgatggtttcaaagttttgggacttccttacttacaaggacaggataagcgacaattctccatgtacttttatcttcccgatgcaaacaacggactgtctgatcttctggacaaaatagtttccactcctgggttcttagacaaccacatcccacgcagacaagttaaagtccgcgaattcaagattccaaagtttaaattctctttcgggttcgatgcttcaaatgttttaaaaggattgggactgacttcgcctttcagcggtgaagaaggtttaactgagatggttgaatctcctgagatggggaagaatctatgcgtatcgaacattttccataaagcgtgtatcgaagtgaatgaagaaggaacagaagctgcagctgcatcagctggagttataaagctaagaggattgcttatggaggaagatgaaatagattttgttgcagaccatccgtttctattggtggtcacagagaacataacaggagtggttctgttcattggccaagttgttgatccgttgcattaa

SEQ ID NO: 19684 - protein, 391 aa, Arabidopsis thaliana
MDVRESISLQNQVSMNLAKHVITTVSQNSNVIFSPASINVVLSIIAAGSAGATKDQILSFLKFSSTDQLNSFSSEIVSAVLADGSANGGPKLSVANGAWIDKSLSFKPSFKQLLEDSYKAASNQADFQSKAVEVIAEVNSWAEKETNGLITEVLPEGSADSMTKLIFANALYFKGTWNEKFDESLTQEGEFHLLDGNKVTAPFMTSKKKQYVSAYDGFKVLGLPYLQGQDKRQFSMYFYLPDANNGLSDLLDKIVSTPGFLDNHIPRRQVKVREFKIPKFKFSFGFDASNVLKGLGLTSPFSGEEGLTEMVESPEMGKNLCVSNIFHKACIEVNEEGTEAAAASAGVIKLRGLLMEEDEIDFVADHPFLLVVTENITGVVLFIGQVVDPLH

SEQ ID NO: 19685 - DNA, 1302 bp, Arabidopsis thaliana
  CDS (1)..(1302)
atggagccaaaagagaagaaacaaaagcttgacacatcagaagtcgcaagtccctctctctcaaagacgcatctaaagaagaagaaaacgaagaagcaaaaaatcagaaaatcacaagaaatcacaagtccctctctgtcaaagaatacagatttggtaatcgcaagtccttctctatcaaatattgatgtgggagaagcaatgaagaagcaaaacgatgtcgctatattccttacggggatagtaatctcttccgtagccaaaaactctaattttgtcttctctcctgcatcaatcaacgccgcactcaccatggttgctgctagttccggtggtgaacaaggtgaagaactaagatccttcatcctctccttcctcaagtcatcctcaactgatgaacttaacgcaattttccgcgaaatcgcttccgtcgttcttgttgacggaagcaaaaaaggcggccccaaaatcgcggtggttaatggaatgtggatggatcagtcgctatctgtcaatcccttgtcgaaagatctctttaagaatttcttcagtgctgctttcgctcaagttgatttcagatccaaggccgaagaagtgcgtacggaggtgaatgcgtgggcatcaagtcacacaaatggtctcatcaaagatcttcttcctcgtggatcagttacaagcctaaccgacagggtttatggaagcgcattgtacttcaaaggaacctgggaggaaaaatactcaaagtcaatgacgaaatgcaaacctttttaccttctcaatggaacatcagtgtctgtgccattcatgagtagctttgagaaacaatacattgcggcttatgatggttttaaggtactcagacttccttatcgacaaggccgtgacaataccaaccgcaactttgcaatgtatatctatctcccggacaagaaaggtgaattggatgatcttttggaaagaatgacatctactcctggattcttggatagtcacaatccagaaagaagagttaaagttggtaaattcagaattccaaagtttaagatcgaattcgggtttgaagcttcaagtgctttcagtgactttgagcttgatgtgtcattttaccaaaaaactttgattgaaatcgatgaaaaaggtaccgaagctgttacttttactgcatttcgttctgcataccttggttgcgctttggtgaagcctattgattttgtagcagatcatccatttcttttcttgattagagaagaacaaaccggaactgttttgttcgctggtcaaatcttcgatccttctgcttag

SEQ ID NO: 19686 - protein, 433 aa, Arabidopsis thaliana
MEPKEKKQKLDTSEVASPSLSKTHLKKKKTKKQKIRKSQEITSPSLSKNTDLVIASPSLSNIDVGEAMKKQNDVAIFLTGIVISSVAKNSNFVFSPASINAALTMVAASSGGEQGEELRSFILSFLKSSSTDELNAIFREIASVVLVDGSKKGGPKIAVVNGMWMDQSLSVNPLSKDLFKNFFSAAFAQVDFRSKAEEVRTEVNAWASSHTNGLIKDLLPRGSVTSLTDRVYGSALYFKGTWEEKYSKSMTKCKPFYLLNGTSVSVPFMSSFEKQYIAAYDGFKVLRLPYRQGRDNTNRNFAMYIYLPDKKGELDDLLERMTSTPGFLDSHNPERRVKVGKFRIPKFKIEFGFEASSAFSDFELDVSFYQKTLIEIDEKGTEAVTFTAFRSAYLGCALVKPIDFVADHPFLFLIREEQTGTVLFAGQIFDPSA

SEQ ID NO: 19687 - DNA, 1158 bp, Arabidopsis thaliana
  CDS (1)..(1158)
atggatgtaagagaagctatgaagaaccaaacccacgttgccatgatcctttccgggcacgtcttatcttccgcgcccaaagactctaacgtcatcttctcaccggcgtcaataaactctgcgatcacgatgcacgccgctggtcccggaggtgatttagtctccggccaaatcctctccttcctaagatcatcttcaattgatgagctcaaaaccgtgttccgagaactagcctccgtcgtctatgccgacagaagcgccaccggcggcccaaagataacggcggcgaatggcctttggattgataaatcacttccgactgatcccaagttcaaggacctcttcgagaacttctttaaggctgtttatgttccagtagatttccgatcagaggctgaagaagtgcgtaaggaggtgaattcatgggttgaacatcacaccaataatctgatcaaggatcttcttcctgatggatccgtgacaagcctaaccaacaagatttacgcaaacgcattgtctttcaagggagcttggaaaagaccatttgaaaagtactatacaagagataatgacttctaccttgtcaatggcacatcagtctctgtgccattcatgtccagctatgagaaccaatacgtaagagcttatgacggtttcaaggtcctcaggcttccttaccaacgaggcagtgatgataccaatcgtaaattctcaatgtatttctatctcccagacaagaaagatggattggatgatctcttggagaaaatggcatctacacctggattcttggatagtcacattccgacatatagagatgaacttgagaaatttagaattccaaagtttaagatcgaattcggtttttctgttacaagcgttttggatcgattgggattgcgttcaatgtcaatgtaccataaagcttgtgtcgagattgatgaagaaggtgctgaagctgcggctgctactgctgatggagattgtggttgttctcttgattttgtggagcctcctaagaagatagattttgtggccgatcatccatttcttttcttgattcgagaagaaaaaactggaaccgttttgttcgttggtcagatctttgatccttcgggaccttgttcgggatctaattcggactcagatgactattaa

SEQ ID NO: 19688 - protein, 385 aa, Arabidopsis thaliana
MDVREAMKNQTHVAMILSGHVLSSAPKDSNVIFSPASINSAITMHAAGPGGDLVSGQILSFLRSSSIDELKTVFRELASVVYADRSATGGPKITAANGLWIDKSLPTDPKFKDLFENFFKAVYVPVDFRSEAEEVRKEVNSWVEHHTNNLIKDLLPDGSVTSLTNKIYANALSFKGAWKRPFEKYYTRDNDFYLVNGTSVSVPFMSSYENQYVRAYDGFKVLRLPYQRGSDDTNRKFSMYFYLPDKKDGLDDLLEKMASTPGFLDSHIPTYRDELEKFRIPKFKIEFGFSVTSVLDRLGLRSMSMYHKACVEIDEEGAEAAAATADGDCGCSLDFVEPPKKIDFVADHPFLFLIREEKTGTVLFVGQIFDPSGPCSGSNSDSDDY

SEQ ID NO: 19689 - DNA, 1125 bp, Arabidopsis thaliana
  CDS (1)..(1125)
atggacctggaagaatcaatagagaagcaatataaggccatgatggacctgaaagaatcagtagggaatcaaaacgacattgttctgaggttgacagcaccgttaatcaacgtcatcctcagtattatcgccgccagttctcccggagacacagacaccgcagacaagattgtctctttacttcaggcttcttcaaccgataagcttcacgctgtatcctccgagatcgtcaccaccgtcctcgccgacagcaccgcgagtggcggcccgacgatatcggcagcgaatggcttgtggatcgaaaagactctcaatgtggaaccttctttcaaggatctcttgctgaattcgtacaaagctgctttcaatcgagttgactttcgcaccaaggctgatgaagtgaatagagaggtgaattcatgggttgaaaagcagacaaatggactcatcactaatcttcttccatcaaaccctaaatctgctcctttgactgatcacatatttgctaatgccttgttcttcaacggaagatgggatagtcaattcgatccatctctaacaaaagattccgactttcaccttcttgatggaaccaaagtacgtgtgcccttcatgactggtgcctcctgcagatacacacatgtttacgaaggtttcaaagtcatcaatctacagtacagaagaggacgcgaagacagtcgtagtttctcaatgcaaatctatctccctgatgagaaagatgggttgccttcaatgttggagagattagcttctactcgtggattcttgaaggacaacgaggtccttcctagccactcggcggttatcaaagaactcaagattccaaggtttaaatttgattttgctttcgaagcctcggaagctctcaagggttttggtttggtggtgccattgtccatgatcatgcacaagtcttgtatcgaggtcgatgaagtgggatcgaaagctgcagctgctgccgcattcagaggaattggttgtcgacgtcctccgccagagaagcatgacttcgtggctgatcatccttttctcttcatcgtcaaagagtacagaagcggacttgttttgttccttggtcaagtcatggatccttctaagcattaa

SEQ ID NO: 19690 - protein, 374 aa, Arabidopsis thaliana
MDLEESIEKQYKAMMDLKESVGNQNDIVLRLTAPLINVILSIIAASSPGDTDTADKIVSLLQASSTDKLHAVSSEIVTTVLADSTASGGPTISAANGLWIEKTLNVEPSFKDLLLNSYKAAFNRVDFRTKADEVNREVNSWVEKQTNGLITNLLPSNPKSAPLTDHIFANALFFNGRWDSQFDPSLTKDSDFHLLDGTKVRVPFMTGASCRYTHVYEGFKVINLQYRRGREDSRSFSMQIYLPDEKDGLPSMLERLASTRGFLKDNEVLPSHSAVIKELKIPRFKFDFAFEASEALKGFGLVVPLSMIMHKSCIEVDEVGSKAAAAAAFRGIGCRRPPPEKHDFVADHPFLFIVKEYRSGLVLFLGQVMDPSKH

SEQ ID NO: 19691 - DNA, 1182 bp, Arabidopsis thaliana
  CDS (1)..(1182)
atggagttgggaaaatcaatggagaatcaaaccgacgtcatggtattactagcaaagcatgtcatccctaccgttgccaacggctccaaccttgtcttctcaccaatgtcaatcaacgttttgctctgcctgattgccgctggttccaactgcgtcaccaaagaacaaatcttatcattcatcatgttaccctcatcggattacctcaacgcagtcttagcgaaaaccgtatctgttgccttaaatgatggaatggagagaagtgacttgcacttatctacggcttatggtgtatggattgacaaatctttatccttcaaaccttcctttaaagatcttttggagaactcctataacgctacttgtaatcaagttgacttcgcaaccaagcctgctgaagtgattaatgaagtgaatgcatgggctgaagtccacaccaatggactcatcaaagagattctttcagacgattctatcaagactatccgtgaaagtatgctaatacttgctaatgcagtgtacttcaaaggagcttggagcaaaaaatttgatgcaaagttaacaaaaagttacgattttcatcttcttgacggcaccatggtgaaagtccccttcatgaccaattacaagaagcaatacctagaatattatgatggtttcaaagttttgcgtcttccttatgtagaagatcaacgtcaattcgccatgtacatttatcttcctaatgatagagatggattacctactcttcttgaggaaataagctccaaaccccgatttcttgataaccatattccgcgccaacgtatattaacggaagctttcaagattccaaagtttaagttctctttcgagtttaaagcttcagatgttttgaaggaaatggggctgactttaccatttacacatggtagtctaaccgagatggttgagtcgccttccattcccgagaatctatgcgtcgctgagaatttgttcgtctcaaatgtttttcacaaagcttgcattgaggtggatgaagagggaactgaagctgcagccgtttctgttgccagcatgacaaaggacatgttgttgatgggagatttcgtagctgatcatccatttctattcacagtgagagaagagaagagtggagtgattttgttcatgggtcaagttcttgatccttcaatacattaa

SEQ ID NO: 19692 - protein, 393 aa, Arabidopsis thaliana
MELGKSMENQTDVMVLLAKHVIPTVANGSNLVFSPMSINVLLCLIAAGSNCVTKEQILSFIMLPSSDYLNAVLAKTVSVALNDGMERSDLHLSTAYGVWIDKSLSFKPSFKDLLENSYNATCNQVDFATKPAEVINEVNAWAEVHTNGLIKEILSDDSIKTIRESMLILANAVYFKGAWSKKFDAKLTKSYDFHLLDGTMVKVPFMTNYKKQYLEYYDGFKVLRLPYVEDQRQFAMYIYLPNDRDGLPTLLEEISSKPRFLDNHIPRQRILTEAFKIPKFKFSFEFKASDVLKEMGLTLPFTHGSLTEMVESPSIPENLCVAENLFVSNVFHKACIEVDEEGTEAAAVSVASMTKDMLLMGDFVADHPFLFTVREEKSGVILFMGQVLDPSIH

SEQ ID NO: 19693 - DNA, 1125 bp, Nostoc sp. PCC 7120
  CDS (1)..(1125): transl_table=11
gtgcctgatactaaaattgtcgatgctaataataagtttggctttaagctgttttcggaaattgccaaacaagatggtaacgccaaaaatatttctgtgtcgcccacgagtgtagcgatcgccctagctatgacctacaatggcgctagcggctctacgcaaaaagcaatggccaaaaccctagagttacagggtatcagtctaccagaactcaactctggttacgcttcattaaacaagctgctacaaaatcctggtgaaaatgtccaactgactatagctaactccctgtgggttaatcaggatgttagtttgcgtcccgattttgtgcaaaccacccgcgatttctatcaagctaaggtgaccaatttagactttcaaaatgtcacggctgtaaatacaattaattcctgggtacaggaaaataccaaaggtaaaattgacaaaattgtcgataatattgaaccaaatcaggcgctatttcttatcaacgccatatattttaatggcaaatggagtaacgccttcgacaaatctcaaacaacaccacagaccttttacactgcatctggtcagcagaaacaacacccgatgatgtcacaaacgggtgaatatagatattatgaaaccccacaatttcagtctgtaagtttaccttatggtcaagatggcaaggtgagtctgtatatctttttgcccacaaaaaactctaacctcaaagccttttctcaaaacttaaatgcagagaactgggaaaaatggatgcctcagtttagaaaccgtgaaggctctattcggttaccgcgctttcaaacagactatgatattaccctgaatgatgccctgaagtctttaggcatggcagaagcttttagtaataaagccaacttttctggtatcggcgacaatttaactattagccaagtgagacataaaactgtgattgaggtgaatgaagaaggtacagaagctagtgcagcaacttctgtaggcatggtagcgacatctttgagagagccacaacagccatttaaaatgattgttgaccgtccctttttctatgcaattcgtgataatcaaagcaaaaatatcttgtttatgggtgcggttgtagaaccaaattaa

SEQ ID NO: 19694 - protein, 374 aa, Nostoc sp. PCC 7120
MPDTKIVDANNKFGFKLFSEIAKQDGNAKNISVSPTSVAIALAMTYNGASGSTQKAMAKTLELQGISLPELNSGYASLNKLLQNPGENVQLTIANSLWVNQDVSLRPDFVQTTRDFYQAKVTNLDFQNVTAVNTINSWVQENTKGKIDKIVDNIEPNQALFLINAIYFNGKWSNAFDKSQTTPQTFYTASGQQKQHPMMSQTGEYRYYETPQFQSVSLPYGQDGKVSLYIFLPTKNSNLKAFSQNLNAENWEKWMPQFRNREGSIRLPRFQTDYDITLNDALKSLGMAEAFSNKANFSGIGDNLTISQVRHKTVIEVNEEGTEASAATSVGMVATSLREPQQPFKMIVDRPFFYAIRDNQSKNILFMGAVVEPN

SEQ ID NO: 19695 - DNA, 1431 bp, Drosophila melanogaster
  CDS (1)..(1431)
atggcgagcaaagtctcgatccttctcctgctaaccgtccatcttctggctgctcagaccttcgcccaggagctcatcgcttggcaacggcaacaacaacagcagcaacagcagcaactgcagctacagcagcaactgctgctgcagcagcaacaacaccaacgtaacccaagaccggagctgggcctccgttccctgcccggaaacccgtggacccagaacaatcaggaagccataagcgatgtggtggcggtggacctaaccaaacgtgagccggtcactccgccacccaatcgcccgccgcccgtcttcagctacatggaccgcttcagctccgagctcttcaaggagatcattaagtcgcaaagtcagcagaacgtggtgttctcgcccttctccgtccacgcgctgctggccctgatctacggggcctcggacggaaaaacgttccgggaactgcagaaggccggagagttcagcaagaacgccatggccgtggcccaggacttcgagagcgtgatcaagtacaagaagcatttggagggcgcagatctgaccctggcaaccaaggtctactacaaccgcgagctgggtggcgtcaaccacagctacgatgagtacgcaaagttctatttcagcgccggcacggaggctgtcgacatgcagaacgccaaagacacggcagccaagatcaacgcctgggtgatggacacgacgcggaacaagatccgggacctggtcacaccgaccgacgttgacccacagacgcaggcgctccttgtgaatgcagtctacttccagggtcgttgggagcacgaattcgccaccatggacacatcaccctacgactttcagcacaccaacggcagaatttccaaggtggccatgatgttcaacgacgatgtgtacggcctggccgagctgcctgagctgggcgccaccgccttggaactggcctacaaggacagcgccaccagcatgctaatcctgctgcccaatgagaccaccggactgggcaaaatgctgcagcagctgtcccggccggagttcgatctcaaccgcgttgcccaccgcctgcgccgccagtcggtcgctgtgcgcctgcccaagttccaattcgagttcgagcaggacatgaccgagccgctaaagaacctgggagtccaccagatgttcacgcccaactcgcaggtgaccaagttgatggatcagccggtgcgcgtgagcaagatcctgcagaaggcctacatcaatgtgggcgaggcgggcacagaggcctcggcagcttcctatgccaagttcgtacccctttcgctgcctcccaagcccacggagttcgtcgccaaccggccattcgtcttcgccgtccgcacacccgcctcagttctgttcataggtcacgtggagtatcccacgcccatgagcgtctaa

SEQ ID NO: 19696 - protein, 476 aa, Drosophila melanogaster
MASKVSILLLLTVHLLAAQTFAQELIAWQRQQQQQQQQQLQLQQQLLLQQQQHQRNPRPELGLRSLPGNPWTQNNQEAISDVVAVDLTKREPVTPPPNRPPPVFSYMDRFSSELFKEIIKSQSQQNVVFSPFSVHALLALIYGASDGKTFRELQKAGEFSKNAMAVAQDFESVIKYKKHLEGADLTLATKVYYNRELGGVNHSYDEYAKFYFSAGTEAVDMQNAKDTAAKINAWVMDTTRNKIRDLVTPTDVDPQTQALLVNAVYFQGRWEHEFATMDTSPYDFQHTNGRISKVAMMFNDDVYGLAELPELGATALELAYKDSATSMLILLPNETTGLGKMLQQLSRPEFDLNRVAHRLRRQSVAVRLPKFQFEFEQDMTEPLKNLGVHQMFTPNSQVTKLMDQPVRVSKILQKAYINVGEAGTEASAASYAKFVPLSLPPKPTEFVANRPFVFAVRTPASVLFIGHVEYPTPMSV

SEQ ID NO: 19697 - DNA, 1125 bp, Drosophila melanogaster
  CDS (1)..(1125)
atgttcgatttcaatttggaatttgcgcgtggaggtgcccgtttcaccagcgaactttttcagcttttgagcgctggcgggctcaaggagaacgtcgtcttctcgcccttctccatccaaacttgcattgccctggcctttgccggatcgcagggtgaaaccgccgacgagatcgccaaggcactgcacttcgtctccaactttccgccggaggtggcccaaacgttccagtttgtgctggagaagtaccgcaacagtaacctgctgcgcgttgccaacaagctgtacgtgcaggagggcaagcagctgaagcccgcctaccagtcggccatcaaggagcagtatcattcggaggcggagtccattaactttgcgctcaacgatgccgccgcccaggccatcaatgcctgggtgaatgccaagactcagggcaagattacggagctggtcagcgcggactcgttctcggacaacaccaggctggtcctgctcaatgccctccacttcaagggcagctgggcgcacaagttcagcgaggagcgcaccgaggaggatatcttctgggtgggcgaggaggagcaggttaaaatcaactacatgaaccagaaggccaagttcaactatggcttcttcgaagatctgggctgcactgccctggagatgccctaccaggactctgacctctccatgttcgtgctgctgccgcaggagcggacaggtatttacgccctagccgagaagctcaagactgtgaacctggtggatttggccgacaagttgaccgtggaagaggtccatgtcaagttccccaagtttaaggtggactactccctggaattggccgagaaactgaagcagctgggcatcacgaaaatgtttacggaccaagctgagtttagcaatctgctggaatcccccgagggcgtctttgtgtccaaggtgctgcacaaggccaccatcgaggtgaatgaggagggcacggaggcggcggctgccaccggcatgatcatgatgacccgcatgatgaccttcccgctgcagttccaggcggaccggcccttcctctacgtcatctggaataagaagaacatcctcttcgctggcgccttcgttaaggctgcctaa

SEQ ID NO: 19698 - protein, 374 aa, Drosophila melanogaster
MFDFNLEFARGGARFTSELFQLLSAGGLKENVVFSPFSIQTCIALAFAGSQGETADEIAKALHFVSNFPPEVAQTFQFVLEKYRNSNLLRVANKLYVQEGKQLKPAYQSAIKEQYHSEAESINFALNDAAAQAINAWVNAKTQGKITELVSADSFSDNTRLVLLNALHFKGSWAHKFSEERTEEDIFWVGEEEQVKINYMNQKAKFNYGFFEDLGCTALEMPYQDSDLSMFVLLPQERTGIYALAEKLKTVNLVDLADKLTVEEVHVKFPKFKVDYSLELAEKLKQLGITKMFTDQAEFSNLLESPEGVFVSKVLHKATIEVNEEGTEAAAATGMIMMTRMMTFPLQFQADRPFLYVIWNKKNILFAGAFVKAA

SEQ ID NO: 19699 - DNA, 1275 bp, Drosophila melanogaster
  CDS (1)..(1275)
atggattatcgtttggtgccatgtggttgctggttgctccccctgctcggcctagccctcttcccgtttccaccggtccacacggctgacgtcaccatggctgacgccgcccaccaggagttcgcccgccggctggcccttttctctatcaacgtgtacggcaagctgtcggggcagaagcccggcgagaacatcgtcttctcgcccttttccatccagacttgtgcggcgatggccaggctgggtgcagaaaacgagacggctacccagctggaccagggactgggcttggcctctagtgacccagagcaaatcgcacacagttttcaccaggtgctggccgcctaccaggacagtcagatcttgcgcatcgccaacaagattttcgtcatggatggctaccagctgcgccaggagtttgatcagctgttatccaagcagttcctctcggcggctcagagcgtggacttttccaaaaatgtacaagcagcggccaccatcaacaattgggttgagcagcgcaccaaccatctgatcaaggaccttgtgccggctgatgtattgaactccgaatcgcgactcgtccttgtgaacgccattcacttcaagggcacctggcagcaccagttcgccaaacacttaacccgcccagacacctttcacctggatggggagcgaacagttcaggttccgatgatgagtttaaaggagcggttccgctacgccgatctgccggcgctagatgccatggctctggaactgccctacaaggactcagacctctctatgctgatcgtactgcccaacaccaagacgggtctgcccgctctggaggagaagttgcgcctcacgaccctctcgcagatcacgcagtcgttgtacgaaacaaaggtagcgctcaaattgcccaggttcaaggcagagttccaagtggaattgtctgaggttttccagaagctgggcatgtcaaggatgttctccgatcaggctgaatttggaaaaatgctacaaagtccggagccattgaaagtgtcagccatcatacacaaggccttcattgaagtcaacgaggagggaacggaggctgcggccgccacgggcatggcggtgcgtaggaagcgcgctattatgtcgcctgaggaaccaattgagttctttgccgaccatcctttcacctatgtccttgtgcatcagaaggatctgccattgttttggggctcagttgtgcggctcgaggaaaataccttcgcctccagcgagcatgatgagctgtga

SEQ ID NO: 19700 - protein, 424 aa, Drosophila melanogaster
MDYRLVPCGCWLLPLLGLALFPFPPVHTADVTMADAAHQEFARRLALFSINVYGKLSGQKPGENIVFSPFSIQTCAAMARLGAENETATQLDQGLGLASSDPEQIAHSFHQVLAAYQDSQILRIANKIFVMDGYQLRQEFDQLLSKQFLSAAQSVDFSKNVQAAATINNWVEQRTNHLIKDLVPADVLNSESRLVLVNAIHFKGTWQHQFAKHLTRPDTFHLDGERTVQVPMMSLKERFRYADLPALDAMALELPYKDSDLSMLIVLPNTKTGLPALEEKLRLTTLSQITQSLYETKVALKLPRFKAEFQVELSEVFQKLGMSRMFSDQAEFGKMLQSPEPLKVSAIIHKAFIEVNEEGTEAAAATGMAVRRKRAIMSPEEPIEFFADHPFTYVLVHQKDLPLFWGSVVRLEENTFASSEHDEL

SEQ ID NO: 19701 - DNA, 1119 bp, Drosophila melanogaster
  CDS (1)..(1119)
atgaagtatttgtgcctgcttcttttggccacgtcggtgtcttgtcgcttcaccgacgatctctaccaacttttggccaaggaaaatgccgacaagaatctcattacctctcccctatcggtggaaatcgcactgagcctggcatacatgggcgccaggggaaagacagcccaagaaatgagggatgttttgaaactgcccgacgacaagaaggaagtggcagccaaattcaaggatcttctgagtaaactcgaagggcgcgagagcgtagccattctgagtctggcaaatcgcatatacgttaacaataagttcaagctagtaccggagtacaatcaaatggtaaaggattcctttaaggctgaagcggaagcaatcagcgctaataatcccaagataaccgcttccattgtcaataagtgggtagatactcagacgagtggtaaaatcagagacttagttatgcccagtgacgtggcgaatctggtattggtcatcttaaatgccatttactttaaaggccagtggcagaaaaaatttaataccgagcaaacgaagtccgatttccatatttcggatcaaaagagtgttcctgtccagatgatgtcactagttaggccatttggggtttcatacgacagagaactaggtgccaatgttatcgagctgccctacagaaattcaaacctttccatggtcatttttctaccggacaaggttgatggtctaccagagttggagaaaaagatggtaggattcactccaaaacttatcaatataaatgtgcatctaaggcttcccaagttcaaaatcgaattctccgctcgtcttgagcaagttcttatagcgatgggcatacaagatgcgtttaagacgtctgctgacttcaatgatctggtcgcgaacagtggggctcatgtgggaggcgtcgttcacaaggcgttcctagaggttaatgaggaaggttctgaagcagcggctgcaacagctgtagtttttcgctataagagtatacggtcaccgccaatggattttaatgtcaatcatccatttgcctatgtcattcgcgatgcggaaaacatttactttcagggccacttcgtgaacccggaactataa

SEQ ID NO: 19702 - protein, 372 aa, Drosophila melanogaster
MKYLCLLLLATSVSCRFTDDLYQLLAKENADKNLITSPLSVEIALSLAYMGARGKTAQEMRDVLKLPDDKKEVAAKFKDLLSKLEGRESVAILSLANRIYVNNKFKLVPEYNQMVKDSFKAEAEAISANNPKITASIVNKWVDTQTSGKIRDLVMPSDVANLVLVILNAIYFKGQWQKKFNTEQTKSDFHISDQKSVPVQMMSLVRPFGVSYDRELGANVIELPYRNSNLSMVIFLPDKVDGLPELEKKMVGFTPKLININVHLRLPKFKIEFSARLEQVLIAMGIQDAFKTSADFNDLVANSGAHVGGVVHKAFLEVNEEGSEAAAATAVVFRYKSIRSPPMDFNVNHPFAYVIRDAENIYFQGHFVNPEL

SEQ ID NO: 19703 - DNA, 1128 bp, Drosophila melanogaster
  CDS (1)..(1128)
atgaagcatttgtgtctgcttcttttggccacgtcggtatcttgtcgctttgccgacgatttctaccaacttttggccaaggaaaatgcggccaataatctcatttcctctcccctttccgtggaaatcgcactgagcatggcctacatgggagccagggcaaagacagcccaagaaatgaggaatgttttgaaactgcccgatgacaaaaaggaagtggcagccaaatacaaggaccttctgagtaaactcgaaggacgcgagaaggtagccactctcagtttggctaatcgcatatacgtgaacaaaaagttccagctagtaccgagttacaatcagatggtcaaggattcatttatggctgaagcggaggcaatcgacattgtcgatcccaataaggcttcttcaattgtcaataattgggtagataatcagacgcgtggtaaaatcaaagacttagtttcatccaatgacatgtcgaaaatggaattgatcgtcttaaatgccatatactttaaaggccagtgggagtacaaatttaatcccaagttaacgaagaagaggaatttccgtgtttcggatcaaaagagtgttcctgtcgagatgatgtcactatttcaatcatttagggccgcacatgatagtgaactgggtgccaaaattatcgagctgccctacagaaattcaagcctgtccatgctaatttttctaccggaccaggtcgatggactatcagagctggagaaaaagattgtaggattcaaaccgaaactttccaaaatggatgtaactttaaggcttcccaagtttaaaatcgaattcttcgctcaactaaacaaagttcttgtggcgatgggcatacaagatgcgttcgaaaaatctgctgacttcaaagatctggtcgaaaacagtaacgttcatgtgaaaaaagtcattcataaggcgttcatcgaggttaatgaagaaggagctgaggcagcggctgcaacagctttacttttcgtgcgctatagtatgcctatgccgtcatctcaaatggtttttaatgccgatcatccttttgcctatgtcattcgcgatagggaaaccatttatttccagggccactttgtgaaaccgaatgaataa

SEQ ID NO: 19704 - protein, 375 aa, Drosophila melanogaster
MKHLCLLLLATSVSCRFADDFYQLLAKENAANNLISSPLSVEIALSMAYMGARAKTAQEMRNVLKLPDDKKEVAAKYKDLLSKLEGREKVATLSLANRIYVNKKFQLVPSYNQMVKDSFMAEAEAIDIVDPNKASSIVNNWVDNQTRGKIKDLVSSNDMSKMELIVLNAIYFKGQWEYKFNPKLTKKRNFRVSDQKSVPVEMMSLFQSFRAAHDSELGAKIIELPYRNSSLSMLIFLPDQVDGLSELEKKIVGFKPKLSKMDVTLRLPKFKIEFFAQLNKVLVAMGIQDAFEKSADFKDLVENSNVHVKKVIHKAFIEVNEEGAEAAAATALLFVRYSMPMPSSQMVFNADHPFAYVIRDRETIYFQGHFVKPNE

SEQ ID NO: 19705 - DNA, 1119 bp, Drosophila melanogaster
  CDS (1)..(1119)
atgtattacttgtgcattttcctgtgggtcacttcagtggcatgtcagacctccaaagagatctaccaactactttccaagagccatacaaaccagaacctcgtcgtctcgcccgtctccatagagaccatccttagcatggtcttcatgggcgcagaaggctcgacggccaaggagctgcagagcgccttaggtttaccatcggaggacaaagaggcggtggcagccaggtacggtgctctcctcaacgatcttcagggacaggaggagggacccatactaaagctcgcgaatcgcatctacgtcaacgaccagtacagcctgaatcagaactacaacctcgctgtgagggaacccttcaagtccgaggcggagtccattagtctgaccaatggccctgtggcggccgagagaatcaaccagtgggtgctggatcagaccagtggtaaaatcaagggcatgatcgatcccggcagcatgacgtccgacgtgaaggccttgctggtgaacgccatctactttaagggccagtgggagtcgaagtttgacccagctaagaccagagcctccaccttccaagtaactgcgaacaagagtgtgcccgtccagatgatggcgcaaatgggaacattcagggctaactacttccgcgatctagatgcccaagtcatcgagctgccgtaccttaactccaacctgtccatgactatctttctgccccgagaagtggagggcttgagcgccctggaagagaagatcgttggcttcgccaggccgctggttgccaaggaggtctatcttaagctgcccaagtttaaaatcgaatttcgtgatgaactcaaagagaccttagagaagctgggcatccgagagctattcaccgacaagtcagacttaagcggcttgttcgccgataagtcaggcggcaaagtcagtcaggtctcgcacaaggcgtttctggaggtgaacgaggagggagcggaggccgcaggtgccacatctgtggccgtcacaaatcgagcgggattttctacgttcctcatggccgatcatccctttgccttcgtcattcgcgatgcgaacaccatatatttccaggggcgtgttgtaagcccttga

SEQ ID NO: 19706 - protein, 372 aa, Drosophila melanogaster
MYYLCIFLWVTSVACQTSKEIYQLLSKSHTNQNLVVSPVSIETILSMVFMGAEGSTAKELQSALGLPSEDKEAVAARYGALLNDLQGQEEGPILKLANRIYVNDQYSLNQNYNLAVREPFKSEAESISLTNGPVAAERINQWVLDQTSGKIKGMIDPGSMTSDVKALLVNAIYFKGQWESKFDPAKTRASTFQVTANKSVPVQMMAQMGTFRANYFRDLDAQVIELPYLNSNLSMTIFLPREVEGLSALEEKIVGFARPLVAKEVYLKLPKFKIEFRDELKETLEKLGIRELFTDKSDLSGLFADKSGGKVSQVSHKAFLEVNEEGAEAAGATSVAVTNRAGFSTFLMADHPFAFVIRDANTIYFQGRVVSP

SEQ ID NO: 19707 - DNA, 1257 bp, Drosophila melanogaster
  CDS (1)..(1257)
atgaaaacgagcacacctcatccacggtcgatttggatacttacaggttgctggttgctccccctgctcggcctagccctcttcccgtttccaccggtccacacggctgacgtcaccatggctgacgccgcccaccaggagttcgcccgccggctggcccttttctctatcaacgtgtacggcaagctgtcggggcagaagcccggcgagaacatcgtcttctcgcccttttccatccagacttgtgcggcgatggccaggctgggtgcagaaaacgagacggctacccagctggaccagggactgggcttggcctctagtgacccagagcaaatcgcacacagttttcaccaggtgctggccgcctaccaggacagtcagatcttgcgcatcgccaacaagattttcgtcatggatggctaccagctgcgccaggagtttgatcagctgttatccaagcagttcctctcggcggctcagagcgtggacttttccaaaaatgtacaagcagcggccaccatcaacaattgggttgagcagcgcaccaaccatctgatcaaggaccttgtgccggctgatgtattgaactccgaatcgcgactcgtccttgtgaacgccattcacttcaagggcacctggcagcaccagttcgccaaacacttaacccgcccagacacctttcacctggatggggagcgaacagttcaggttccgatgatgagtttaaaggagcggttccgctacgccgatctgccggcgctagatgccatggctctggaactgccctacaaggactcagacctctctatgctgatcgtactgcccaacaccaagacgggtctgcccgctctggaggagaagttgcgcctcacgaccctctcgcagatcacgcagtcgttgtacgaaacaaaggtagcgctcaaattgcccaggttcaaggcagagttccaagtggaattgtctgaggttttccagaagctgggcatgtcaaggatgttctccgatcaggctgaatttggaaaaatgctacaaagtccggagccattgaaagtgtcagccatcatacacaaggccttcattgaagtcaacgaggagggaacggaggctgcggccgccacgggaatggtcatgtgctacgcctccatgctcacgttcgaaccgcagcccgtccaattccatgtccagcatccatttaactattacattatcaataaggattctactattttgtttgcgggaagaatcaataagttttga

SEQ ID NO: 19708 - protein, 418 aa, Drosophila melanogaster
MKTSTPHPRSIWILTGCWLLPLLGLALFPFPPVHTADVTMADAAHQEFARRLALFSINVYGKLSGQKPGENIVFSPFSIQTCAAMARLGAENETATQLDQGLGLASSDPEQIAHSFHQVLAAYQDSQILRIANKIFVMDGYQLRQEFDQLLSKQFLSAAQSVDFSKNVQAAATINNWVEQRTNHLIKDLVPADVLNSESRLVLVNAIHFKGTWQHQFAKHLTRPDTFHLDGERTVQVPMMSLKERFRYADLPALDAMALELPYKDSDLSMLIVLPNTKTGLPALEEKLRLTTLSQITQSLYETKVALKLPRFKAEFQVELSEVFQKLGMSRMFSDQAEFGKMLQSPEPLKVSAIIHKAFIEVNEEGTEAAAATGMVMCYASMLTFEPQPVQFHVQHPFNYYIINKDSTILFAGRINKF

SEQ ID NO: 19709 - DNA, 1179 bp, Drosophila melanogaster
  CDS (1)..(1179)
atggctgacgccgcccaccaggagttcgcccgccggctggcccttttctctatcaacgtgtacggcaagctgtcggggcagaagcccggcgagaacatcgtcttctcgcccttttccatccagacttgtgcggcgatggccaggctgggtgcagaaaacgagacggctacccagctggaccagggactgggcttggcctctagtgacccagagcaaatcgcacacagttttcaccaggtgctggccgcctaccaggacagtcagatcttgcgcatcgccaacaagattttcgtcatggatggctaccagctgcgccaggagtttgatcagctgttatccaagcagttcctctcggcggctcagagcgtggacttttccaaaaatgtacaagcagcggccaccatcaacaattgggttgagcagcgcaccaaccatctgatcaaggaccttgtgccggctgatgtattgaactccgaatcgcgactcgtccttgtgaacgccattcacttcaagggcacctggcagcaccagttcgccaaacacttaacccgcccagacacctttcacctggatggggagcgaacagttcaggttccgatgatgagtttaaaggagcggttccgctacgccgatctgccggcgctagatgccatggctctggaactgccctacaaggactcagacctctctatgctgatcgtactgcccaacaccaagacgggtctgcccgctctggaggagaagttgcgcctcacgaccctctcgcagatcacgcagtcgttgtacgaaacaaaggtagcgctcaaattgcccaggttcaaggcagagttccaagtggaattgtctgaggttttccagaagctgggcatgtcaaggatgttctccgatcaggctgaatttggaaaaatgctacaaagtccggagccattgaaagtgtcagccatcatacacaaggccttcattgaagtcaacgaggagggaacggaggctgcggccgccacgggcatggcggtgcgtaggaagcgcgctattatgtcgcctgaggaaccaattgagttctttgccgaccatcctttcacctatgtccttgtgcatcagaaggatctgccattgttttggggctcagttgtgcggctcgaggaaaataccttcgcctccagcgagcatgatgagctgtga

SEQ ID NO: 19710 - protein, 392 aa, Drosophila melanogaster
MADAAHQEFARRLALFSINVYGKLSGQKPGENIVFSPFSIQTCAAMARLGAENETATQLDQGLGLASSDPEQIAHSFHQVLAAYQDSQILRIANKIFVMDGYQLRQEFDQLLSKQFLSAAQSVDFSKNVQAAATINNWVEQRTNHLIKDLVPADVLNSESRLVLVNAIHFKGTWQHQFAKHLTRPDTFHLDGERTVQVPMMSLKERFRYADLPALDAMALELPYKDSDLSMLIVLPNTKTGLPALEEKLRLTTLSQITQSLYETKVALKLPRFKAEFQVELSEVFQKLGMSRMFSDQAEFGKMLQSPEPLKVSAIIHKAFIEVNEEGTEAAAATGMAVRRKRAIMSPEEPIEFFADHPFTYVLVHQKDLPLFWGSVVRLEENTFASSEHDEL

SEQ ID NO: 19711 - DNA, 1125 bp, Drosophila melanogaster
  CDS (1)..(1125)
atggctgacgccgcccaccaggagttcgcccgccggctggcccttttctctatcaacgtgtacggcaagctgtcggggcagaagcccggcgagaacatcgtcttctcgcccttttccatccagacttgtgcggcgatggccaggctgggtgcagaaaacgagacggctacccagctggaccagggactgggcttggcctctagtgacccagagcaaatcgcacacagttttcaccaggtgctggccgcctaccaggacagtcagatcttgcgcatcgccaacaagattttcgtcatggatggctaccagctgcgccaggagtttgatcagctgttatccaagcagttcctctcggcggctcagagcgtggacttttccaaaaatgtacaagcagcggccaccatcaacaattgggttgagcagcgcaccaaccatctgatcaaggaccttgtgccggctgatgtattgaactccgaatcgcgactcgtccttgtgaacgccattcacttcaagggcacctggcagcaccagttcgccaaacacttaacccgcccagacacctttcacctggatggggagcgaacagttcaggttccgatgatgagtttaaaggagcggttccgctacgccgatctgccggcgctagatgccatggctctggaactgccctacaaggactcagacctctctatgctgatcgtactgcccaacaccaagacgggtctgcccgctctggaggagaagttgcgcctcacgaccctctcgcagatcacgcagtcgttgtacgaaacaaaggtagcgctcaaattgcccaggttcaaggcagagttccaagtggaattgtctgaggttttccagaagctgggcatgtcaaggatgttctccgatcaggctgaatttggaaaaatgctacaaagtccggagccattgaaagtgtcagccatcatacacaaggccttcattgaagtcaacgaggagggaacggaggctgcggccgccacggtatggcgggtgatggccgtagctgccttcagtcgcaaacacttcattgccaaccatccttttgctttctacgtgaagacccattacgatctgccgatattcactgggcgctacttgggttaa

SEQ ID NO: 19712 - protein, 374 aa, Drosophila melanogaster
MADAAHQEFARRLALFSINVYGKLSGQKPGENIVFSPFSIQTCAAMARLGAENETATQLDQGLGLASSDPEQIAHSFHQVLAAYQDSQILRIANKIFVMDGYQLRQEFDQLLSKQFLSAAQSVDFSKNVQAAATINNWVEQRTNHLIKDLVPADVLNSESRLVLVNAIHFKGTWQHQFAKHLTRPDTFHLDGERTVQVPMMSLKERFRYADLPALDAMALELPYKDSDLSMLIVLPNTKTGLPALEEKLRLTTLSQITQSLYETKVALKLPRFKAEFQVELSEVFQKLGMSRMFSDQAEFGKMLQSPEPLKVSAIIHKAFIEVNEEGTEAAAATVWRVMAVAAFSRKHFIANHPFAFYVKTHYDLPIFTGRYLG

SEQ ID NO: 19713 - DNA, 1221 bp, Drosophila melanogaster
  CDS (1)..(1221)
atggattatcgtttggtgccatgtggttgctggttgctccccctgctcggcctagccctcttcccgtttccaccggtccacacggctgacgtcaccatggctgacgccgcccaccaggagttcgcccgccggctggcccttttctctatcaacgtgtacggcaagctgtcggggcagaagcccggcgagaacatcgtcttctcgcccttttccatccagacttgtgcggcgatggccaggctgggtgcagaaaacgagacggctacccagctggaccagggactgggcttggcctctagtgacccagagcaaatcgcacacagttttcaccaggtgctggccgcctaccaggacagtcagatcttgcgcatcgccaacaagattttcgtcatggatggctaccagctgcgccaggagtttgatcagctgttatccaagcagttcctctcggcggctcagagcgtggacttttccaaaaatgtacaagcagcggccaccatcaacaattgggttgagcagcgcaccaaccatctgatcaaggaccttgtgccggctgatgtattgaactccgaatcgcgactcgtccttgtgaacgccattcacttcaagggcacctggcagcaccagttcgccaaacacttaacccgcccagacacctttcacctggatggggagcgaacagttcaggttccgatgatgagtttaaaggagcggttccgctacgccgatctgccggcgctagatgccatggctctggaactgccctacaaggactcagacctctctatgctgatcgtactgcccaacaccaagacgggtctgcccgctctggaggagaagttgcgcctcacgaccctctcgcagatcacgcagtcgttgtacgaaacaaaggtagcgctcaaattgcccaggttcaaggcagagttccaagtggaattgtctgaggttttccagaagctgggcatgtcaaggatgttctccgatcaggctgaatttggaaaaatgctacaaagtccggagccattgaaagtgtcagccatcatacacaaggccttcattgaagtcaacgaggagggaacggaggctgcggccgccacggtatggcgggtgatggccgtagctgccttcagtcgcaaacacttcattgccaaccatccttttgctttctacgtgaagacccattacgatctgccgatattcactgggcgctacttgggttaa

SEQ ID NO: 19714 - protein, 406 aa, Drosophila melanogaster
MDYRLVPCGCWLLPLLGLALFPFPPVHTADVTMADAAHQEFARRLALFSINVYGKLSGQKPGENIVFSPFSIQTCAAMARLGAENETATQLDQGLGLASSDPEQIAHSFHQVLAAYQDSQILRIANKIFVMDGYQLRQEFDQLLSKQFLSAAQSVDFSKNVQAAATINNWVEQRTNHLIKDLVPADVLNSESRLVLVNAIHFKGTWQHQFAKHLTRPDTFHLDGERTVQVPMMSLKERFRYADLPALDAMALELPYKDSDLSMLIVLPNTKTGLPALEEKLRLTTLSQITQSLYETKVALKLPRFKAEFQVELSEVFQKLGMSRMFSDQAEFGKMLQSPEPLKVSAIIHKAFIEVNEEGTEAAAATVWRVMAVAAFSRKHFIANHPFAFYVKTHYDLPIFTGRYLG

SEQ ID NO: 19715 - DNA, 1140 bp, Drosophila melanogaster
  CDS (1)..(1140)
atggctgacgccgcccaccaggagttcgcccgccggctggcccttttctctatcaacgtgtacggcaagctgtcggggcagaagcccggcgagaacatcgtcttctcgcccttttccatccagacttgtgcggcgatggccaggctgggtgcagaaaacgagacggctacccagctggaccagggactgggcttggcctctagtgacccagagcaaatcgcacacagttttcaccaggtgctggccgcctaccaggacagtcagatcttgcgcatcgccaacaagattttcgtcatggatggctaccagctgcgccaggagtttgatcagctgttatccaagcagttcctctcggcggctcagagcgtggacttttccaaaaatgtacaagcagcggccaccatcaacaattgggttgagcagcgcaccaaccatctgatcaaggaccttgtgccggctgatgtattgaactccgaatcgcgactcgtccttgtgaacgccattcacttcaagggcacctggcagcaccagttcgccaaacacttaacccgcccagacacctttcacctggatggggagcgaacagttcaggttccgatgatgagtttaaaggagcggttccgctacgccgatctgccggcgctagatgccatggctctggaactgccctacaaggactcagacctctctatgctgatcgtactgcccaacaccaagacgggtctgcccgctctggaggagaagttgcgcctcacgaccctctcgcagatcacgcagtcgttgtacgaaacaaaggtagcgctcaaattgcccaggttcaaggcagagttccaagtggaattgtctgaggttttccagaagctgggcatgtcaaggatgttctccgatcaggctgaatttggaaaaatgctacaaagtccggagccattgaaagtgtcagccatcatacacaaggccttcattgaagtcaacgaggagggaacggaggctgcggccgccacgggaatggtcatgtgctacgcctccatgctcacgttcgaaccgcagcccgtccaattccatgtccagcatccatttaactattacattatcaataaggattctactattttgtttgcgggaagaatcaataagttttga

SEQ ID NO: 19716 - protein, 379 aa, Drosophila melanogaster
MADAAHQEFARRLALFSINVYGKLSGQKPGENIVFSPFSIQTCAAMARLGAENETATQLDQGLGLASSDPEQIAHSFHQVLAAYQDSQILRIANKIFVMDGYQLRQEFDQLLSKQFLSAAQSVDFSKNVQAAATINNWVEQRTNHLIKDLVPADVLNSESRLVLVNAIHFKGTWQHQFAKHLTRPDTFHLDGERTVQVPMMSLKERFRYADLPALDAMALELPYKDSDLSMLIVLPNTKTGLPALEEKLRLTTLSQITQSLYETKVALKLPRFKAEFQVELSEVFQKLGMSRMFSDQAEFGKMLQSPEPLKVSAIIHKAFIEVNEEGTEAAAATGMVMCYASMLTFEPQPVQFHVQHPFNYYIINKDSTILFAGRINKF

SEQ ID NO: 19717 - DNA, 1140 bp, Drosophila melanogaster
  CDS (1)..(1140)
atggctgacgccgcccaccaggagttcgcccgccggctggcccttttctctatcaacgtgtacggcaagctgtcggggcagaagcccggcgagaacatcgtcttctcgcccttttccatccagacttgtgcggcgatggccaggctgggtgcagaaaacgagacggctacccagctggaccagggactgggcttggcctctagtgacccagagcaaatcgcacacagttttcaccaggtgctggccgcctaccaggacagtcagatcttgcgcatcgccaacaagattttcgtcatggatggctaccagctgcgccaggagtttgatcagctgttatccaagcagttcctctcggcggctcagagcgtggacttttccaaaaatgtacaagcagcggccaccatcaacaattgggttgagcagcgcaccaaccatctgatcaaggaccttgtgccggctgatgtattgaactccgaatcgcgactcgtccttgtgaacgccattcacttcaagggcacctggcagcaccagttcgccaaacacttaacccgcccagacacctttcacctggatggggagcgaacagttcaggttccgatgatgagtttaaaggagcggttccgctacgccgatctgccggcgctagatgccatggctctggaactgccctacaaggactcagacctctctatgctgatcgtactgcccaacaccaagacgggtctgcccgctctggaggagaagttgcgcctcacgaccctctcgcagatcacgcagtcgttgtacgaaacaaaggtagcgctcaaattgcccaggttcaaggcagagttccaagtggaattgtctgaggttttccagaagctgggcatgtcaaggatgttctccgatcaggctgaatttggaaaaatgctacaaagtccggagccattgaaagtgtcagccatcatacacaaggccttcattgaagtcaacgaggagggaacggaggctgcggccgccacgggtatgtttatgagccttacttcgctgcccatgccgaagccggatccgatacgtttcaatgtcgaccatccatttacattttacatccttaacaaggactcaaccgctctcttcgctggcagcataaagaaactctaa

SEQ ID NO: 19718 - protein, 379 aa, Drosophila melanogaster
MADAAHQEFARRLALFSINVYGKLSGQKPGENIVFSPFSIQTCAAMARLGAENETATQLDQGLGLASSDPEQIAHSFHQVLAAYQDSQILRIANKIFVMDGYQLRQEFDQLLSKQFLSAAQSVDFSKNVQAAATINNWVEQRTNHLIKDLVPADVLNSESRLVLVNAIHFKGTWQHQFAKHLTRPDTFHLDGERTVQVPMMSLKERFRYADLPALDAMALELPYKDSDLSMLIVLPNTKTGLPALEEKLRLTTLSQITQSLYETKVALKLPRFKAEFQVELSEVFQKLGMSRMFSDQAEFGKMLQSPEPLKVSAIIHKAFIEVNEEGTEAAAATGMFMSLTSLPMPKPDPIRFNVDHPFTFYILNKDSTALFAGSIKKL

SEQ ID NO: 19719 - DNA, 1236 bp, Drosophila melanogaster
  CDS (1)..(1236)
atggattatcgtttggtgccatgtggttgctggttgctccccctgctcggcctagccctcttcccgtttccaccggtccacacggctgacgtcaccatggctgacgccgcccaccaggagttcgcccgccggctggcccttttctctatcaacgtgtacggcaagctgtcggggcagaagcccggcgagaacatcgtcttctcgcccttttccatccagacttgtgcggcgatggccaggctgggtgcagaaaacgagacggctacccagctggaccagggactgggcttggcctctagtgacccagagcaaatcgcacacagttttcaccaggtgctggccgcctaccaggacagtcagatcttgcgcatcgccaacaagattttcgtcatggatggctaccagctgcgccaggagtttgatcagctgttatccaagcagttcctctcggcggctcagagcgtggacttttccaaaaatgtacaagcagcggccaccatcaacaattgggttgagcagcgcaccaaccatctgatcaaggaccttgtgccggctgatgtattgaactccgaatcgcgactcgtccttgtgaacgccattcacttcaagggcacctggcagcaccagttcgccaaacacttaacccgcccagacacctttcacctggatggggagcgaacagttcaggttccgatgatgagtttaaaggagcggttccgctacgccgatctgccggcgctagatgccatggctctggaactgccctacaaggactcagacctctctatgctgatcgtactgcccaacaccaagacgggtctgcccgctctggaggagaagttgcgcctcacgaccctctcgcagatcacgcagtcgttgtacgaaacaaaggtagcgctcaaattgcccaggttcaaggcagagttccaagtggaattgtctgaggttttccagaagctgggcatgtcaaggatgttctccgatcaggctgaatttggaaaaatgctacaaagtccggagccattgaaagtgtcagccatcatacacaaggccttcattgaagtcaacgaggagggaacggaggctgcggccgccacgggaatggtcatgtgctacgcctccatgctcacgttcgaaccgcagcccgtccaattccatgtccagcatccatttaactattacattatcaataaggattctactattttgtttgcgggaagaatcaataagttttga

SEQ ID NO: 19720 - protein, 411 aa, Drosophila melanogaster
MDYRLVPCGCWLLPLLGLALFPFPPVHTADVTMADAAHQEFARRLALFSINVYGKLSGQKPGENIVFSPFSIQTCAAMARLGAENETATQLDQGLGLASSDPEQIAHSFHQVLAAYQDSQILRIANKIFVMDGYQLRQEFDQLLSKQFLSAAQSVDFSKNVQAAATINNWVEQRTNHLIKDLVPADVLNSESRLVLVNAIHFKGTWQHQFAKHLTRPDTFHLDGERTVQVPMMSLKERFRYADLPALDAMALELPYKDSDLSMLIVLPNTKTGLPALEEKLRLTTLSQITQSLYETKVALKLPRFKAEFQVELSEVFQKLGMSRMFSDQAEFGKMLQSPEPLKVSAIIHKAFIEVNEEGTEAAAATGMVMCYASMLTFEPQPVQFHVQHPFNYYIINKDSTILFAGRINKF

SEQ ID NO: 19721 - DNA, 1236 bp, Drosophila melanogaster
  CDS (1)..(1236)
atggattatcgtttggtgccatgtggttgctggttgctccccctgctcggcctagccctcttcccgtttccaccggtccacacggctgacgtcaccatggctgacgccgcccaccaggagttcgcccgccggctggcccttttctctatcaacgtgtacggcaagctgtcggggcagaagcccggcgagaacatcgtcttctcgcccttttccatccagacttgtgcggcgatggccaggctgggtgcagaaaacgagacggctacccagctggaccagggactgggcttggcctctagtgacccagagcaaatcgcacacagttttcaccaggtgctggccgcctaccaggacagtcagatcttgcgcatcgccaacaagattttcgtcatggatggctaccagctgcgccaggagtttgatcagctgttatccaagcagttcctctcggcggctcagagcgtggacttttccaaaaatgtacaagcagcggccaccatcaacaattgggttgagcagcgcaccaaccatctgatcaaggaccttgtgccggctgatgtattgaactccgaatcgcgactcgtccttgtgaacgccattcacttcaagggcacctggcagcaccagttcgccaaacacttaacccgcccagacacctttcacctggatggggagcgaacagttcaggttccgatgatgagtttaaaggagcggttccgctacgccgatctgccggcgctagatgccatggctctggaactgccctacaaggactcagacctctctatgctgatcgtactgcccaacaccaagacgggtctgcccgctctggaggagaagttgcgcctcacgaccctctcgcagatcacgcagtcgttgtacgaaacaaaggtagcgctcaaattgcccaggttcaaggcagagttccaagtggaattgtctgaggttttccagaagctgggcatgtcaaggatgttctccgatcaggctgaatttggaaaaatgctacaaagtccggagccattgaaagtgtcagccatcatacacaaggccttcattgaagtcaacgaggagggaacggaggctgcggccgccacgggtatgtttatgagccttacttcgctgcccatgccgaagccggatccgatacgtttcaatgtcgaccatccatttacattttacatccttaacaaggactcaaccgctctcttcgctggcagcataaagaaactctaa

SEQ ID NO: 19722 - protein, 411 aa, Drosophila melanogaster
MDYRLVPCGCWLLPLLGLALFPFPPVHTADVTMADAAHQEFARRLALFSINVYGKLSGQKPGENIVFSPFSIQTCAAMARLGAENETATQLDQGLGLASSDPEQIAHSFHQVLAAYQDSQILRIANKIFVMDGYQLRQEFDQLLSKQFLSAAQSVDFSKNVQAAATINNWVEQRTNHLIKDLVPADVLNSESRLVLVNAIHFKGTWQHQFAKHLTRPDTFHLDGERTVQVPMMSLKERFRYADLPALDAMALELPYKDSDLSMLIVLPNTKTGLPALEEKLRLTTLSQITQSLYETKVALKLPRFKAEFQVELSEVFQKLGMSRMFSDQAEFGKMLQSPEPLKVSAIIHKAFIEVNEEGTEAAAATGMFMSLTSLPMPKPDPIRFNVDHPFTFYILNKDSTALFAGSIKKL

SEQ ID NO: 19723 - DNA, 1188 bp, Strongylocentrotus purpuratus
  CDS (1)..(1188)
atggcattctctaagcagcaagatacgtctgggcagctgatgcagctttcaagtgctaacatcggattcgccctggatctttatcaaactcttcaagatgaacggagaggtaaaaatctgttcttctcccctctcagcatatcgaccgctctggctatgacacagctaggagcccgaggtgatacagcaactcaaatcgctgatgtcttccgtttcaatcagacagaccaagatcaacttcatggaacattcaaagaactaaacaacttgctttaccaaacagattccggttacaaacttcattccgccaacaggctctatggcaaatctggctacaacttcgttcagtcatttcttgaaggaactgttttctattatggagcagccattgaggcggtaaatgactttgcatctccaattgccactcaatcaatcaatgattgggtctcaaagcagaccgagggtaaaataaaaaacttgattgctcccggaaccctaaatgatctcacacgccttgtcctggtgaatgccatttatttcaaggcgaactggaaatctaaattttatgccgaaaatactactcatgatacatgtacattcaaggttttcgatgagaggtataaggttccggtgagtcttatgagtcaaaagggaagatttgctttgactgttgacaacacaaatgactgtcttgtgctagagctgccttatgaaagccacaatctgagtctattgattgctcttcccaccaaagatgatggccttggtcaacttgagacgaagctctctgtggacgtcctgcaatcctgggacgtagggctcaaatcaagaagagtgaacgtgctattaccaaagttcaaactagaagcaacattccaactgaaggaggttttgaaacgaatgggaatgcccgacgcttttgatgaggatagggctaacttcaaaggcatctcaagtgaagaaagagagttttacatctctgccgtcatccacaaggcctttattaatgtcaatgaggaagggagtgaggcagctgctgcaacggcttttgtgatggcaggaggcggtccacgaatagaacgtgagaagccgatcctgtttcgagcagaccacccatttctcttcatgattcgtcaccggtcgacgaaatcggtccttttcatggggcgaatgatggatccatcctag

SEQ ID NO: 19724 - protein, 395 aa, Strongylocentrotus purpuratus
MAFSKQQDTSGQLMQLSSANIGFALDLYQTLQDERRGKNLFFSPLSISTALAMTQLGARGDTATQIADVFRFNQTDQDQLHGTFKELNNLLYQTDSGYKLHSANRLYGKSGYNFVQSFLEGTVFYYGAAIEAVNDFASPIATQSINDWVSKQTEGKIKNLIAPGTLNDLTRLVLVNAIYFKANWKSKFYAENTTHDTCTFKVFDERYKVPVSLMSQKGRFALTVDNTNDCLVLELPYESHNLSLLIALPTKDDGLGQLETKLSVDVLQSWDVGLKSRRVNVLLPKFKLEATFQLKEVLKRMGMPDAFDEDRANFKGISSEEREFYISAVIHKAFINVNEEGSEAAAATAFVMAGGGPRIEREKPILFRADHPFLFMIRHRSTKSVLFMGRMMDPS

SEQ ID NO: 19725 - DNA, 1188 bp, Strongylocentrotus purpuratus
  CDS (1)..(1188)
atggcattctctgagcagcaagatacgtctgggcaactggtccagctttcaagtgcgaacatcggattcgccctggatctttatcaaactcttcaagatgaacggagaggtacaaatctgttcttctcccctctcagcatatcgaccgctctggctatgacacagctaggagcccgaggtgatacagcaactcaaatcgctgatgtcttccgtttcaatcagacagaccaagatcaacttcatggaacattcaaagaactaaacaacttgctttaccaaacagattccggttacaaacttcattccgccaacaggctctatggcaaatctggctacagctttgttcagtcatttcttgaaggaactgttttctattatggagcagccattgaggcggtaaatgactttgcatctccaattgccactcaatcaatcaatgattgggtctcaaagcagaccgagggtaaaatcaaaaacttgattgctcccggaaccctaaatgatctcacacgccttgtcctggtgaatgccatttatttcaaggcgaactggaaatctaaattttatgccgaaaatactactcatgatacatgtacattcaaggttttcgatgagaggtataaggttccggtgagtcttatgagtcaaaagggaagatttgctttgactgttgacaacacaaatgactgtcttgtgctagagctgccttatgaaagccacaatctgagtctattgattgctcttcccaccaaagatgatggccttggtcaacttgagacgaagctctctgtggacgtcctgcaatcctgggacgtagggctcaaatcaagaagagtgaacgtgctattaccaaagttcaaactagaagcaacattccaactgaaggaggttttgaaacgaatgggaatgcccgacgcttttgatgaggatagggctaacttcaaaggcatctcaagtgaagaaagagagttttacatctctgccgtcatccacaaggcctttattaatgtcaatgaggaagggagtgaggcagctgctgcaacggcttttgtgatggcaggaggcggtccacgaatagaacgtgagaagccgatcctgtttcgagcagaccacccatttctcttcatgattcgtcaccggtcgacgaaatcggtccttttcatggggcgaatgatggatccatcctag

SEQ ID NO: 19726 - protein, 395 aa, Strongylocentrotus purpuratus
MAFSEQQDTSGQLVQLSSANIGFALDLYQTLQDERRGTNLFFSPLSISTALAMTQLGARGDTATQIADVFRFNQTDQDQLHGTFKELNNLLYQTDSGYKLHSANRLYGKSGYSFVQSFLEGTVFYYGAAIEAVNDFASPIATQSINDWVSKQTEGKIKNLIAPGTLNDLTRLVLVNAIYFKANWKSKFYAENTTHDTCTFKVFDERYKVPVSLMSQKGRFALTVDNTNDCLVLELPYESHNLSLLIALPTKDDGLGQLETKLSVDVLQSWDVGLKSRRVNVLLPKFKLEATFQLKEVLKRMGMPDAFDEDRANFKGISSEEREFYISAVIHKAFINVNEEGSEAAAATAFVMAGGGPRIEREKPILFRADHPFLFMIRHRSTKSVLFMGRMMDPS

SEQ ID NO: 19727 - DNA, 1194 bp, Strongylocentrotus purpuratus
  CDS (1)..(1194)
atggcattctctaagcagcaagatacgtctgggcagctgatgcagctttcaagtgcgaacatcggattcgccctggatctttatcaaactcttcaagatgaacggagaggtaaaaatctgttcttctcccctcttcttatatcgaccgctatggctatgacacagctaggagcccgaggtgatacagcaactcaaatcgcggatgtcttccgttttaatcagacagaccaagatcaacttcatggaacattcaaagaactaaataacttgctttaccaaacagattcaggttacaaacttcattccgccaacaagctctatggcaaatctggctacaacttcgttcagtcatttcttgaagaaagtgcttcctattatggagcggccatagaggcggtaaataactttgcatctccaattgtcactcaatcaatcaatgattgggtttcagagcagaccgaggataaaatcaaaaacctgattgctcctggaatcctaaatgatctcacacgccttgtcctggtgaatgccatctatttcaaggcgaactggcattcagaatttcgtgcccacaatactaaaaaggataaattcaaggttttcgatgagagaaagaaggttttcaagagagagaaggttccggtgagtcttatgagtcaagggggaccatttgctttggctgttgacaaaaccaatgactgtcttgtgctagagatggattatcaaggccacaatatgagtctattgattgctcttcccgtcaaagatgatggccttggtcaacttgagacgaagctctctgtggacgtcctgcaatcctgggacgcagggctcgaatggagagaagtggacgtactattaccaaagttcaaactagaagcaacataccaactgaaggaggttttgcaacgaatgggaatgcccgacgcttttgatgaggatagggctaagttcgaaggcatctcagatgaaagagagttgcatatctctgccgtcatccacaaggcctttattaatgtcaatgaggacgggactgaggcagctgctgcaacgggtaggctattgggaggttgtctaccagaagatcgtgagaagccgatcctttttcgagcagaccacccatttctcttcatgattcgtcaccggtcgacgaaagcggtccttttcatgggacgaatgatggatccctcctag

SEQ ID NO: 19728 - protein, 397 aa, Strongylocentrotus purpuratus
MAFSKQQDTSGQLMQLSSANIGFALDLYQTLQDERRGKNLFFSPLLISTAMAMTQLGARGDTATQIADVFRFNQTDQDQLHGTFKELNNLLYQTDSGYKLHSANKLYGKSGYNFVQSFLEESASYYGAAIEAVNNFASPIVTQSINDWVSEQTEDKIKNLIAPGILNDLTRLVLVNAIYFKANWHSEFRAHNTKKDKFKVFDERKKVFKREKVPVSLMSQGGPFALAVDKTNDCLVLEMDYQGHNMSLLIALPVKDDGLGQLETKLSVDVLQSWDAGLEWREVDVLLPKFKLEATYQLKEVLQRMGMPDAFDEDRAKFEGISDERELHISAVIHKAFINVNEDGTEAAAATGRLLGGCLPEDREKPILFRADHPFLFMIRHRSTKAVLFMGRMMDPS

SEQ ID NO: 19729 - DNA, 1143 bp, Anopheles gambiae str. PEST
  CDS (1)..(1143)
atggccgacaatagcagctctctcgatgcgcaatttgtgtcacagtcgaacagcttcgctaccaagctgtaccagcgaataagtgcgaaacatgcgggagagaatgtggtcatttcgcccttctcgatcagtgcgtgcctttccctggctgcaatgggcgccggcggccttaccgcagagcagatgtactccgtgctggagtttggagcaccagacagaaagcaaaccgtggccgacaactatcggcgcctaatggagcgcctcgccaccgacagcacggtgaacgtggcgaacaaaatctacgtcatgcagaattacgctgtcaagggtgcgttcaacgcgattgccaccggcagcttccggtcggaggccgagtcggtcaactttgccgagagtgcggcggcagcgaaaaagatcaacggctgggtggaggagaagacgaacaacaaaatcaaggatctgatctcgccagatgcgctggacgagctgtcgcgcatggtgctggtcaatgcggtgcacttcaagggcacctggacgtaccagttcgatccgagcctgacccgcccgttcccgttctggctgagcgagacggaatcgcgcgacgtgccgatgatgaacatcaagaaacactttgccttcaacaacttcgaggagctcggcttctcggcgctggagctcacgtacggcgggagcgacatgacgatgatgctgctgctgccgaacgagcggatgggtttggccgcgctcgaggaaaagctgcccacgctcaatctggccgagctggcggggaaaatgcacaagcaggaggtagaggtgtttctgcccaaattcaagatcgaatttacgcgcgatctcaacgaggatctgcaagcgctcggcatggaaagaatgttcagcgactcggccgaattccccgacctgctggagcaaaacgaaccaatgaaggtgtccaaagtcgtccacaaagcgttcattgaagtgaacgaggaaggcactgaggcggctgctgctaccggtatgatcatgatgatgcgctgcatgccaatgcacccttacttcacggtcgaccatccattcctttatgtgctgaggcatcagcagatggtttactttgtgggtcgcgtggccaagatcgatgcttag

SEQ ID NO: 19730 - protein, 380 aa, Anopheles gambiae str. PEST
MADNSSSLDAQFVSQSNSFATKLYQRISAKHAGENVVISPFSISACLSLAAMGAGGLTAEQMYSVLEFGAPDRKQTVADNYRRLMERLATDSTVNVANKIYVMQNYAVKGAFNAIATGSFRSEAESVNFAESAAAAKKINGWVEEKTNNKIKDLISPDALDELSRMVLVNAVHFKGTWTYQFDPSLTRPFPFWLSETESRDVPMMNIKKHFAFNNFEELGFSALELTYGGSDMTMMLLLPNERMGLAALEEKLPTLNLAELAGKMHKQEVEVFLPKFKIEFTRDLNEDLQALGMERMFSDSAEFPDLLEQNEPMKVSKVVHKAFIEVNEEGTEAAAATGMIMMMRCMPMHPYFTVDHPFLYVLRHQQMVYFVGRVAKIDA

SEQ ID NO: 19731 - DNA, 1140 bp, Anopheles gambiae str. PEST
  CDS (1)..(1140)
atggccgacaatagcagctctctcgatgcgcaatttgtgtcacagtcgaacagcttcgctaccaagctgtaccagcgaataagtgcgaaacatgcgggagagaatgtggtcatttcgcccttctcgatcagtgcgtgcctttccctggctgcaatgggcgccggcggccttaccgcagagcagatgtactccgtgctggagtttggagcaccagacagaaagcaaaccgtggccgacaactatcggcgcctaatggagcgcctcgccaccgacagcacggtgaacgtggcgaacaaaatctacgtcatgcagaattacgctgtcaagggtgcgttcaacgcgattgccaccggcagcttccggtcggaggccgagtcggtcaactttgccgagagtgcggcggcagcgaaaaagatcaacggctgggtggaggagaagacgaacaacaaaatcaaggatctgatctcgccagatgcgctggacgagctgtcgcgcatggtgctggtcaatgcggtgcacttcaagggcacctggacgtaccagttcgatccgagcctgacccgcccgttcccgttctggctgagcgagacggaatcgcgcgacgtgccgatgatgaacatcaagaaacactttgccttcaacaacttcgaggagctcggcttctcggcgctggagctcacgtacggcgggagcgacatgacgatgatgctgctgctgccgaacgagcggatgggtttggccgcgctcgaggaaaagctgcccacgctcaatctggccgagctggcggggaaaatgcacaagcaggaggtagaggtgtttctgcccaaattcaagatcgaatttacgcgcgatctcaacgaggatctgcaagcgctcggcatggaaagaatgttcagcgactcggccgaattccccgacctgctggagcaaaacgaaccaatgaaggtgtccaaagtcgtccacaaagcgttcattgaagtgaacgaggaaggcactgaggcggctgctgctaccggtatggtgatgatgacgtgcgcaatgattatgtaccctatgtttacggctgatcatccgttcctatatgcgctgaaagattcgcaaggaaacatcttgttcattggtaaaatacttaaagtttga

SEQ ID NO: 19732 - protein, 379 aa, Anopheles gambiae str. PEST
MADNSSSLDAQFVSQSNSFATKLYQRISAKHAGENVVISPFSISACLSLAAMGAGGLTAEQMYSVLEFGAPDRKQTVADNYRRLMERLATDSTVNVANKIYVMQNYAVKGAFNAIATGSFRSEAESVNFAESAAAAKKINGWVEEKTNNKIKDLISPDALDELSRMVLVNAVHFKGTWTYQFDPSLTRPFPFWLSETESRDVPMMNIKKHFAFNNFEELGFSALELTYGGSDMTMMLLLPNERMGLAALEEKLPTLNLAELAGKMHKQEVEVFLPKFKIEFTRDLNEDLQALGMERMFSDSAEFPDLLEQNEPMKVSKVVHKAFIEVNEEGTEAAAATGMVMMTCAMIMYPMFTADHPFLYALKDSQGNILFIGKILKV

SEQ ID NO: 19733 - DNA, 1185 bp, Strongylocentrotus purpuratus
  CDS (1)..(1185)
atggcattctcaaagcagcaagatatatctgggcaactggttcagctttcaagtgctaacaccagattcgccctccatctttatcaaactctgcaagatgaacggaaaggtaaaaatctgttcttctcccctctcagcatatcgaccactttggccatgacacagctaggagcatgtggggatacagcgactcaaatcgctgatgtcttccgtttcaaccaggtagaccaagatcaacttcatggaacattcaaagagctgaacagcttgctttaccaaacagattccgggtacaaacttcatgccgccaacaggctctatgggaaatctggctacaacttcgttcagtcatttcttgaaggaactgctacctattatggagcagccatagaggcagtaaataactttgcagctccaattgccactaaatcgatcaatgattgggtctcaaagcagaccgaaaataaaatcaaaaacctgattgctcctggaatcctaaatgatctcacacgccttgttctggtgaatgccatctatttcaaggcgaactgggattcaaaatttcttgccgaaaatactacaaaggataaattcaaggttatcggtaagagaaagaaggttcgggtgagtcttatgagtcaagaggatagatttgaattggttgttgacaaaaccaatgactgtcttgtgctagagatgccatatgaacgcttcgatctgagtttattgattgctcttccggtcaaagatgacggccttggtcaacttgagacgaagctctctgcggacatcctgcaatcctgggacgcagggctcgaatggagaaaagtaaaggtgctattaccaaagttcaaactaaaagcagaatttcaactgaatgaggttttgaaacgaatgggaatgcccgacgcttttaatgatggcttggctaacttcgaaggcatctcagatgatagagagttgcacatctctgccgtcatccacaaggcctttgttagtgtcaatgaggaagggagtgaggcagctgctgcaacggctgttgtaatggggaattgcctgagcatgcgacgaggaaaacctgagaagccgattctgtttcgagcagaccacccatttctcttcatgattcgtcaccaggcgacgaaatcggtccttttcatgggacgaatgatggatccctcctag

SEQ ID NO: 19734 - protein, 394 aa, Strongylocentrotus purpuratus
MAFSKQQDISGQLVQLSSANTRFALHLYQTLQDERKGKNLFFSPLSISTTLAMTQLGACGDTATQIADVFRFNQVDQDQLHGTFKELNSLLYQTDSGYKLHAANRLYGKSGYNFVQSFLEGTATYYGAAIEAVNNFAAPIATKSINDWVSKQTENKIKNLIAPGILNDLTRLVLVNAIYFKANWDSKFLAENTTKDKFKVIGKRKKVRVSLMSQEDRFELVVDKTNDCLVLEMPYERFDLSLLIALPVKDDGLGQLETKLSADILQSWDAGLEWRKVKVLLPKFKLKAEFQLNEVLKRMGMPDAFNDGLANFEGISDDRELHISAVIHKAFVSVNEEGSEAAAATAVVMGNCLSMRRGKPEKPILFRADHPFLFMIRHQATKSVLFMGRMMDPS

SEQ ID NO: 19735 - DNA, 1182 bp, Strongylocentrotus purpuratus
  CDS (1)..(1182)
atggcattctctaagcagcaagatatatctgggcaactggtccaactttcaagtgctaacaccagattcgccctccatctttatcaaactcttcaagatgaacggagaggtacaaatctgttcttctcccctctcagcatatcgaccgctctggctatgacacagctaggagcatgtggtgatacagcgactcaaatcgctgatgtcttccgtttcaatcaggtagaccaagatcaacttcatggaacattcaaagagctaaaaaacttgctttaccaaacagattccgggtacaaacttcatgccgccaacaggctctatggaaaatctggctacaacttcgttcagtcatttcttgaaggaactgcttcttattatggagcagccatagaagcagtagataactttgcagctccaattgccactaaatcaatcaatgattgggtctcaaagcagaccgaagataaaatcacaaacctgattgctcctggaatcctaaatgatctcacacgtcttgtcctggtgaatgccatctatttcaagggaaactgggaatcaaaatttcgtgccgaaaatactacacaggaaacattcaaggttttagatgagagaaagaaggttccggtaagtcttatgattcaaaagggtaaatatgctttggctgttgacaacaccaatgactgtcttgtgctagagatgccatatcaaggccgcaatctgagtctattgattgctcttcctgtcaaagatgatggccttggtcaacttgagacgaagctctctgcggacatcctgcaatcctgggacgcagggctaaaatcaagacaagtgaacgtcctattaccaaagttcaaactagaagcacaattccaactgaaggagtttttgcaaaggatgggaatgtccgacgcttttgatgaggatagggcaaacttcgaaggcatatcaggtgatagagagttgcacatctctgccgtcatccacaaggccttcgttgatgtcaatgaggaaggaagtgaggcagctgctgcaacagctgttgtaatgatgaggagatgcgctccaccaagagaacctgagaagccgattctgtttcgagcagaccacccatttatcttcatgattcgtcaccggccgacgaaatcagtccttttcatgggacgaatgatggatccctcctag

SEQ ID NO: 19736 - protein, 393 aa, Strongylocentrotus purpuratus
MAFSKQQDISGQLVQLSSANTRFALHLYQTLQDERRGTNLFFSPLSISTALAMTQLGACGDTATQIADVFRFNQVDQDQLHGTFKELKNLLYQTDSGYKLHAANRLYGKSGYNFVQSFLEGTASYYGAAIEAVDNFAAPIATKSINDWVSKQTEDKITNLIAPGILNDLTRLVLVNAIYFKGNWESKFRAENTTQETFKVLDERKKVPVSLMIQKGKYALAVDNTNDCLVLEMPYQGRNLSLLIALPVKDDGLGQLETKLSADILQSWDAGLKSRQVNVLLPKFKLEAQFQLKEFLQRMGMSDAFDEDRANFEGISGDRELHISAVIHKAFVDVNEEGSEAAAATAVVMMRRCAPPREPEKPILFRADHPFIFMIRHRPTKSVLFMGRMMDPS

SEQ ID NO: 19737 - DNA, 1182 bp, Strongylocentrotus purpuratus
  CDS (1)..(1182)
atggcattctataagcagcaagatatatctgagcaactggtccagctttcaagtgctaacaccagattcgccctagatctttatcaaacatttcaagatgaacggagaggtacaaatctgtttttctcccctctcagcatatcgaccgctctagctatgacacagctaggagcatgtggtgatacagcgactcaaatagctgatgtcttccgtttcaatcaggttgaccaagaccaacttcacggaacattcaaagagctgaacaacttgctttaccaaacaaattccggttacaaacttcatgctgccaacaggctctatggaaaatctggctacaacttcgttcagtcatttcttgaaggaactgcttcttattatggagcagccatagaggcagtggataactttgcagctccaactgccactcactcaatcaatgattgggtctcaaagcagaccgaagataaaatcacaaacctgatccctcctggaatcctaaatgatctcacacgccttgtcctggtgaatgccatctatttcaaggggaactgggaatcaaaatttcgtgccgaaaatactacacaagaaacattcaaggttttagatgagagaaagaaggttccggtgagtcttatgatccaaaagggtaaatttgctttggctgttgacaaaaccaatgactgtcttgtgctagagatgccatatcaaggccgcaatctgagtcttttgattgctcttcctgtcaaagatgatggccttggtaaccttcagacgaagctctctgcagacatccttcgatcctgggacgcagggctcaaatcaagacaagtgaacgtactattaccaaagttcaaattagaagcagaattccaattgaaggaggttttgaaacgaatgggaatgcccgacgcttttaatgatggcaaggctaacttcgaaggcatctcaggtgatagagagttgtacatctctgccgtcatccacaaggcctttgttgatatcaatgaggaagggagtgaggcagctgctgcaacggctgttgcagtgaagttgggatgcgctcgaccaagagaacctgagaagccgactctgtttcgagcagaccacccatttatcttcatgattcgtcaccggccgacgaaatcggtccttttcatgggacgaatgatggatccctcctag

SEQ ID NO: 19738 - protein, 393 aa, Strongylocentrotus purpuratus
MAFYKQQDISEQLVQLSSANTRFALDLYQTFQDERRGTNLFFSPLSISTALAMTQLGACGDTATQIADVFRFNQVDQDQLHGTFKELNNLLYQTNSGYKLHAANRLYGKSGYNFVQSFLEGTASYYGAAIEAVDNFAAPTATHSINDWVSKQTEDKITNLIPPGILNDLTRLVLVNAIYFKGNWESKFRAENTTQETFKVLDERKKVPVSLMIQKGKFALAVDKTNDCLVLEMPYQGRNLSLLIALPVKDDGLGNLQTKLSADILRSWDAGLKSRQVNVLLPKFKLEAEFQLKEVLKRMGMPDAFNDGKANFEGISGDRELYISAVIHKAFVDINEEGSEAAAATAVAVKLGCARPREPEKPTLFRADHPFIFMIRHRPTKSVLFMGRMMDPS

SEQ ID NO: 19739 - DNA, 1191 bp, Tribolium castaneum
  CDS (1)..(1191)
atgaagacaacacttgttttattctttatttttcacttatctatagctgaagaaggtgcaatccaagaattcacaaatgcaaacaatcaattcacctcagcagtttacaaggaattgagcaaaactgaaaatggcaatttcatggtaagtcctttctcggctgaaacagtccttgctttcgcccaatcggggtgtaaaggagactcagctgaagaattgcgcaacagtttgcatctcccaaatgacagaaccaaagtcgaatcggccctaaagtcacttttgccgaaaatcaaaggcaatgacctctacactctccacacggccaacaaaatgtacgtcaaaaaagactttgcgatcaaggaagaattcaaaagagctgcaagtcaagtgtattatgccgattctgagagtatcgatttcacaaaaaatgttgaagctgcgaatgttatgaacagttgggtggaaaaacatacaaaaagcaaaataaaaaatttgatcgattcgaatgatttggacaaatttactcgagcagttttgatcaatgctttgtatttcaaagccaattggtcccttccgttccaattaagtctaaccagcaaaaggaaattctacaaaacagcgtctgattcgattgaagtggatatgatgcaacatttcgatgaacatttcaattattacgagtctccagatttgaaggcccagtttttggaactaccgtttaaagggggtgaagcctcgatggtgttcgtgcttccgaacgaaaaagacggtcttgcgagactcgaaactcaattggaatctgtttttgtgcctcaacaccagttgaaaagcacatttctaaacgtggttttgcccaaattccggattgaaagcgaaattgatttcaaaagtgttttaatgaagttaggggtcgcaaaagtgtttgatgaagaacaagccgatttgagtggaattgcaggtgaaaaaggagatttggttattgataaaattgcccagaaaacttttattgacgtgagcgaagaaggagttgaagctgctgctgctacgtatgtccttattgctgttcctgcttctgctattttgcatcaacaacaacctaaaaattttatagctgatcatcccttcattttctacattaaggttaaggatcttgtcatttttgctggaagagttaccattccgtcgcaataa

SEQ ID NO: 19740 - protein, 396 aa, Tribolium castaneum
MKTTLVLFFIFHLSIAEEGAIQEFTNANNQFTSAVYKELSKTENGNFMVSPFSAETVLAFAQSGCKGDSAEELRNSLHLPNDRTKVESALKSLLPKIKGNDLYTLHTANKMYVKKDFAIKEEFKRAASQVYYADSESIDFTKNVEAANVMNSWVEKHTKSKIKNLIDSNDLDKFTRAVLINALYFKANWSLPFQLSLTSKRKFYKTASDSIEVDMMQHFDEHFNYYESPDLKAQFLELPFKGGEASMVFVLPNEKDGLARLETQLESVFVPQHQLKSTFLNVVLPKFRIESEIDFKSVLMKLGVAKVFDEEQADLSGIAGEKGDLVIDKIAQKTFIDVSEEGVEAAAATYVLIAVPASAILHQQQPKNFIADHPFIFYIKVKDLVIFAGRVTIPSQ

SEQ ID NO: 19741 - DNA, 1188 bp, Tribolium castaneum
  CDS (1)..(1188)
atgaagttccttcttttattgttagtttcagtgtcggttgcgtttgcgaaaaatgtggcaattcaagaatttacaagcgctaacaaccaattcacttcatcggtttacaaggaattgggcaaatccgaaaatggcaatttcgtggtaagtcctttctcggctgaaacagtccttgctttcgcccaatcgggttgtaaaggagactcagctgaagaactgcgcaacagtttgcatctcccaaatgacaaaaccaaagtcgaatcggccctaaagtcacttttgccaaaaatcaaaggcaatgacctctacactctccacacggccaacaaaatgtacgtcaaaaaagactttgcgatcaaggaagagttcaaaaaagctgcaagtcaagtgtattatgccgattctgaaagtatcgatttcaccaaaaatgttgaagctgcgaatgttatgaacagttgggtggaaaaacatacaaaaagcaaaatcaaaaatttgatcagttcgggtgatttggaccaatttactcgagcagttttgatcaatgctttgtacttcaaagccaattggtctcttccgttccaattaagtctaacgcagaaaaaaaagttttataaaacaccatctgattcaattgaagtggatatgatgcaacatttcgatgagcatttcaattattacgagtgtccgcatttgaaagcccagtttttggaattgccgtttcttggaggtgaagcctcgatggtgttcgtgcttccgaacgaaaaagacggtctttcaagactcgaaaatcagttggagtctgattttgtgccccagcacgagttgaaaagaacgtttctaaacgtggtcttgcccaaattccggattgaaagtcttatcaattttgtcgatattttaacaaaattgggtgttaaaaaagtgtttgatgagaaagaagccgatttgagtggaattgcaggtgaaaagggagatttggttattgataaaattgcccagaaaacttttattgacgtgagcgaagaaggggttgaagctgctgctgctacgtatgtccttattgctgttcccatttccgctcctttggaacaacctaaaaatttcatagctgatcatcccttcatcttctacatcaaagttaaggatcttatcatttttgccggaagagttaccaatccgtcaaagcaataa

SEQ ID NO: 19742 - protein, 395 aa, Tribolium castaneum
MKFLLLLLVSVSVAFAKNVAIQEFTSANNQFTSSVYKELGKSENGNFVVSPFSAETVLAFAQSGCKGDSAEELRNSLHLPNDKTKVESALKSLLPKIKGNDLYTLHTANKMYVKKDFAIKEEFKKAASQVYYADSESIDFTKNVEAANVMNSWVEKHTKSKIKNLISSGDLDQFTRAVLINALYFKANWSLPFQLSLTQKKKFYKTPSDSIEVDMMQHFDEHFNYYECPHLKAQFLELPFLGGEASMVFVLPNEKDGLSRLENQLESDFVPQHELKRTFLNVVLPKFRIESLINFVDILTKLGVKKVFDEKEADLSGIAGEKGDLVIDKIAQKTFIDVSEEGVEAAAATYVLIAVPISAPLEQPKNFIADHPFIFYIKVKDLIIFAGRVTNPSKQ

SEQ ID NO: 19743 - DNA, 1167 bp, Symbiobacterium thermophilum IAM 14863
  CDS (1)..(1167): transl_table=11
atgaccgggtgcggcagtccggggctggcgtcgccccctccccgtcccgacgcggtggacccggccctctcggaggccgccgaccgcttcggcatcgagctgctgcgggcggtgtacgaccagcggccggatgcgaatctgttgttgtcgcccgcaagcgcctgggtgatcctcagcctcgccgcgaacggcgcccggggggagacccaacgggagatgctggccgccctggggtatggcgatgcggagatgggggccgtaaacgcgcatatgcgcgacgtgtggggcatcatggccaaccccggccggggggtgaagctgaccgcggccaacgccgtctggcaccacagggactttgcggtcgtcccggccttccgggaggtggccgcgaagcagtacggcgcggaggtgttcggcaccaccttcggccggcctgaggccgcggcggcgatcaaccgctgggtcgcgcgacggacacgggatcgcatcacagacctgatcgaccgaacttacgccgagcagcgcatggcgctggtcaacgctctccacttcaagggcgagtggcaggagccgttcgaccccgaccgcacggagcccgggcccttccgcaggccggacgggagcgaggtgcaggtggagttcatgcaccagaccgagaccttcggctacctggcggaggaggggctggtgggcgtgcgaatgccctatggcgagggggacgtggcgctctacgccttcatgccggacgagtgggacggcttcgtggtggggctcacccccgagcggttccggggctggatcgacgcgctggccgagacgcgcatccggctggccatgccgaaggtgcgcttcacggaccggcatgacctgagcgaagcgcttcaggcgctgggcatggagcgggccttcgacgaccgacgggccgactttggcggcctcctggtcaccgacgaaccgctgtacatcggggcggtgatccagaaaaccttcctggagatcaacgaagagggcaccgaggcggccgccgcgacggttgtggggataacggccggcgccgcaccgcccccccaaccgccggaggtggtgctggacaggcccttcctgctggcgatccgggacgaccgaacggggatgaccctgttcctgggcgccgtcgtgaacccgtga

SEQ ID NO: 19744 - protein, 388 aa, Symbiobacterium thermophilum IAM 14863
MTGCGSPGLASPPPRPDAVDPALSEAADRFGIELLRAVYDQRPDANLLLSPASAWVILSLAANGARGETQREMLAALGYGDAEMGAVNAHMRDVWGIMANPGRGVKLTAANAVWHHRDFAVVPAFREVAAKQYGAEVFGTTFGRPEAAAAINRWVARRTRDRITDLIDRTYAEQRMALVNALHFKGEWQEPFDPDRTEPGPFRRPDGSEVQVEFMHQTETFGYLAEEGLVGVRMPYGEGDVALYAFMPDEWDGFVVGLTPERFRGWIDALAETRIRLAMPKVRFTDRHDLSEALQALGMERAFDDRRADFGGLLVTDEPLYIGAVIQKTFLEINEEGTEAAAATVVGITAGAAPPPQPPEVVLDRPFLLAIRDDRTGMTLFLGAVVNP

SEQ ID NO: 19745 - DNA, 1116 bp, Symbiobacterium thermophilum IAM 14863
  CDS (1)..(1116): transl_table=11
gtggacccgaacctggccagcgccgccgaccggttcggcatccgcctgctccaggaggtgcaccgagagcggggagccgggaacctgtttctgtccccggccagcgcccagatcatcctcagcctcgcggccaacggcgcccggggcgagacccgggaggagatgctggaggccatggggtacggggacatggatctgggcgccgtgaaccgggccatcgcggacctgcgcggaatcctggcgcacccgggcgcgggcgtcgaactgaccgctgccaacgccgtctggcaccagaaggggatgacggtggcccccgcgttccgggaggtcgcggtccagcagtacggagcgcaggtgcgggagacgacgtttggcgagccggcgtccgccgaggccatcaaccgctgggtctccgaccagacccgggggcgcatcccccagctggtcgaagggactcggcccgacgacgtcatgtggctggtcaacgtcctctacttcaagggggcgtggcagaagcccttcgaccccgcccgcacctacgaccgtcccttccacctgccggacggcggcacggcggaggtgccgttcatgcaccagacggccgtcttcggctacttggcggaggacgggctggtgggcgtacggctgccgtacggcgagggggacctggcgctctacgccttcatgcccgacgagtgggagggcttcgtggaagggctcaccccggagcggtacgccggctgggtggaacggatgggccggcaggagatccgcctcgccttccccaagatccggctgaccgaccgggctgagctggcggatcccctcgcggccatgggcatggagcgggcgttcacccccggccgggccgacctcgggggcctgttcgagggcagccgggagctgttcatcagccgggtgatccagaagaccttcctggagatcaacgaggaaggcacggaagcggcggccgccaccggtgtggcggtgaccgtcaccagcgcaccggccggacagcccccggaggtggtgttggataagccgttcctgctggcgatccgggacgaccgcaccggcgtcaccctgttcctgggtgccatcgcggatccgtcgtag

SEQ ID NO: 19746 - protein, 371 aa, Symbiobacterium thermophilum IAM 14863
MDPNLASAADRFGIRLLQEVHRERGAGNLFLSPASAQIILSLAANGARGETREEMLEAMGYGDMDLGAVNRAIADLRGILAHPGAGVELTAANAVWHQKGMTVAPAFREVAVQQYGAQVRETTFGEPASAEAINRWVSDQTRGRIPQLVEGTRPDDVMWLVNVLYFKGAWQKPFDPARTYDRPFHLPDGGTAEVPFMHQTAVFGYLAEDGLVGVRLPYGEGDLALYAFMPDEWEGFVEGLTPERYAGWVERMGRQEIRLAFPKIRLTDRAELADPLAAMGMERAFTPGRADLGGLFEGSRELFISRVIQKTFLEINEEGTEAAAATGVAVTVTSAPAGQPPEVVLDKPFLLAIRDDRTGVTLFLGAIADPS

SEQ ID NO: 19747 - DNA, 1329 bp, Anabaena variabilis ATCC 29413
  CDS (1)..(1329): transl_table=11
atgaatcggcagaagttcagtggtgtgaaagacagttttttacaaagacgttacgctgttagtctgggaagacgttatgttctagcagcagctagcgtggttctattcagtgtactaggttgttctcaagttaatcctgacacaagtgcgctggcccagactggggtatctccagcagaatcttcattgcaaaaaaaaacagtagtgcctgatactaaaattgtcgatgctaataataagtttggctttaagctattttcggaaattgcaaaagaagatggtaacgccaagaatatttctgtatcgccgacgagtgtagcgatcgccctagctatgacctacaatggcgctagcggctctacgcaaaaagcaatggctaaaaccttagagttacagggtatcagtctaccagaacttaactctgcttacgcttcattaaacaagctgctacaaaatcctggtgaaaatgtccaactgactatagctaactccctgtgggctaatcaagatgtgagtttgcgtcccgattttctgcaaactacccgcgatttctatcaagctagggtgacaaatttagattttaaaaatgtcgcggctgtaaatacaatcaattcctgggtgaaggaaaatactaaaggtaaaattgacaaaattgtcgataatattgaaccaaatcaggcgctatttctcatcaacgccatatattttaacggtaaatggagtagtgcttttgataagtctcaaacaacaccacagaccttttacactgcatcgggtcagcagaaacaacacccaatgatgtcacaaacgggtgaatatagatattatgaaacaccacaatttcagtctgtcagtttaccttatggtcaagatggtaaggtgagtttgtatatctttttgcccacgaaaaactctaatctcaaagccttttatcaaaacttaaatgcagagaattgggaaacatggatgcctcagtttaggaaccgtgaaggctctattcgtttaccgcgctttcaaacaaactatgatatcaccctgaatgatgccctgaaatctttaggcatggcagaagcctttagtgataaagccaacttttctggcatcggcgacaatttaactattagccaagttagacataaaactgtgattgatgtgaatgaagaaggtacagaagctagtgcagcaacttctgtaggcatggtagcgacatctttgagagagccacaacaaccatttaaaatgattgttgaccgtccctttttctatgcaattcgtgataatcaaagcaaaaatatcttgtttatgggtgcggttgtagaaccaacgtga

SEQ ID NO: 19748 - protein, 442 aa, Anabaena variabilis ATCC 29413
MNRQKFSGVKDSFLQRRYAVSLGRRYVLAAASVVLFSVLGCSQVNPDTSALAQTGVSPAESSLQKKTVVPDTKIVDANNKFGFKLFSEIAKEDGNAKNISVSPTSVAIALAMTYNGASGSTQKAMAKTLELQGISLPELNSAYASLNKLLQNPGENVQLTIANSLWANQDVSLRPDFLQTTRDFYQARVTNLDFKNVAAVNTINSWVKENTKGKIDKIVDNIEPNQALFLINAIYFNGKWSSAFDKSQTTPQTFYTASGQQKQHPMMSQTGEYRYYETPQFQSVSLPYGQDGKVSLYIFLPTKNSNLKAFYQNLNAENWETWMPQFRNREGSIRLPRFQTNYDITLNDALKSLGMAEAFSDKANFSGIGDNLTISQVRHKTVIDVNEEGTEASAATSVGMVATSLREPQQPFKMIVDRPFFYAIRDNQSKNILFMGAVVEPT

SEQ ID NO: 19749 - DNA, 1263 bp, Methanococcoides burtonii DSM 6242
  CDS (1)..(1263): transl_table=11
atgaaaaaaataaaaactttgttggtagttacattatgcatagtttcatcactttttctaggttgtattgaagattcaactgtaaacacaaagaatacaatcaatgcagattcagttgaagagtatgatattgcaacagcaaacaatgcttttgcttttgacatgtattcaatgattgaaagcgaagatgaaaatattttcttctcaccgtacagtatattcactgcaatggctatttgttatgatggtgcagaaggttctacaaaaaagcagatttcaaatgttttttactatcctttaagcaaacctgttcttgaagagagttcaaaagagatgatagatacaattaattctgctaatgatgaatatgatctaaaaacagccaatgctctctggatacgaaagaattatcctttgaatgaacagtttgcacataacttgaagatttactatgatggaaatgtaacaaatgtagattttagaaatgaaccagaaaagtctaaagacatcatcaatgaatgggtttcaacaaacaccaatggcaagattaaggacataatctcggatgaaatgatagatccctacaacacagccataatcattacaaatgcaatttactttaaaggaaaatggattaatgagtttgacatagaaaatactcaaaaggaacttttctataattcatcttcaaacgatgaaggaactctcatagacatgatgtatacaaggcagtattttaattacggtgagagcgaagatgcaaaaatcgttgaactgccttacaagggcaatgatttatgtatgtatattgttcttcctgaagaaaataacattgatgattttgaaaacagatttactctctcttattataacaaactcaagtcatccatggaatcagaaaaggatgtaaggatctggttgcctaaattcaagtttaatacaaaaaacgaattatcaaacacattgagaaatatgggaatagtagaagcttttacgagtaacgcaaatttctcaagtatcagtacccgcggtgatctatccatatctgaagtaattcatcaggcatacatcgatgtgaatgaagaaggtactgaggcagcagcagcaacggctattgaagcaactgacagtgcaccgatgcctgggcagataatggaattcaaggccgatcatcctttcatgttcttcatcgaagataagagaacaggttccatactttttatgggaaaagttggaagtcctgaatctgaggaaatgtcataa

SEQ ID NO: 19750 - protein, 420 aa, Methanococcoides burtonii DSM 6242
MKKIKTLLVVTLCIVSSLFLGCIEDSTVNTKNTINADSVEEYDIATANNAFAFDMYSMIESEDENIFFSPYSIFTAMAICYDGAEGSTKKQISNVFYYPLSKPVLEESSKEMIDTINSANDEYDLKTANALWIRKNYPLNEQFAHNLKIYYDGNVTNVDFRNEPEKSKDIINEWVSTNTNGKIKDIISDEMIDPYNTAIIITNAIYFKGKWINEFDIENTQKELFYNSSSNDEGTLIDMMYTRQYFNYGESEDAKIVELPYKGNDLCMYIVLPEENNIDDFENRFTLSYYNKLKSSMESEKDVRIWLPKFKFNTKNELSNTLRNMGIVEAFTSNANFSSISTRGDLSISEVIHQAYIDVNEEGTEAAAATAIEATDSAPMPGQIMEFKADHPFMFFIEDKRTGSILFMGKVGSPESEEMS

SEQ ID NO: 19751 - DNA, 1266 bp, Anopheles gambiae
  CDS (1)..(1266)
atgcggtcggcggtgcccaatagcgtcaggtgctatgcagtcctgatgctactgatttccatcggtacggtgcaacccttccgacggcatcacctccgtcaccagtcctccttcgtgtcgaggagtgactttgactggaatctcgctcgtgaagtgttccggcacgaagactcaaatgttgtgttttcgccgttctccatcaaacttttgctaacgctactgtacgaggcagccgaaccgggatccggcacccgatcgcagctcgaggctgcactggtcgatccggacctgaaccaaacgcgtgccttctacacacagttcctagatgcatcgcagcaaacgaacggtgactacgagttcgatattggcacaaaaatgttcctggacaaggcgcgcgccaagctgcctcaagcgtacactgaccttctggagcaaatgtaccgtacctcggtggagcgggtatcgttcaatggcacaaaggcgaccgccgagcggataaacacctggtgcgaaaaggtaacccgtggtcgcatcacggagctagttacggaagacacgctacaggatgcacagctagtactggcgaacgtgctgttcctgaaagcgtcctggaagaactcgttccccgacgaccaaacgcacaatcggacgtttcacgtcgccgacggcgacacggtgacaaccgagtttatgcgccagatggatctgtacgactacaccgttcacgagcagctcggggcggaagtgctccggctaccgtacaagggacgccagttcagcatgaatatggtgctgccgcaccggaacgtttcacttgcggcgcttgccgacgctctcacgcccaccatgctcgactcgatagcggagcagttcgtacgggaagaggtaacggtgctgataccaaagtttcgcttcaactacggcacactgctcaacgaggccatccagcgcctgggaatacgcgacgttttcactaagaatgcagcacttcccctgcttgcgtctgctgatgacgccaaacagagcaccatcaagaatgaagtgcaggtatcgaagatgctgcaaaaagcgggaatcgagatcaacgaaaaggggacgcttgcctttgcagcgactgaaattcagctagtcaacaaattcggttacgacggcgagccgatcgtgttcgaggctaaccgaccgttcctgttctacatactcgacgaggaaacgaatgcgatcctgttcgtgggaaaggtaacggatccttcgcgcagcacgccctaa

SEQ ID NO: 19752 - protein, 421 aa, Anopheles gambiae
MRSAVPNSVRCYAVLMLLISIGTVQPFRRHHLRHQSSFVSRSDFDWNLAREVFRHEDSNVVFSPFSIKLLLTLLYEAAEPGSGTRSQLEAALVDPDLNQTRAFYTQFLDASQQTNGDYEFDIGTKMFLDKARAKLPQAYTDLLEQMYRTSVERVSFNGTKATAERINTWCEKVTRGRITELVTEDTLQDAQLVLANVLFLKASWKNSFPDDQTHNRTFHVADGDTVTTEFMRQMDLYDYTVHEQLGAEVLRLPYKGRQFSMNMVLPHRNVSLAALADALTPTMLDSIAEQFVREEVTVLIPKFRFNYGTLLNEAIQRLGIRDVFTKNAALPLLASADDAKQSTIKNEVQVSKMLQKAGIEINEKGTLAFAATEIQLVNKFGYDGEPIVFEANRPFLFYILDEETNAILFVGKVTDPSRSTP

SEQ ID NO: 19753 - DNA, 1221 bp, Branchiostoma lanceolatum
  CDS (1)..(1221)
atgcggagtacgtactgcttgttcattggactcctcgttgccatggcaactgcagagaaccccgccccacaagagcctacgtcattggctgacgtcaacagcgagtttgccctggagctgtacaagacgctccacaaggatcatcccgagaacatcttcttctcacccttcagtgtctccacctgtctggccatgacttacctgggggcaaggaatggtacagcacaacagatgagtcgtgtgttgcgcttcaacaagttaaaccacacggacttccacgaacgattccacgaccttctgacccagctacaccacccagacaggccctacacactcaagaccgccaacaggctcttcggtcagaactcctttgagtttggacagaagttccttgacgaaacgtccaggaattacggagcagagttggctcccgtggacttccgtggaaacaccgagggtgcatgtcaaactatcaacaactgggtagaggaacaaacagataacagaattcaagaaattatggagccaggatatctttcaccagaaaccgttttggttctcgtcaatgccatctacttcaaggggagttgggaaagtccattctacatctcagacacgatgttcaactctttccacgtcagtcttgaagaagtcgtacaagttcccatgatgtatcaagacgggatgttcaagttaggacgcgatgaaaacctaaaatgccagatcttggagttaccgtacaagggcaagcacttgagtatggtgttggtcttaccagacaaaatagacggactcaacgccatcgaaacatctctaacgccggaggtactgcgtaagtggcagaactccatggtaaaagaagacgtcggcattctcatacctaagttcaaacttgtgcaagactttgggctcagtgagaagttgtcagaaatggggatgcccgacttgttcggcacggatgcggacttatcgggcatgacaggatcacgtggtcttcacgtggacgcccttctccacaaggcgtttgtagacgtcaatgaagagggtacagaagccgcggcagcgacagcgggggatatagttctgtcagggcctacacacgagttcgatgctgaccgccccttcctgttctttatcaaagacaacgacacgaactctatcttattcataggaagactagtccgcccagaagggactactacgagaaaagacgaattatag

SEQ ID NO: 19754 - protein, 406 aa, Branchiostoma lanceolatum
MRSTYCLFIGLLVAMATAENPAPQEPTSLADVNSEFALELYKTLHKDHPENIFFSPFSVSTCLAMTYLGARNGTAQQMSRVLRFNKLNHTDFHERFHDLLTQLHHPDRPYTLKTANRLFGQNSFEFGQKFLDETSRNYGAELAPVDFRGNTEGACQTINNWVEEQTDNRIQEIMEPGYLSPETVLVLVNAIYFKGSWESPFYISDTMFNSFHVSLEEVVQVPMMYQDGMFKLGRDENLKCQILELPYKGKHLSMVLVLPDKIDGLNAIETSLTPEVLRKWQNSMVKEDVGILIPKFKLVQDFGLSEKLSEMGMPDLFGTDADLSGMTGSRGLHVDALLHKAFVDVNEEGTEAAAATAGDIVLSGPTHEFDADRPFLFFIKDNDTNSILFIGRLVRPEGTTTRKDEL

SEQ ID NO: 19755 - DNA, 1272 bp, Oryza sativa subsp
  CDS (1)..(1272)
atggcggcgctcgccgccggtgagccgttctctggtcgagcgacgggaggcgatggtggtgtgcggagcgacgtcatggctcctcctgcgatggcggaggaggcgaaggtgtcgtgcctgccgctcgcgagggaggtcggccgcagggcggcggcggcaggcggcggccgggggcgcaacttcatcgtctcgccgctgtccttccacgcggcgctcgcgctggtggccgacggcgcgcggggcgagacgcagcgcgagctcctgggcttcctcggctcgccgtcgctcgccgagcttcaccgctcgccgacgacgcggctcgtcgcgaggctccgccacctgccgaacacgtccttcgcctgcggcgtgtgggtggaccgcggccgcgcgctcacgccggagttcgcggacgccgccgcgtcgcgctacgccgccgtcgccgagcccgccgacttcgccacccagcccgagcaggcgcgggagcgagtcaacgccttcgtgtccgacgcgacggaggggctcatccgcgacgtcctccctcccaactccgtcgactcctccacggtggtcgtcctcgccaacgcggtccacttcaaggggacgtggtcgctgccgttccacccgtcggcgaccttccacgcgccgttccacctcctcgacggcggcgccgtgcgcgcgccgttcatgacgacggagatccccttcgagcgccacgtcgccgccttccccggcttcacggcgctcaagctcccctacaagaacgtcggcggcggcggcggtggcgacggcgtgccccgagccgcattctacatgctcctgctcctccccgacggcgacggcgcgctcaagctcgccgatctctacgatatggccgtgaccacgccggagttcatcaagaagcacacgccggcggcggaggctccggtgaggcggctcatggtccccaagttcaagttctcgttcaagttcgaggcgaagtccgacatgcggaagctgggcgtgacccgagctttcgccggcggcgacttctccggcatggtgaccggcggggacggtctcttcatcgccgaagtgtatcatcaggccaccatcgaggtggacgagctcggcaccgtggccgccgcctccaccgccgtggttatgatgcaaaaggggagctcactgccgccggtggacttcgtcgccgaccggccgttcttgttcgccgtcgtcgaggagctcaccggcgccgtactgtttcttgggcatgtggtcaatcctctcgctgaataa

SEQ ID NO: 19756 - protein, 423 aa, Oryza sativa subsp
MAALAAGEPFSGRATGGDGGVRSDVMAPPAMAEEAKVSCLPLAREVGRRAAAAGGGRGRNFIVSPLSFHAALALVADGARGETQRELLGFLGSPSLAELHRSPTTRLVARLRHLPNTSFACGVWVDRGRALTPEFADAAASRYAAVAEPADFATQPEQARERVNAFVSDATEGLIRDVLPPNSVDSSTVVVLANAVHFKGTWSLPFHPSATFHAPFHLLDGGAVRAPFMTTEIPFERHVAAFPGFTALKLPYKNVGGGGGGDGVPRAAFYMLLLLPDGDGALKLADLYDMAVTTPEFIKKHTPAAEAPVRRLMVPKFKFSFKFEAKSDMRKLGVTRAFAGGDFSGMVTGGDGLFIAEVYHQATIEVDELGTVAAASTAVVMMQKGSSLPPVDFVADRPFLFAVVEELTGAVLFLGHVVNPLAE

SEQ ID NO: 19757 - DNA, 1236 bp, Oryza sativa subsp
  CDS (1)..(1236)
atggagctcgcggaggccgtccgggacgagacagccatggccatgcgcctgctcggccacctcgcgcgcgccccacgcggcggcggcggcgacaaaaacctggccgtctccccgctctcgctccacgcggcgctggcgctcctcggcgcgggggcccgcggcgaaacgctcgaccagatcgtcgccttcctcggccccgcgggtggccccgcccacgcggcgctcgcgtcccacgtcgcgctgtgctccctcgccgacgacagcggccccggcgatgaccgcggcgggcccaaggtgcggttcgccaacggcgtctgggtcgacgccgcgctccgcctcaaggccgcgtacgcgcgcgtcgtcgccgacaagtaccgcgcggaggcgcgcccggtgtccttccgagacaagctagaggaagcgaggcgggagatcaacgagtggttcgagagcgcgacggccggccggatcaaggacttcctgcccaaagacgccgtggaccgcgcgacgccggccgtcctcggcaacgcgctctacttcaagggcgactgggagagcaagttcgacgcccggtccacgagcgacgacgtcttctacctccccgacggcggccatgtctccgcgccgttcatgtcgagcagcaagtggcagtacatcgcctgccgcgccggctacaaggtcctcaggctcccgtacgcgcgcggcggccgcggccgcggccgcgacaccggccgcctcttctcgatgtacatctacctccccgacgagcgccacggcctgcctgacatgctgcgcaagctgtgctccgacccggcggcgctgatcgagagctccgccgccctgacggagaaggtccccgtgggcgccttcatggtgccgaggttcaccctgtcgtacaagacgaacgcggcggagacgctgcgacagctcgggctgcgcctgccgttcgagtaccccggcgccgacctgtcggagatggtggagtcatcgccggaggcggagaagatcgtcgtgtcggccgtctaccacgagtccttcgtcgaggtgaacgaggaaggcaccgaggcggcggcggcgaccgccgtcgtcatgacccttggctgcgcggcgccatcggcgccggttcacgtcgtggacttcgtcgccgaccaccccttcatgttcctgatcaaggaggacctcaccggcgtggtggtcttcgccgggcaagtcaccaatccttcgtcctcgacctag

SEQ ID NO: 19758 - protein, 411 aa, Oryza sativa subsp
MELAEAVRDETAMAMRLLGHLARAPRGGGGDKNLAVSPLSLHAALALLGAGARGETLDQIVAFLGPAGGPAHAALASHVALCSLADDSGPGDDRGGPKVRFANGVWVDAALRLKAAYARVVADKYRAEARPVSFRDKLEEARREINEWFESATAGRIKDFLPKDAVDRATPAVLGNALYFKGDWESKFDARSTSDDVFYLPDGGHVSAPFMSSSKWQYIACRAGYKVLRLPYARGGRGRGRDTGRLFSMYIYLPDERHGLPDMLRKLCSDPAALIESSAALTEKVPVGAFMVPRFTLSYKTNAAETLRQLGLRLPFEYPGADLSEMVESSPEAEKIVVSAVYHESFVEVNEEGTEAAAATAVVMTLGCAAPSAPVHVVDFVADHPFMFLIKEDLTGVVVFAGQVTNPSSST

SEQ ID NO: 19759 - DNA, 1194 bp, Oryza sativa subsp
  CDS (1)..(1194)
atggagcaggaagctgccgtgagagaccaggtggagctcaccatgcgcctcctccaccacctcctcctcgacgacaagcacggcaccaccaccaacctcgccttctcgccgctgtcgctccacgccgccctcaccctcctcgcctccggcgcggctggcgccacccgcgagcagatcgtcgccttcctcggcccagccggcgcagacgcccacacggcgctcgcgtccaaggaggcttccgtcggcgtcctcgcctgccgccggagcgccggctgcagcaatcccgaggtccgctccgccatggccgtctgggtcgacgcctctctccgcctcaaccccgccttcgccgacaccgccgcctccgtgttcaaggctgccgtgcggtcagccggcaaccccgcggcagcgagggccgagatcaacgagtggttcagtagccagaccggcggcttcgtcaaggacatcctctccaactccatcgacgacgacgacgacggcagcggcggcggcggcggcgccatctccgcctcggtcttcctcgccaactcactctacttcaacgcctactgggaccaccccttcttaccgcacctcaaggaggaaggcgacttcacccaccagcacgccttcatggacgtcggctgccacccgggcttctacgtcctgcgcatgatgtaccgcacgggcggcgccgccggcggggacaagatgttcgcgatgtacatctacctccccgacgaccgcgacggcctcccggagctcgcgcgcaagctcgcctccaacccggccgcgttcctgcgcaggacgatcgtgccggcgcagcctgttgcggtcggcgagctcaagatccccaaattcgaggtgtcgctcaaggtggaggcgtcgcgtctcctccgggaactcggcctcgacctgccattcctccccgccgccgacaactcgttctcggggatgctgctggacccgcctcaggggacagccgtctcgtcccttctccaccagtgcttcgtcaatgtgaatgaggaagggaccgtggctgctgcgggcaccgtcggggagatcatgggcttcgccatgccggacgatcaaatcgtcgatttcgtcgccgatcaccccttccttttcttcatcgtggaggaggtgagtggcctcgtggtgttcgccggtcaagtcgtcaacccattgctccattga

SEQ ID NO: 19760 - protein, 397 aa, Oryza sativa subsp
MEQEAAVRDQVELTMRLLHHLLLDDKHGTTTNLAFSPLSLHAALTLLASGAAGATREQIVAFLGPAGADAHTALASKEASVGVLACRRSAGCSNPEVRSAMAVWVDASLRLNPAFADTAASVFKAAVRSAGNPAAARAEINEWFSSQTGGFVKDILSNSIDDDDDGSGGGGGAISASVFLANSLYFNAYWDHPFLPHLKEEGDFTHQHAFMDVGCHPGFYVLRMMYRTGGAAGGDKMFAMYIYLPDDRDGLPELARKLASNPAAFLRRTIVPAQPVAVGELKIPKFEVSLKVEASRLLRELGLDLPFLPAADNSFSGMLLDPPQGTAVSSLLHQCFVNVNEEGTVAAAGTVGEIMGFAMPDDQIVDFVADHPFLFFIVEEVSGLVVFAGQVVNPLLH

SEQ ID NO: 19761 - DNA, 1212 bp, Oryza sativa subsp
  CDS (1)..(1212)
atggcgctgtccatgcgcctcaccaagcagctctccgccgccgccgccgccagcaaggctggcgctgccggcaacctcgtcttctcgccgctgtccatctactccgcgctctccgtggtcaccgccggcgcgcgcgggcgcaccctgacagagctcctcggcgccctcggcgcagagtcccgcgagaagctcgccgcgaacgccggcgagatggcgcgtgctctccccgcccccggcggcggcgcggcacagccgggcggcggcccgcgcgtcgcgcacgcgtgcggagtctggcacgagcggacgcggacggttaggccggcgttccgcgacgccgccgccgcgtcgttcaacgccgcggccctcgccgtcgacttcctcaacaacccggaggaagcgaggaaggagatcaacagctgggttgcggcggcgacggagaacctcatcgacacgatcctcccgccggggtcggtgagcacggacacgggcctcgtggtcaccagcgccatctacttcaacggccaatggcggactcctttctgtaaggagataaccgagaagcgggcgttccaccgcctcgacggcggcgacgtcgaggcggacttcatgcgcagcggcgaggaccagtacatcgccgtgcacgacgggttcaaggtgctcaagatgccgtacgcggcttgtgtgagcgcgaggacgacgacgacgccgaggtactcgatgtacgtcttcctccccgacgagcgcgacggcctgtggagcctggaggacaggatggcggccggcggcgagggcttcctccgcgagcacacgccggagcggcgcgtcgaggtcggcgagttcaggatccccaggttcaagctctccttcgacgacagcgtcgtgggcgccctccagcgtctcggggtcagggacgtgttcaagccgttcgtggcggacctggccgacgtgctggaagcggagaactctggcgatgatccgccgctgtttgtgtcggacgtcaagcacaaggccgtcatcgaggtgaacgaggagggcaccgaggcggccgccgccaccgcggtttgtcttaccttcgcatcggcggcgccatcgtcacggcggccggcgagggtggatttcgtcgccgaccatccgttcgcgttcttggttttggaggagtcgtcgggtgcggtgctcttcgccggccacgttgttgacccgacagatgagtaa

SEQ ID NO: 19762 - protein, 403 aa, Oryza sativa subsp
MALSMRLTKQLSAAAAASKAGAAGNLVFSPLSIYSALSVVTAGARGRTLTELLGALGAESREKLAANAGEMARALPAPGGGAAQPGGGPRVAHACGVWHERTRTVRPAFRDAAAASFNAAALAVDFLNNPEEARKEINSWVAAATENLIDTILPPGSVSTDTGLVVTSAIYFNGQWRTPFCKEITEKRAFHRLDGGDVEADFMRSGEDQYIAVHDGFKVLKMPYAACVSARTTTTPRYSMYVFLPDERDGLWSLEDRMAAGGEGFLREHTPERRVEVGEFRIPRFKLSFDDSVVGALQRLGVRDVFKPFVADLADVLEAENSGDDPPLFVSDVKHKAVIEVNEEGTEAAAATAVCLTFASAAPSSRRPARVDFVADHPFAFLVLEESSGAVLFAGHVVDPTDE

SEQ ID NO: 19763 - DNA, 1338 bp, Oryza sativa subsp
  CDS (1)..(1338)
atggcgccgccgccgccggcggcgccgccgtgccccggcctgacggagctcgccctccgcgtcgccaggaggatccaggccggcggtgcccccgacggcaacctcgtcttctcgccgctgtccgtgtacgccgcgctcgcgctggtggccgcgggcgccggcggcgacacgctcgccgagctcctcggcgttctcggcgcgggctcccgggacgagctcgccggcctcaccggccgcctcgcggggcgggcgctcgccgaccggtcccgcgccggcgggccgcgcgtgtcgttcgtgtccggcgtgtggtacgacaagaccaggacgctctcgccgtcgttccgcgacgccgccgtccagtccttcatggcggagacgcgcgccgccgacttccgcgaaaagccaggggaggcggtgaaccagatcaacgcgtgggcgaggaaggcgacgaacaagctcatcgacacggtcatcgacggtggattgcccgccgacaccgacgtcgtcgtcgccaacgccgtctacttcaagggcaaatggaaggatcccttcacgaaggcgttgaccaagaccggcaagttccaccgcctcgacggcgccgccgtcgacgcgagcttcatgcagaggggcacctactacgacacgggcgattacatcgcctgccacgacgggttcaaggtgctccggctgccgtacgacgacgaacggcgccgctccccggcgtcgccgccgccgccgccgtcgacgccgcgcttctcgctgtgcgtcttcctccccgacgcgcgcgacgggctctgggacctcctcgacgagatcgcgtcaaccccgggcttcctccaggcgaagctgccgacgaggcacgcgtccgtcggcgagctcaagctgcccaagttcaagctcaccttctccggcgacatcgccggcgtcctccgcggcctgggcctcgacgccaccttcagcgacggggaggccgacttctccaagatggtggaggacgacggcggcaggcggccgctgtcgatgaggagcctcgtccacaaggccgtgatagaggtgaacgaggaaggcaccgaggcggccgcctccgccatcaacatggtgtgcggcatgagtatgacgccggagccaccgccggtgccggtggacttcgtcgccgaccatcctttcgccttcttcgtcatcgaggagacgacgggcgccgtcgtcttcgccggccacgtccttgatccgagctcaacggccggagctttggacgatgacgacgacgacgacgagttcgtcgtaatgggatgtcttcgctatcttttggatcgctgcatggcatttgttggggtttag

SEQ ID NO: 19764 - protein, 445 aa, Oryza sativa subsp
MAPPPPAAPPCPGLTELALRVARRIQAGGAPDGNLVFSPLSVYAALALVAAGAGGDTLAELLGVLGAGSRDELAGLTGRLAGRALADRSRAGGPRVSFVSGVWYDKTRTLSPSFRDAAVQSFMAETRAADFREKPGEAVNQINAWARKATNKLIDTVIDGGLPADTDVVVANAVYFKGKWKDPFTKALTKTGKFHRLDGAAVDASFMQRGTYYDTGDYIACHDGFKVLRLPYDDERRRSPASPPPPPSTPRFSLCVFLPDARDGLWDLLDEIASTPGFLQAKLPTRHASVGELKLPKFKLTFSGDIAGVLRGLGLDATFSDGEADFSKMVEDDGGRRPLSMRSLVHKAVIEVNEEGTEAAASAINMVCGMSMTPEPPPVPVDFVADHPFAFFVIEETTGAVVFAGHVLDPSSTAGALDDDDDDDEFVVMGCLRYLLDRCMAFVGV

SEQ ID NO: 19765 - DNA, 1251 bp, Oryza sativa subsp
  CDS (1)..(1251)
atggaagacgacgccggcaactgcggcggcctgacggcgttcgcgctccgcctggcgaagcgtctcgccgacgacggcgacaacagcaacaggaacgtcgtcttctcgccggtgtccctgtacgccgcgctggcgctggtggcgtccggggcacggggcaccaccctggacgagctcgtcgcgctgctcggcgccgcgtcgctcgacgacctcgaggagtcagtacgccgcgccgtggaggtcggcctcgccgacgagtccgagtccggcgggccgcgcgtctcctacgcctgcggcgtctggcacgacgagaggctcgcgctgaagccggcctaccgcgccgccgccgtcgagacctaccaggccgagacgcgcgccgccgacttccaaagacagccaaagagttcaagaaagaagatcaacaagtgggtgtccaaggcgacgaacaagctcatccgcgagatcctcccagatggatcagttcatggcggcaccgccctcgttctcgtcaacgccatctacttcaagggcaaatggtccaatcccttccccagggagagaaccaccaccggcaagttccaccgcctcgacggcagctccgtcgacgctccgttcatgagcagccgggaggatcagtacatcggcttttacgacggcttcaaggtgctcaagctgccgtaccaccggaccatgaagaaccatggcgatggtggtgacatcactccggccatcctcaaacactacggcgagaacgtggggttgtcgatgtacatcttcctgccggacgcgcgcgacggcctgccggcgctcgtcgacaagatggcagcggcgtcgtccggcacggcctcctcctccttcctgcgcgaccaccggccggggcaacggcggatcaaggtcggcgacctgagggtgccgaggttcaaggtgtcgttctacagcgagatgaacgaggttctgaaggggatggggattggggccgccttcgacgtcggcaaggtcgacctatccggcatgatcgacggcgagctggtggtggtggagaaggtgatgcacagggcggtcgtggaggtgaacgaggaaggcacggaggcggcggcggccacggcctgcacgatgaagctcttgtgtttaactttaacctctcctgtggacttcgtcgcggaccatccgttcgcgttcttcgtggtggaggagaagtcggatgcggtgctcttcgctggccacgtccttgacccaacaagcttggagtaa

SEQ ID NO: 19766 - protein, 416 aa, Oryza sativa subsp
MEDDAGNCGGLTAFALRLAKRLADDGDNSNRNVVFSPVSLYAALALVASGARGTTLDELVALLGAASLDDLEESVRRAVEVGLADESESGGPRVSYACGVWHDERLALKPAYRAAAVETYQAETRAADFQRQPKSSRKKINKWVSKATNKLIREILPDGSVHGGTALVLVNAIYFKGKWSNPFPRERTTTGKFHRLDGSSVDAPFMSSREDQYIGFYDGFKVLKLPYHRTMKNHGDGGDITPAILKHYGENVGLSMYIFLPDARDGLPALVDKMAAASSGTASSSFLRDHRPGQRRIKVGDLRVPRFKVSFYSEMNEVLKGMGIGAAFDVGKVDLSGMIDGELVVVEKVMHRAVVEVNEEGTEAAAATACTMKLLCLTLTSPVDFVADHPFAFFVVEEKSDAVLFAGHVLDPTSLE

SEQ ID NO: 19767 - DNA, 1182 bp, Plutella xylostella
  CDS (1)..(1182)
atgaagctcttaatatgtgtactgtctgtggtcgtggcaacaatggcggacgagatcgaggacttcaagcagcagctcaacaatggaaacgatctattcacggccaatatgttctcggaggttctgaagcagcagaacggcaagaacgtggtcctgtcagccttctcggtgctgactccggtggcgcagctcagcctggcctcctcgggggagactcatgacctgctcctcaagaccttgggcttgcccagtgacgaagccatcaaaagcgtatttccgctcgtgaacgctaaactgcgggacatcaagggggtgacgctcaaacaagccagccgcatctacctgccgctgacggccgagctggccgacgacttcgccgccgcgtccagggatgtcttcggctccgaagccaagaacctcgacttcaccaaaaacgtcgagtccgctaaagaaatcaacgactgggtggaagagcagaccaacaaccgtatccaggacctggtggaccctgacagtatcaaacccgacaccgccagccttcttgtcaatgccatctacttcaagggtacatggaagagcaagttcgacaacgcgagcaccaccgagcgagacttccacgtgtccaaggacaagaccgtgaaggttcccacaatgtaccagaaggctagcttcaaatatggagaaagtgctgaactggacgctaagcttctggaaatgccctacgaaggagaaaaagcgtcattcctgatcattctgcccaacgacatcgaaggtctgcccgccctgaccgagaagctcaaagagccacagcacctcaacaaagctctcagtgaaatgtacaagggcgaaatccaagtgtacattcctaagttcaaaatcgagacggagaccgatctcaaagaagtcatgtctaacatgggtctatccagcctctttgagcctggcaaagccacaattgacaaactattgaaatctaaggcgcctttgtatattggtgatgcgaaacagaaggctttcattgaagtgaacgaggaagggtctgaggcagcagcggctaatgttttttccatgttgcgttcggcgaagatggcccaccctccgttcgtggccgaccgtccgttcgtcttcagcatccagcaagcctccaccagcctcttcagcggagccttcctggacgcatag

SEQ ID NO: 19768 - protein, 393 aa, Plutella xylostella
MKLLICVLSVVVATMADEIEDFKQQLNNGNDLFTANMFSEVLKQQNGKNVVLSAFSVLTPVAQLSLASSGETHDLLLKTLGLPSDEAIKSVFPLVNAKLRDIKGVTLKQASRIYLPLTAELADDFAAASRDVFGSEAKNLDFTKNVESAKEINDWVEEQTNNRIQDLVDPDSIKPDTASLLVNAIYFKGTWKSKFDNASTTERDFHVSKDKTVKVPTMYQKASFKYGESAELDAKLLEMPYEGEKASFLIILPNDIEGLPALTEKLKEPQHLNKALSEMYKGEIQVYIPKFKIETETDLKEVMSNMGLSSLFEPGKATIDKLLKSKAPLYIGDAKQKAFIEVNEEGSEAAAANVFSMLRSAKMAHPPFVADRPFVFSIQQASTSLFSGAFLDA

SEQ ID NO: 19769 - DNA, 1185 bp, Plutella xylostella
  CDS (1)..(1185)
atgaagctcttaatatgtgtactgtctgtggtcgtggcaacaatggcggacgagatcgaggacttcaagcagcagctcaacaatggaaacgatctattcacggccaatatgttctcggaggttctgaagcagcagaacggcaagaacgtggtcctgtcagccttctcggtgctgactccggtggcgcagctcagcctggcctcctcgggggagactcatgacctgctcctcaagaccttgggcttgcccagtgacgaagccatcaaaagcgtatttccgctcgtgaacgctaaactgcgggacatcaagggggtgacgctcaaacaagccagccgcatctacctgccgctgacggccgagctggccgacgacttcgccgccgcgtccagggatgtcttcggctccgaagccaagaacctcgacttcaccaaaaacgtcgagtccgctaaagaaatcaacgactgggtggaagagcagaccaacaaccgtatccaggacctggtggaccctgacagtatcaaacccgacaccgccagccttcttgtcaatgccatctacttcaagggtacatggaagagcaagttcgacaacgcgagcaccaccgagcgagacttccacgtgtccaaggacaagaccgtgaaggttcccacaatgtaccagaaggctagcttcaaatatggagaaagtgctgaactggacgctaagcttctggaaatgccctacgaaggagaaaaagcgtcattcctgatcattctgcccaacgacatcgaaggtctgcccgccctgaccgagaagctcaaagagccacagcacctcaacaaagctctcagtgaaatgtacaagggcgaaatccaagtgtacattcctaagttcaaaatcgagacggagaccgatctcaaagaagtcatgtctaacatgggtctatccagcctctttgagcctggcaaagccacaattgacaaactattgaaatctaaggcgcctttgtatattggtgatgcgaaacagaaggctttcattgaagtgaacgaggaagggtctgaggcagcagcggctaatgtgatgaacttcgcgatgtgttcagcgatgatcggccccgctcccttcagcgccgaccgacccttcgctttcgctattcgacacgctggcatcagcttctttagtggagctttcttcgaagcttag

SEQ ID NO: 19770 - protein, 394 aa, Plutella xylostella
MKLLICVLSVVVATMADEIEDFKQQLNNGNDLFTANMFSEVLKQQNGKNVVLSAFSVLTPVAQLSLASSGETHDLLLKTLGLPSDEAIKSVFPLVNAKLRDIKGVTLKQASRIYLPLTAELADDFAAASRDVFGSEAKNLDFTKNVESAKEINDWVEEQTNNRIQDLVDPDSIKPDTASLLVNAIYFKGTWKSKFDNASTTERDFHVSKDKTVKVPTMYQKASFKYGESAELDAKLLEMPYEGEKASFLIILPNDIEGLPALTEKLKEPQHLNKALSEMYKGEIQVYIPKFKIETETDLKEVMSNMGLSSLFEPGKATIDKLLKSKAPLYIGDAKQKAFIEVNEEGSEAAAANVMNFAMCSAMIGPAPFSADRPFAFAIRHAGISFFSGAFFEA

SEQ ID NO: 19771 - DNA, 1179 bp, Medicago truncatula
  CDS (1)..(1179)
atggagaagaaagcaaccccgtcacgaagaaaaagaaaaagaatgaagtttcaatacatacctcaagaagaagaatcagtcaccattaccaaccaaaccaacgtatccctcaacatcgtcaaacatctcttttcaaaacaatcagacaataacatcatgttttctccgctatcacttcaagttgttctcagccttatcgctgctggatccgagggaccgacacaacaacagcttctccacttcctccgctccgaatctaccaataatctcaactcctttgtggctaaactcgtttccataaccctctctgatgccgctcctgctggtggtcctcgcctctcattctttaatggtttgtggtttgatcaagccctttctcttaaaccctccttcgaacaaattgtgtccaatgattacaaggctactttagattctgttgattttcagaacaaggcagttgaagtgacaaatgatgtgaatttatgggctaaaaaggagacaaatggtcttattgaggaaattctaccttcagattctgtcaacaacttaacgaaactcatatttgctaatgcactttactttaaaggggtgtgggatcaacagtttgatgcttcggaaacaaaagactatgattttcacattctgaatggcaacgtaatcaaagttcccttcatgaccagcaacgaggatcaatttatttgtgctttcgatgatttcaaagtacttcgtcttccatacagacaagatggactgtctgctttgattgagagggtggcttctcaatccgaggtactacaccaaaatcttcggcgtttttctcaaaagagagtaggtgatttcagaattccaaggttcaaggtttcatttgggtttgaaacttctgatatgctgaaggagcttggagtagttttacctttctctcctggaggtttgacaaaaatggtggactttcttgaacatcaagacctctttgtttctcgcatatttcacaaatctttcatcgaagtaaatgaagaaggaactgaagttgctgcagtcactgctgctgtattcggagtcaagggtgtaagtcctcgagtagattttgtagctgaccaccctttcttatttctaattagagaagatttaaccgaaacaatcctctttgtagggcaagtactcaatccttttgttgagtga

SEQ ID NO: 19772 - protein, 392 aa, Medicago truncatula
MEKKATPSRRKRKRMKFQYIPQEEESVTITNQTNVSLNIVKHLFSKQSDNNIMFSPLSLQVVLSLIAAGSEGPTQQQLLHFLRSESTNNLNSFVAKLVSITLSDAAPAGGPRLSFFNGLWFDQALSLKPSFEQIVSNDYKATLDSVDFQNKAVEVTNDVNLWAKKETNGLIEEILPSDSVNNLTKLIFANALYFKGVWDQQFDASETKDYDFHILNGNVIKVPFMTSNEDQFICAFDDFKVLRLPYRQDGLSALIERVASQSEVLHQNLRRFSQKRVGDFRIPRFKVSFGFETSDMLKELGVVLPFSPGGLTKMVDFLEHQDLFVSRIFHKSFIEVNEEGTEVAAVTAAVFGVKGVSPRVDFVADHPFLFLIREDLTETILFVGQVLNPFVE

SEQ ID NO: 19773 - DNA, 1068 bp, Arabidopsis thaliana
  CDS (1)..(1068)
atgaatgtgaaaaaggctatgaagaagcaaaacgacgtcgcgatgatccttgggaggcacgtcttatcttctgagtcggaatctaacgtcatcttctcgccggcgtcaataaactctgcgatcaccatgcacgccgctggttccggaggtggcttagtcgccggtgaaatcctctccttcctcagatcttcttcaatcgatgagctcaaatccgtcttccgagaactatcatccatcgtctacgccgacagcagcgctagtggcggcccaaagatgagggcggtgaatggcctctggattgagaaatcactaccgattgatcccaaatacaaggctctcttcgagaacttcttcaaggctgtttacgttcccgtagatttccgatcaaaggctgaagaagtgcgtaaggaggtgaattcatgggttgaagatcacaccaataatctcatcaaagatcttcttcctcgtgaatctgtgacaagccgaaccaacaagatttacgcaaacgcattgtatttcaagggagcttggaagagaccatttgaaaagtactatacaaaagacagagacttccacatggtcaatggcactacagtctctgtgccattcatgaccagctacgagacacaaaaagtaagagcttataacggtttcaaggtccttaccgacgaggccgtgatgataccaaccgcaaattctcaatcatctacacctggattcttggatagtcacattccgagatacaaagttgaacttgaggaatttagaattccaaagtttaagatcgaattcggtttttctgctacaagcgttttgaatcaagtgggagtactgcattcagtgtcaatgtaccataaagcttgtgtcgagatcgatgaagaaggtgctgaagctgcggctgcaactgctgatgtagaagatgacggttgtgctcttgatatggggccacctcctaagaagatagattttgtggctgatcatccatttattttccttatccgagaagacaaaaccgggaccgttttgttctttggtcagctcttcaaaccttcggaattcttgttctga

SEQ ID NO: 19774 - protein, 355 aa, Arabidopsis thaliana
MNVKKAMKKQNDVAMILGRHVLSSESESNVIFSPASINSAITMHAAGSGGGLVAGEILSFLRSSSIDELKSVFRELSSIVYADSSASGGPKMRAVNGLWIEKSLPIDPKYKALFENFFKAVYVPVDFRSKAEEVRKEVNSWVEDHTNNLIKDLLPRESVTSRTNKIYANALYFKGAWKRPFEKYYTKDRDFHMVNGTTVSVPFMTSYETQKVRAYNGFKVLTDEAVMIPTANSQSSTPGFLDSHIPRYKVELEEFRIPKFKIEFGFSATSVLNQVGVLHSVSMYHKACVEIDEEGAEAAAATADVEDDGCALDMGPPPKKIDFVADHPFIFLIREDKTGTVLFFGQLFKPSEFLF

SEQ ID NO: 19775 - DNA, 1332 bp, Triticum aestivum
  CDS (22)..(1218)
aacgaaacctccatcctagccatggcaaccaccctcgccactgacgttcgcctctccattgcgcaccagacccgctttgccttccgcctcgcctccgctatctcatccaaccccgagtctactgtcaacaatgccgcattctctccagtctccctccatgtcgcgctaagcctcatcaccgctggcgcggggggcgccacccgcaaccaactcgccgctacactgggggaaggcgaggttgagggactccacgcactcgccgagcaggtggtgcagttcgtcctcgccgacgcgtccaacatcggcggcccgcgcgtcgccttcgccaacggcgtcttcgtggacgcgtcgctgcagctcaagccatccttccaggagctcgcagtgtgcaagtacaaggccgaggcccagtccgtggacttccaaactaaggccgcggaagttactgctcaagtgaactcatgggtagagaaagtcacaaccggtctcatcaaagatattctccccgccggatctattgacaataccactagacttgttcttggcaatgccctttatttcaaaggagcttggacagatcagtttgatccacgtgcaacacaaagcgacgacttctaccttcttgatgggagctcaattcaaacaccattcatgtacagctcagaagaacaatacatttcttcttctgatggcttgaaggtgcttaagcttccttacaagcaaggtggggacaagaggcagttctccatgtacatccttctcccagaagcactaagtggtctctggagcttggcagaaaagttgagtgccgaaccagagttcctggagcagcatatcccaaggcagaaggttgcactcaggcaattcaagctccccaagttcaagatatccttgggaattgaagcatctgatttgctcaaaggtttgggtctgctacttccattcggtgctgaagcagatctttcggagatggtggattccccaatggcacagaacctctacatctcatccatttttcacaaagcatttgtcgaagtgaatgaaacaggaactgaggctgcagcaacaactattgctaaagtagtcctgcgacaagcaccgccgccctcggtcttggatttcatcgtggatcaccctttcctcttccttatccgggaagacacttccggtgtggttctattcatcggtcatgtggtcaatcccctcctatcttcgtaatgtgtttgctctgaagtgtcttgtcatttgcctcagctgttacatgtaaggggagggtttggacaatcaatcatgctacccatgcaataaatccaataaatgttctatgcttca

SEQ ID NO: 19776 - protein, 398 aa, Triticum aestivum
MATTLATDVRLSIAHQTRFAFRLASAISSNPESTVNNAAFSPVSLHVALSLITAGAGGATRNQLAATLGEGEVEGLHALAEQVVQFVLADASNIGGPRVAFANGVFVDASLQLKPSFQELAVCKYKAEAQSVDFQTKAAEVTAQVNSWVEKVTTGLIKDILPAGSIDNTTRLVLGNALYFKGAWTDQFDPRATQSDDFYLLDGSSIQTPFMYSSEEQYISSSDGLKVLKLPYKQGGDKRQFSMYILLPEALSGLWSLAEKLSAEPEFLEQHIPRQKVALRQFKLPKFKISLGIEASDLLKGLGLLLPFGAEADLSEMVDSPMAQNLYISSIFHKAFVEVNETGTEAAATTIAKVVLRQAPPPSVLDFIVDHPFLFLIREDTSGVVLFIGHVVNPLLSS

SEQ ID NO: 19777 - DNA, 1380 bp, Triticum aestivum
  CDS (58)..(1257)
atttactctgtcttcctctcaggtctaaccaaagcccaacaaaccaccacctcggccatggcaaccaccctcgccaccgacgtccgcctctccatcgcgcaccagacccgcttcgccctccgtctcgcctccaccatctcatccaaccctaagtctgctgccagcaatgccgccttctccccggtctccctccactccgcacttagcctcctcgccgctggtgcgggcagtgccactcgggaccaactcgtcgccacactcgggacaggcgaggtcgagggaggccacgcgctcgccgagcaagtggtccagttcgtgctcgccgacgcgtcctccgctggaggtccgcgtgtcgccttcgccaacggcgtcttcgtggacgcgtcgctgctcctcaagccatccttccaagagcttgcagtgtgcaagtacaaggccgagacccaatccgtggacttccaaactaaggccgctgaagttactactcaagtgaactcatgggtagagaaagtcacaagcggtcgcatcaagaacattctcccatcaggatctgttgacaataccactaaacttgttcttgccaatgccctttatttcaaaggagcttggacagatcagtttgattcatatggaacaaaaaacgactacttctaccttcttgatgggagctcagttcaaacaccattcatgtccagcatggatgacgaccaatacatttcgtcttctgatgggttgaaggtacttaagcttccttacaagcaaggtggggacaataggcagttctccatgtatatccttcttccagaagcaccgggtggtctctcgagcttggccgaaaaattgagtgctgaaccagacttcttggagcggcatatcccaaggcagagggttgcaattaggcaattcaagctccccaagttcaagatatcatttggaatggaagcatctgatttgctcaaatgcttgggcctccagcttccattcagtgatgaagcggatttttcggagatggtggattccccaatgccacaaggtcttcgtgtctcatctgttttccaccaagcgtttgtggaagtgaacgaacaaggaactgaggctgcagcatcaactgctattaaaatggtcccgcaacaggcaaggccgccctcggtcatggatttcatcgcggatcaccctttcctcttccttctccgggaagacatctctggtgtggtcctattcatgggtcatgtggtcaatcccctcttatcttcgtaatgtgtttgctctgaaagtgcgtgttgtcggttgcctcagccattacatgtaatggaagggtttcaaccgtcagccatgttatccatacaataaatccaataaatggttctgctaagacatcca

SEQ ID NO: 19778 - protein, 399 aa, Triticum aestivum
MATTLATDVRLSIAHQTRFALRLASTISSNPKSAASNAAFSPVSLHSALSLLAAGAGSATRDQLVATLGTGEVEGGHALAEQVVQFVLADASSAGGPRVAFANGVFVDASLLLKPSFQELAVCKYKAETQSVDFQTKAAEVTTQVNSWVEKVTSGRIKNILPSGSVDNTTKLVLANALYFKGAWTDQFDSYGTKNDYFYLLDGSSVQTPFMSSMDDDQYISSSDGLKVLKLPYKQGGDNRQFSMYILLPEAPGGLSSLAEKLSAEPDFLERHIPRQRVAIRQFKLPKFKISFGMEASDLLKCLGLQLPFSDEADFSEMVDSPMPQGLRVSSVFHQAFVEVNEQGTEAAASTAIKMVPQQARPPSVMDFIADHPFLFLLREDISGVVLFMGHVVNPLLSS

SEQ ID NO: 19779 - DNA, 1179 bp, Oryza sativa
  CDS (1)..(1179)
atggattactgcttgcaagtggcctggatcgccggcacgaaggcgatcacggagcagtccaatttcatgttctcgcccttgggcctccgcgccgggctcgcgctgctcgccacgggcactgacggcgagacgctgcgccagctgctggccttcctgggctcccagcacatccaccagctcaatgcggcgagtgccgggctcctcgccgagatgcgggcgtggccgcaactctccttcgccgcgggaatctttgtggaccgctcgctccgcctcaggccggagttccagtccaccgctgccgccgctcacggggcattcccacgatccgtggacttccaaaaccaggctaacgctgcggcggcggaggtgaaccgtttcatctcgcaggccacgaacgggcgcttgaacaacaccatctcccctggcacattcgggagcagcacaaagtgcgtccttgccaacgccatgcacttcaaggcgacgtggggtcggaagttcgagtcgtacgacacccagcgccgcaggttccaccgccaggacggcacgagggtgacggtgccgttcctgtcggaccccaggacgcactacgccgccaggttcgacggcctcgggttcaaggtcctccagctcttctacaagatggtgggacacgacggccaggtccacttcggggcgccctgcttctgcatgctcgtgttcctcccgatcaagcgcgacggcctccgccacctcctgcgcatggccgtcaccgagccggacttcgtcatgcggtgcgtgccccggagcgagcaggaagtctccccgtgcatggtccctaagttcaagttctcctccgagctcgacgcccgcggtgcgctggcaaagctcgggctgggcgcgccgttcgatcctctcgccgccgacctgtccaggatggctgtgagtgtgaacacgccgccggagaggctctatgtgtcggcaatgaggcagaagtgcgccgtggaggtcgacgaggagggcacgacggcggtggaggcgacgtactcgtgttgcagcccgacctatagcggaccggagtctcccaagccgcggccaatgagcttcgtggcagagcacccgttcatgttcgccatcgtggagtatgagaaggcccaggtcttgttcctcgggcacgtcatggacccttcaaatgaggaatga

SEQ ID NO: 19780 - protein, 392 aa, Oryza sativa
MDYCLQVAWIAGTKAITEQSNFMFSPLGLRAGLALLATGTDGETLRQLLAFLGSQHIHQLNAASAGLLAEMRAWPQLSFAAGIFVDRSLRLRPEFQSTAAAAHGAFPRSVDFQNQANAAAAEVNRFISQATNGRLNNTISPGTFGSSTKCVLANAMHFKATWGRKFESYDTQRRRFHRQDGTRVTVPFLSDPRTHYAARFDGLGFKVLQLFYKMVGHDGQVHFGAPCFCMLVFLPIKRDGLRHLLRMAVTEPDFVMRCVPRSEQEVSPCMVPKFKFSSELDARGALAKLGLGAPFDPLAADLSRMAVSVNTPPERLYVSAMRQKCAVEVDEEGTTAVEATYSCCSPTYSGPESPKPRPMSFVAEHPFMFAIVEYEKAQVLFLGHVMDPSNEE

SEQ ID NO: 19781 - DNA, 1278 bp, Aedes aegypti
  CDS (1)..(1278)
atgcctgctcaatgccctcgatttgggctaagcgcggtgcatatgggggtggcacttctatttttattgactacctctgcaacccttagaaatgttggaaatcatcgatcgaaccagctacaaaatcaacccgacgcagttcttttaaacaatgatcttgattggaaactcgtcaaggaagtgttccatcatgaacagaaaaacgtaattttttctccgttctccatcaaattgttgctttccctgctgtacgaagcatcaaaagaacacagcaaaacccgacaggaactatcactcgttctggctggctcagacctggaaaagaatcgactattgtatcaggaattcctggaaagttccacgaaagaaaacagcaactatcagttcaacgttggaacacggatttttactgatcaaagggcggccaacgtttcagatgcttattccgatttggtgcagaattgctacaaaactagtatagagtctgtggagtttgacagtcccaaagagactgctaacaagatcaacgaatggtgctttaacattactaatggacacttgaaagatctagtagatgaagagctcatcaaggactcagtaatggtgatagtgaacgctctgttcctgaaagcttcgtggagaaattcgttcaaagaagagctcaacagaaagcggaatttctacgtgtcggaaaacaccaccgttgaagcagagtttatggagcagactgacatctaccaatatctcgacgatcctgatatgcagcttgaaatggttcgattaccttataagggtcgccacttttcgatgaccatagttctgccctacgcaaaccggtcattggggaaaatggtcgagtccctcacagaccaaaacctgctgaaacttgaatcgaacctacaacgggacgaaattgtagtcattattcccaaatataaattcgactacagcacaacgctcaatgatgtgctgataaggctgggaataactgaagtattcaccgataaagctgagttaccggaactctccggaggcaagaactcaacattggcagtgtcaaaaatgcttcaaaaggctggcattgaagtcaacgaaaaaggaactctagctttcgcagccacagaaattcaactggtaaacaaattcggcatagacgatatgcctattcagtttaaagcgaaccgacccttcatgttctacatcaaagacgaagattcggatgctgtgctctttgttggaaaagtagagaatcccgtggcgacggaaaaactaccgtag

SEQ ID NO: 19782 - protein, 425 aa, Aedes aegypti
MPAQCPRFGLSAVHMGVALLFLLTTSATLRNVGNHRSNQLQNQPDAVLLNNDLDWKLVKEVFHHEQKNVIFSPFSIKLLLSLLYEASKEHSKTRQELSLVLAGSDLEKNRLLYQEFLESSTKENSNYQFNVGTRIFTDQRAANVSDAYSDLVQNCYKTSIESVEFDSPKETANKINEWCFNITNGHLKDLVDEELIKDSVMVIVNALFLKASWRNSFKEELNRKRNFYVSENTTVEAEFMEQTDIYQYLDDPDMQLEMVRLPYKGRHFSMTIVLPYANRSLGKMVESLTDQNLLKLESNLQRDEIVVIIPKYKFDYSTTLNDVLIRLGITEVFTDKAELPELSGGKNSTLAVSKMLQKAGIEVNEKGTLAFAATEIQLVNKFGIDDMPIQFKANRPFMFYIKDEDSDAVLFVGKVENPVATEKLP

SEQ ID NO: 19783 - DNA, 1191 bp, Medicago truncatula
  CDS (1)..(1191)
atgatgcagaatctcatcagaaaatcactcacaaacctaaccaacgtttccatgaacatcaccaaacacttgttatccaatcaaaaactcaaagaaaagaatgttgtgttttcaccattatcgctcaacaccgtgctcagtatgatcgctaccggctccgagggtcccactcaaaaacaacttctctccttcctccagtcagaatcccccggtaatctcaaatccttatactctcggctggtttcttctgtgctctccgatggcgctcccgctggtggcccttgcttgtcttacgtcaatggtgtgtgggttgaacaatcacttcctcttcaaccttcctttaaacaacttatgactactgattttaaagctactcttgctgaagttgatttcgtcaacaaggctgatgaagtgagaaaagaagtgaatgtatgggctgaaaaggagacaaaagggcttattaaaaatcttcttcaacctggctcagttcacagcttaacgagtctaatatttgcaaatgcactatatttcaaaggagtgtggaaacaaccctttgatacttcaaaaacgaaggactatgattttgaccttctcaatggcaagtcagtaaaggttccctttatgaccagcaagaatgatcagtttatcagttcttttgatggttttaaagttcttggtcttccttacaaacaaggcaattatgggcgtgcattctccatttacttttttcttcccgatgcaaaagatgggttgtccgctttgattgataatgtaacttctgattatgagtttttggaacacaatcttcctcgtagaaaagtggaagtaggcaagttcaggattccaagattcaatatttcttttgagattgaagctcctgagttactaaagaaattaggattgactttacctttttctatgggaggtttgacaaaaatggtggactctcctataagtcaagaaatatttgtttccgacatacttcagaagtcttgcattgaagtaaacgaagaaggtacaaaagctgcagcggtgaccgttagcatgttatgcgggtgttctcggtatagtccccctccgccccctccaatcgactttgtagctgaccacccttttttatttctgatcagagaagagtttagtggaaccatactctttgttggaaaggtggtcaatcctcttgatggttga

SEQ ID NO: 19784 - protein, 396 aa, Medicago truncatula
MMQNLIRKSLTNLTNVSMNITKHLLSNQKLKEKNVVFSPLSLNTVLSMIATGSEGPTQKQLLSFLQSESPGNLKSLYSRLVSSVLSDGAPAGGPCLSYVNGVWVEQSLPLQPSFKQLMTTDFKATLAEVDFVNKADEVRKEVNVWAEKETKGLIKNLLQPGSVHSLTSLIFANALYFKGVWKQPFDTSKTKDYDFDLLNGKSVKVPFMTSKNDQFISSFDGFKVLGLPYKQGNYGRAFSIYFFLPDAKDGLSALIDNVTSDYEFLEHNLPRRKVEVGKFRIPRFNISFEIEAPELLKKLGLTLPFSMGGLTKMVDSPISQEIFVSDILQKSCIEVNEEGTKAAAVTVSMLCGCSRYSPPPPPPIDFVADHPFLFLIREEFSGTILFVGKVVNPLDG

SEQ ID NO: 19785 - DNA, 1215 bp, Medicago truncatula
  CDS (1)..(1215)
atgctccctcaaaaaagaagaacatcagagcagaatctcatcggaaaatcactgacaaacctcaccaacgtttctctgaacatcaccaaacacttgttatccaatcaaaaactcaatgaaaagaacgttgtgttttcaccattatcgctcaacaccgtactcattatgatcactgccggctccgagggtcccacacaaaaccaacttctctccttcctccagtctgaatccaccggtgatctcaaatccttatgctctcagcttgtttcttctgtgctctccgatggcgctcccgccggtggtccttgcctgtctcacgtcaatggtgtgtgggttgaacaatcacttcctcttcaaccttccttcaaacaactcatgactactgatttcaaagcgactcttgctgctgttgatttcatcaacaaggctgatgaagtgataaaagaagtgaatttatgggctaataaggagacaaaggggtttattaatgatcttcttccacgcgggtcagttgacagcttaaccagcctcatctttgcgaatgcactatacttcaaaggagtttggaaacgaccgtttgatacttcaaaaacgaaggactatgattttgaccttctcaatggcaagtcagtaaaggttccctttatgaccagcaagaataatcagtttatcagttcttttgatggttttaaagtccttggtcttccttacaaacaaggcaatgataagcgtgcattctctatttacttttttcttcctgacgaaaaagatgggttgtcagctttgattgataaagtagcttctgattctgagtttttggaacagaaacttcctcgtaatcaagtcaaagtaggcaagttcatgattccaagattcaatatttcttttgagattgaagcttctgagttattaaataaattaggattgactttacctttttcgaagggaggtttgacaaaaatggtggactctcctataagtcaagaactttctgttaccagcatatttcagaagtctttcattgaattaaatgaagaaggtacgatagctgcagcgacagcccgtggcagtacaggcggcgctgctccatttcgtctccctccgccccctccaatcgactttgttgctgaccacccttttttatttctgatcagagaagagtttagtggaaccatactctttgttggaaaggtggtcaatcctcttgatggttga

SEQ ID NO: 19786 - protein, 404 aa, Medicago truncatula
MLPQKRRTSEQNLIGKSLTNLTNVSLNITKHLLSNQKLNEKNVVFSPLSLNTVLIMITAGSEGPTQNQLLSFLQSESTGDLKSLCSQLVSSVLSDGAPAGGPCLSHVNGVWVEQSLPLQPSFKQLMTTDFKATLAAVDFINKADEVIKEVNLWANKETKGFINDLLPRGSVDSLTSLIFANALYFKGVWKRPFDTSKTKDYDFDLLNGKSVKVPFMTSKNNQFISSFDGFKVLGLPYKQGNDKRAFSIYFFLPDEKDGLSALIDKVASDSEFLEQKLPRNQVKVGKFMIPRFNISFEIEASELLNKLGLTLPFSKGGLTKMVDSPISQELSVTSIFQKSFIELNEEGTIAAATARGSTGGAAPFRLPPPPPIDFVADHPFLFLIREEFSGTILFVGKVVNPLDG

SEQ ID NO: 19787 - DNA, 1224 bp, Branchiostoma lanceolatum
  CDS (1)..(1224)
atgccaggacacagctactgcctctttggcctcctggttgccatggcaactctgggaagctccgcatcacaagagtccaccccattggctgacatcaacagcgagtttgccctggagctgtacaaggcgctccacaaggatcatcccgagaacatcttcttctcacccttcagtatctccacctgtctggccatgacttacctgggggcaaggaatgatacagcacaacagatgagtcgagtgcttcgcttccacaagatggatgcctccgaccttcacgcgttgttccacgaccttctgacccagctgcaccactcagacaggccctacacactcaagaccgccaatcggctcttcggtcagaactcattcgagttttcgcaaaagtttctggatgaaacgtccagacattacagggcgcagttggctcccgtggacttcagtggaaacacagagggcgcacggcaaactatcaacagctgggtagaggaacaaacagagaacaaaatccaagatcttttagcaccaggaaccgtgacccctgctaccatgttagtactggtcaacgccatctacttcaaaggcagctgggaacgcaagtttgaggagtcgcgtacgaggctcggtaccttccacgtcagccgcgacgagaaggttgaggtacccatgatgcatcagcaaggccggttcaaactcgcctacgacgaggacctcaactgccaaatcctagagatgccttaccaagggaaacatctgagcatgctgtttgtgttaccggaaaagatggacgctctgagcaccatcgagacgtccttaacgccagacttactccgtcgctggcagaagtctatggacgaggtttccaccatggtacaaatccccaagttcaagctcgtccacgatttcgtcctgaatgaaaagctagcggacatggggatgacggacctgttcagcatggcggacgccgacctgtctgggatcacgggtttgcgtgaccttcacgtcagccaggtcatccacaaagcgtttgtggaggtcaacgaggagggcagcgaggctgcggcagcgacggcggtgaacatgatgaagcggtccctggacggggagacgttctttgccgaccaccccttcctattcctgatcagagacaatgactcaaactctatcctgtttctaggtcgactggtgcgaccagaaggactaactacaaaggatgaactgtag

SEQ ID NO: 19788 - protein, 407 aa, Branchiostoma lanceolatum
MPGHSYCLFGLLVAMATLGSSASQESTPLADINSEFALELYKALHKDHPENIFFSPFSISTCLAMTYLGARNDTAQQMSRVLRFHKMDASDLHALFHDLLTQLHHSDRPYTLKTANRLFGQNSFEFSQKFLDETSRHYRAQLAPVDFSGNTEGARQTINSWVEEQTENKIQDLLAPGTVTPATMLVLVNAIYFKGSWERKFEESRTRLGTFHVSRDEKVEVPMMHQQGRFKLAYDEDLNCQILEMPYQGKHLSMLFVLPEKMDALSTIETSLTPDLLRRWQKSMDEVSTMVQIPKFKLVHDFVLNEKLADMGMTDLFSMADADLSGITGLRDLHVSQVIHKAFVEVNEEGSEAAAATAVNMMKRSLDGETFFADHPFLFLIRDNDSNSILFLGRLVRPEGLTTKDEL

SEQ ID NO: 19789 - DNA, 1224 bp, Branchiostoma lanceolatum
  CDS (1)..(1224)
  misc_feature (90)..(90): y is t or c
atgccaggacacagttactgcctctttggcctcctggttgccatggcaactctgggaagctccgcatcacaagagtccaccccattggcygacgtcaacgctgagtttgccctggagctgtacaagacgctacacaaggatcatcccgagaacatcttcttctcacccttcagtatctccacctgtctggccatgacttacctgggggcaaggaacgatacagcgcaacagatgagtcgagtgcttcgctttcacaagatggatgcctccgaccttcacatgctgttccacgaccttctgacccagctgcaccacccagacaggccctacacactcaagaccgccaacaggctcttcggtcagaactccttcgagtttgcgcaaaagtttctagatgaaacgtccagacattacagggcgcagttggctcccgtggacttcagtggaaacactgagggtgcacgtcaaactatcaacagctgggtggaggaacaaacagagaacaaaatacaagatcttttagcaccaggaaccgtgacccctgctaccatgttagttctggtcaacgccatctacttcaaaggcagttgggaacgcaagtttgaggaatcgcgtacgaggctcggtaccttccacgtcagccgcgacgagaaggttgaggtacccatgatgcatcagcaaggccggttcaaactcgcctacgacgaggacctcaactgccaaatcctagagatgccttaccaagggaaacatctgagcatgctgtttgtgttgccggaaaagatggacgctctgagcaccatcgagacatccttaacgccagacttactccgtcgctggcagaagtctttggacgaggtttccaccatggtccaaatccccaagttcaaactcgtccacgatttcgtcctgaatgaaaagctagcggacatggggatgacggacttgttcagcatggcggacgccgacctgtcggggatcacgggttcgcgtaaccttcatgtcagtcaggtcatccacaaggcgtttgtagaggtcaatgaggagggtagcgaggctgccgcggcaacggcagtgaacatgatgaaacggtcccttgacggggaaacgttctttgccgaccaccccttcctgtttctgatcagggacaatgactcgaactccatcctgtttctaggtcgactggtgcgaccagaaggacactctacaaaggatgaactgtaa

SEQ ID NO: 19790 - protein, 407 aa, Branchiostoma lanceolatum
MPGHSYCLFGLLVAMATLGSSASQESTPLADVNAEFALELYKTLHKDHPENIFFSPFSISTCLAMTYLGARNDTAQQMSRVLRFHKMDASDLHMLFHDLLTQLHHPDRPYTLKTANRLFGQNSFEFAQKFLDETSRHYRAQLAPVDFSGNTEGARQTINSWVEEQTENKIQDLLAPGTVTPATMLVLVNAIYFKGSWERKFEESRTRLGTFHVSRDEKVEVPMMHQQGRFKLAYDEDLNCQILEMPYQGKHLSMLFVLPEKMDALSTIETSLTPDLLRRWQKSLDEVSTMVQIPKFKLVHDFVLNEKLADMGMTDLFSMADADLSGITGSRNLHVSQVIHKAFVEVNEEGSEAAAATAVNMMKRSLDGETFFADHPFLFLIRDNDSNSILFLGRLVRPEGHSTKDEL

SEQ ID NO: 19791 - DNA, 1257 bp, Tachypleus tridentatus
  CDS (1)..(1257)
atgaagcttggagactggaagttctgcctacttctatttcaactaatgttcttgacaaacgtttgtctgtctgacctttcttttaatccttacaagtggcctgtcaaccagctacgtagagtaattggagctgtaaaggtgaccaacactagcaattactttggtttcagtttatatgagaaccttaacagtaacggtaatgtttttatttctccttacagcctggccagtgtaatggctatgttatatcttggtgctcgtggtgtaactaaaaatgaaatggatttaacactaggatataattcggtaaatttaaacagtgaagatcttgtgctcgggtttcaacaatcattactgcttcttaacgctgaatctaaagagtatcagctggagacagcaaattcccttatgattcaaaacacctttaatatcttggataattataaacggatgctagaagacaagtttggtgcaaatgtacaagatgttgattttattaataaagcagaattagtccagcgatatatcaatgcttgggtagcttttaaaacaaaaaacaagattcctatcctcctgaatgaaccccttaaaccagaaactcgtctggcttttttcaacgccgtttactttaaaggtgtatgggaaacaaaatttgactctgccctaaccaggagagctaccttctacaacaatggatatgtcccgacccaagttcctatgatgatgctgagaggaatatttccatttgcttatgtttctagtttaaggtcctacgttcttgagttgccttataaaggtcatgaggtaagtatgttgctgttgttgcctaaggatagaaacggtatatctgatttggagagggacttgtcttcctcttctcttgactctgttacttctaacttgcgagaaattggggtcttggtcactattcctaagttcaaacttgaagagacctacgaagatgacttaaaacaaagcctagagtctatgggaatgacaagtttgtttagtgaagccaacgcaaacctagagggtatcactggtcaccgtgatttatttgtgactaaaataacccacagaacccttatcgaagtcaacgaagaagggactgaggcttcaggaatcagtagtgtcgtcgcaggtgttcggtcaggttggaagagaccaacttttactgctgaccatccatttgtattctttattcgtcacaatcgatctggtattattttgtttatgggacgggtttcacaactgtga

SEQ ID NO: 19792 - protein, 418 aa, Tachypleus tridentatus
MKLGDWKFCLLLFQLMFLTNVCLSDLSFNPYKWPVNQLRRVIGAVKVTNTSNYFGFSLYENLNSNGNVFISPYSLASVMAMLYLGARGVTKNEMDLTLGYNSVNLNSEDLVLGFQQSLLLLNAESKEYQLETANSLMIQNTFNILDNYKRMLEDKFGANVQDVDFINKAELVQRYINAWVAFKTKNKIPILLNEPLKPETRLAFFNAVYFKGVWETKFDSALTRRATFYNNGYVPTQVPMMMLRGIFPFAYVSSLRSYVLELPYKGHEVSMLLLLPKDRNGISDLERDLSSSSLDSVTSNLREIGVLVTIPKFKLEETYEDDLKQSLESMGMTSLFSEANANLEGITGHRDLFVTKITHRTLIEVNEEGTEASGISSVVAGVRSGWKRPTFTADHPFVFFIRHNRSGIILFMGRVSQL

SEQ ID NO: 19793 - DNA, 1209 bp, Medicago truncatula
  CDS (1)..(1209)
atggcaagaagaagaatgatgatgcagaatctcatcggaaaatcatttacaaacctaaccaacatttccatgaacatcaccaaacacttgttatccaatcaaaaactcaaagaagagaacgttgtgttttcaccattatcgcttaacaccgtgctcagtatgattgctaccggctccgagggtcccactcaaaaacaacttctctcctttctccagtctgaatccaccggtgatctcaaatccttatgctctcagcttgtttcttctgtgctctccgatggcgctcccgctggtggcccttgcttgtcttacgtcaatggtgtgtgggttgaacagacaattcctcttcaaccttccttcaaacaacttatgaatactgatttcaaagctgcttttgctgctgttgatttcgtcaacaaggctaatgaagttggagaagaagtgaatttctgggctgaaaaggagacaaaagggcttattaaaaatcttcttccacctggctcagttaacagcttaacccgcctcatctttgctaatgcactatatttcaaaggagtgtggaaacaacagttcgatactacaaaaacgaaggactatgattttgaccttctcaatggcaagtcagtaaaggttccatttatgaccagcaagaatgatcagtttatcagttcgttagatggttttaaagtccttggtcttccttataaacaaggcaaagatgaacgtgcattctctatttacttttttcttcctgacaaaaaagatgggttgtcaaatttgattgataaagtagcttctgattctgagtttttggaacggaatcttcctcgtagaaaagtggaagtaggcaagttcaggattccaagattcaatatttcttttgagattgaagcttctgagttactaaagaaattaggattggctttaccttttactctgggaggtttgacaaaaatggtggactctcctataagtcaagaactttatgtttccggcatatttcagaagtctttcattgaagtaaatgaagaaggtacgaaagctgcagcggtgaccgttagcttcatatcctcgcgttctcggtatagtccccctccgccccctccaatcgactttgtagctgaccacccttttttatttctgatcagagaagagtttagtggaaccatactctttgttggaaaggtggtcaatcctcttgatggttaa

SEQ ID NO: 19794 - protein, 402 aa, Medicago truncatula
MARRRMMMQNLIGKSFTNLTNISMNITKHLLSNQKLKEENVVFSPLSLNTVLSMIATGSEGPTQKQLLSFLQSESTGDLKSLCSQLVSSVLSDGAPAGGPCLSYVNGVWVEQTIPLQPSFKQLMNTDFKAAFAAVDFVNKANEVGEEVNFWAEKETKGLIKNLLPPGSVNSLTRLIFANALYFKGVWKQQFDTTKTKDYDFDLLNGKSVKVPFMTSKNDQFISSLDGFKVLGLPYKQGKDERAFSIYFFLPDKKDGLSNLIDKVASDSEFLERNLPRRKVEVGKFRIPRFNISFEIEASELLKKLGLALPFTLGGLTKMVDSPISQELYVSGIFQKSFIEVNEEGTKAAAVTVSFISSRSRYSPPPPPPIDFVADHPFLFLIREEFSGTILFVGKVVNPLDG

SEQ ID NO: 19795 - DNA, 1221 bp, Glossina morsitans morsitans
  CDS (1)..(1221)
atgacgttaaccggtaacaaagatttgttattgttgtttgtcacctttgccgttgcaatatcgttacacacaataatggccaattctactgatgcttccacgtcacctaattataatgtttttgctgccgatctattcactgttgtggtagataatagtgtcgatcgaaatgttgtgttttcgcccgcttccattcagacatgtctcatagtagcatatctgggagctgaaggtgagacagcagaggaaatgcgtaacgctttgaaactgggggagggcgacaagaatgctgttattaaaaagtatgcagaatttgtcaagtcatcctttaaatcaacgaatccgcaaggcggcccgttattaaaaatagcaaatcgggtttttgctaatcacaatttaaagatttctggaacatttcagaaactggctaaagaatattttggtaccacagcaaagcttttaaattttgcaaatgctgcggaatccgtagccgcaattaatggctgggtagaagagcaaactaataagaaaattcaaaatcttttgcaagaggatgcagtgaatagtgatactagtgccatattggtgaacgctatttattttaaggcaaaatggacccggcaattcagtgaatcgtcgacacgtaaatcgactttttacacacttaataaagatcaagtgcatgtagaccttatgtatcaagatgattacttccgttacgctgatttacctgaatttgatgctactgctttggagatgcaatacgagaattccgacctttcaatgctcattattttacccagggaagttgatggccttcaaaatttggaatcgaagctaagcggattcaatataagtcaaatagcagagaaaatggaaggtgaacacgttgatgtatttctaccaagatttcgcatcgaattcgatatagatttaaaggaaccattaaagaagatgggtattacgtcgatgttttcatcgaacgctaacctggcaggtttgtttgtctcctctgtaccacaaaagatttccgaagttaagcataaagctttcttagatgttaatgaagctggctcagaggccgctgctgctacttatttgaaaattgtaccaatgagtctgaatttaaatcagaaggtattcagagttgatcatccatttttctttgctatacgagataaaacgtccgtttatttttctggtcatgttgtgaaaccttaa

SEQ ID NO: 19796 - protein, 406 aa, Glossina morsitans morsitans
MTLTGNKDLLLLFVTFAVAISLHTIMANSTDASTSPNYNVFAADLFTVVVDNSVDRNVVFSPASIQTCLIVAYLGAEGETAEEMRNALKLGEGDKNAVIKKYAEFVKSSFKSTNPQGGPLLKIANRVFANHNLKISGTFQKLAKEYFGTTAKLLNFANAAESVAAINGWVEEQTNKKIQNLLQEDAVNSDTSAILVNAIYFKAKWTRQFSESSTRKSTFYTLNKDQVHVDLMYQDDYFRYADLPEFDATALEMQYENSDLSMLIILPREVDGLQNLESKLSGFNISQIAEKMEGEHVDVFLPRFRIEFDIDLKEPLKKMGITSMFSSNANLAGLFVSSVPQKISEVKHKAFLDVNEAGSEAAAATYLKIVPMSLNLNQKVFRVDHPFFFAIRDKTSVYFSGHVVKP

SEQ ID NO: 19797 - DNA, 1185 bp, Oryza sativa subsp
  CDS (1)..(1185)
atgccgacgcggccgtggggggaggcgctggccgcggcgcagcgcgccttctgcctgccgctcgcggggcgcgtcctcgccgccgcggggaccgggaacgcggccgtgtccgcccccgccgtccacgtctccctggcgctcgccgcgggcggcgcgcggggcgccacgcggaggcaggtgctccaggcgctcggctgcggcggcggcggcaggggcggcgccgccgacgcggccaacgtggcgtcccgcgtcgtgaagcgcgtcctcagggaccggtccacctccggcggcccgcggctggcgttcgcgggcggcgtctgggccgacgcatcgaggagtctctcgccggagttcgtgggactcgccggcaatgtgtacggctctgcggcgaagaaggccgatttcaagaacaagccggaagatgctcctgatcaaattaattcgtgggtcaaagattccacaaaaggtactgttacaacacttctgcctgctggaacaatcgaccagaatacaggacttgttcttgggagtgcactgtactttaggggcagatggctggatagagatgatttgcggaggactactgaacaaaagttctactgcctggatggaacatctgtcgaagtcccatttgtggaatatgacagaacacgtctttttgccgtccatgataactttaaagttattaagcttccttacaagcaaggaaagaatgaaaggaagttttccatgtacattttcctccctgatgatcatgatggcttgtttgaattaacccagaagattttctctgaaccaatgttcctagaacaacatttaccaacagagaaatgccatgtgggtatctcggtgcccaactttaaaatatctttccagatcgatgtaaaggattttctgaaagatatggggcttgaactacctttcctccgggaagctgaattctctgacatgatcaaggaagatgactcaagtggtcctctgtttctgtctgatgtacttcataaagcggttttggaggttgatcaaaaaggaattgaagaaacttcagtatcaatgggcttgggcaagcctttgccagcacaacacttcaaggccgaccatccgttcttcttcatgattagggaggaggtctctggaacagtaatattcatggggcatgtgcttgacccttcatcacggacatag

SEQ ID NO: 19798 - protein, 394 aa, Oryza sativa subsp
MPTRPWGEALAAAQRAFCLPLAGRVLAAAGTGNAAVSAPAVHVSLALAAGGARGATRRQVLQALGCGGGGRGGAADAANVASRVVKRVLRDRSTSGGPRLAFAGGVWADASRSLSPEFVGLAGNVYGSAAKKADFKNKPEDAPDQINSWVKDSTKGTVTTLLPAGTIDQNTGLVLGSALYFRGRWLDRDDLRRTTEQKFYCLDGTSVEVPFVEYDRTRLFAVHDNFKVIKLPYKQGKNERKFSMYIFLPDDHDGLFELTQKIFSEPMFLEQHLPTEKCHVGISVPNFKISFQIDVKDFLKDMGLELPFLREAEFSDMIKEDDSSGPLFLSDVLHKAVLEVDQKGIEETSVSMGLGKPLPAQHFKADHPFFFMIREEVSGTVIFMGHVLDPSSRT

SEQ ID NO: 19799 - DNA, 1197 bp, Hordeum vulgare
  CDS (1)..(1197)
atggcgaccaccgacatccgcctctccatcgcgcaccagacccgtttcgccgtccgccttgcctccgccatctcctcgccctcccacgccaagggatcctccggcaacgctgccttctccccgctctcgctccacgttgcgctcagcctcgtcgcggccggcgccgcggcgacgcgtgaccagcttgctgccacgctcggggccgcggagaaaggcgacgccgagggcctccacgctctcgccgagcaggtggtgcaggtcgtgctcgccgacgcgtcgggcgctggcggccctcgctccttcgccaacgtcttcgtcgactcctcgctcaaactcaagccttccttcaaggatctcgtagtgggcaagtacaagggcgagacgcagtccgtggacttccaaactaaggctcctgaagttgctggtcaagtgaactcctgggtagaaaaaatcacaacaggtctcatcaaagagatcctccctgcagggtctgttgacagtaccactagactggttcttggtaatgccctttattttaaaggaagttggactgagaagtttgatgcatctaagacaaaagacgagaagttccacctccttgatgggagctcagttcaaacaccattcatgtccagtacaaagaagcaatacatttcgtcttatgacagcttgaaagtactgaagcttccttaccagcaaggcggggacaagaggcagttctccatgtacattcttcttccagaagcacaggatggtctctggaacttggccaacaagttgagcactgaaccagagttcatggagaagcatatgccaatgcagaaggttccagtcgggcaattcaagctcccgaagttcaagatatcatttgggtttgaagcgtctgatatgctcaaaggtttgggtctccagctgccattcagctcagaggcagatctttcggagatggtggattcacccgcagcacggagcttgtatgtctcatccgttttccacaagtcgtttgtcgaggtgaatgaagaaggcaccgaggctgcggcacgaactgctcgagtggtcacacttaggtcactgcctgtagagcccgtgaaggtggatttcgttgcggatcaccctttcctcttccttatccgagaggacctcacaggcgtggtgctattcgtcggtcatgtgttcaatcccttggtgtctgcataa

SEQ ID NO: 19800 - protein, 398 aa, Hordeum vulgare
MATTDIRLSIAHQTRFAVRLASAISSPSHAKGSSGNAAFSPLSLHVALSLVAAGAAATRDQLAATLGAAEKGDAEGLHALAEQVVQVVLADASGAGGPRSFANVFVDSSLKLKPSFKDLVVGKYKGETQSVDFQTKAPEVAGQVNSWVEKITTGLIKEILPAGSVDSTTRLVLGNALYFKGSWTEKFDASKTKDEKFHLLDGSSVQTPFMSSTKKQYISSYDSLKVLKLPYQQGGDKRQFSMYILLPEAQDGLWNLANKLSTEPEFMEKHMPMQKVPVGQFKLPKFKISFGFEASDMLKGLGLQLPFSSEADLSEMVDSPAARSLYVSSVFHKSFVEVNEEGTEAAARTARVVTLRSLPVEPVKVDFVADHPFLFLIREDLTGVVLFVGHVFNPLVSA

SEQ ID NO: 19801 - DNA, 1203 bp, Hordeum vulgare
  CDS (1)..(1203)
atggcaaccaccctcgccaccgacgtccgtctctccatcgcacaccagacccgcttcgccctccgcctcgcttccgccatctcctccaaccccgagcgtgctgccggcaatgtcgccttctctccgctctccctgcacgtcgcactcagtctcatcaccgctggcgcgggcggcgccacccgtgaccagctcgtcgccatactcggagatgggggtgcaggtgacgccaaggaactgaacgcgctcgcggagcaggtggtgcaatttgtgctcgccaatgagtccagcaccggtggcccgcgcatcgccttcgccaacggcatctttgtcgatgcgtcgctctcgctcaagccttccttcgaggagctcgctgtgtgccagtacaaggccaagacacagtccgtggatttccagcataagactctagaagctgttggtcaagtgaactcatgggtagagcaagtcaccacaggtctcatcaaacagatccttcctccaggatctgttgacaatactacaaaactggtccttggtaatgctctttatttcaaaggggcctgggatcaaaagtttgatgaatcaaatacaaaatgtgacagtttccaccttcttgacgggagctcaattcaaacacaattcatgtccagtacaaagaagcaatacatttcctcttccgacaacttgaaggtacttaagcttccttacgcgaagggtcatgacaagaggcagttttccatgtacattcttcttcctggagcacaagatggtctctggagtttggccaagcggttgagcactgaaccggagttcatcgagaaccatatcccaaagcagacggttgaagttggtcggttccagctccccaagttcaagatatcatatcaatttgaagcatctagcttgctcagagctttgggtctccaattgccatttagcgaagaggctgatctgtcagagatggtggattcttcgcaagggctggaaatctcacatgtcttccacaagtcgtttgtcgaagtgaacgaagaaggaactgaggctggcgcagctacagttgcaatgggcgtggccatgtcaatgcccctgaaggtggatttggtggattttgtcgcgaatcaccctttcctcttccttattcgggaagacattgccggtgtggtggtcttcgtaggtcatgtgaccaatcccctcatatctgcataa

SEQ ID NO: 19802 - protein, 400 aa, Hordeum vulgare
MATTLATDVRLSIAHQTRFALRLASAISSNPERAAGNVAFSPLSLHVALSLITAGAGGATRDQLVAILGDGGAGDAKELNALAEQVVQFVLANESSTGGPRIAFANGIFVDASLSLKPSFEELAVCQYKAKTQSVDFQHKTLEAVGQVNSWVEQVTTGLIKQILPPGSVDNTTKLVLGNALYFKGAWDQKFDESNTKCDSFHLLDGSSIQTQFMSSTKKQYISSSDNLKVLKLPYAKGHDKRQFSMYILLPGAQDGLWSLAKRLSTEPEFIENHIPKQTVEVGRFQLPKFKISYQFEASSLLRALGLQLPFSEEADLSEMVDSSQGLEISHVFHKSFVEVNEEGTEAGAATVAMGVAMSMPLKVDLVDFVANHPFLFLIREDIAGVVVFVGHVTNPLISA

SEQ ID NO: 19803 - DNA, 1373 bp, Triticum aestivum
  CDS (54)..(1250)
cgcctctcttcctctcaagtctaaccaaagcccaacaaaccaccacctcggccatggcaaccaccctcgccaccgacgtccgcctctccatcgcgcaccagacccgcttcgccctccgtctcgcctccaccatctcatccaaccctaagtctgctgccagcaatgccgccttctccccggtctccctctactccgcacttagcctcctcgccgctggcgcgggcagtgccactcgggaccaactcgtcgccacactcgggacaggcaaggtcgagggactccacgcgctcgccgagcaggtggtccagtttgtgctcgccgacgcgtcctccactggtgggtccgcgtgtcgcttcgccaatggcgtcttcgtggacgcgtcgctgctcctcaagccatccttccaagagattgcagtgtgcaagtacaaggccgagacccaatccgtggacttccaaactaaggccgctgaagttactactcaagtgaattcatgggtagagaaagtcacgagcggtcgcatcaaggacattctccccccaggatctattgacaataccactaaacttgttcttgccaatgccctttatttcaaaggagcttggacagagcagtttgattcatatggaacaaaaaacgactacttctaccttcttgatgggagctcagttcaaacaccattcatgtccagcatggatgaccaataccttttgtcttctgatgggttgaaggtacttaagctaccttacaagcaaggtggggacaataggcagttcttcatgtatatccttcttccagaagcaccaggtggtctctcaagcttggccgaaaaattgagtgctgaaccagacttcctggagcggcatatcccaaggcagagggttgcacttaggcaattcaagctccccaagttcaagatatcatttggaattgaagcatctgatttgctcaaatgtttgggcctccagcttcccttcggcgatgaagcggatttttcggagatggtggattccctaatgccacaaggtcttcgtgtctcatctgttttccaccaagcgtttgtggaagtgaacgaacaaggaactgaggctgcagcatcaactgctattaaaatggtcctgcaacaggcaaggccgccctcggtcatggatttcatcgcggatcaccctttcctcttccttgtccgggaagacatctctggtgtggtcctattcatgggtcatgtggtcaatcccctcttatcttcgtaatgtgtttgctctgaaagtgtgtgttgtcagttgccctcagccattatatgtaagggaagggtttcgacagtcagtcatgttaccgatacaataaatccaataaatggttctcctaagatatcc

SEQ ID NO: 19804 - protein, 398 aa, Triticum aestivum
MATTLATDVRLSIAHQTRFALRLASTISSNPKSAASNAAFSPVSLYSALSLLAAGAGSATRDQLVATLGTGKVEGLHALAEQVVQFVLADASSTGGSACRFANGVFVDASLLLKPSFQEIAVCKYKAETQSVDFQTKAAEVTTQVNSWVEKVTSGRIKDILPPGSIDNTTKLVLANALYFKGAWTEQFDSYGTKNDYFYLLDGSSVQTPFMSSMDDQYLLSSDGLKVLKLPYKQGGDNRQFFMYILLPEAPGGLSSLAEKLSAEPDFLERHIPRQRVALRQFKLPKFKISFGIEASDLLKCLGLQLPFGDEADFSEMVDSLMPQGLRVSSVFHQAFVEVNEQGTEAAASTAIKMVLQQARPPSVMDFIADHPFLFLVREDISGVVLFMGHVVNPLLSS

SEQ ID NO: 19805 - DNA, 1320 bp, Hordeum vulgare
  CDS (30)..(1223)
cataacgtagaagaaccacaaccaccgccatggcaaccaccctcaccaccgacctccgcctctccatcgcgcaccaaacccgattcggcctccgcctcgcctccgccatctcctccgaccccgagtctgctgccaccaacgttgctttctccccggtctcgctccacgtcgcgctcagcctcgttgctgccggcgcaaggggtgccacccgcgaccagctcgtagctgtactcgggggcggtggtgcaggagaggccgaggcactccaatcacttgccgagcaggtggtgcagttcgtgctcgccgacgcgtccatcaactccggcccgcgcatcgccttcgccaacggtgttttcgtcgacgcgtcgctctcgctcaagccatccttccaggagctcgccgtgtgcaactacaaatctgaggtccagtccgtggacttcaagactaaggctcctgaagctgctagtcaagtgaattcctgggtaaagaatgtcaccgcaggtctcatcgaagagattctccccgcggggtctattgacaatacaactagactagttcttggtaatgcactttacttcaaaggactttggaccaagaagtttgatgaatctaagacaaagtatgacgatttccaccttcttaatgggagcactgttcaaacaccattcatgtctagtacaaataagcagtacctttcatcttcggatggcttgaaggtacttaagcttccataccaacatggtggggacaacaggcagttctccatgtacattcttcttcctgaagcacatgacggtctctcaaggcttgcacaaaagttgagcactgaaccagattttttggagaaccgtatcccaacggaggaggttgaagtcggacagttcatgctcccaaagttcaagatatcttttggatttgaagcaaacaaattgctcaaaactttgggtcttcaactgccattcagtttggaggccaatctttcggagatggtgaattctcccatgggcctatacatctcatctgtttttcacaaaacgtttgttgaagtagacgaagaaggaactaaggcaggagcagcaaccggcgatgtgattgtagaccggtcactacccataaggatggatttcgtcgctaatcaccctttcctcttccttattcgagaagacatcgccggtgtagtgctcttcattggtcatgttgccaatcccgctgtgtcttcatagtatgtttaccctaaatcagtgtcttgtaagttaattacctaaactgttacatgtaagtgatgggtttcaacattcaataatgctgccggtataataa

SEQ ID NO: 19806 - protein, 397 aa, Hordeum vulgare
MATTLTTDLRLSIAHQTRFGLRLASAISSDPESAATNVAFSPVSLHVALSLVAAGARGATRDQLVAVLGGGGAGEAEALQSLAEQVVQFVLADASINSGPRIAFANGVFVDASLSLKPSFQELAVCNYKSEVQSVDFKTKAPEAASQVNSWVKNVTAGLIEEILPAGSIDNTTRLVLGNALYFKGLWTKKFDESKTKYDDFHLLNGSTVQTPFMSSTNKQYLSSSDGLKVLKLPYQHGGDNRQFSMYILLPEAHDGLSRLAQKLSTEPDFLENRIPTEEVEVGQFMLPKFKISFGFEANKLLKTLGLQLPFSLEANLSEMVNSPMGLYISSVFHKTFVEVDEEGTKAGAATGDVIVDRSLPIRMDFVANHPFLFLIREDIAGVVLFIGHVANPAVSS

SEQ ID NO: 19807 - DNA, 1275 bp, Oryza sativa subsp
  CDS (1)..(1275)
atggaagacaacgccggcgactgcggcggcatgacggccttcgcgctccgcctggcgaagcgtctcgccgacgtcggcgtcagcagcaacaagaacctcgtcttctcgccggcgtccctgtacgccgcgctggcgctggtggcggccggggcacggggcaccaccctggacgagctcctcgcgctgctcggcgccgcgtcgctcgacgacctcgaggagtccgtacgccgcgccgtggaggtcggcctcgccgacgagtccgcgtccggcgggccgcgcgtctccgacgcctgcggcgtctggcacgacgagacgctcgagcttaagccggcctaccgcgccgccgccgccggcacctacaaggccgtgacgcgcgccgccaacttccaaagacagccaaagagatcaagaaagaagatcaacaagtgggtgtccaaggcgacgaacaagctcatccccgagatcctcccagatggatcagttcatgtcgacaccgccctcgtgctcgtgaacgccatctacttcaagggcaaatggtccaatcccttccccaggtcgagcaccaccaccggcaagttccaccgcctcgacggcagctccgtcgacgtcccgttcatgagcagccgggaggatcagtacatcggcttccacgacggcttcacggtgctcaagctgccgtaccaccaccggaccatgaagaaccatggcgatggtggcgacactatcaccaacagtagcatcactcgggccatcctcgagcactacggcggcgagaacgtagggctgtcgatgtacatcttccttccggacgagcgcgacggcctgccggcgctcgtcgacaagatggcggcgtcgtcgtcgtcgtcctccttcctgcgcgaccaccggccgacgcggcgtcgcgaggtcggcgacctcagggtgccgaggttcaaggtgtcgttctacagccagatcaacggggttctgcaggggatgggggtgacggccgccttcgacgccggcgaggccgacctgtccggcatggcggagggcgtggatcagcggggcggcgggctggtggtggaggaggtgttccacagggcggtcgtggaggtgaacgaggaaggcacggaggcggcggcgtccacggcctgcacgatcaggctcttgagcatgagctacccggaggacttcgtcgcggaccatccgttcgcgttcttcgtggtggaggagacgtcgggcgcggtgctcttcgccggccacgtccttgacccaacaagcagctcagagtga

SEQ ID NO: 19808 - protein, 424 aa, Oryza sativa subsp
MEDNAGDCGGMTAFALRLAKRLADVGVSSNKNLVFSPASLYAALALVAAGARGTTLDELLALLGAASLDDLEESVRRAVEVGLADESASGGPRVSDACGVWHDETLELKPAYRAAAAGTYKAVTRAANFQRQPKRSRKKINKWVSKATNKLIPEILPDGSVHVDTALVLVNAIYFKGKWSNPFPRSSTTTGKFHRLDGSSVDVPFMSSREDQYIGFHDGFTVLKLPYHHRTMKNHGDGGDTITNSSITRAILEHYGGENVGLSMYIFLPDERDGLPALVDKMAASSSSSSFLRDHRPTRRREVGDLRVPRFKVSFYSQINGVLQGMGVTAAFDAGEADLSGMAEGVDQRGGGLVVEEVFHRAVVEVNEEGTEAAASTACTIRLLSMSYPEDFVADHPFAFFVVEETSGAVLFAGHVLDPTSSSE

SEQ ID NO: 19809 - DNA, 1215 bp, Oryza sativa subsp
  CDS (1)..(1215)
atggaagacgacgccggcaactgcggcggcctgacggcgttcgcgctccgcctggcgaagcgtctcgccgacgacggcgacaacagcaacaggaacgtcgtcttctcgccggtgtccctgtacgccgcgctggcgctggtggcgtccggggcacggggcaccaccctggacgagctcgtcgcgctgctcggcgccgcgtcgctcgacgacctcgaggagtcagtacgccgcgccgtggaggtcggcctcgccgacgagtccgagtccggcgggccgcgcgtctcctacgcctgcggcgtctggcacgacgagaggctcgcgctgaagccggcctaccgcgccgccgacttccaaagacagccaaagagttcaagaaagaagatcaacaagtgggtgtccaaggcgacgaacaagctcatccgcgagatcctcccagatggatcagttcatggcggcaccgccctcgtgctcgtcaacgccatctacttcaagggcaaatggtccaatcccttccccagggagagaaccaccaccggcaagttccaccgcctcgacggcagctccgtcgacgctccgttcatgagcagccgggaggatcagtacatcggcttctacgacggcttcaaggtgctcaagctgccgtaccaccggaccatgaagaaccatggcgatggtggtgacatcactccggccatcctcaaacactacggcgagaacgtggggttgtcgatgtacatcttcctgccggacgcgcgcgacggcctgccggcgctcgtcgacaagatggcagtggcgtcgtccggcacggcctcctcctccttcctgcgtgaccaccggccggggcgacggcggatcaaggtcggcgacctgagggtgccgaggttcaaggtgtcgttctacagcgagatgaacgaggttctgaaggggatggggattggggccgccttcgacgtcggcaaggtcgacctatccggcatgatcgacggcgagctggtggtggtggagaaggtgatgcacagggcggtcgtggaggtgaacgaggaaggcacggaggcggcggcggccacggcctgcacgatgaagttcttgtgtttaactttaacctctcctgtggacttcgtcgcggaccatccgttcgcgttcttcgtggtggaggagaagtcggatgcggtgctctttgctggccacgtccttgacccaacaagcttggagtaa

SEQ ID NO: 19810 - protein, 404 aa, Oryza sativa subsp
MEDDAGNCGGLTAFALRLAKRLADDGDNSNRNVVFSPVSLYAALALVASGARGTTLDELVALLGAASLDDLEESVRRAVEVGLADESESGGPRVSYACGVWHDERLALKPAYRAADFQRQPKSSRKKINKWVSKATNKLIREILPDGSVHGGTALVLVNAIYFKGKWSNPFPRERTTTGKFHRLDGSSVDAPFMSSREDQYIGFYDGFKVLKLPYHRTMKNHGDGGDITPAILKHYGENVGLSMYIFLPDARDGLPALVDKMAVASSGTASSSFLRDHRPGRRRIKVGDLRVPRFKVSFYSEMNEVLKGMGIGAAFDVGKVDLSGMIDGELVVVEKVMHRAVVEVNEEGTEAAAATACTMKFLCLTLTSPVDFVADHPFAFFVVEEKSDAVLFAGHVLDPTSLE

SEQ ID NO: 19811 - DNA, 1248 bp, Oryza sativa subsp
  CDS (1)..(1248)
atggaatcgtgtgcacggcggtgcgccgtctccggcctgacggcgctgtccatgcgcctcaccaagcagctctccgccgccgccgccagcaaggccggcgctgccggcaacctcgtcttctcgccgctgtccatctactccgtgctctccgtggtcaccgccggcgcgcgcgggcgcactctgacagagctcctcggcgccctcggcgcagagtcccgcgagaagctcgccgcgaacgccggcgagatggcgcgtgctctccccgcccccggcggcggcgcggcacagccgggcggcggcccgcgcgtcgcgcacgcgtgcggagtctggcacgagcggacgcggacggttaggccggcgttccgcgacgccgccgccgcgtcgttcaacgccgcggccctcgccgtcgacttcctcaacaacccggaggaagcgaggaaggagatcaacagctgggttgcggcggcgacggagaacctcatcgacacgatcctcccgccggggtcggtgagcacggacacgggcctcgtggtcaccagcgccatctacttcaacggccaatggtggactcctttctgtaaggagataaccgagaagcgggcgttccaccgcctcgacggcggcgacgtcgaggcggacttcatgcgcagcggcgaggaccagtacatcgccgtgcacgacgggttcaaggtgctcaagatgccgtacgcggcttgtgtgagcgcgaggacgacgacgacgccgaggtactcgatgtacgtcttcctccccgacgagcgcgacggcctgtggagcctggaggacaggatggcggccggcggcgagggcttcctccgcgagcacacgccggagcggcgcgtcgaggtcggcgagttcaggatccccaggttcaagctctccttcgacgacagcgtcgtgggcgcgctccagcgtctcggggtcagggacgtgttcaagccgttcgtggcggacctggccgacgtgctggaagcggagaactccggcgatgatccgccgctgtttgtgtcggacgtcaagcacaaggccgtcatcgaggtgaacgaggagggcaccgaggcggccgccgccaccgcggtttgtcttaccttcgcatcggcggcgccatcgtcacggcggccggcgagggtggatttcgtcgccgaccatccgttcgcgttcttggttttggaggagtcgtcgggtgcggtgctcttcgccggccacgttgttgacccgacagatgagtaa

SEQ ID NO: 19812 - protein, 415 aa, Oryza sativa subsp
MESCARRCAVSGLTALSMRLTKQLSAAAASKAGAAGNLVFSPLSIYSVLSVVTAGARGRTLTELLGALGAESREKLAANAGEMARALPAPGGGAAQPGGGPRVAHACGVWHERTRTVRPAFRDAAAASFNAAALAVDFLNNPEEARKEINSWVAAATENLIDTILPPGSVSTDTGLVVTSAIYFNGQWWTPFCKEITEKRAFHRLDGGDVEADFMRSGEDQYIAVHDGFKVLKMPYAACVSARTTTTPRYSMYVFLPDERDGLWSLEDRMAAGGEGFLREHTPERRVEVGEFRIPRFKLSFDDSVVGALQRLGVRDVFKPFVADLADVLEAENSGDDPPLFVSDVKHKAVIEVNEEGTEAAAATAVCLTFASAAPSSRRPARVDFVADHPFAFLVLEESSGAVLFAGHVVDPTDE

SEQ ID NO: 19813 - DNA, 1338 bp, Oryza sativa subsp
  CDS (1)..(1338)
atggcgccgccgccgccggcggcgccgccgtgccccggcctgacggagctcgccctccgcgtcgccaggaggatccaggccggcggtgcccccgacggcaacctcgtcttctcgccgctgtccgtgtacgccgcgctcgcgctggtggccgcgggcgccggcggcgacacgctcgccgagctcctcggcgttctcggcgcgggctcccgggacgagctcgccggcctcgccggccgcctcgcggggcgggcgctcgccgaccggtcccgcgccggcgggccgcgcgtgtcgttcgtgtccggcgtgtggtacgacaagaccaggacgctctcgccgtcgttccgcgacgccgccgtccagtccttcatggcggagacgcgcgccgccgacttccgcgaaaagccaggggaggcggtgaaccagatcaacgcgtgggcgaggaaggcgacgaacaagctcatcgacacggtcatcgacggtggattgcccgccgacaccgacgtcgtcgtcgccaacgccgtctacttcaagggcaaatggaaggatcccttcacgaaggcgttgaccaagaccggcaagttccaccgcctcgacggcgccgccgtcgacgcgagcttcatgcagaggggcacctactacgacacgggcgattacatcgcctgccacgacgggttcaaggtgctccggctgccgtacgacgacgaacggcgccgctccccggcgtcgccgccgccgccgccgtcgacgccgcgcttctcgctgtgcgtcttcctccccgacgcgctcgacgggctctgggacctcctcgacgagatcgcgtcaaccccgggcttcctccaggcgaagctgccgacgaggcacgcgtccgtcggcgagctcaagctgcccaagttcaagctcaccttctccggcgacatcgccggcgtcctccgcggcctgggcctcgacgccaccttcagcgacggggaggccgacttctccaagatggtggaggacgacggcggcaggcggccgctgtcgatgaggagcctcgtccacaaggccgtgatagaggtgaacgaggaaggcaccgaggcggccgcctccgccatcaacatggtgtgcggcatgagtatgacgccggagccacggccggtgccggtggacttcgtcgccgaccatcctttcgccttcttcgtcatcgaggagacgacgggcgccgtcgtcttcgccggccacgtccttgatccgagctcaacggccggagctttggatgatgacgacgacgacgacgagttcgtcgtaatgggatgtcttcgctatcttttggatcgctgcatggcatttgttggggtttag

SEQ ID NO: 19814 - protein, 445 aa, Oryza sativa subsp
MAPPPPAAPPCPGLTELALRVARRIQAGGAPDGNLVFSPLSVYAALALVAAGAGGDTLAELLGVLGAGSRDELAGLAGRLAGRALADRSRAGGPRVSFVSGVWYDKTRTLSPSFRDAAVQSFMAETRAADFREKPGEAVNQINAWARKATNKLIDTVIDGGLPADTDVVVANAVYFKGKWKDPFTKALTKTGKFHRLDGAAVDASFMQRGTYYDTGDYIACHDGFKVLRLPYDDERRRSPASPPPPPSTPRFSLCVFLPDALDGLWDLLDEIASTPGFLQAKLPTRHASVGELKLPKFKLTFSGDIAGVLRGLGLDATFSDGEADFSKMVEDDGGRRPLSMRSLVHKAVIEVNEEGTEAAASAINMVCGMSMTPEPRPVPVDFVADHPFAFFVIEETTGAVVFAGHVLDPSSTAGALDDDDDDDEFVVMGCLRYLLDRCMAFVGV

SEQ ID NO: 19815 - DNA, 1272 bp, Oryza sativa subsp
  CDS (1)..(1272)
atggcggcgctcgccgccggtgagccgttctctggtcgagcgacgggaggcgatggtggtgtgcggagcgacgtcatggctcctcctgcgatggcggaggaggcgaaggtgtcgtgcctgccgctcgcgagggaggtcggccgcagggcggcggcggcaggcggcggccaggggcgcaacttcatcgtctcgccgctgtccttccacgcggcgctcgcgctggtggccgacggcgcgcggggcgagacgcagcgcgagctcctgggcttcctcggctcgccgtcgctcgccgagcttcaccgctcgccgacgacgcggctcgtcgcgaggctccgccacctgccgaacacgtccttcgcctgcggcgtgtgggtggaccgcggccgcgcgctcacgccggagttcgcggacgccgccgcgtcgcgctacgccgccgtcgccgagcccgccgacttcgccacccagcccgagcaggcgcgggagcgagtcaacgccttcgtgtccgacgcgacggaggggctcatccgcgacgtcctccctcccaactccgtcgactcctccacggtggtcgtcctcgccaacgcggtccacttcaaggggacgtggtcgctgccgttccacccgtcggcgaccttccacgcgccgttccacctcctcgacggcggcgccgtgcgcgcgccgttcatgacgacggagatccccttcgagcgccacgtcgccgccttccccggcttcacggcgctcaagctcccctacaagaacgtcggcggcggcggcggtggcgacggcgtgccccgagccgcattctacatgctcctgctcctccccgacggcgacggcgcgctcaagctcgccgatctctacgatatggccgtgaccacgccggagttcatcaagaagcacacgccggcggcggaggctccggtgaggcggctcatggtccccaagttcaagttctcgttcaagttcgaggcgaagtccgacatgcggaagctgggcgtgacccgagctttcgccggcggcgacttctccggcatggtgaccggcggggacggtctcttcatcgccgaagtgtatcatcaggccaccatcgaggtggacgagctcggcaccgtggccgccgcctccaccgccgtggttatgatgcaaaaggggagctcactgccgccggtggacttcgtcgccgaccggccgttcttgttcgccgtcgtcgaggagctcaccggcgccgtactgtttcttgggcatgtggtcaatcctctcgctgaataa

SEQ ID NO: 19816 - protein, 423 aa, Oryza sativa subsp
MAALAAGEPFSGRATGGDGGVRSDVMAPPAMAEEAKVSCLPLAREVGRRAAAAGGGQGRNFIVSPLSFHAALALVADGARGETQRELLGFLGSPSLAELHRSPTTRLVARLRHLPNTSFACGVWVDRGRALTPEFADAAASRYAAVAEPADFATQPEQARERVNAFVSDATEGLIRDVLPPNSVDSSTVVVLANAVHFKGTWSLPFHPSATFHAPFHLLDGGAVRAPFMTTEIPFERHVAAFPGFTALKLPYKNVGGGGGGDGVPRAAFYMLLLLPDGDGALKLADLYDMAVTTPEFIKKHTPAAEAPVRRLMVPKFKFSFKFEAKSDMRKLGVTRAFAGGDFSGMVTGGDGLFIAEVYHQATIEVDELGTVAAASTAVVMMQKGSSLPPVDFVADRPFLFAVVEELTGAVLFLGHVVNPLAE

SEQ ID NO: 19817 - DNA, 1188 bp, Plutella xylostella
  CDS (1)..(1188)
atgaagctcttaatatgtgtactgtctgtggtcgtggcaacaatggcggacgagatcgaggacttcaagcagcagctcaacaatggaaacgatctattcacggccaatatgttctcggaggttctgaagcagcagaacggcaagaacgtggtcctgtcagccttctcggtgctgactccggtggcgcagctcagcctggcctcctcgggggagactcatgacctgctcctcaagaccttgggcttgcccagtgacgaagccatcaaaagcgtatttccgctcgtgaacgctaaactgcgggacatcaagggggtgacgctcaaacaagccagccgcatctacctgccgctgacggccgagctggccgacgacttcgccgccgcgtccagggatgtcttcggctccgaagccaagaacctcgacttcaccaaaaacgtcgagtccgctaaagaaatcaacgactgggtggaagagcagaccaacaaccgtatccaggacctggtggaccctgacagtatcaaacccgacaccgccagccttcttgtcaatgccatctacttcaagggtacatggaagagcaagttcgacaacgcgagcaccaccgagcgagacttccacgtgtccaaggacaagaccgtgaaggttcccacaatgtaccagaaggctagcttcaaatatggagaaagtgctgaactggacgctaagcttctggaaatgccctacgaaggagaaaaagcgtcattcctgatcattctgcccaacgacatcgaaggtctgcccgccctgaccgagaagctcaaagagccacagcacctcaacaaagctctcagtgaaatgtacaagggcgaaatccaagtgtacattcctaagttcaaaatcgagacggagaccgatctcaaagaagtcatgtctaacatgggtctatccagcctctttgagcctggcaaagccacaattgacaaactattgaaatctaaggcgcctttgtatattggtgatgcgaaacagaaggctttcattgaagtgaacgaggaagggtctgaggcagcagcggctaatgttttcggtattgcctacatgagcgcagtaatatccgagcctctgattttcaacgtgaaccatcccttcgtgtttgctttgatgcaaaaaagaaccatgctatttaacggagttttccaatcattatag

SEQ ID NO: 19818 - protein, 395 aa, Plutella xylostella
MKLLICVLSVVVATMADEIEDFKQQLNNGNDLFTANMFSEVLKQQNGKNVVLSAFSVLTPVAQLSLASSGETHDLLLKTLGLPSDEAIKSVFPLVNAKLRDIKGVTLKQASRIYLPLTAELADDFAAASRDVFGSEAKNLDFTKNVESAKEINDWVEEQTNNRIQDLVDPDSIKPDTASLLVNAIYFKGTWKSKFDNASTTERDFHVSKDKTVKVPTMYQKASFKYGESAELDAKLLEMPYEGEKASFLIILPNDIEGLPALTEKLKEPQHLNKALSEMYKGEIQVYIPKFKIETETDLKEVMSNMGLSSLFEPGKATIDKLLKSKAPLYIGDAKQKAFIEVNEEGSEAAAANVFGIAYMSAVISEPLIFNVNHPFVFALMQKRTMLFNGVFQSL

SEQ ID NO: 19819 - DNA, 1224 bp, Branchiostoma lanceolatum
  CDS (1)..(1224)
atgccaggacacagttacagcctctttggcctcctggttgccatggcaactctgggaagctccgcatcacaagagtccaccccattggctgacatcaacagcgagtttgccctggagctgtacaagacgctacacaaggatcatcccgagaacatcttcttctcacccttcagtatctccacctgtctggccatggcttacctgggggcaaggaacgatacagcacaacagatgagtcgagtgcttcgctttcacaagatggatgcctccgaccttcacgtgttgttccacgaccttctgacccagctgcaccactcagacaggccctacacactcaagaccgcaaaccggctcttcggtcagaactcattcgagttttcgcaaaagtttctggatgaaacgtccagacattacagggcgcagttggctcccgtggacttcagtggaaacacagagggcgcacggcaaactatcaacagctgggtagaggaacaaacagagaacaaaatccaagatcttttagcaccaggaaccgtgacccctgctaccatgttagtactggtcaacgccatctacttcaaaggcagctgggaacgcaagtttgaggagtcgcgtacgaggctcggtaccttccacatcagccgcgacgagaaggtcgaggtacccatgatgcatcagcaaggccggttcaaactcgcctacgacgaggacctcaactgccaaatcctagagatgccttaccaaggcaaacatcttagcatgctgttggtgttgccggaaaagatggacgctctgagcaccatcgagacgtccttgacgccagacatactccgtcgctggcagaagtctatggacgaggtttccaccatggtccaaatccccaagttcaagctcgtccacgatttcgtcctgaatgaaaagctggcggatatggggatgacggacctgttcagcatggcggacgccgacctgtccgggatcacgggttcgcgtgaccttcacgtcagtcaggtcatccataaggcgtttgtggaggtcaacgaggagggtagcgaggccgcggcggcgacggcggtgaacatgatgaaacgatcactggatggggagacgttctttgccgaccaccccttcctgttcctgatcagagacaatgactcaaactctatcctgtttcttggtcgactggtgcgaccagaaggattaactacaaaggatgaactgtaa

SEQ ID NO: 19820 - protein, 407 aa, Branchiostoma lanceolatum
MPGHSYSLFGLLVAMATLGSSASQESTPLADINSEFALELYKTLHKDHPENIFFSPFSISTCLAMAYLGARNDTAQQMSRVLRFHKMDASDLHVLFHDLLTQLHHSDRPYTLKTANRLFGQNSFEFSQKFLDETSRHYRAQLAPVDFSGNTEGARQTINSWVEEQTENKIQDLLAPGTVTPATMLVLVNAIYFKGSWERKFEESRTRLGTFHISRDEKVEVPMMHQQGRFKLAYDEDLNCQILEMPYQGKHLSMLLVLPEKMDALSTIETSLTPDILRRWQKSMDEVSTMVQIPKFKLVHDFVLNEKLADMGMTDLFSMADADLSGITGSRDLHVSQVIHKAFVEVNEEGSEAAAATAVNMMKRSLDGETFFADHPFLFLIRDNDSNSILFLGRLVRPEGLTTKDEL

SEQ ID NO: 19821 - DNA, 1197 bp, Haemaphysalis longicornis
  CDS (1)..(1197)
atgctcgccaagtgcgtcttccttgcggtgctcgtcacccttgtgggttcggagagcgacgacgtcctgctcgccagtgctcacaacacgcttgccgtcaacctgctgaagcacctgacggccgagagtccctcggaaaatgtgttcttctccccgacgagcatcgccaccgccttcggcatggcgtacgccggtgccaggggaagctctgaggcagagctagcctctgcgctcggccacacggccttcaacctcaccgacaggccgagggtgctggcggcgtacaagaagctgctggagctggcggcctcgccgaacgtcacgctagaggtggccaacatggtcctggcccagaataacttcgacgtctccgacaattacaagcaacagctgcatgaggtcttcgacgcagagctgaggtcggtggactttgccaacgagggacccagagtggcagccgaagtgaactcctgggttcgcgacaagactcgaggaaagatcagcagcatcctacccgaggggcagccgttggatatcatcctcttcatcctgaacgctgtctacttcaagggcacctgggtgaccaagttcgacactgccctaacggaggacaagccctttttcaatggcggaaccaccgaggtcagaaaaccggcgatgaacctcaggaggcgctttgcgtacacgaggatcaacgccctgagcgcaagcgccgtggagatcccgtacgaggggaatgacttcagcatggtcgtgcttcttccagacaccagaacgggggtggatcaggttagggatggcctgtcgctaccggttctcgaagatctggcccaccagctcagtttccgcgacgtcatcctgagactgcccaagttcgatatgagcctgcgctacaatctagtgcccgccatgcgcgcgatggggctcgatggcgtgttcggaagcagggccaacttcacaggcatcagtgagagcccgctggtgcgcatctcggacgccgtgcacaaggcgacggtcgaagtgaacgaggaaggtaccgtcgccaccgcggtcacagggatctcgttcattccgctttcggcgcactaccaaccaccgccgccggttgaattcatcgtggaccaccccttcatcttctacatcagggaccgcaacaccaaccgcatgctgttcatgggcgaagttaggcacctttaa

SEQ ID NO: 19822 - protein, 398 aa, Haemaphysalis longicornis
MLAKCVFLAVLVTLVGSESDDVLLASAHNTLAVNLLKHLTAESPSENVFFSPTSIATAFGMAYAGARGSSEAELASALGHTAFNLTDRPRVLAAYKKLLELAASPNVTLEVANMVLAQNNFDVSDNYKQQLHEVFDAELRSVDFANEGPRVAAEVNSWVRDKTRGKISSILPEGQPLDIILFILNAVYFKGTWVTKFDTALTEDKPFFNGGTTEVRKPAMNLRRRFAYTRINALSASAVEIPYEGNDFSMVVLLPDTRTGVDQVRDGLSLPVLEDLAHQLSFRDVILRLPKFDMSLRYNLVPAMRAMGLDGVFGSRANFTGISESPLVRISDAVHKATVEVNEEGTVATAVTGISFIPLSAHYQPPPPVEFIVDHPFIFYIRDRNTNRMLFMGEVRHL

SEQ ID NO: 19823 - DNA, 1119 bp, Drosophila melanogaster
  CDS (1)..(1119)
atgtattacttgtgcattttcctgtgggtcacttcagtggcatgtcagacctccaaagagatctaccaactactttgcaagagccatacaaaccagaacctcgtcgtctcgcccgtctccatagagaccatccttagcatggtcttcatgggcgcagaaggctcgacggccaaggagctgcagagcgccttaggtttaccatcggaggacaaagaggcggtggcagccaggtacggtgctctcctcaacgatcttcagggacaggaggagggacccatactaaagctcgcgaatcgcatctacgtcaacgaccagtacagcctgaatcagaactacaacctcgctgtgagggaacccttcaagtccgaggcggagtccattagtctgaccaatggccctgtggcggccgagagaatcaaccagtgggtgctggatcagaccagtggtaaaatcaagggcatgatcgatcccggcagcatgacgtccgacgtgaaggccttgctggtgaacgccatctactttaagggccagtgggagtcgaagtttgacccagctaagaccagagcctccaccttccaagtaactgcgaacaagagtgtgcccgtccagatgatggcgcaaatgggaacattcagggctaactacttccgcgatctagatgcccaagtcatcgagctgccgtaccttaactccaacctgtccatgactatctttctgccccgagaagtggagggcttgagcgccctggaagagaagatcgttggcttcgccaggccgctggttgccaaggaggtctatcttaagctgcccaagtttaaaatcgaatttcgtgatgaactcaaagagaccttagagaagctgggcatccgagagctattcaccgacaagtcagacttaagcggcttgttcgccgataagtcaggcggcaaagtcagtcaggtctcgcacaaggcgtttctggaggtgaacgaggagggagcggaggccgcaggtgccacatctgtggccgtcacaaatcgagcgggattttctacgttcctcatggccgatcatccctttgccttcgtcattcgcgatgcgaacaccatatatttccaggggcgtgttgtaagcccttga

SEQ ID NO: 19824 - protein, 372 aa, Drosophila melanogaster
MYYLCIFLWVTSVACQTSKEIYQLLCKSHTNQNLVVSPVSIETILSMVFMGAEGSTAKELQSALGLPSEDKEAVAARYGALLNDLQGQEEGPILKLANRIYVNDQYSLNQNYNLAVREPFKSEAESISLTNGPVAAERINQWVLDQTSGKIKGMIDPGSMTSDVKALLVNAIYFKGQWESKFDPAKTRASTFQVTANKSVPVQMMAQMGTFRANYFRDLDAQVIELPYLNSNLSMTIFLPREVEGLSALEEKIVGFARPLVAKEVYLKLPKFKIEFRDELKETLEKLGIRELFTDKSDLSGLFADKSGGKVSQVSHKAFLEVNEEGAEAAGATSVAVTNRAGFSTFLMADHPFAFVIRDANTIYFQGRVVSP

SEQ ID NO: 19825 - DNA, 1137 bp, Rhipicephalus appendiculatus
  CDS (1)..(1137)
atggccgtcaaccagctcggggactctattctcagcttcgccgtcgacttgtatggccagttgcagccgaaagacggccgcaagggaaacatctttttctcgccgttcagcatctcggctgctctttcaatggccctcgcaggagcgcgtaacaaaacggccaaagaactgtccaccgtgcttcgaatacccgacgatgtccagatacacaacaccacttttccgatttcctctcgaagctgtgtcgacgctgcgacgtcgctgcacatcgccaaccgcatgtactgcgaacagacgttccccgtcctggagagcttcctgtctctcctacgcgacagctacggtgctactatcgagtccgtcgacttcaagaacgactacgagacggttcgacttcaagccaacgcgtgggtggagcgagagacagagtcgaagataagggatctgctaccaggaggcagtgtggacgccaggacaactctcatcctgataaacgctatctactttaagggcatttgggcgtctcagctcgaccctgacgcgactcatccctctgattttcacctggattccaagcacaagaaacaggtcgacatgatgtttcacaaagaccgttactgcactggcagaagcaaggaacttggcgtggaagccctggagataccgtaccgaggtggcaaaacatccatggtaatccttctgcccgacgaggtcgaaggactgtccaaactcgagaagcgcttgaccacttcgaagctcgggaacctgctggagaaccttcgtggattttcgacgtggagctgtacctgccggttcaaactggaacagacgattaacctgaaggaagtcttgaaacatatgggagtcaaagattttttctcgtgcgacgccgatctgtccgccatcagtgagaagggacaagctggcgcttccgatgtggttcacaaagccttcgtggaagtcaacgaagaaggcaccgaagccgcggccgctacagctgtaatgatggcggcctgctgcttgtcttcaacgccgccgcagacttacaaatttacagtggatcggccgttcatgtttgtcatccgcagccgtgacccagatgttgtgctcttcatgggctccgtccgcgagttgtaa

SEQ ID NO: 19826 - protein, 378 aa, Rhipicephalus appendiculatus
MAVNQLGDSILSFAVDLYGQLQPKDGRKGNIFFSPFSISAALSMALAGARNKTAKELSTVLRIPDDVQIHNTTFPISSRSCVDAATSLHIANRMYCEQTFPVLESFLSLLRDSYGATIESVDFKNDYETVRLQANAWVERETESKIRDLLPGGSVDARTTLILINAIYFKGIWASQLDPDATHPSDFHLDSKHKKQVDMMFHKDRYCTGRSKELGVEALEIPYRGGKTSMVILLPDEVEGLSKLEKRLTTSKLGNLLENLRGFSTWSCTCRFKLEQTINLKEVLKHMGVKDFFSCDADLSAISEKGQAGASDVVHKAFVEVNEEGTEAAAATAVMMAACCLSSTPPQTYKFTVDRPFMFVIRSRDPDVVLFMGSVREL

SEQ ID NO: 19827 - DNA, 1363 bp, Cucurbita maxima
  CDS (42)..(1211)
cttgattcatcgatctcgaacccactctccagctgccggaaatggacatcaaagaagcaatcagaaaccatggcgacgtcgccatggccatcaccaagcgcattctccaacacgacgaagccaagggttccaacgttgtgatatcccccttgtcaatctacgtgcttctcagccttgtcgctgccggctccaagggccgcccgctggatcaacttctgtccttcctcaaatcaaactccatcgacaacctcaacgccttcgcttctcatatcatagacaaggtcttcgccgatgcgtcttcctgcggcggacctcgcctcgcgtttgtcaacggcgtttggatcgatcagtcactttctctcaagtcttctttccaacaggttgtggacaaatattacaaggccgagctccgtcaagtcgatttcctgactaaggctaatgaagtgatttcggaagtgaactcatgggttgaaaaaaacacgtatggacttatcagagagattcttcccgctggatcagtgggtagttccactcagctcgtccttgcgaatgcactctacttcaaagcggcatggcagcaggcatttgatgcttcgataacaatgaagcgtgatttctaccttattgatgggagctcagttaaagcaccctttatgtccggtgagaaggaccaatatgtagctgtgttcgatgggtttaaggttcttgcattgccgtacagtcaaggtcctgaccctcgtcgtttttctatgtacttctttctcccagatcggaaggatggactggcaagtttgattgaaaagttagattctgagcctgggttcatcgaccgccacattccatgtaaaaaacaagagctggggggatttttgattccaaagtttaaaatttcctttgggattgaagtttccgatgttttaaagaagttaggattggtgttaccatttactgaaggagggttgttaggaatggtggagtccccagtggctcaaaaccttcgtgtttctaacatattccacaaggcgtttattgaggttgatgaagaaggcacaaaagctgcagcttcttcagctgttactgtaggaatagtaagcttgcctataaatagaatagacttcattgccaaccgcccgttcttgtatttgatcagggaagacaaatcaggaactttgcttttcatcgggcaggtgttaaaccctcttgtggattgaataataccaatagactggagctaaagaataaacctaaatagctgcaataaaatctagctaacacttcgaggaatgttttagcatatcctatgaatattataagtattatctataacatatttcatgtgataaaaaaaaaaaaaaaaaaaaaa

SEQ ID NO: 19828 - protein, 389 aa, Cucurbita maxima
MDIKEAIRNHGDVAMAITKRILQHDEAKGSNVVISPLSIYVLLSLVAAGSKGRPLDQLLSFLKSNSIDNLNAFASHIIDKVFADASSCGGPRLAFVNGVWIDQSLSLKSSFQQVVDKYYKAELRQVDFLTKANEVISEVNSWVEKNTYGLIREILPAGSVGSSTQLVLANALYFKAAWQQAFDASITMKRDFYLIDGSSVKAPFMSGEKDQYVAVFDGFKVLALPYSQGPDPRRFSMYFFLPDRKDGLASLIEKLDSEPGFIDRHIPCKKQELGGFLIPKFKISFGIEVSDVLKKLGLVLPFTEGGLLGMVESPVAQNLRVSNIFHKAFIEVDEEGTKAAASSAVTVGIVSLPINRIDFIANRPFLYLIREDKSGTLLFIGQVLNPLVD

SEQ ID NO: 19829 - DNA, 1134 bp, Ixodes ricinus
  CDS (1)..(1134)
  misc_feature (1023)..(1023): y is t or c
atggaggcaagtctgagcaaccacatccttaacttctccgtcgacctctacaagcggctgaaaccctccggcaaagacacggcaggaaacgtcttctgctcaccattcagtattgcagctgcactgtccatggccctcgcaggagctagaggcaacactgccaagcaaatcgctgccatcctgcactcaaacgacgacaagatccacgaccacttctcgagcttcctttgcaagctacccagttacgccccagatgtggccctgcacatcgccaatcgcatgtactctgagcagaccttccatccgaaagcggagtacacaaccctgttgcaaaagtcctacgacagcaccatcaaggctgttgactttgcaggaaatgccgacagggtccgtctggaggtcaatgcctgggttgaggaagtcaccaggtcaaagatcagggacctgctcgcacctggaactgttgattcatcgacatcacttatattggtgaatgccatttacttcaaaggtctgtgggactctcagttcaagcctagtgctacgaagccgggagattttcacttgacaccacagacctcaaagaaagtggacatgatgcaccagaaaggagacttcaagatgggtcactgcagcgacctcaaggtcactgcgcttgagataccctacaaaggcaacaagacgtcgatggtcattctcctgcccgaagatgtggagggactctcagtcctggaggaacacttgaccgctccgaaactgtcggctctgctcggcggcatgtatgtgacgtccgatgtcaacttgcgcttgccgaagttcaaactggagcagtccataggtttgaaggatgtactgatggcgatgggagtcaaggatttcttcacatcccttgcagatctttctggcatcagcgctgcggggaatctgtgcgcttcggatatcatccacaaggcttttgtggaagttaatgaggagggcacagaggctgcagctgccactgccatacccattatgttgatgtgygcgagatttccacaggtggtgaactttttcgttgaccgcccattcatgttcttgatccacagccatgatccagatgttgttctcttcatgggatccatccgtgagctctaa

SEQ ID NO: 19830 - protein, 377 aa, Ixodes ricinus
MEASLSNHILNFSVDLYKRLKPSGKDTAGNVFCSPFSIAAALSMALAGARGNTAKQIAAILHSNDDKIHDHFSSFLCKLPSYAPDVALHIANRMYSEQTFHPKAEYTTLLQKSYDSTIKAVDFAGNADRVRLEVNAWVEEVTRSKIRDLLAPGTVDSSTSLILVNAIYFKGLWDSQFKPSATKPGDFHLTPQTSKKVDMMHQKGDFKMGHCSDLKVTALEIPYKGNKTSMVILLPEDVEGLSVLEEHLTAPKLSALLGGMYVTSDVNLRLPKFKLEQSIGLKDVLMAMGVKDFFTSLADLSGISAAGNLCASDIIHKAFVEVNEEGTEAAAATAIPIMLMCARFPQVVNFFVDRPFMFLIHSHDPDVVLFMGSIREL

SEQ ID NO: 19831 - DNA, 1143 bp, Anopheles gambiae
  CDS (1)..(1143)
atggccgacaatagcagctctctcgatgcgcaatttgtgtcacagtcgaacagcttcgctaccaagctgtaccagcgaataagtgcgaaacatgcgggagagaatgtggtcatttcgcccttctcgatcagtgcgtgcctttccctggctgcaatgggcgccggcggccttaccgcagagcagatgtactccgtgctggagtttggagcaccagacagaaagcaaaccgtggccgacaactatcggcgcctaatggagcgcctcgccaccgacagcacggtgaacgtggcgaacaaaatctacgtcatgcagaattacgctgtcaagggtgcgttcaacgcgattgccaccggcagcttccggtcggaggccgagtcggtcaactttgccgagagtgcggcggcagcgaaaaagatcaacggctgggtggaggagaatacgaacaacaaaatcagggatctgatctcgccagatgcgctggacgagctgtcgcgcatggtgctggtcaatgcggtacacttcaagggcacctggacgtaccagttcgatccgagcctgacccgcccgttcccgttctggctgagcgagacggaatcgcgcgacgtgccgatgatgaacatcaagaaacactttgccttcaacaacttcgaggagctcggcttctcggcgctggagctcacgtacggcgggagcgacatgacgatgatgctgctgctgccgaacgagcggatgggtttggccgcgctcgaggaaaagctgcccacgctcaatctggccgagctggcggggaaaatgcacaagcaggaggtagaggtgtttctgcccaaattcaagatcgaatttacgcgcgatctcaacgaggatctgcaagcgctcggcatggaaagaatgttcagcgactcggccgaattccccgacctgctggagcaaaacgaaccactgaaggtgtccaaagtcgtccacaaagcgttcattgaagtgaacgaggaaggcactgaggcggctgctgctaccggtatgatcatgatgatgcgctgcatgccaatgcacccttacttcacggtcgaccatccattcctttatgtgctgaggcatcagcagatggtctactttgtgggtcgcgtggccaagatcgatgcttag

SEQ ID NO: 19832 - protein, 380 aa, Anopheles gambiae
MADNSSSLDAQFVSQSNSFATKLYQRISAKHAGENVVISPFSISACLSLAAMGAGGLTAEQMYSVLEFGAPDRKQTVADNYRRLMERLATDSTVNVANKIYVMQNYAVKGAFNAIATGSFRSEAESVNFAESAAAAKKINGWVEENTNNKIRDLISPDALDELSRMVLVNAVHFKGTWTYQFDPSLTRPFPFWLSETESRDVPMMNIKKHFAFNNFEELGFSALELTYGGSDMTMMLLLPNERMGLAALEEKLPTLNLAELAGKMHKQEVEVFLPKFKIEFTRDLNEDLQALGMERMFSDSAEFPDLLEQNEPLKVSKVVHKAFIEVNEEGTEAAAATGMIMMMRCMPMHPYFTVDHPFLYVLRHQQMVYFVGRVAKIDA

SEQ ID NO: 19833 - DNA, 1140 bp, Anopheles gambiae
  CDS (1)..(1140)
  misc_feature (1098)..(1098): s is g or c
atggccgacaatagcagctctctcgatgcgcaatttgtgtcacagtcgaacagcttcgctaccaagctgtaccagcgaataagtgcgaaacatgcgggagagaatgtggtcatttcgcccttctcgatcagtgcgtgcctttccctggctgcaatgggcgccggcggccttaccgcagagcagatgtactccgtgctggagtttggagcaccagacagaaagcaaaccgtggccgacaactatcggcgcctaatggagcgcctcgccaccgacagcacggtgaacgtggcgaacaaaatctacgtcatgcagaattacgctgtcaagggtgcgttcaacgcgattgccaccggcagcttccggtcggaggccgagtcggtcaactttgccgagagtgcggcggcagcgaaaaagatcaacggctgggtggaggagaatacgaacaacaaaatcagggatctgatctcgccagatgcgctggacgagctgtcgcgcatggtgctggtcaatgcggtacacttcaagggcacctggacgtaccagttcgatccgagcctgacccgcccgttcccgttctggctgagcgagacggaatcgcgcgacgtgccgatgatgaacatcaagaaacactttgccttcaacaacttcgaggagctcggcttctcggcgctggagctcacgtacggcgggagcgacatgacgatgatgctgctgctgccgaacgagcggatgggtttggccgcgctcgaggaaaagctgcccacgctcaatctggccgagctggcggggaaaatgcacaagcaggaggtagaggtgtttctgcccaaattcaagatcgaatttacgcgcgatctcaacgaggatctgcaagcgctcggcatggaaagaatgttcagcgactcggccgaattccccgacctgctggagcaaaacgaaccactgaaggtgtccaaagtcgtccacaaagcgttcattgaagtgaacgaggaaggcactgaggcggctgctgctaccggtatggtgatgatgacgtgcgcaatgattatgtaccctatgtttacggctgatcatccgttcctatatgcgctgaaagattcscaaggaaacatcttgttcattggtaaaatacttaaagtttga

SEQ ID NO: 19834 - protein, 379 aa, Anopheles gambiae
MADNSSSLDAQFVSQSNSFATKLYQRISAKHAGENVVISPFSISACLSLAAMGAGGLTAEQMYSVLEFGAPDRKQTVADNYRRLMERLATDSTVNVANKIYVMQNYAVKGAFNAIATGSFRSEAESVNFAESAAAAKKINGWVEENTNNKIRDLISPDALDELSRMVLVNAVHFKGTWTYQFDPSLTRPFPFWLSETESRDVPMMNIKKHFAFNNFEELGFSALELTYGGSDMTMMLLLPNERMGLAALEEKLPTLNLAELAGKMHKQEVEVFLPKFKIEFTRDLNEDLQALGMERMFSDSAEFPDLLEQNEPLKVSKVVHKAFIEVNEEGTEAAAATGMVMMTCAMIMYPMFTADHPFLYALKDSQGNILFIGKILKV

SEQ ID NO: 19835 - DNA, 1364 bp, Triticum aestivum
  CDS (50)..(1246)
catctttctctcaactctaacaaaagcccaacgaaccactaccccagccatggcaaccaccctcgccaccgacgtccgcctctccattgcgcaccagacccgcttcggctttcgcctcgcctccactatctcatccaaccccgaatctactgccaacaatgtcgcattctctccggtttcccttcacgtcgcgctcagcctcatcaccgctggcgctgggggcgccacccgtgaccaactcgtcgctacactgggggaaggcgaggctgagaggctccacgcgctcgccgagcaggtggtgcagttcgtgcttgccgacgcgtcctatgccgatagtccgcgtgtcaccttcgctaacggcgtcttcgtggacgcatcgctgccgctcaagccatccttccaggagcttgcagtgtgcaaatacaaggccgaagctcagtccgtggacttccaaactaaggccgcggaagttactgctcaagtgaactcatgggtagagaaagtcacaaccggtctcatcaaagatattctccccgcggggtctattagcaacaccactagacttgttcttggcaatgccctttatttcaaaggagcttggacagaccagtttgattcacgtgtaacaaaaagcgactacttctaccttcttgatgggagctcaattcaaacaccattcatgtacagctcagaagaacaatacatttcttcttctgatggcttgaaggtacttaagcttccttacaagcaaggtggggacaagaggcagttctccatgtacatccttcttccagaagcaccaagtggtatctggagcttggcagaaaagttgagtgctgagccagagctcttggagcgccatatcccaaggcagaaggttgcactcaggcaattcaagctcccgaagttcaagatatcatttggaattgaagcatccgatttgctcaaacatttgggtctgcaactgccattcagtgatgaagcagatctttcggagatggtggattccccaatgccacagggcctccgcatctcatccgttttccacaaaacgtttgtcgaagtgaatgaaacaggaaccgaggctgcggcagcaactattgctaaagcagtcctgctaagtgcaagtccgccctcagacatggatttcatcgcggatcatcctttcctcttccttatccgagaagacacttccggtgtggttctattcatcggtcatgtggtcaatcccctccgatctttgtaatgtgtttgctctgaagtgtcttgtcatttgcctcggctgttacatgtaagggcagggtttggacaatcaatcatgctacccatgcaataaatccaataaatgttctatgcttttgatg

SEQ ID NO: 19836 - protein, 398 aa, Triticum aestivum
MATTLATDVRLSIAHQTRFGFRLASTISSNPESTANNVAFSPVSLHVALSLITAGAGGATRDQLVATLGEGEAERLHALAEQVVQFVLADASYADSPRVTFANGVFVDASLPLKPSFQELAVCKYKAEAQSVDFQTKAAEVTAQVNSWVEKVTTGLIKDILPAGSISNTTRLVLGNALYFKGAWTDQFDSRVTKSDYFYLLDGSSIQTPFMYSSEEQYISSSDGLKVLKLPYKQGGDKRQFSMYILLPEAPSGIWSLAEKLSAEPELLERHIPRQKVALRQFKLPKFKISFGIEASDLLKHLGLQLPFSDEADLSEMVDSPMPQGLRISSVFHKTFVEVNETGTEAAAATIAKAVLLSASPPSDMDFIADHPFLFLIREDTSGVVLFIGHVVNPLRSL

SEQ ID NO: 19837 - DNA, 1350 bp, Triticum aestivum
  CDS (13)..(1209)
accacctcagccatggcaaccacccttgccaccgacgtccgcctctccatcgcgcaccagacccgcttcgccctccgtctcgcctccaccatctcatccaaccctaagtctgctgccagcaatgccgtcttctccccggtctccctccatgtcgcgcttagcctcctcgccgctggcgcgggcagtgccactcgggaccaactcgtcgccacactcgggacaggcgaggtcgaaggactccacgcgctcgccgagcaggtggtgcagttcgtgctcgccgacgcgtcctccgctggaggtccgcatgtcgccttcgccaacggtgtcttcgtggacgcgtcgctgcccctcaagccatccttccaagagcttgcagtgtgcaagtacaaggctgacacccaatccgtggacttccaaactaaggccgctgaagttgctactcaagtgaactcatgggtagagaaagtcacaagcggtcgcatcaaggacattctcccatcaggatctgttgacaataccactaaacttgttcttgccaatgccctttatttcaaaggggcttggacagatcagtttgattcatctggaacaaaaaacgactacttctaccttcctgatgggagctcagttcaaacaccattcatgtccagcatggatgaccaatacctttcgtcttctgatgggttgaaggtacttaagcttccctacaagcaaggtggggacaagaggcagttctccatgtatatccttcttccagaagcaccaggtggtctctcaaacttggccgaaaaattgagtgctgaaccagacttcctggagcggcatatcccaaggcagagggttgcacttaggcaattcaagctccccaagttcaagatatcatttgaaactgaagcatctgatttgctcaaatgtttgggcctccagcttccattcagcaatgaagcagatttttccgagatggtggattccccaatggcacacggtcttcgtgtctcatctgttttccaccaagcgtttgtggaagtgaacgaacaaggaactgaggccgcggcatcaactgccattaaaatggccctgctacaggcaaggccgccctcggtcatggatttcatcgcggatcaccctttcctcttccttctccgggaagacatctctggtgtggtcctattcatgggtcatgtggtcaatcccctcttatcttcgtaatgtgtttgctctgaaagtgtgtgttgtcagttgccctcagccattacatgtaagggaagggtttcgacagtcagtcatgttaaccatacaataaatcgaataaatggttatgctaaaatatccaataaattgccttttaat

SEQ ID NO: 19838 - protein, 398 aa, Triticum aestivum
MATTLATDVRLSIAHQTRFALRLASTISSNPKSAASNAVFSPVSLHVALSLLAAGAGSATRDQLVATLGTGEVEGLHALAEQVVQFVLADASSAGGPHVAFANGVFVDASLPLKPSFQELAVCKYKADTQSVDFQTKAAEVATQVNSWVEKVTSGRIKDILPSGSVDNTTKLVLANALYFKGAWTDQFDSSGTKNDYFYLPDGSSVQTPFMSSMDDQYLSSSDGLKVLKLPYKQGGDKRQFSMYILLPEAPGGLSNLAEKLSAEPDFLERHIPRQRVALRQFKLPKFKISFETEASDLLKCLGLQLPFSNEADFSEMVDSPMAHGLRVSSVFHQAFVEVNEQGTEAAASTAIKMALLQARPPSVMDFIADHPFLFLLREDISGVVLFMGHVVNPLLSS

SEQ ID NO: 19839 - DNA, 1179 bp, Drosophila melanogaster
  CDS (1)..(1179)
atggctgacgccgcccaccaggagttcgcccgccggctggcccttttctctatcaacgtgtacggcaagctgtcggggcagaagcccggcgagaacatcgtcttctcgcccttttccatccagacttgtgcggcgatggccaggctgggtgcagaaaacgagacggctacccagctggaccagggactgggcttggcctctagtgacccagagcaaatcgcacacagttttcaccaggtgctggccgcctaccaggacagtcagatcttgcgcatcgccaacaagattttcgtcatggatggctaccagctgcgccaggagtttgatcagctgttatccaagcagttcctctcggcggctcagagcgtggacttttccaaaaatgtacaagcagcggccaccatcaacaattgggttgagcagcgcaccaaccatctgatcaaggaccttgtgccggctgatgtattgaactccgaatcgcgactcgtccttgtgaacgccattcacttcaagggcacctggcagcaccagttcgccaaacacttaacccgcccagacacctttcacctggatggggagcgaacagttcaggttccgatgatgagtttaaaggagcggttccgctacgccgatctgccggcgctagatgccatggctctggaactgccctacaaggactcagacctctctatgctgatcgtactgcccaacaccaagacgggtctgcccgctctggaggagaagttgcgcctcacgaccctctcgcagatcacgcagtcgttgtacgaaacaaaggtagcgctcaaattgcccaggttcaaggcagagttccaagtggaattgtctgaggttttccagaagctgggcatgtcaaagatgttctccgatcaggctgagtttggaaaaatgctacaaagtccggagccattgaaagtgtcagccttcatacacaaggccttcattgaagtcaacgaggagggaacggaggctgcggccgccacgggcatggcggtgcgtaggaagcgcgctattatgtcgcctgaggaaccaattgagttctttgccgaccatcctttcacctatgtccttgtgcatcagaaggatctgccattgttttggggctcagttgtgcggctcgaggaaaataccttcgcctccagcgagcatgatgagctgtga

SEQ ID NO: 19840 - protein, 392 aa, Drosophila melanogaster
MADAAHQEFARRLALFSINVYGKLSGQKPGENIVFSPFSIQTCAAMARLGAENETATQLDQGLGLASSDPEQIAHSFHQVLAAYQDSQILRIANKIFVMDGYQLRQEFDQLLSKQFLSAAQSVDFSKNVQAAATINNWVEQRTNHLIKDLVPADVLNSESRLVLVNAIHFKGTWQHQFAKHLTRPDTFHLDGERTVQVPMMSLKERFRYADLPALDAMALELPYKDSDLSMLIVLPNTKTGLPALEEKLRLTTLSQITQSLYETKVALKLPRFKAEFQVELSEVFQKLGMSKMFSDQAEFGKMLQSPEPLKVSAFIHKAFIEVNEEGTEAAAATGMAVRRKRAIMSPEEPIEFFADHPFTYVLVHQKDLPLFWGSVVRLEENTFASSEHDEL

SEQ ID NO: 19841 - DNA, 1119 bp, Drosophila melanogaster
  CDS (1)..(1119)
atgaagtatttgtgcctgcttcttttggccacgtcggtgtcttgtcgcttcaccgacgatctctaccaacttttggccaaggaaaatgccgacaagaatctcattacctctcccctatcggtggaaatcgcactgagcctggcatacatgggcgccaggggaaagacagcccaagaaatgagggatgttttgaaactgcccgacgacaagaaggaagtggcagccaaattcaaggatcttctgagtaaactcgaagggcgcgagagcgtagccattctgagtctggcaaatcgcatatacgttaacaataagttcaagctagtaccggagtacaatcaaatggtaaaggattcctttaaggctgaagcggaagcaatcagcgctaataatcccaagataaccgcttccattgtcaataagtgggtagatactcagacgagtggtaaaatcagagacttagttatgcccagtgacgtggcgaatctggtattggtcatcttaaatgccatttactttaaaggccagtggcagaaaaaatttaataccgagcaaacgaagtccgatttccatatttcggatcaaaagagtgttcctgtccagatgatgtcactagttaggccatttggggtttcatacgacagagaactaggtgccaatgttatcgagctgccctacagaaattcaaacctttccatggtcatttttctaccggacaaggttgatggtctaccagagttggagaaaaagatggtaggattcactccaaaacttatcaatataaatgtgcatctaaggcttcccaagttcaaaatcgaattctccgctcgtcttgagcaagttcttatagcggtgggcatacaagatgcgtttaagacgtctgctgacttcaatgatctggtcgcgaacagtggggctcatgtgggaggcgtcgttcacaaggcgttcctagacgttaatgaggaaggttctgaagcagcggctgcaacagctgtagtttttcgctataagagtatacggtcaccgccaatggattttaatgtcaatcacccatttgcctatgtcattcgcgatgcggaaaacatttactttcagggccacttcgtgaacccggaactataa

SEQ ID NO: 19842 - protein, 372 aa, Drosophila melanogaster
MKYLCLLLLATSVSCRFTDDLYQLLAKENADKNLITSPLSVEIALSLAYMGARGKTAQEMRDVLKLPDDKKEVAAKFKDLLSKLEGRESVAILSLANRIYVNNKFKLVPEYNQMVKDSFKAEAEAISANNPKITASIVNKWVDTQTSGKIRDLVMPSDVANLVLVILNAIYFKGQWQKKFNTEQTKSDFHISDQKSVPVQMMSLVRPFGVSYDRELGANVIELPYRNSNLSMVIFLPDKVDGLPELEKKMVGFTPKLININVHLRLPKFKIEFSARLEQVLIAVGIQDAFKTSADFNDLVANSGAHVGGVVHKAFLDVNEEGSEAAAATAVVFRYKSIRSPPMDFNVNHPFAYVIRDAENIYFQGHFVNPEL

SEQ ID NO: 19843 - DNA, 1128 bp, Drosophila melanogaster
  CDS (1)..(1128)
atgaagcatttgtgtctgcttcttttggccacgtcggtatcttgtcgctttgccgacgatttctaccaacttttggccaaggaaaatgcggccaataatctcatttcctctcccctttccgtggaaatcgcactgagcatggcctacatgggagccaggtcaaagacagcccaagaaatgaggaatgttttgaaactgcccgatgacaaaaaggaagtggcagccaaatacaaggaccttctgagtaaactcgaaggacgcgagaaggtagccactctcagtttggctaatcgcatatacgtgaacaaaaagttccagctagtaccgagttacaatcagatggtcaaggattcatttatggctgaagcggaggcaatcgacattgtcgatcccaataaggcttcttcaattgtcaataattgggtagataatcagacgcgtggtaaaatcaaagacttagtttcatccaatgacatgtcgaaaatggaattgatcgtcttaaatgccatatactttaaaggccagtgggagtacaaatttaatcccaagttaacgaagaagaggaatttccgtgtttcggatcaaaagagtgttcctgtcgagatgatgtcactatttcaatcatttagggccgcacatgatagtgaactgggtgccaaaattatcgagctgccctacagaaattcaagcctgtccatgctaatttttctaccggaccaggtcgatggactatcagagctggagaaaaagattgtaggattcaaaccgaaactttccaaaatggatgtaactttaaggcttcccaagtttaaaatcgaattcttcgctcaactaaacaaaattcttgtggcgatgggcatacaagatgcgttcgaaaaatctgctgacttcaaagatctggtcgaaaacagtaacgttcatgtgaaaaaagtcattcataaggcgttcatcgaggttaatgaagaaggtgctgaggcagcggctgcaacagctttacttttcgtgcgcttaagtgtgcctatgccgtcatctcaaatggtttttaatgccgatcatccttttgcctatgtcattcgcgatagggaaaccatttatttccagggtcactttgtgaaaccgaatgaataa

SEQ ID NO: 19844 - protein, 375 aa, Drosophila melanogaster
MKHLCLLLLATSVSCRFADDFYQLLAKENAANNLISSPLSVEIALSMAYMGARSKTAQEMRNVLKLPDDKKEVAAKYKDLLSKLEGREKVATLSLANRIYVNKKFQLVPSYNQMVKDSFMAEAEAIDIVDPNKASSIVNNWVDNQTRGKIKDLVSSNDMSKMELIVLNAIYFKGQWEYKFNPKLTKKRNFRVSDQKSVPVEMMSLFQSFRAAHDSELGAKIIELPYRNSSLSMLIFLPDQVDGLSELEKKIVGFKPKLSKMDVTLRLPKFKIEFFAQLNKILVAMGIQDAFEKSADFKDLVENSNVHVKKVIHKAFIEVNEEGAEAAAATALLFVRLSVPMPSSQMVFNADHPFAYVIRDRETIYFQGHFVKPNE

SEQ ID NO: 19845 - DNA, 1431 bp, Drosophila melanogaster
  CDS (1)..(1431)
atggcgagcaaagtctcgatccttctcctgctaaccgtccatcttctggctgctcagaccttcgcccaggagctcatcgcttggcaacggcaacaacaacagcagcaacagcagcaactgcagctacagcagcaactgctgctgcagcagcaacaacaccaacgtaacccaagaccggagctgggcctccgttccctgcccggaaacccgtggacccagaacaatcaggaagccataagcgatgtggtggcggtggacctaaccaaacgtgagccggtcactccgccacccaatcgcccgccgcccgtcttcagctacatggaccgcttcagctccgagctcttcaaggagatcattaagtcgcaaagtcagcagaacgtggtgttctcgcccttctccgtccacgcgctgctggccctgatctacggggcctcggacggaaaaacgttccgggaactgcagaaggccggagagttcagcaagaacgccatggccgtggcccaggacttcgagagcgtgatcaagtacaagaagcatttggagggcgcagatctgaccctggcaaccaaggtctactacaaccgcgagctgggtggcgtcaaccacagctacgatgagtacgcaaagttctatttcagcgccggcacggaggctgtcgacatgcagaacgccaaagacacggcagccaagatcaacgcctgggtgatggacacgacgcggaacaagatccgggacctggtcacaccgaccgacgttgacccacagacgcaggcgctccttgtgaatgcagtctacttccagggtcgttgggagcacgaattcgccaccatggacacatcaccctacgactttcagcacaccaacggcagaatttccaaggtggccatgatgttcaacgacgatgtgtacggcctggccgagctgcctgagctgggcgccaccgccttggaactggcctacaaggacagcgccaccagcatgctaatcctgctgcccaatgagaccaccggactgggcaaaatgctgcagcagctgtcccggccggagttcgatctcaaccgcgttgcccaccgcctgcgccgccagtcggtcgctgtgcgcctgcccaagttccaattcgagttcgagcaggacatgaccgagccgctaaagaacctgggagtccaccagatgttcacgcccaactcgcaggtgaccaagttgatggatcagccggtgcgcgtgagcaagatcctgcagaaggcctacatcaatgtgggcgaggcgggcacagaggcctcggcagcttcctatgccaagttcgtacccctttcgctgcctcccaagcccacggagttcgtcgccaaccggccattcgtcttcgccgtccgcaccccctcctcagttctgttcataggtcacgtggagtatcccacgcccatgagcgtctaa

SEQ ID NO: 19846 - protein, 476 aa, Drosophila melanogaster
MASKVSILLLLTVHLLAAQTFAQELIAWQRQQQQQQQQQLQLQQQLLLQQQQHQRNPRPELGLRSLPGNPWTQNNQEAISDVVAVDLTKREPVTPPPNRPPPVFSYMDRFSSELFKEIIKSQSQQNVVFSPFSVHALLALIYGASDGKTFRELQKAGEFSKNAMAVAQDFESVIKYKKHLEGADLTLATKVYYNRELGGVNHSYDEYAKFYFSAGTEAVDMQNAKDTAAKINAWVMDTTRNKIRDLVTPTDVDPQTQALLVNAVYFQGRWEHEFATMDTSPYDFQHTNGRISKVAMMFNDDVYGLAELPELGATALELAYKDSATSMLILLPNETTGLGKMLQQLSRPEFDLNRVAHRLRRQSVAVRLPKFQFEFEQDMTEPLKNLGVHQMFTPNSQVTKLMDQPVRVSKILQKAYINVGEAGTEASAASYAKFVPLSLPPKPTEFVANRPFVFAVRTPSSVLFIGHVEYPTPMSV

SEQ ID NO: 19847 - DNA, 1179 bp, Bombyx mori
  CDS (1)..(1179)
atgaagacaatcatttgtttgtttactatcgccatcgcggcaatggcagccgtcacaaatctctctaatgtgctcaaaaatggaaacgataacttcacagccagaatgtttaccgaagtagtgaaaaataatccagggaaaagcattgtcctctcggcattttcggtgctgcctcctctcgctcagttagctttagcttctgatggtgaaacccatgaagagcttttgaaagctatcggcttccctgacgacgatgctatacgaacagaattcgcgagtaaaagccgtgaccttcgatcaattaaaggcgttgagcttaaaatggcgaacaaagtatacgttcatgatggtggaaaactagacgagaattttgcagtcgtttccagggacgtcttcaattcggacgtccaaaatattgatttctcgaagaatacagtcgcagctaagtctattaacgattgggtagaagaaaatactaataaccgcattaaggatttagttaatccggactccctcagctcagccacagcggctgttctcgtcaacgccatctatttcaagggagcatggagttctaaatttgacgagcgactgaccagtgaccgtgacttctacgtgagcaaagacaaaacaatcaaagtacccatgatgtataaacgcggcgattataaatatggagagagcgcagtacttaatgcccaactaattgaaataccttacaagggcgatcaatcgtcgctgatcgtagtgttaccaaaagacaaggatggcattacacaacttcaagaagcactaaaagaccctaagacgttggaaacggctcagcaaagcatgtatagcaccgaagtcgatttgtatcttcccaaattcaaaattgaaacggagacgaatctcaaagatgttttaagcaatatgaacgttaataaaatattcaacaacgatgctcaaattacgcgccttctaaaaggagaaagcctttctgtaagtgaggctattcaaaaagcgttcattgaaatcaacgaggaaggcgctgaagctgctgcagctaacgcttttacaatgacgagatcatcaaaggtttatgtacgaccgccaatcgttttcaatgcaaacaaaccgttttactatgcccttcaagttgatggtgttattatgtttaacggaatctttataaattag

SEQ ID NO: 19848 - protein, 392 aa, Bombyx mori
MKTIICLFTIAIAAMAAVTNLSNVLKNGNDNFTARMFTEVVKNNPGKSIVLSAFSVLPPLAQLALASDGETHEELLKAIGFPDDDAIRTEFASKSRDLRSIKGVELKMANKVYVHDGGKLDENFAVVSRDVFNSDVQNIDFSKNTVAAKSINDWVEENTNNRIKDLVNPDSLSSATAAVLVNAIYFKGAWSSKFDERLTSDRDFYVSKDKTIKVPMMYKRGDYKYGESAVLNAQLIEIPYKGDQSSLIVVLPKDKDGITQLQEALKDPKTLETAQQSMYSTEVDLYLPKFKIETETNLKDVLSNMNVNKIFNNDAQITRLLKGESLSVSEAIQKAFIEINEEGAEAAAANAFTMTRSSKVYVRPPIVFNANKPFYYALQVDGVIMFNGIFIN

SEQ ID NO: 19849 - DNA, 1200 bp, Hordeum vulgare
  CDS (1)..(1200)
atggcaaccaccctcgccaccgacgtccgtctctccatcgcacaccagacccgcttcgccctccgcctccgttccgccatctcctccaaccccgagcgtgctgccggcaatgtcgccttctctccgctctccctgcacgtcgcactcagtctcatcaccgctggcgcggcggccacccgtgaccagctcgtcgccatactcggagatgggggtgcaggtgacgccaaggaactgaacgcgctcgcggagcaggtggtgcaatttgtgctcgccaatgagtccagcaccggtggcccgcgcatcgccttcgccaacggcatctttgtcgatgcgagtctctcgctcaagccttccttcgaggagctcgctgtgtgccagtacaaggccaagacacagtccgtggatttccagcataagactctagaagctgttggtcaagtgaactcatgggtagagcaagtcaccacaggtctcatcaaacagatccttcctccaggatctgttgacaatactacaaaactaatccttggtaatgctctttatttcaaaggggcctgggaccaaaagtttgatgaatcaaatacaaaatgtgacagtttccaccttcttgacgggagctcaattcaaacacaattcatgtccagtacaaagaagcaatacatttcctcttccgacaacttgaaggtacttaagcttccttacgcgaagggtcatgacaagaggcagttttccatgtacattcttcttcctggagcacaagatggtctctggagtttggccaagcggttgagcactgaaccggagttcatcgagaaccatatcccaaagcagacggttgaagttggtcggttccagctccccaagttcaagatatcatatcaatttgaagcatctagcttgctcagagctttgggtctccaattgccatttagcgaagaggctgatctgtcagagatggtggattcttcgcaagggctggaaatctcacatgtcttccacaagtcgtttgtcgaagtgaacgaagaaggaactgaggctggcgcagctacagttgcaatgggcgtggccatgtcaatgcccctgaaggtggatttggtggattttgtcgcgaatcaccctttcctcttccttattcgggaagacattgccggtgtggtggtcttcgtaggtcatgtgaccaatcccctcatatctgcataa

SEQ ID NO: 19850 - protein, 399 aa, Hordeum vulgare
MATTLATDVRLSIAHQTRFALRLRSAISSNPERAAGNVAFSPLSLHVALSLITAGAAATRDQLVAILGDGGAGDAKELNALAEQVVQFVLANESSTGGPRIAFANGIFVDASLSLKPSFEELAVCQYKAKTQSVDFQHKTLEAVGQVNSWVEQVTTGLIKQILPPGSVDNTTKLILGNALYFKGAWDQKFDESNTKCDSFHLLDGSSIQTQFMSSTKKQYISSSDNLKVLKLPYAKGHDKRQFSMYILLPGAQDGLWSLAKRLSTEPEFIENHIPKQTVEVGRFQLPKFKISYQFEASSLLRALGLQLPFSEEADLSEMVDSSQGLEISHVFHKSFVEVNEEGTEAGAATVAMGVAMSMPLKVDLVDFVANHPFLFLIREDIAGVVVFVGHVTNPLISA

SEQ ID NO: 19851 - DNA, 1281 bp, Pyrococcus kodakaraensis
  CDS (1)..(1281): transl_table=11
atgaggcgtacagttctgcttgttacagttcttctcgttttcattgggggatgcctcggtcagatggagaatcccaggcccacaaataacccatcaacatcacatccatcggactcttactccaccttacccacaacaaagtacgacgtcctgaaagaggggcaggaaaagcctgtggttaacgcgatcaactccttcacatttgacctatacaaagagctggcagggaacaataacaacgtcttcttctcgcccttcagcatcgagacggcccttgccatggcatatgagggagcaagaggaaagaccgcagaagaaatgaagagggtcctacatcttcctgaagacgatgatgcgaggtggacaggttttaggtatcttctactttccctgaaaagtcccgaaggctcgcctttcatcctcaggagcgtcaatgcactctgggttcagaggggatattccctacgggaggagtatctgggaattgtgaaggagttctacctcggggaggcaaaggaagtagactttcagggcaatcccgcggaagcggcgagggaaataaatgagtgggttgaggaacagacgaacggcaggataaaggacatcgtatcgggcttaagtcccctgacaaggctcgtgataacgaacgcggtttactttaaggcaaactggtcgagcagattcagggcaagcgacacgagaaacgaaaccttccacgctcccaacgggacagttatcgtccctatgatgcaccagactggagaattcccttattttgaaaacgacgatcttcaggccctcgaacttccctacgagggtgaaaggctgggcatgctgataatcctgcccaaagaagggaagttcgaaaaggtggaaggcaacctgagcgctggctccatagagaacatcctgaaaaacatgcgcgaggaaaaggtgaaagttgccctcccgaagttcaggttcgaggcttcgtacaagctcagggacgttctcatggacatgggaatgaaaagagcatttctggtgccggatttctctggaatctccaacggggaaaacctagcgatagaggatgtcgtccacaagagcttcatcagcgtggccgaaaacggaaccgaggcggccgcggcgacggcagttacgctaacgatgaacgcccctatgcaggagaaagaaccaaaaatcttcaaggccgaccacccgttcatcttcttcatctacgacagagagactggaacaatactcttcatggggcgcatgatgaacccaaaggatggatag

SEQ ID NO: 19852 - protein, 426 aa, Pyrococcus kodakaraensis
MRRTVLLVTVLLVFIGGCLGQMENPRPTNNPSTSHPSDSYSTLPTTKYDVLKEGQEKPVVNAINSFTFDLYKELAGNNNNVFFSPFSIETALAMAYEGARGKTAEEMKRVLHLPEDDDARWTGFRYLLLSLKSPEGSPFILRSVNALWVQRGYSLREEYLGIVKEFYLGEAKEVDFQGNPAEAAREINEWVEEQTNGRIKDIVSGLSPLTRLVITNAVYFKANWSSRFRASDTRNETFHAPNGTVIVPMMHQTGEFPYFENDDLQALELPYEGERLGMLIILPKEGKFEKVEGNLSAGSIENILKNMREEKVKVALPKFRFEASYKLRDVLMDMGMKRAFLVPDFSGISNGENLAIEDVVHKSFISVAENGTEAAAATAVTLTMNAPMQEKEPKIFKADHPFIFFIYDRETGTILFMGRMMNPKDG

SEQ ID NO: 19853 - DNA, 1359 bp, Oryza sativa
  CDS (1)..(1359)
atggatgacggcgaggcggcgcgacgtcatcgccatcgggccatctccggcggcctgacggcgctggccgtccgcctcgccgaccgcctcggcgccgcgagccccggccgcaacctggccttctcgccgctctccgtccacgcagcgctctccctcgccgccgccggcgcggccggcggcaccctcgacgagatcctcgccgtgctcggcgcggcgtcgcgcgatgacctggcggcgttcgtcggccgcacggccgagacggcgctcgccgacaggggcccggagtccctcgggccgcgcgtcgtgttcgcgcccggcgtctggtgcgacgccgcgcgcccgttcaagcccgcctaccgcgccgccgtcgccgccgagtacaacgccgaggccaccgtcgtcgacttcaagaacaaggttggttatagcatactcatcgatgcatttattcttttacttgatccatccatgatcgatcaatgtgttcttgatttggtttctgagaaggcagaggaagcgaggaagcagatcaacgcgtgggcgcggcgggcgacggggaagctcatcaccgacgtcctaccgccgagatccgtcggcccggagaccgccgtcgtgctcggcaacgccatctacttcaagggcaagtgggatcgtcccttcaatgagagcgacacggagaggaagccgttctaccgccacgacggcgccgccgccgccgccgccgtcgccgacgtgccctacatgtcgagccgttcctaccagcgcgtcgccgtgcacgacggcttcaaggtgctcaagctccgctaccgatcgccgcgactcctccgcgacaagcgcaagcgcggcggcggcggcgatgtcggcggcgagttcacgcggtacgccatggccatcttcctccccgacgcgcgcgacgggctgcgcggcctcgtggagaggatggcgtcgcggccggggttcctgcacgagcacatgccggcggcgtggccagtgcccgtcggcgagtttcgggtgcccaagttcaaggtgtcatgcggcggcagcgtcgtcggcgccctcgagcagctgggcctccggctgccgttttcgccggagctcgccgacctgtccgacatggtggaggacgacggctccggctggccgttgttcgtcggcgacatccagcacaaggcggtgatcgaggtgaacgaggaaggaaccgtggctgccgccgccaccatgacaaggatgcttccttccggtgtgccgccgccgccggtggacttcgtcgccgaacatccgttcgcctacttcatagtggaggagatgtcaagtgcggtcgtcttcgccggacacatcgtcgacccgtcgatggaatga

SEQ ID NO: 19854 - protein, 452 aa, Oryza sativa
MDDGEAARRHRHRAISGGLTALAVRLADRLGAASPGRNLAFSPLSVHAALSLAAAGAAGGTLDEILAVLGAASRDDLAAFVGRTAETALADRGPESLGPRVVFAPGVWCDAARPFKPAYRAAVAAEYNAEATVVDFKNKVGYSILIDAFILLLDPSMIDQCVLDLVSEKAEEARKQINAWARRATGKLITDVLPPRSVGPETAVVLGNAIYFKGKWDRPFNESDTERKPFYRHDGAAAAAAVADVPYMSSRSYQRVAVHDGFKVLKLRYRSPRLLRDKRKRGGGGDVGGEFTRYAMAIFLPDARDGLRGLVERMASRPGFLHEHMPAAWPVPVGEFRVPKFKVSCGGSVVGALEQLGLRLPFSPELADLSDMVEDDGSGWPLFVGDIQHKAVIEVNEEGTVAAAATMTRMLPSGVPPPPVDFVAEHPFAYFIVEEMSSAVVFAGHIVDPSME

SEQ ID NO: 19855 - DNA, 1533 bp, Oryza sativa
  CDS (1)..(1533)
atggggagcccgccgccgccgcgccgccggtgctgcgcgatccagggtttcgtggtgttgttcctcgtctacgtgctcgcggtgcttgtgctcgccggcggcgagctcttccgcgacgaccacccgctcgacctccgcttcccctcctctcctggaattggatcctcctcctcctcctccgctcgattcctcctctcgcctcgctcgttgctgcttcgtctcggggagatcgcgagccgtcggggcaggtggtggcgaccggaatcggactctccgacgagcggcggacgaaaggacgggaacagttcgaccacggaggcgtgttcgcggcggtgcgccgcctccggcctgatggggatatcgctgcgcctcgccgagcagttctccgcggaggaggacggcggcggcggcggcggcaacctcgtcttctcgccgctgtccatctactccgcgctctccgtggtcaccgccggcgcgcggggcaccaccctgaccgagctgctcgccgccctcggcgcgccgtcccgcgacgcgctcgccaagaacgccgccgagatcgcgcgcgccctcgccggcggcacggcgacgggcgggccccgcgtcgcgcacgcgtgcggcctctggcacgagcggacgaggtcgctcaagctggcgttccgggacgccgccgccgcctccttcaacgccgcaacccgcgccgtcgacttcctcgccaacccggaagaagcgaggaaggagatcaacagctgggttgcggccgcgacggagaacctcatcgacacgatcctcccgccggggtcggtgagcacggacacgggtctcgtggtcaccagcgccatctacttcaacggcacatggcagacgccattccgaaagcaggacaccaagaaggacaagttccacctcctcgacggccacggcaccgtcgacgcggacttcatgcgcaccggcgaggaccagtacatcgcggcgcacgacgggttcaaggtgctcaagatgccgtacgcccacgaccacgcggcgccacaaccctcgccgcggtactactccatgtacatcctcctccccgacgagcgcgacggcctgtccagcctcgaggacaggatggcggcggccggtggcggcggcggcggcgagggcttcctcagcgagcacatgccggtgcgacgcgtcgaggtcggcgagttcaggatccccaggttcaagctctccttcagccgcagcgtcgtgcgcgcgctccggggtgtcggggtgaacgccgtgttcgatcgggccgagctgccggacatgatcgagggcgagccgctgcgcgtgtcggacgtcctgcacaaggccgtgatcgaggtgaacgaggagggcaccgaggcggcggcggccacggcagtgttaatggaaggtgcggcgcggtatgcgccgccgccgccgccaagggaggacttcgtcgccgaccatccgttcgccttctttgtggtggaggaatcgtcgggcgcggtactcttcgcggggcatgtcgttgacccgacgaaatcttag

SEQ ID NO: 19856 - protein, 510 aa, Oryza sativa
MGSPPPPRRRCCAIQGFVVLFLVYVLAVLVLAGGELFRDDHPLDLRFPSSPGIGSSSSSSARFLLSPRSLLLRLGEIASRRGRWWRPESDSPTSGGRKDGNSSTTEACSRRCAASGLMGISLRLAEQFSAEEDGGGGGGNLVFSPLSIYSALSVVTAGARGTTLTELLAALGAPSRDALAKNAAEIARALAGGTATGGPRVAHACGLWHERTRSLKLAFRDAAAASFNAATRAVDFLANPEEARKEINSWVAAATENLIDTILPPGSVSTDTGLVVTSAIYFNGTWQTPFRKQDTKKDKFHLLDGHGTVDADFMRTGEDQYIAAHDGFKVLKMPYAHDHAAPQPSPRYYSMYILLPDERDGLSSLEDRMAAAGGGGGGEGFLSEHMPVRRVEVGEFRIPRFKLSFSRSVVRALRGVGVNAVFDRAELPDMIEGEPLRVSDVLHKAVIEVNEEGTEAAAATAVLMEGAARYAPPPPPREDFVADHPFAFFVVEESSGAVLFAGHVVDPTKS

SEQ ID NO: 19857 - DNA, 1575 bp, Oryza sativa
  CDS (1)..(1575)
atggcgactccaccggcggccggggcgccgcgccggcggtggtgcgcgatccagggtctcgtcgtgttgttcctcgtctacgtgcttgcggtgcttgtgctcgccggcggcgagctcttccacgacgaccagctccagccccgcttcccatcctctcctggaatcggatcctcttcctcctcctcctccgctcgaattctcctctcgcctcgctcgatgatccgccgtctcggggagatcgctcgccgtagtggaagcaggcggtggtggactggtggtgttcgaccggaatcgggctctccaagaagcgagggaggaaacagttcggccacggatcaggcgtgttcgcggcggtgcgccgcctccggcctggcggggatggcgctgcgcctcgccgagcgtctgtccttggaggaggacagcgtcggcggcggcaacctcgtgttctcgccgctgtccatctactccgcgctcaccgtggtcaccgccggcgcgcgggggaccaccctggccgagctgctcgccgccctcggcgcgccgtcctcccgcgacgcgctcgccgaggacgccggcgagatcgtgcgcgccctccccggcggctccggcacggcgacgggcgggccccgcgtcgcgcacgcgtgcggcctctggcacgatcggaggaggaacgtcaagccggccttccgcgacgccgccgccgcgtccttccaagccacgacgcgcgccgtcgacttcctcgccaacccggaggaagcgaggaacgagatcaacagctgggtcgcggcggcgacggagaacctcatcgacacgatcctcccgccggggtcggtgagcacggacacgcggctcgtggtcgccagcgccatctacttcaacgccacatggcagacgccattccgcaagcaggacaccaagaaggacaagttccacatcctcggcggcggcggcgacgtcgacgcagacttcatgcgcagcggcgacgaccagtacgtcgccgcgtacgacgggttcaaggtgctcaagatgccgtacaacacgcgtgcctcccgtacgcacacgcaaccgcagtactcgttgtgtgtcttcctccccgacaagcgcaacgggctgtggaccctcgccgacaggatggaggccggcggcggcgaggtcttcctccgggagcacatgccggagaagcgcgtcaaggtcggcgagttcaggatccccaggttcaagctctccttcgacggcagcatcaagaccgcgctccagggtgtcggggtcagggccgtgttcgatccggcagcggccgacctgtccgacgtgctggaggagggcaactccggcgatccgccgctgttcgtgtcggacgtcctgcatggggcagcgatcgaggtgaacgaggagggcacggaggtggcggcggccacggtggttattatgaaagggagggcgaggcggccatctccggcgccggcgccggtggacttcgtcgccgaccatccgttcgccttctttgtagtggaggagtcgtcgggtgcggtgctcttcgccggccacgtcgttgaccccactaatcctagtcaactgtaa

SEQ ID NO: 19858 - protein, 524 aa, Oryza sativa
MATPPAAGAPRRRWCAIQGLVVLFLVYVLAVLVLAGGELFHDDQLQPRFPSSPGIGSSSSSSSARILLSPRSMIRRLGEIARRSGSRRWWTGGVRPESGSPRSEGGNSSATDQACSRRCAASGLAGMALRLAERLSLEEDSVGGGNLVFSPLSIYSALTVVTAGARGTTLAELLAALGAPSSRDALAEDAGEIVRALPGGSGTATGGPRVAHACGLWHDRRRNVKPAFRDAAAASFQATTRAVDFLANPEEARNEINSWVAAATENLIDTILPPGSVSTDTRLVVASAIYFNATWQTPFRKQDTKKDKFHILGGGGDVDADFMRSGDDQYVAAYDGFKVLKMPYNTRASRTHTQPQYSLCVFLPDKRNGLWTLADRMEAGGGEVFLREHMPEKRVKVGEFRIPRFKLSFDGSIKTALQGVGVRAVFDPAAADLSDVLEEGNSGDPPLFVSDVLHGAAIEVNEEGTEVAAATVVIMKGRARRPSPAPAPVDFVADHPFAFFVVEESSGAVLFAGHVVDPTNPSQL

SEQ ID NO: 19859 - DNA, 1191 bp, Oryza sativa
  CDS (1)..(1191)
atggccgccgacctccgcgtttccatcgcccaccagacctccttcgcgctccgcctcgccgccgccctgtcctccccggcgcacccggcgggtggcgccgggaggaacgtcgccttctccccgctgtccctccacgtcgcgctcagcctcgtcgcggccggcgccggcggggccacgcgggaccagctcgcctccgcgctcgggggcccggggagcgccgagggcctccacgcgttcgccgagcagctggtgcagctcgtcctcgccgacgcttccggcgccggcggcccgcgcgtcgccttcgccgacggcgtcttcgtcgacgcgtcgctgtcgctcaagaaaaccttcggtgacgtcgccgtgggcaagtacaaggccgagacccactccgtagacttccaaactaaggctgctgaagttgcttctcaagtgaactcatgggtagagaaagtcacatcaggcctcatcaaagagatactccctcctggatctgttgaccatactaccaggctggttctaggtaatgcgctttatttcaaaggagcatggactgagaagtttgatgcatctaaaaccaaagatggcgagttccaccttcttgatggcaagtcggttcaagcaccattcatgtccacttcaaagaagcagtatattttgtcttatgacaacttgaaggtactgaagcttccataccagcaaggcggggacaagaggcagttctccatgtacatacttcttccggaagcacaggatggcctctggagcttggctgagaagctgaactctgaaccagagttcctggagaagcatatcccaacgcggcaagttactgtcgggcaattcaagctcccgaagttcaagatatcgtttggatttgaggcgtctgatttgctcaaaagtttggggctccacctgccatttagctctgaagctgatcttacagagatggtcgattcaccagaggaaaaaaacctgtttgtttcatccgttttccacaagtcgttcgttgaggtgaatgaggaagggactgaggctgctgctgcaactgcagcagtgatcacacttaggtcagctccaatagctgaggactttgtcgcggatcatcctttccttttcctgatccaagaagacatgacaggcgtggtgctgttcgtcggccatgtggtcaatcccctacttgctgcatag

SEQ ID NO: 19860 - protein, 396 aa, Oryza sativa
MAADLRVSIAHQTSFALRLAAALSSPAHPAGGAGRNVAFSPLSLHVALSLVAAGAGGATRDQLASALGGPGSAEGLHAFAEQLVQLVLADASGAGGPRVAFADGVFVDASLSLKKTFGDVAVGKYKAETHSVDFQTKAAEVASQVNSWVEKVTSGLIKEILPPGSVDHTTRLVLGNALYFKGAWTEKFDASKTKDGEFHLLDGKSVQAPFMSTSKKQYILSYDNLKVLKLPYQQGGDKRQFSMYILLPEAQDGLWSLAEKLNSEPEFLEKHIPTRQVTVGQFKLPKFKISFGFEASDLLKSLGLHLPFSSEADLTEMVDSPEEKNLFVSSVFHKSFVEVNEEGTEAAAATAAVITLRSAPIAEDFVADHPFLFLIQEDMTGVVLFVGHVVNPLLAA

SEQ ID NO: 19861 - DNA, 1209 bp, Brassica napus
  CDS (1)..(1209)
atggaccagtcagctcctcgaccagcgaaaatggacgtgcgagaatcaatctcactgcaaaaccatgtctccttgagcctcgccaagaacgtgatctccaccgtctctaaaaactccaacgtcatcttctccccggcatcgatcaacgtcgtcctcggcataatcgccgctggatccgccggcgctaccaaagaccagatcctctccttcctcaacttcccttcaatcgaccacctcaacaccttctcctccgatatcgtctccgccgtcctcgccgacggcagcgctaacggtggccctaaactctcggcggctaacggtgtatggatcgataagtctctgtcattcaaaccttccttcaagcagctcttggatggttcttacaaagctgcttctaatctagcagattttcagacaaaggctgtggaagtgattgctgaagtgaattcatgggctgaaaaggagacgaatggtctcattaccgaggttctaccggaaggatcagcagacagtatgaccagactgatatttgcaaatgctttgtacttcaagggaacatggaacgagaaattcgacgaatcgctgacaaaagacggagactttcaccttcttgacggtagttccaaagtgactgctccgtttatgaccagcaagaagaaacagtacgtgagtgcctacgaaggtttcaaagtgttgggacttccttacttgcaaggagaggataagagacagttctcaatgtacttgtatcttccagatgcaaacaacggtttgtctgatcttctggataagatagtttctactccagggttcttggatagccacattccacgcagacaagttaaggtcggcgagttcaagattcctaagtttaaattctctttcgggttcgaagcttcagatgttttgaaaggactgggactgacttcgcccttctctggtgaagatggtctgactgagatggttgagtctccagagatggggaagaatctaaaggtatcgagcattttccataaagcgtgtattgaggtgaatgaagaaggaacagaagctgcagctgcatcagctggcgttataaagctaaggggtttggctatggaggaagagatgatagattttgtggcggaccatccgtttctgttggtggtcatggagaacataacaggagtgattctgtttattggtcaagtcattgatccgttgcattaa

SEQ ID NO: 19862 - protein, 402 aa, Brassica napus
MDQSAPRPAKMDVRESISLQNHVSLSLAKNVISTVSKNSNVIFSPASINVVLGIIAAGSAGATKDQILSFLNFPSIDHLNTFSSDIVSAVLADGSANGGPKLSAANGVWIDKSLSFKPSFKQLLDGSYKAASNLADFQTKAVEVIAEVNSWAEKETNGLITEVLPEGSADSMTRLIFANALYFKGTWNEKFDESLTKDGDFHLLDGSSKVTAPFMTSKKKQYVSAYEGFKVLGLPYLQGEDKRQFSMYLYLPDANNGLSDLLDKIVSTPGFLDSHIPRRQVKVGEFKIPKFKFSFGFEASDVLKGLGLTSPFSGEDGLTEMVESPEMGKNLKVSSIFHKACIEVNEEGTEAAAASAGVIKLRGLAMEEEMIDFVADHPFLLVVMENITGVILFIGQVIDPLH

SEQ ID NO: 19863 - DNA, 1170 bp, Glycine max
  CDS (1)..(1170)
atggacctccgtgaatcgataagcaaccaaaccgacgtggccctgagcatctcaaagctcctgttgtcgaaagaagctcgggacaagaacctcgtgtattcgccgctgtcgttgcacgttgttctgagcatcatcgccgctggctccaagggccccacactcgatcagcttctctccttcctccgatccaaatccaccgatcatctcaactccttcgcctctcagctcttcgccgtcgtgctctccgacgcctctcccgccggcgggcctcgcctctccttcgccgacggcgtgtgggttgagcaatccctctcgcttctcccttccttcaaacaacttgtcagtgctgattacaaggccactttggcttcagttgatttccagaccaaggctgttgaagtggccaatgaagttaattcatgggctgaaaaggagacaaatggacttgttaaagaccttcttcctcctggatcagttgacagttcaaccagactcatctttgcaaatgcactgtacttcaaaggagcatggaatgaaaagtttgattcttcgataacaaaagactatgattttcaccttcttgatggccgttcaatcagggttcccttcatgacgagcaggaagaatcagtttattagggcttttgatggtttcaaagtccttggtcttccctacaagcaaggtgaagataagcgccaattcaccatgtactttttccttccagaaacaaaagatgggctgttagctttggctgagaagttggcttctgaatctgggttcttggaacgcaagcttcctaataacaaattggaagtaggagacttcaggatcccaagattcaaaatttcttttgggtttgaagcctctaatgtgctgaaggagctgggagtggttttgcctttctccgttggaggtttgacagaaatggtggactctgctgtgggtcaaaacttgtttgtttccgatatatttcataagtcttttatagaagtaaatgaagaaggcactgaagctgcagcggccaccgctgcaactatacaatttgggtgtgcgatgtttccaactgaaatagactttgtagctgaccaccctttcttgttcctgatcagagaagatttaactggaacagtactctttatcggacaggtgttgaatcctcaggctgaataa

SEQ ID NO: 19864 - protein, 389 aa, Glycine max
MDLRESISNQTDVALSISKLLLSKEARDKNLVYSPLSLHVVLSIIAAGSKGPTLDQLLSFLRSKSTDHLNSFASQLFAVVLSDASPAGGPRLSFADGVWVEQSLSLLPSFKQLVSADYKATLASVDFQTKAVEVANEVNSWAEKETNGLVKDLLPPGSVDSSTRLIFANALYFKGAWNEKFDSSITKDYDFHLLDGRSIRVPFMTSRKNQFIRAFDGFKVLGLPYKQGEDKRQFTMYFFLPETKDGLLALAEKLASESGFLERKLPNNKLEVGDFRIPRFKISFGFEASNVLKELGVVLPFSVGGLTEMVDSAVGQNLFVSDIFHKSFIEVNEEGTEAAAATAATIQFGCAMFPTEIDFVADHPFLFLIREDLTGTVLFIGQVLNPQAE

SEQ ID NO: 19865 - DNA, 1431 bp, Zea mays
  CDS (1)..(1431)
atgagcacaccgcgtcgcggcgggcagcaccacggcgacaagcgcaccgtgacacgagcagcctcccgaaacagcgacggacacggcgcaggcgacttgagcttcgggtccacggcggggcctcggttcgccgtcgccccgccgcgcccttgggcgccgccgcctgagcacgcggccgtcttcgcgcagccaccagacgatccgtcgacgttgaccatgctgtggggaccgcccggcgaggtgcccgttgccggcttcgctgcggcaccggaagggcgaccggatgcgttcgctggcagcgcgtcgtgcctgccgctcgcgaggcaggtcggcggccagcagggggcgcgcaacttcgtggtgtcgccgctgtcgttccacgcggcgctcgcgctggtggccgcgggcgcgcggggcgagacgcagcgggagctcctgcgcttcttggactccgagtcgctgggcgagctgcaccgcgccgcggcgacggcgctggtcgcccggctcagcgacctcccgcaggcgtccttcgcctgcggagtctgggtggaccggagccgcgcgctcacgccggagttcatggacaccgccgcgtcgcgctacgcggcggtcgcggagtccgtcgacttcttgaagaactccgaggcggcaaggcagcaagtcaacgacttcgtgaaaggagcaacgaaagggctcatcggcgacgtcctgcctcccggctccgtcgactcgtccacggcgctcgtcctcgccaacgccatctacttcaagggggcgtgggctcggccgttcgatccgtcgagaaccatcttcgcgccgttccatctccccgacggcggcaccgtgcgcgtgccgttcatgactacgagcggtttcgaggaccagcggcagcgggttgccgtgttccccggattcaaggcgctcaagctgccctacaagaacgacgacggcgcgcagcaggacgcgttctacatgcttctactcctccccgacggtgagaccctaaccctcaatgatctctatgataaggtcgtgtcgtcgccgggattcatcaggaagcacacgccggtggacgaggtccgggtcggggggttcatggtgccgaagttcaagttcacgttcgagtttgaggcgtctcacgatatccagaagctgggagtcaaccgagcctttcaaagaggtgacttctccggcatggtctccggtggaaacgggctcatcatctcaggagtgtaccacaaggccaccgtagaggtggacgaggccggcaccgttgccgccgcggccacggccgagttcatgtttatgtgtgcaagaatgcatccaccgccggtggatttcgtggcggaccggccgtttttgttcgccatcgtggagagaagtggcgtcgtgctgtttcttgggcatgtggtgaaccctctggttgggtga

SEQ ID NO: 19866 - protein, 476 aa, Zea mays
MSTPRRGGQHHGDKRTVTRAASRNSDGHGAGDLSFGSTAGPRFAVAPPRPWAPPPEHAAVFAQPPDDPSTLTMLWGPPGEVPVAGFAAAPEGRPDAFAGSASCLPLARQVGGQQGARNFVVSPLSFHAALALVAAGARGETQRELLRFLDSESLGELHRAAATALVARLSDLPQASFACGVWVDRSRALTPEFMDTAASRYAAVAESVDFLKNSEAARQQVNDFVKGATKGLIGDVLPPGSVDSSTALVLANAIYFKGAWARPFDPSRTIFAPFHLPDGGTVRVPFMTTSGFEDQRQRVAVFPGFKALKLPYKNDDGAQQDAFYMLLLLPDGETLTLNDLYDKVVSSPGFIRKHTPVDEVRVGGFMVPKFKFTFEFEASHDIQKLGVNRAFQRGDFSGMVSGGNGLIISGVYHKATVEVDEAGTVAAAATAEFMFMCARMHPPPVDFVADRPFLFAIVERSGVVLFLGHVVNPLVG

SEQ ID NO: 19867 - DNA, 1194 bp, Zea mays
  CDS (1)..(1194)
atggccaccgccgccgacatccgcgtctccatcggctaccagacccgcttcgggctccgcctcgccgccgcgctctcctccccacccccatcccccgccagcaactccgccttctccccgctctccctccacgtcgcgctcagcctcctcgccgccggcgcgggtggcgccacgcgcgaccagctcgccgccgccctcggaggcgacgcgcccgccggggccgacggcctgcacgcgctcgccgagcaggtggtgcagctcgtgctcgccgacggctccggcgccggcggcccgcgcgtcgccttcgccgacggcgtcttcgtcgactcctcgctgaagctcaagccggccttcgaggagatcgccgtgggaaagtacagggccgacacccagtccgtcgacttccagaaaaaggctgctgaagctgctggtcaagtgaactcatgggtagaaaaaattacttctggtctcatcaaagagatcctgcccccaggttctgttgaccacaccaccaggcttgttcttggtaatgcgctctattttaaaggagcttggactgagaagtttgatgcatctaaaacaaaagatagcgagttccaccttcttgatgggagctcagtccaagcacctttcatgtccagtacagacaaacaatatatcgtggcttacaacaacttgaaggtgcttaagcttccataccagcaaggtgcggacaagaggcagttctccatgtacattcttcttccagatgcaaaagatgccatctggagcttggctgaaaagctgagctctgaaccagagttcctggagaaccatgtcccaatgcacaaggttccagtcggacagttcaaagtccccaagttcaagatatcctttggatttgaggcatctgagttgctcaaaggtctcgggctccagcttccgtttagtgctgaagcggacctgtcggggttagttgattcaccagagggacggaacttgtctgtttcgtccgtattccacaagtcatttgtcgaagtgaacgaggaaggaacggaggccgctgccgcatctgctgcaacagttgtgctccggtcgttcacgatgcctcaggatttcgtcgcagatcaccctttcatgttcctgatccgcgaagacttgactggtgtggtgctgtttgtcggccacgtggtgaatcccctccttgctccatag

SEQ ID NO: 19868 - protein, 397 aa, Zea mays
MATAADIRVSIGYQTRFGLRLAAALSSPPPSPASNSAFSPLSLHVALSLLAAGAGGATRDQLAAALGGDAPAGADGLHALAEQVVQLVLADGSGAGGPRVAFADGVFVDSSLKLKPAFEEIAVGKYRADTQSVDFQKKAAEAAGQVNSWVEKITSGLIKEILPPGSVDHTTRLVLGNALYFKGAWTEKFDASKTKDSEFHLLDGSSVQAPFMSSTDKQYIVAYNNLKVLKLPYQQGADKRQFSMYILLPDAKDAIWSLAEKLSSEPEFLENHVPMHKVPVGQFKVPKFKISFGFEASELLKGLGLQLPFSAEADLSGLVDSPEGRNLSVSSVFHKSFVEVNEEGTEAAAASAATVVLRSFTMPQDFVADHPFMFLIREDLTGVVLFVGHVVNPLLAP

SEQ ID NO: 19869 - DNA, 22 bp, Artificial sequence
  primer
atggagttaggaaaatcaattg

SEQ ID NO: 19870 - DNA, 21 bp, Artificial sequence
  primer
tcaatgtttagaaggatcaag

SEQ ID NO: 19871 - protein, 444 aa, Artificial sequence
  consensus sequence
  Variant (3)..(3): Xaa in position 3 is any amino acid
  Variant (5)..(14): Xaa in position 5 to 14 is any amino acid
  Variant (16)..(18): Xaa in position 16 to 18 is any amino acid
  Variant (19)..(23): Xaa in position 19 to 23 is any or no amino acid
  Variant (25)..(31): Xaa in position 25 to 31 is any amino acid
  Variant (33)..(57): Xaa in position 33 to 57 is any amino acid
  Variant (58)..(70): Xaa in position 58 to 70 is any or no amino acid
  Variant (72)..(90): Xaa in position 72 to 90 is any amino acid
  Variant (91)..(103): Xaa in position 91 to 103 is any or no amino acid
  Variant (105)..(112): Xaa in position 105 to 112 is any amino acid
  Variant (113)..(145): Xaa in position 113 to 145 is any or no amino acid
  Variant (147)..(147): Xaa in position 147 is any amino acid
  Variant (149)..(152): Xaa in position 149 to 152 is any amino acid
  Variant (154)..(156): Xaa in position 154 to 156 is any amino acid
  Variant (158)..(173): Xaa in position 158 to 173 is any amino acid
  Variant (174)..(186): Xaa in position 174 to 186 is any or no amino acid
  Variant (189)..(190): Xaa in position 189 to 190 is any amino acid
  Variant (194)..(194): Xaa in position 194 is any amino acid
  Variant (196)..(198): Xaa in position 196 to 198 is any amino acid
  Variant (200)..(203): Xaa in position 200 to 203 is any amino acid
  Variant (205)..(207): Xaa in position 205 to 207 is any amino acid
  Variant (208)..(210): Xaa in position 208 to 210 is any or no amino acid
  Variant (212)..(220): Xaa in position 212 to 220 is any amino acid
  Variant (221)..(230): Xaa in position 221 to 230 is any or no amino acid
  Variant (232)..(247): Xaa in position 232 to 247 is any amino acid
  Variant (248)..(251): Xaa in position 248 to 251 is any or no amino acid
  Variant (253)..(254): Xaa in position 253 to 254 is any amino acid
  Variant (257)..(258): Xaa in position 257 to 258 is any amino acid
  Variant (259)..(296): Xaa in position 259 to 296 is any or no amino acid
  Variant (299)..(299): Xaa in position 299 is any amino acid
  Variant (300)..(304): Xaa in position 300 to 304 is any or no amino acid
  Variant (307)..(308): Xaa in position 307 to 308 is any amino acid
  Variant (310)..(329): Xaa in position 310 to 329 is any amino acid
  Variant (330)..(343): Xaa in position 330 to 343 is any or no amino acid
  Variant (345)..(345): Xaa in position 345 is any amino acid
  Variant (347)..(357): Xaa in position 347 to 357 is any amino acid
  Variant (358)..(359): Xaa in position 358 to 359 is any or no amino acid
  Variant (361)..(363): Xaa in position 361 to 363 is any amino acid
  Variant (365)..(366): Xaa in position 365 to 366 is any amino acid
  Variant (367)..(368): Xaa in position 367 to 368 is any or no amino acid
  Variant (370)..(372): Xaa in position 370 to 372 is any amino acid
  Variant (373)..(399): Xaa in position 373 to 399 is any or no amino acid
  Variant (402)..(404): Xaa in position 402 to 404 is any amino acid
  Variant (411)..(411): Xaa in position 411 is any amino acid
  Variant (416)..(428): Xaa in position 416 to 428 is any amino acid
  Variant (429)..(437): Xaa in position 429 to 437 is any or no amino acid
  Variant (439)..(439): Xaa in position 439 is any amino acid
SPXSXXXXXXXXXXGXXXXXXXXTXXXXXXXLXXXXXXXXXXXXXXXXXXXXXXXXXXXXXXXXXXXXXXAXXXXXXXXXXXXXXXXXXXXXXXXXXXXXXXXFXXXXXXXXXXXXXXXXXXXXXXXXXXXXXXXXXXXXXXXXXNXWXXXXTXXXIXXXXXXXXXXXXXXXXXXXXXXXXXXXXXNAXXFKGXWXXXFXXXXTXXXXXXFXXXXXXXXXXXXXXXXXXXMXXXXXXXXXXXXXXXXXXXXLXXPYXXXXXXXXXXXXXXXXXXXXXXXXXXXXXXXXXXXXXXXXLPXXXXXXGLXXLXXXXXXXXXXXXXXXXXXXXXXXXXXXXXXXXXXPXFXXXXXXXXXXXXXLXXXGXXXXFXXXXXXXXXXXXXXXXXXXXXXXXXXXXXXHKXXXEVNEEGXEAAAXXXXXXXXXXXXXXXXXXXXXXFXADHPF

SEQ ID NO: 19872 - protein, 10 aa, Artificial sequence
  protein pattern
  Variant (2)..(2): Xaa in position 2 is any amino acid
  Variant (4)..(4): Xaa in position 4 is Ala, Ser, Thr or Val
  Variant (5)..(5): Xaa in position 5 is any amino acid
  Variant (9)..(9): Xaa in position 9 is Ala, Gly, Ser, Thr or Val
  Variant (10)..(10): Xaa in position 10 is Ala, Asn, Ser or Thr
EXGXXAAAXX

SEQ ID NO: 19873 - protein, 18 aa, Artificial sequence
  protein pattern
  Variant (3)..(3): Xaa in position 3 is Ile, Leu or Val
  Variant (4)..(4): Xaa in position 4 is His or Tyr
  Variant (7)..(7): Xaa in position 7 is Ala or Gly
  Variant (8)..(8): Xaa in position 8 is any amino acid
  Variant (10)..(12): Xaa in position 10 to 12 is any amino acid
  Variant (14)..(17): Xaa in position 14 to 17 is any amino acid
NAXXFKXXWXXXFXXXXT

SEQ ID NO: 19874 - DNA, 1965 bp, Arabidopsis thaliana
  CDS (1)..(1965)
atgggtaacggaatcgggaagctaagtaaatgtttgaccggaggtgctggtcggaacaaaaaacccgagttatcaattctcgaaccagatcctttagacgaagggttaggacactctttctgttacgtcagaccagacccgacacgagtttcgtcttcaaaagttcactcagaagaagaaacgacgacgttccgtacaatctccggcgcttccgttagtgctaacaccgccacaccactctctacttctctctatgatccttacggacatatcgatagagccgccgcgttcgaaagcacgacgtcgttttcgtcgattcctttgcaaccgattccgagaagttccggtccgattgtacccggttcgggtcctttagaaagagggtttttatccggtccgattgaaagaggtttcatgtccggtccacttgatggttcttccggtccgattgatggtaaaaccggttctgatcaatttcagagaagtttctctcatggtttagctaatctccgggtcgggtcgagaaaaggatctttagttcgggttctccgtcgtgcaatttcgaagacgattactagaggacagaactctattgttgctccgatcaaaccggttaaagagcccgattgggtattcgggtcggataaaacccggatccatcagatcgagaataatctcactgttaatagcttgaattttagtagtgaaggaagtttactagacgacgacgtttcgttagagagccagaatcttcaatgggcacaaggtaaagccggtgaggatcgtgtacatgtggttgtatcggaagaacatggatggcttttcgttggaatctacgatggattcaacggtccagatgcgccggactatttactctctcatttatatccagccgttcatcgtgagcttaaaggattgttatgggacgatcccaaaacagatgcaaaatcttccgatgaagctgatgtagagaatcgtgactcgagttctgagaaaaagtcaaagaattgggaagaaagtcaacgacggtggagatgtgaatgggatcgagatcttgaccgtttactgaaagatcggagtaatgggttggatctagatccggatccgaattcgtctgatgtactgaaagctttgtcacaagctttgaggaagacggaagaagcttatttggagaatgcagatatgatgctcgacgaaaatcctgaactagctttaatgggttcttgtgttttggtaatgttgatgaaaggtgaagatgtttatttgatgaatgttggtgatagtagagctgttcttgggcaaaaagctgagagtgattattggattgggaagattaaacaagatttggaacgtatcaatgaagaaactatgaatgattttgatggttgtggtgatggtgaaggagctagtttggttccgactttatcagcttttcagcttactgttgatcatagcactaatgtagaagaggaagttaatagaattcgaaaggagcatcctgatgatgcgagcgcggtttcgaatgaacgggttaaaggttcgttgaaggtcactagagctttcggtgcgggtttccttaagcagcctaaatggaataacgcgcttctagagatgtttcaaatcgattacaaagggacgtcaccatacatcaattgtttgccatcactttaccatcatagattaggctcgaaagaccagtttctgatactatcatcggatggtctttaccaatatttcacaaacgaagaagcggtttcagaggttgaactattcatcacgttacagccggaaggtgacccggctcagcacttggttcaagagcttcttttccgtgctgctaagaaagctggtatggatttccatgaactgcttgagataccacaaggggaacggagacggtaccacgatgatgtttccattgtagtgatctctttagaaggaagaatgtggaaatcttgtgtataa

SEQ ID NO: 19875 - protein, 654 aa, Arabidopsis thaliana
MGNGIGKLSKCLTGGAGRNKKPELSILEPDPLDEGLGHSFCYVRPDPTRVSSSKVHSEEETTTFRTISGASVSANTATPLSTSLYDPYGHIDRAAAFESTTSFSSIPLQPIPRSSGPIVPGSGPLERGFLSGPIERGFMSGPLDGSSGPIDGKTGSDQFQRSFSHGLANLRVGSRKGSLVRVLRRAISKTITRGQNSIVAPIKPVKEPDWVFGSDKTRIHQIENNLTVNSLNFSSEGSLLDDDVSLESQNLQWAQGKAGEDRVHVVVSEEHGWLFVGIYDGFNGPDAPDYLLSHLYPAVHRELKGLLWDDPKTDAKSSDEADVENRDSSSEKKSKNWEESQRRWRCEWDRDLDRLLKDRSNGLDLDPDPNSSDVLKALSQALRKTEEAYLENADMMLDENPELALMGSCVLVMLMKGEDVYLMNVGDSRAVLGQKAESDYWIGKIKQDLERINEETMNDFDGCGDGEGASLVPTLSAFQLTVDHSTNVEEEVNRIRKEHPDDASAVSNERVKGSLKVTRAFGAGFLKQPKWNNALLEMFQIDYKGTSPYINCLPSLYHHRLGSKDQFLILSSDGLYQYFTNEEAVSEVELFITLQPEGDPAQHLVQELLFRAAKKAGMDFHELLEIPQGERRRYHDDVSIVVISLEGRMWKSCV

SEQ ID NO: 19876 - DNA, 2357 bp, Oryza sativa
  CDS (163)..(2082)
gatattccggcatttcaaccccacccactccgcacccccgcaagtcaactctcttccttcctcctccgtgcttaatgctctccgcattataaccacccacctctcctcctccccccacctcctctctctctatctccatctccaccgctacgcttcccagccatgggcaactccctcgcctgcttctgctgcggcggcggcgccggcggccgaggcggccgccacgtcgtccccgccgcgctcccctccgacccggcctacgacgagggcctgggccactcgttctgctacgtccgccccgacaagttcgtggttcccttctccgcggatgatttggtggctgacgcgaaggcggccgcggcggcggagggggaggcgaccacgttccgggcgatatccggggcggcgctcagtgccaacgtatccacgccgctgtccacgtccgtgctgctgctgatgccggaggagtcgtcggcgtccgccaccgcgtcgtcggggtttgagagctcggagtcgttcgctgctgtgccgctgcagccggtgccgaggttctcgtccgggccgatctccgcgcccttctccggcgggttcatgtcggggcccttggagagggggttccaatctgggccactcgacgccgcgctcctctcgggccctctccctggcaccgccacctccggtcgtatgggtggcgccgtccctgcgctccgccggagcctctcccacggtggccgccgcctccgcaatttcacccgcgcgctcctcgcgcgcaccgagaagtttcaggattctgcggatctaggctcgccggacgccgccgccgccgccgtcgccgcctgtgggggcgatccctgtggtctgcagtgggcgcaggggaaagccggcgaggaccgcgtccacgtcgtcgtgtcggaggagcgaggctgggtgttcgtcggcatctacgatgggttcaacggccccgacgccaccgacttcctggtatccaacctctacgccgccgtccaccgcgagctccgcggcctcctctgggatcagcgggagcagaacgtgcagcacgaccagcgccccgaccaacccggctcagccccaagcaccacggcctcagataaccaagaccagtggggtcgccgccgccgcacccgccgctcaagaccgccgcgtggcgccgacgacgaccagcggcggtggaagtgcgagtgggagcaggagcgggattgctccaacctgaagccaccaacgcagcagcgtcttcgttgcaacagcgagaacgaccacgtcgccgtgctcaaggcgctgacccgtgcgctgcacaggaccgaggaggcttacctggacatcgccgacaagatggtcggcgagttcactgagcttgcgctcatgggctcttgtgttcttgccatgctcatgaaaggagaggacatgtacatcatgaatgttggcgatagccgggctgtgttggcaacaatggacagcgtcgatctcgagcagatcagccagggttcattcgatggatcagtcggggattgcccgccatgcttgtcggccgtgcagctcacgtcggatcacagcacttcagtggaagaggaagtaatcagaatacgaaacgagcatcctgatgatccatctgccatctccaaggatcgcgtgaagggctcgctgaaggtgaccagagcatttggtgctgggtttttgaaacagcccaagtggaatgatgcactcctggagatgttcagaattgattacgttgggtcctccccatacatatcatgcaatccatccctttttcatcataagctcagcacaagggatagattcttgatattatcttcagatggactttaccagtatttcaccaacgaggaggcagttgctcaggtcgaaatgttcatcgcaacaacccctgaaggcgaccctgcccaacatcttgtggaggaagttcttttccgtgctgccaacaaagcaggaatggactttcatgaactgatcgagataccacatggtgatcgtcggcgataccatgacgatgtatctgtcatcgtcatctctttggagggcaggatttggagatcctgcgtgtaaatagaaacaatagtaggctagtgaaacaaaacgtatagagggggttcttcccatgccttccttgagctgagaggtgttcttgcggctactctactcctcttcccccagttgctactgtacaatatcaaccaagcactgtggggggttggattcggcttgggctctcggcacatccagctgaatcgccatgaatcgcccgcagggctggccgcgtggtataatatgttgatgtaaatgaggatttgttcaattattaataatttataaaatcgacc

SEQ ID NO: 19877 - protein, 639 aa, Oryza sativa
MGNSLACFCCGGGAGGRGGRHVVPAALPSDPAYDEGLGHSFCYVRPDKFVVPFSADDLVADAKAAAAAEGEATTFRAISGAALSANVSTPLSTSVLLLMPEESSASATASSGFESSESFAAVPLQPVPRFSSGPISAPFSGGFMSGPLERGFQSGPLDAALLSGPLPGTATSGRMGGAVPALRRSLSHGGRRLRNFTRALLARTEKFQDSADLGSPDAAAAAVAACGGDPCGLQWAQGKAGEDRVHVVVSEERGWVFVGIYDGFNGPDATDFLVSNLYAAVHRELRGLLWDQREQNVQHDQRPDQPGSAPSTTASDNQDQWGRRRRTRRSRPPRGADDDQRRWKCEWEQERDCSNLKPPTQQRLRCNSENDHVAVLKALTRALHRTEEAYLDIADKMVGEFTELALMGSCVLAMLMKGEDMYIMNVGDSRAVLATMDSVDLEQISQGSFDGSVGDCPPCLSAVQLTSDHSTSVEEEVIRIRNEHPDDPSAISKDRVKGSLKVTRAFGAGFLKQPKWNDALLEMFRIDYVGSSPYISCNPSLFHHKLSTRDRFLILSSDGLYQYFTNEEAVAQVEMFIATTPEGDPAQHLVEEVLFRAANKAGMDFHELIEIPHGDRRRYHDDVSVIVISLEGRIWRSCV

SEQ ID NO: 19878 - DNA, 2278 bp, Zea mays
  CDS (1)..(1899)
atgggaaactccctcgcctgcttctgctgcgggggcggcgccgccggccgccgccgccacgtggcgcccgcggcgctcccctcggaccccgcctacgacgagggcctcggccactccttctgctacgtccggccggataaggtgctggtgcccttctccgcggacgacgacgacctggtcgccgacgccaaggcggccgccgcggccgaggagcccaccacgttccgggccatatccggggccgcgctcagcgccaacgtctccacgcagctctccacctccgtcctcctcctgctgccggacgaatcctcctccgccgccgccgcctcctcctcctcctccgggttcgagagctccgaatcgttcgccgccgtgccgctgcagcccgtcccgaggttcccgtcgggccccatctgcgcgcacgggggcgggttcctctccgggcccatagagagggggttcctctcgggccccctcgacgcggcgctcatgtccggccctctcccttgcgccgccacatccgcccgcatgggaggaggcgccgtgcccgcgctccgccggagtctctcgcacggcggccgccgcctgcggaattttacccgcgcgcttctcgcgcgggcggataagtttcaggattcgatggatctcggctcggccgccgccgccgcctgtggcgccggttccgccgggctgcagtgggcgcaggggaaggccggcgaggaccgcgtccacatcgtggtgtccgaggagcggggctgggtgttcgtcggcatctacgacggcttcaacggtcccgacgccacggacttcctcgtctcccatctctacgccgccgtgcaccgcgagctccgcggcctgctctgggatcagtgcgagcaggaggagcagcgcgacacagatcccgaccagccgatgagcaccacggcctcatatcaccaggaccagcccgccaacggccgccgcgcccgccgatcaagaccgccgcgcggcgccgatgatgaccaacggcggtggaagtgcgagtgggagcgcgactgctccagcctcaagccgccaactcagcgccctcctaggagcagcagcgagaacgaccacctcgccgtgcttaaggcacttgcgcgcgcgcttcgcaagaccgaggaggcctacctggacgtcgccgacaagatggtcggcgagttcccggagcttgcgcttatgggctcttgcgttcttgccatgcttatgaaaggagaggacatgtacctcatgaatgtaggtgacagccgggctgtgctgggaacaatggacagtgttgatctcgaggagatcagtgggggttcattcgatggattggtcggggatggcactccgctcttgtcagctctgcagctcacctcagaacatagcacgtcagtgcgagaggaagtttgcagaatacggaacgagcatcccggagacccgtctgcaatctccaaggaccgtgtgaagggctcgcttaaggtgacgagagcgtttggagctggtttcttgaaacagcccaaatggaacgatgcgctgctggaggtgttcagaatagattacgtcgggtcatccccgtacatcacgtgcaatccttcgctctatcaccacaggctcagcacgagggacaggttcctgatactatcttcagacgggctctaccagtatttcaccaacgaggaggcggtcgctcaggttgagatgttcatcgcaacaacccctgagggcgaccctgcccagcatctggtggaggaagttcttttcagagctgcaaacaaagcaggaatggacttccacgaattgatcgagataccacatggcgaccgccggcggtaccacgacgacgtatctgtcattgtgatatctttggagggcaggatctggagatcatgcgtgtaaataggtcagccatactagtagtagattagagaaagaaacgtatagagagaaagagagagaggttcttgaaggcctacttcactcgtcccagctgctactgtacaatatcaatgaagcactgggtggtgggcttgggatctcaagttgaaccacgatgagattcacctggagcgtgccgatgccgacgcagtgccgtatgagatgtccatgcaaaagaggatttgttcaattattaataactcaatcaaatagcgaccaattggtcaactttctttgaccttttgttttgaaaaaaaacaacaaaaaataaataataaaaaaaaaaattggtcaaaaaaatttttgacctttttttgggggcaccctctgtgttcatacc

SEQ ID NO: 19879 - protein, 632 aa, Zea mays
MGNSLACFCCGGGAAGRRRHVAPAALPSDPAYDEGLGHSFCYVRPDKVLVPFSADDDDLVADAKAAAAAEEPTTFRAISGAALSANVSTQLSTSVLLLLPDESSSAAAASSSSSGFESSESFAAVPLQPVPRFPSGPICAHGGGFLSGPIERGFLSGPLDAALMSGPLPCAATSARMGGGAVPALRRSLSHGGRRLRNFTRALLARADKFQDSMDLGSAAAAACGAGSAGLQWAQGKAGEDRVHIVVSEERGWVFVGIYDGFNGPDATDFLVSHLYAAVHRELRGLLWDQCEQEEQRDTDPDQPMSTTASYHQDQPANGRRARRSRPPRGADDDQRRWKCEWERDCSSLKPPTQRPPRSSSENDHLAVLKALARALRKTEEAYLDVADKMVGEFPELALMGSCVLAMLMKGEDMYLMNVGDSRAVLGTMDSVDLEEISGGSFDGLVGDGTPLLSALQLTSEHSTSVREEVCRIRNEHPGDPSAISKDRVKGSLKVTRAFGAGFLKQPKWNDALLEVFRIDYVGSSPYITCNPSLYHHRLSTRDRFLILSSDGLYQYFTNEEAVAQVEMFIATTPEGDPAQHLVEEVLFRAANKAGMDFHELIEIPHGDRRRYHDDVSVIVISLEGRIWRSCV

SEQ ID NO: 19880 - DNA, 1791 bp, Oryza sativa (japonica cultivar-group)
  CDS (1)..(1791)
atgggcagcggcgcgtcacggctgctgaccgcgtgcacgtgctcgcggccggcgccggcgtccgtggacgcggagccgtgcctggacgacgctctcggccactccttctgctacgccgccgccgccacggccaccgcccactcctcgtcgttccgccacggcatctccggcgccgcgctctccgccaactcgtcggtgcccgtcccgctctacaacgcgtccgccgccgccggcggcgtggcgccggggtactcctcggcattccacacctcgtcgtccttttcctccgcgccgctgcagctgtccaacctctcctcgggcccgctgttcctctcgggtcccatcgaccgcgccggccagctctccggcccgctcgaccccgccgtgcccttctctggcccgctccccgcaaagcctcccaagcccgcgtcctcctcatcgagggggttctcgaggaggttccggaagccgtccttcggcagcctgcggcggagcgtgtcggagaagaaccgcccgtgcgccgtgccgctccgccgcgacgacggcgtgcagtgggcgcacggccgcgccggggaggaccgcgtccacgtggtggtctccgaggatcagcggtggctcttcgtcggcatctacgacggcttcaacggccccgaggcccccgacttcctcgtcaccaacctctaccgcttcctcctccgcgagctccgcgggatcttctacaaggaggccgacgcggacaacaagaagctctggcagtttctcgtggacggcgacgacgacgacagcgagctcgacttctcgggctctggccggttcgcgctgtcactcgacaggctcaaggagagtcggtttcacatgtgggcgcacgccgcggccgacgagagcggcagggaatggggttccaggaggttggcaccggcgcctgcggtgagggaccatgcggcggtgctagccgctctcacccgggccctggcctcgacggaagcggcgtacttggacatgaccgaccagtcaatgggaacccatccggagttggcggtcaccggggcgtgcctgctcgtggccctcgtgagggacgacaacgtgtacgtgatgaaccttggggacagccgtgccattgtggcgcagcgtccggacgatggcgacgatggctgtgtgtttggaaccatgcggcggatggaggacgtcggggtgggcttggagatcgagacaaggcccggcggatgcgccattattgggcttaagccactgcagctgtcgactgatcacagcaccagcatcgaagaggaagttcacaggatcaaacgtgaacatcctgatgatgatcagtgtattgtaaatgatagagtgaagggtcgcctaaaagttacccgggcttttggtgcaggctatctcaaacaggcaaaattgaacaatggattgttagagatgttccgcaatgattacattggtgatacaccgtatatatcatgcacaccatcgctttgccatcacaagctcactgcaagggatcagtttttggttctttcttccgatggcttatatcagtacctgagcaacgaggaggtagttttgcatgttgagaatttcatggagaggtttccagaaggtgatcctgcacaaagtttaattgaggagcttctctctcgtgcagcaaagaaggctggtatggatttttatgagttactagatatacctcaaggggaccgaagaaaataccatgatgatgtcactgtcatggttatttctctggaagggagaatctggaagtcgtccggaacatatgtgtga

SEQ ID NO: 19881 - protein, 596 aa, Oryza sativa (japonica cultivar-group)
MGSGASRLLTACTCSRPAPASVDAEPCLDDALGHSFCYAAAATATAHSSSFRHGISGAALSANSSVPVPLYNASAAAGGVAPGYSSAFHTSSSFSSAPLQLSNLSSGPLFLSGPIDRAGQLSGPLDPAVPFSGPLPAKPPKPASSSSRGFSRRFRKPSFGSLRRSVSEKNRPCAVPLRRDDGVQWAHGRAGEDRVHVVVSEDQRWLFVGIYDGFNGPEAPDFLVTNLYRFLLRELRGIFYKEADADNKKLWQFLVDGDDDDSELDFSGSGRFALSLDRLKESRFHMWAHAAADESGREWGSRRLAPAPAVRDHAAVLAALTRALASTEAAYLDMTDQSMGTHPELAVTGACLLVALVRDDNVYVMNLGDSRAIVAQRPDDGDDGCVFGTMRRMEDVGVGLEIETRPGGCAIIGLKPLQLSTDHSTSIEEEVHRIKREHPDDDQCIVNDRVKGRLKVTRAFGAGYLKQAKLNNGLLEMFRNDYIGDTPYISCTPSLCHHKLTARDQFLVLSSDGLYQYLSNEEVVLHVENFMERFPEGDPAQSLIEELLSRAAKKAGMDFYELLDIPQGDRRKYHDDVTVMVISLEGRIWKSSGTYV

SEQ ID NO: 19882 - DNA, 1896 bp, Oryza sativa (japonica cultivar-group)
  CDS (1)..(1896)
atgggcaatggcatcaccaagaatccgtgcttctccggcgacccgtacgccgccgccgtggcgtccgaccctctcccggacgacagccacggccactccttcacgtacgtgccgtcctccgcggccgccttcgaccactccccgaggtccgccgcggcgtcctccgagacgtcatacttctcgctctccggcgccgccatcagcgccaacccggcgacgtccgcgtcgatgccgtcgttccgcctctacaacgagctgacgtggccgccgtcgacggcctgcaccttcgagagctcccgctccttcgccgcggcgccgctcatccaggccgcgccgcccaggctgtccatgtccgggccgctccacgcgacgtcggggcgcttctccgaggcgtcgggatcggcctccaccgcctccgaccgcttctccgaccacccgttcatggacggcatgctcgaccgcgcctcgtcggcctcctccaccgccaggctcatgcccagcttctctcacctcatgtctgagccccgcgtcgcgcagtccggcctgagcaatgagcgatcgctcatccgatcccttgtcagggtcgcctccaagctccggtttggggtgccgctctccggccgccggtcgaatggacctgccgaaccgacgaccaagagcgacggcgactaccgctccacgcccaagggcaatgtggagtgggcgcagggcatggccggcgaggaccggttccacgtcgccgtctccgaggagcacggctgggtgttcgtcggaatctacgacggcttcaacggccccgacgcaaccgactacctcttcgccaacctctacgtcgccgtgcaccgcgagctcaagggcgtgctctgggacgacatacaaggcgtcgacgtcgtcacggacaacctcccggaccctgctctggccaatgccacacacctctgtttccttgacgcaggcggcgtcggcggcggtggcgacgacgaccccgacgcagagcgcaaggcgaagagggggcggatcgagcgcaatgccgatgacgacggcgcgtcgtcggtgcaccgcgacgtcctgaaggcgctggcgcgcgcgctggcgaggacggaggaggcgttcttcgcggcggcggaggagcgcgcggcgcagagccccgagctgggcctggtcgggtcgtgcgtgctggtgatgctgatgaagggcaaggacgtgtacctgatgaacgtcggcgacagccgcgccgtgctggcgcggcggcgcgagccggacttcaaggacatcttcttcaggcccgaccaggacttgcagctgctcaaggccgaggtgatgcgcgagctcgaggcgcacgacaggaatggcctccagtgcgtgcagctcactcccgagcatagcgccgccgccgaggaggaagtgaggaggatcaggtcccagcatctgactgatcggcaggccgtcgtcaacggcagggtgaaggggaagctcagtgttaccagagcatttggtgccggctacctgaagcagccaaaatggaacgacaggctgcttgaagccttcaaggttgattacatcggcgccgagccatacatcagctgcacgccgtcgctgcgccaccaccggatcagctccaacgacaggttcctcgtgctgtcttctgacgggctctaccagtacttcaccaacaaggaggtggtcgatcaggtcgccatgttcaccgccgagcagcccgacggcgacccggcgaagcacctcgttggagagctcgtcctccgcgccgcgaggaaagccggcatggattgccgcaggctgctcgagatcccgcatggcgacaggaggaactaccatgacgacgtgtccatcatcgtcatgtcgttcgaggggaggatatggagatcgtccgtttag

SEQ ID NO: 19883 - protein, 631 aa, Oryza sativa (japonica cultivar-group)
MGNGITKNPCFSGDPYAAAVASDPLPDDSHGHSFTYVPSSAAAFDHSPRSAAASSETSYFSLSGAAISANPATSASMPSFRLYNELTWPPSTACTFESSRSFAAAPLIQAAPPRLSMSGPLHATSGRFSEASGSASTASDRFSDHPFMDGMLDRASSASSTARLMPSFSHLMSEPRVAQSGLSNERSLIRSLVRVASKLRFGVPLSGRRSNGPAEPTTKSDGDYRSTPKGNVEWAQGMAGEDRFHVAVSEEHGWVFVGIYDGFNGPDATDYLFANLYVAVHRELKGVLWDDIQGVDVVTDNLPDPALANATHLCFLDAGGVGGGGDDDPDAERKAKRGRIERNADDDGASSVHRDVLKALARALARTEEAFFAAAEERAAQSPELGLVGSCVLVMLMKGKDVYLMNVGDSRAVLARRREPDFKDIFFRPDQDLQLLKAEVMRELEAHDRNGLQCVQLTPEHSAAAEEEVRRIRSQHLTDRQAVVNGRVKGKLSVTRAFGAGYLKQPKWNDRLLEAFKVDYIGAEPYISCTPSLRHHRISSNDRFLVLSSDGLYQYFTNKEVVDQVAMFTAEQPDGDPAKHLVGELVLRAARKAGMDCRRLLEIPHGDRRNYHDDVSIIVMSFEGRIWRSSV

SEQ ID NO: 19884 - DNA, 1920 bp, Oryza sativa (japonica cultivar-group)
  CDS (1)..(1920)
atgggcaactccctcgcctgcttctgctgcggcggcggcgccggcggccgaggcggccgccacgtcgcccccgccgcgctcccctccgacccggcctacgacgagggcctgggccactcgttctgctacgtccgccccgacaagttcgtggttcccttctccgcggatgatttggtggctgacgcgaaggcggccgcggcggcggagggggaggcgaccacgttccgggcgatatccggggcggcgctcagtgccaacgtatccacgccgctgtccacgtccgtgctgctgctgatgccggaggagtcgtcggcgtccgccaccgcgtcgtcggggtttgagagctcggagtcgttcgctgctgtgccgctgcagccggtgccgaggttctcgtccgggccgatctccgcgcccttctccggcgggttcatgtcggggcccttggagagggggttccaatctgggccactcgacgccgcgctcctctcgggccctctccctggcaccgccacctccggtcgtatgggtggcgccgtccctgcgctccgccggagcctctcccacggtggccgccgcctccgcaatttcacccgcgcgctcctcgcgcgcaccgagaagtttcaggattctgcggatctaggctcgccggacgccgccgccgccgccgtcgccgcctgtgggggcgatccctgtggtctgcagtgggcgcaggggaaagccggcgaggaccgcgtccacgtcgtcgtgtcggaggagcgaggctgggtgttcgtcggcatctacgatgggttcaacggccccgacgccaccgacttcctggtatccaacctctacgccgccgtccaccgcgagctccgcggcctcctctgggatcagcgggagcagaacgtgcagcacgaccagcgccccgaccaacccggctcagccccaagcaccacggcctcagataaccaagaccagtggggtcgccgccgccgcacccgccgctcaagaccgccgcgtggcgccgacgacgaccagcggcggtggaagtgcgagtgggagcaggagcgggattgctccaacctgaagccaccaacgcagcagcgtcttcgttgcaacagcgagaacgaccacgtcgccgtgctcaaggcgctgacccgtgcgctgcacaggaccgaggaggcttacctggacatcgccgacaagatggtcggcgagttccctgagcttgcgctcatgggctcttgtgttcttgccatgctcatgaaaggagaggacatgtacatcatgaatgttggcgatagccgggctgtgttggcaacaatggacagcgtcgatctcgagcagatcagccagggttcattcgatggatcagtcggggattgcccgccatgcttgtcggccgtgcagctcacgtcggatcacagcacttcagtggaagaggaagtaatcagaatacgaaacgagcatcctgatgatccatctgccatctccaaggatcgcgtgaagggctcgctgaaggtgaccagagcatttggtgctgggtttttgaaacagcccaagtggaatgatgcactcctggagatgttcagaattgattacgttgggtcctccccatacatatcatgcaatccatccctttttcatcataagctcagcacaagggatagattcttgatattatcttcagatggactttaccagtatttcaccaacgaggaggcagttgctcaggtcgaaatgttcatcgcaacaacccctgaaggcgaccctgcccaacatcttgtggaggaagttcttttccgtgctgccaacaaagcaggaatggactttcatgaactgatcgagataccacatggtgatcgtcggcgataccatgacgatgtatctgtcatcgtcatctctttggagggcaggatttggagatcctgcgtgtaa

SEQ ID NO: 19885 - protein, 639 aa, Oryza sativa (japonica cultivar-group)
MGNSLACFCCGGGAGGRGGRHVAPAALPSDPAYDEGLGHSFCYVRPDKFVVPFSADDLVADAKAAAAAEGEATTFRAISGAALSANVSTPLSTSVLLLMPEESSASATASSGFESSESFAAVPLQPVPRFSSGPISAPFSGGFMSGPLERGFQSGPLDAALLSGPLPGTATSGRMGGAVPALRRSLSHGGRRLRNFTRALLARTEKFQDSADLGSPDAAAAAVAACGGDPCGLQWAQGKAGEDRVHVVVSEERGWVFVGIYDGFNGPDATDFLVSNLYAAVHRELRGLLWDQREQNVQHDQRPDQPGSAPSTTASDNQDQWGRRRRTRRSRPPRGADDDQRRWKCEWEQERDCSNLKPPTQQRLRCNSENDHVAVLKALTRALHRTEEAYLDIADKMVGEFPELALMGSCVLAMLMKGEDMYIMNVGDSRAVLATMDSVDLEQISQGSFDGSVGDCPPCLSAVQLTSDHSTSVEEEVIRIRNEHPDDPSAISKDRVKGSLKVTRAFGAGFLKQPKWNDALLEMFRIDYVGSSPYISCNPSLFHHKLSTRDRFLILSSDGLYQYFTNEEAVAQVEMFIATTPEGDPAQHLVEEVLFRAANKAGMDFHELIEIPHGDRRRYHDDVSVIVISLEGRIWRSCV

SEQ ID NO: 19886 - DNA, 1953 bp, Arabidopsis thaliana
  CDS (1)..(1953)
atgggaaatggagtcgcgagttttagtggctgttgcgccggaaccaccgccggagaaatttccggtcgatacgtaaccggagtaggactggttcaagaaaacctcggccactctttctgctacgttcgtccagttctcaccggatcaaaatcttctttcccgccggaaccgcccctccgacccgacccgatacccggaaccaccaccactttccgatcaatctccggcgcctctgttagcgccaatacttcaaccgcgctctcaacttctctgtcaacagatacgtctggaatagcctccgcgttcgagagttccaatagattcgcttccttgcctctccagcctgtaccacgtagtcctattaagaaatcggatcacgggtcgggtctattcgaacgccggttcttatccggtccgattgaaagcggtttggtttcagggaagaagaccaaggagaaagcaaaactgaagaaaagtggaagcaaatcctttacgaaaccaaaactgaagaaaagtgaaagcaaaatctttacattcaaaaacgttttcaccaacttatcttgttcgaagaagagtgtgattaagccaatcaacggtttcgattcattcgatggatcatcagatactgatcgttacatacctgagatcaactccttaagcacgattgtgagcagccatgagaaacctagaatcaaagaagaagaagataagactgagtctgctttagaggagccaaagatacaatgggcacaggggaaagcaggtgaagatcgagtacacgtcatcctctccgaggaaaacggttggcttttcgtcggaatttacgacggattcagcggtccagatccaccggattatcttatcaaaaatctctacactgccgtgctcagagagctcaaagggttactatggatcgacaaaggtgaatcatataatagaaacggcgagtccaacatcgagaaacagagtacagtcgagcatgcatccgattcggatcaagaaaactgccctgtgatgaatggaaacgatgttgcttgtggatcaagaaacattacgagtgacgtgaagaagttgcaatggaggtgcgagtgggagcataactcaagcaacaagtctaataatattaaccacaaagacgttcttagagctcttcaacaagcgttggagaaaacagaagaatcgtttgatctgatggttaatgagaatccagaattagccttgatgggatcctgcgttcttgtgacattgatgaaaggagaagatgtttacgtgatgagcgttggagatagccgagcggttcttgctcgaagacctaatgtcgagaaaatgaagatgcaaaaggagcttgagagagtcaaagaagaaagtccattagagaccttgttcatcaccgaaagaggactgagtcttctggtccctgttcagctcaataaggaacatagcacaagtgttgaagaggaagtgagaagaatcaagaaggaacatcctgatgatatattagcgatagagaataatagagtgaaaggttatctcaaagtcactcgtgcatttggcgctggatttcttaaacagccaaaatggaacgaggcgcttctagagatgttcagaatagactacgtcggaacatcgccgtacatcacgtgctctccgtcgctacaccaccatagactctcatcacgtgacaaattcctaatcctctcatccgatggactatacgaatacttctcgaacgaggaagccatcttcgaggttgactcattcatctcagccttccctgaaggcgatcctgctcaacatctcattcaagaagtcctccttagagctgccaagaaatatggtatggactttcatgaattgctagagataccacaaggagatcgtcggaggtatcatgacgatgtttctgtgattgtgatttcacttgaaggaagaatttggagatcttccatgtga

SEQ ID NO: 19887 - protein, 650 aa, Arabidopsis thaliana
MGNGVASFSGCCAGTTAGEISGRYVTGVGLVQENLGHSFCYVRPVLTGSKSSFPPEPPLRPDPIPGTTTTFRSISGASVSANTSTALSTSLSTDTSGIASAFESSNRFASLPLQPVPRSPIKKSDHGSGLFERRFLSGPIESGLVSGKKTKEKAKLKKSGSKSFTKPKLKKSESKIFTFKNVFTNLSCSKKSVIKPINGFDSFDGSSDTDRYIPEINSLSTIVSSHEKPRIKEEEDKTESALEEPKIQWAQGKAGEDRVHVILSEENGWLFVGIYDGFSGPDPPDYLIKNLYTAVLRELKGLLWIDKGESYNRNGESNIEKQSTVEHASDSDQENCPVMNGNDVACGSRNITSDVKKLQWRCEWEHNSSNKSNNINHKDVLRALQQALEKTEESFDLMVNENPELALMGSCVLVTLMKGEDVYVMSVGDSRAVLARRPNVEKMKMQKELERVKEESPLETLFITERGLSLLVPVQLNKEHSTSVEEEVRRIKKEHPDDILAIENNRVKGYLKVTRAFGAGFLKQPKWNEALLEMFRIDYVGTSPYITCSPSLHHHRLSSRDKFLILSSDGLYEYFSNEEAIFEVDSFISAFPEGDPAQHLIQEVLLRAAKKYGMDFHELLEIPQGDRRRYHDDVSVIVISLEGRIWRSSM

SEQ ID NO: 19888 - DNA, 2025 bp, Arabidopsis thaliana
  CDS (1)..(2025)
atgggaaatggagtcaccactttgaccggttgctgtacaggaactctcgccggagaaatttcccggcgttacgacgtatctctcgttcacgatggacttggccactctttctgctatattcgaccagatctccccggagtagtattaccttcgccggagtctcctctccgatcagatcatatccaagaaaccactttccgttcaatctccggcgcatcggtcagcgcaaatccttcaacggcgctctccggagctctgtcatcggattctgattgtccgtacagctccgcagtctccgcctccgcattcgagagctccggtaattttgcctctttaccactccagcctgtgccgcgtggctccacgtggcaatcaggtccaattgttaacgagtcgggtctcgggtcagctccgtttgagcgacgatttttatcgggtccgattgaaagcgggttgtattcgggtccgattgaatcaacgaagaagacggagaaagagaaaccgaagaagatcagaaaaaaacctaaatcgaagaagaattttctcacattcaaaacactattcgcgaatctaatctctaacaacaataaacctcgcttgaagaagagtgtgatcgagccgatcaacggctctgattcatcagattctggtcgtcttcatcatgaacctgtgattacttcctcacgaagcaacgagaaccctaaatctgatcttgaagaagaagatgaaaaacagagcatgaactctgttttagatgttcaatgggctcaggggaaagcaggggaggatcgtgtacacgtggttgtatctgaagacaacggatgggtctttgtcggaatctatgacggattcagtggtccagatgcgccggattatctcctcaacaatctttacaccgccgtgcaaaaggagctcaatgggttactttggaacgacgaaaagcttagatctttaggagaaaacggcatgaccaaaaccggaaaatgttctgatgaggaagatcccgagtcaggaaaagagaattgtcccgtgataaacaatgatgatgcagttgcttccggtgcaagaaaccaagcgaagagtttgaaatggagatgtgaatgggagaagaagtcaaataacaagaccaaatctgataacaggtgtgatcagaaaggatcaaattcgacgacaacaaaccataaagatgttcttaaagctcttttacaagctttgaggaaaaccgaagacgcgtatttagagctagctgatcaaatggttaaagagaatccagagttagcattgatggggtcttgtgttctcgtgacattgatgaaaggagaagacgtttacgtgatgaatgtcggggatagccgagcggttttaggccggaaacctaatttagcaaccgggagaaagaggcaaaaagagttggagagaataagagaagatagttcattagaagataaagaaattttgatgaatggagcaatgcgtaatactttggttcctctacaacttaacatggaacatagcacaagaattgaagaggaagtgagaagaatcaagaaggaacatcctgacgatgattgtgccgtagagaatgatagagttaaaggttatcttaaggtcactcgtgcatttggagctggctttctcaaacagcctaaatggaacgatgcccttttagagatgttcaggatcgattatatcgggacatcaccatatattacatgttcaccatcattatgtcatcacaagctaacgtcacgtgacaaattcctaatcctatcttctgatggattgtatgaatatttctctaaccaagaagccattttcgaggttgaatctttcatctctgctttccctgaaggcgatccagctcaacacttaatccaagaagtcctccttcgtgctgccaacaagtttggtatggattttcatgaattgttggagataccgcaaggagatcgtaggaggtatcacgatgatgtctctgtgatagtgatctctcttgaaggaagaatatggagatcatcaatgtga

SEQ ID NO: 19889 - protein, 674 aa, Arabidopsis thaliana
MGNGVTTLTGCCTGTLAGEISRRYDVSLVHDGLGHSFCYIRPDLPGVVLPSPESPLRSDHIQETTFRSISGASVSANPSTALSGALSSDSDCPYSSAVSASAFESSGNFASLPLQPVPRGSTWQSGPIVNESGLGSAPFERRFLSGPIESGLYSGPIESTKKTEKEKPKKIRKKPKSKKNFLTFKTLFANLISNNNKPRLKKSVIEPINGSDSSDSGRLHHEPVITSSRSNENPKSDLEEEDEKQSMNSVLDVQWAQGKAGEDRVHVVVSEDNGWVFVGIYDGFSGPDAPDYLLNNLYTAVQKELNGLLWNDEKLRSLGENGMTKTGKCSDEEDPESGKENCPVINNDDAVASGARNQAKSLKWRCEWEKKSNNKTKSDNRCDQKGSNSTTTNHKDVLKALLQALRKTEDAYLELADQMVKENPELALMGSCVLVTLMKGEDVYVMNVGDSRAVLGRKPNLATGRKRQKELERIREDSSLEDKEILMNGAMRNTLVPLQLNMEHSTRIEEEVRRIKKEHPDDDCAVENDRVKGYLKVTRAFGAGFLKQPKWNDALLEMFRIDYIGTSPYITCSPSLCHHKLTSRDKFLILSSDGLYEYFSNQEAIFEVESFISAFPEGDPAQHLIQEVLLRAANKFGMDFHELLEIPQGDRRRYHDDVSVIVISLEGRIWRSSM

SEQ ID NO: 19890 - DNA, 1989 bp, Arabidopsis thaliana
  CDS (1)..(1989)
atgggtaacggagtaacaaaactgagtatatgtttcacaggcggtggaggagaacgtctccggccaaaagacatctccgttcttcttccggatcctttagacgaaggtttaggtcactccttctgctacgtccgaccagacccgactctaatcagttcctcaaaagtccattcagaggaagacacaacgacgacaacgttccgtacaatctccggcgcttccgttagcgccaacacagctactcctctctcaacttctctctacgatccctacggtcacatcgaccgcgccgccgcattcgaaagcacgacttcattttcgtcaatccctcttcaaccgatccccaaaagctccggtccgatcgttttaggctcgggtccgatcgaaagagggttcctttcaggtccgatcgaaagaggattcatgtcgggtcctcttgatcgggtcgggttattctcaggtccgcttgataagccaaactcagatcatcatcatcagttccaacgtagcttctctcatggtttagctttacgggtcgggtcaagaaaacgatctttggttcggatcctccgtagagcaatctcgaaaacgatgtcaagagggcaaaactcgatcgttgctccgatcaaatccgttaaagattccgataactggggaattaggtcagaaaagagccggaatttgcacaacgagaatctcacagtgaatagcttgaactttagcagcgaagttagcttagacgacgacgtttcactcgaaaaccagaatcttcagtgggctcagggaaaagccggtgaggatcgagtacacgtggttgtatcggaggagcacgggtggctcttcgtcggaatatacgacggattcaacggtccagatgcgccggattatcttctctctcatctctatcctgtcgttcatcgagagctcaaaggattgttatgggacgattcaaatgtcgaatccaaatctcaggatttagaaaggtctaacggagacgaatcttgttcaaatcaggaaaaggatgagacttgtgagcgatggtggagatgtgaatgggatcgtgaaagtcaagatcttgaccgtcgattaaaggaacagattagtcggagaagtgggtcggatcggttaacgaatcattcggaagtattagaggctctgtcacaagctctgaggaaaacagaggaagcgtatttagatactgcagataagatgctcgacgaaaatcctgaactagctttgatgggttcttgtgttttggtcatgttaatgaaaggtgaagatatttatgtgatgaatgttggtgatagtagagctgtgcttggtcagaaatcagaaccggattactggttagctaagattagacaggatttggaacggattaacgaggaaacgatgatgaatgatttggaaggttgtgaaggagatcaatcatctttagtcccgaatttatcggcttttcagctcactgttgatcacagcacaaatatagaagaagaagttgagagaatcagaaacgagcatcccgatgatgttaccgcggtaacgaatgaacgggttaaaggctccttaaaggtcacaagagcgtttggtgctggtttccttaagcagcctaaatggaacaatgcacttcttgagatgttccaaattgattacgttgggaagtctccatacatcaactgcttaccgtctctctaccaccacagattagggtccaaggaccggtttctaatactatcatcggatggtctctaccaatacttcacaaacgaagaagctgtttcagaggttgagctcttcatcacattacaacctgaaggggatccagctcaacaccttgtgcaagagcttttgtttagagctgctaagaaagctggtatggatttccatgaattgctagagataccacaaggtgaacgaagacggtatcacgatgatgtttcaatagtagtgatctctttagaaggaagaatgtggaaatcttgtgtatag

SEQ ID NO: 19891 - protein, 662 aa, Arabidopsis thaliana
MGNGVTKLSICFTGGGGERLRPKDISVLLPDPLDEGLGHSFCYVRPDPTLISSSKVHSEEDTTTTTFRTISGASVSANTATPLSTSLYDPYGHIDRAAAFESTTSFSSIPLQPIPKSSGPIVLGSGPIERGFLSGPIERGFMSGPLDRVGLFSGPLDKPNSDHHHQFQRSFSHGLALRVGSRKRSLVRILRRAISKTMSRGQNSIVAPIKSVKDSDNWGIRSEKSRNLHNENLTVNSLNFSSEVSLDDDVSLENQNLQWAQGKAGEDRVHVVVSEEHGWLFVGIYDGFNGPDAPDYLLSHLYPVVHRELKGLLWDDSNVESKSQDLERSNGDESCSNQEKDETCERWWRCEWDRESQDLDRRLKEQISRRSGSDRLTNHSEVLEALSQALRKTEEAYLDTADKMLDENPELALMGSCVLVMLMKGEDIYVMNVGDSRAVLGQKSEPDYWLAKIRQDLERINEETMMNDLEGCEGDQSSLVPNLSAFQLTVDHSTNIEEEVERIRNEHPDDVTAVTNERVKGSLKVTRAFGAGFLKQPKWNNALLEMFQIDYVGKSPYINCLPSLYHHRLGSKDRFLILSSDGLYQYFTNEEAVSEVELFITLQPEGDPAQHLVQELLFRAAKKAGMDFHELLEIPQGERRRYHDDVSIVVISLEGRMWKSCV

SEQ ID NO: 19892 - DNA, 1791 bp, Oryza sativa subsp
  CDS (1)..(1791)
atgggcagcggcgcgtcacggctgctgaccgcgtgcacgtgctcgcggccggcgccggcgtccgtggacgcggagccgtgcctggacgacgctctcggccactccttctgctacgccgccgccgccacggccaccgcccactcctcgtcgttccgccacggcatctccggcgccgcgctctccgccaactcgtcggtgcccgtcccgctctacaacgcgtccgccgccgccggcggcgtggcgccggggtactcctcggcattccacacctcgtcgtccttttcctccgcgccgctgcagctgtccaacctctcctcgggcccgctgttcctctcgggtcccatcgaccgcgccggccagctctccggcccgctcgaccccgccgtgcccttctctggcccgctccccgcaaagcctcccaagcccgcgtcctcctcatcgagggggttctcgaggaggttccggaagccgtccttcggcagcctgcggcggagcgtgtcggagaagaaccgcccgtgcgccgtgccgctccgccgcgacgacggcgtgcagtgggcgcacggccgcgccggggaggaccgcgtccacgtggtggtctccgaggatcagcggtggctcttcgtcggcatctacgacggcttcaacggccccgaggcccccgacttcctcgtcaccaacctctaccgcttcctcctccgcgagctccgcgggatcttctacaaggaggccgacgcggacaacaagaagctctggcagtttctcgtggacggcgacgacgacgacagcgagctcgacttctcgggctctggccggttcgcgctgtcactcgacgggctcaaggagagtcggtttcacatgtgggcgcacgccgctgccgacgagagcggcagggaatggggttccaggaggttggcaccggcgcctgcggtgagggaccatgcggcggtgctagccgctctcacccgggccctggcctcgacggaagcggcgtacttggacatgaccgaccagtcaatgggaacccatccggagttggcggtcaccggggcgtgcctgctcgtggccctcgtgagggacgacaacgtgtacgtgatgaaccttggggacagccgtgccattgtggcgcagcgtccggacgatggcgacgatggctgtgtgtttggaaccatgcggcggatggaggacgtcggggtgggcttggagatcgagacaaggcccggcggatgcgccattattgggcttaagccactgcagctgtcgactgatcacagcaccagcatcgaagaggaagttcacaggatcaaacgtgaacatcctgatgatgatcagtgtattgtaaatgatagagtgaagggtcgcctaaaagttacccgggcttttggtgcaggctatctcaaacaggcaaaattgaacaatggattgttagagatgttccgcaatgattacattggtgatacaccgtatatatcatgcacaccatcgctttgccatcacaagctcactgcaagggatcagtttttggttctttcttccgatggcttatatcagtacctgagcaacgaggaggtagttttgcatgttgagaatttcatggagaggtttccagaaggtgatcctgcacaaagtttaattgaggagcttctctctcgtgcagcaaagaaggctggtatggatttttatgagttactagatatacctcaaggggaccgaagaaaataccatgatgatgtcactgtcatggttatttctctggaagggagaatctggaagtcgtccggaacatatgtgtga

SEQ ID NO: 19893 - protein, 596 aa, Oryza sativa subsp
MGSGASRLLTACTCSRPAPASVDAEPCLDDALGHSFCYAAAATATAHSSSFRHGISGAALSANSSVPVPLYNASAAAGGVAPGYSSAFHTSSSFSSAPLQLSNLSSGPLFLSGPIDRAGQLSGPLDPAVPFSGPLPAKPPKPASSSSRGFSRRFRKPSFGSLRRSVSEKNRPCAVPLRRDDGVQWAHGRAGEDRVHVVVSEDQRWLFVGIYDGFNGPEAPDFLVTNLYRFLLRELRGIFYKEADADNKKLWQFLVDGDDDDSELDFSGSGRFALSLDGLKESRFHMWAHAAADESGREWGSRRLAPAPAVRDHAAVLAALTRALASTEAAYLDMTDQSMGTHPELAVTGACLLVALVRDDNVYVMNLGDSRAIVAQRPDDGDDGCVFGTMRRMEDVGVGLEIETRPGGCAIIGLKPLQLSTDHSTSIEEEVHRIKREHPDDDQCIVNDRVKGRLKVTRAFGAGYLKQAKLNNGLLEMFRNDYIGDTPYISCTPSLCHHKLTARDQFLVLSSDGLYQYLSNEEVVLHVENFMERFPEGDPAQSLIEELLSRAAKKAGMDFYELLDIPQGDRRKYHDDVTVMVISLEGRIWKSSGTYV

SEQ ID NO: 19894 - DNA, 1896 bp, Oryza sativa subsp
  CDS (1)..(1896)
atgggcaatggcatcaccaagaatccgtgcttctccggcgacccgtacgccgccgccgtggcgtccgaccctctcccggacgacagccacggccactccttcacgtacgtgccgtcctccgcggccgccttcgaccactccccgaggtccgccgcggcgtcctccgagacgtcctacttctcgctttccggcgccgccatcagcgccaacccggcgacgtccgcgtcgatgccgtcgttccgcctctacaacgagctgacgtggccgccatcgacggcctgcaccttcgagagctcccgctccttcgccgcggcgccgctcatccaggccgcgccgcccaggctgtccatgtccgggccgctccacgcgacgtcggggcgcttctccgaggcgtcgggatcggcctccaccgcctccgaccgcttctccgaccacccgttcatggacggcatgctcgaccgcgcctcttcggcctcctccaccgccaggctcatgcccagcttctctcacctcatgtctgagccccgcgtcgcgcagtccggcctgagcaatgagcgatcgctcatccgatcccttgtcagggtcgcctccaagctccggtttggggtgccgctctccggccgccggtcgaatggacctgccgagccgacgaccaagagcgacggcgactaccgctccacgcccaagggcaatgtggagtgggcgcagggcatggccggcgaggaccggttccacgtcgccgtctccgaggagcacggctgggtgttcgtcggaatctacgacggcttcaacggccccgacgcaaccgactacctcttcgccaacctctacgtcgccgtgcaccgcgagctcaagggcgtgctctgggacgacatacaaggcgtcgacgtcgtcacggacaacctcccggaccctgctctggccaatgccacacacctctgtttccttgacgcaggcggcgtcggcggcggcggcgacgacgaccccgacgcagagcgcaaggcgaagagggggcggatcgagcgcaatgccgatgacgacggcgcgtcgtcggtgcaccgcgacgtcctgaaggcgctggcgcgcgcgctggcgaggacggaggaggcgttcttcgcggcggcggaggagcgcgcggcgcagagccccgagctgggcctggtcgggtcgtgcgtgctggtgatgctgatgaagggcaaggacgtgtacctgatgaacgtcggcgacagccgcgccgtgctggcgcggcggcgcgagccggacttcaaggacatcttcttcaggcccgaccaggacttgcagctgctcaaggccgaggtgatccgcgagctcgaggcgcacgacaggaatggcctccagtgcgtgcagctcactcccgagcatagcgccgccgccgaggaggaagtgaggaggatcaggtcccagcatctgactgatcggcaggccgtcgtcaacggcagggtgaaggggaagctcagtgttaccagagcatttggtgccggctacctgaagcagccaaaatggaacgataggctgcttgaagccttcaaggttgattacatcggcgccgagccatacatcagctgcacgccgtcgctgcgccaccaccggatcagctccaacgacaggttcctcgtgctgtcttctgacgggctctaccagtacttcaccaacaaggaggtggtcgatcaggtcgccatgttcaccgccgagcagcccgacggcgacccggcgaagcacctcgttggagagctcgtcctccgcgccgcgaggaaagccggcatggattgccgcaggctgctcgagatcccgcatggcgacaggaggaactaccatgacgacgtgtccatcatcgtcatgtcgttcgaggggaggatatggagatcgtccgtttag

SEQ ID NO: 19895 - protein, 631 aa, Oryza sativa subsp
MGNGITKNPCFSGDPYAAAVASDPLPDDSHGHSFTYVPSSAAAFDHSPRSAAASSETSYFSLSGAAISANPATSASMPSFRLYNELTWPPSTACTFESSRSFAAAPLIQAAPPRLSMSGPLHATSGRFSEASGSASTASDRFSDHPFMDGMLDRASSASSTARLMPSFSHLMSEPRVAQSGLSNERSLIRSLVRVASKLRFGVPLSGRRSNGPAEPTTKSDGDYRSTPKGNVEWAQGMAGEDRFHVAVSEEHGWVFVGIYDGFNGPDATDYLFANLYVAVHRELKGVLWDDIQGVDVVTDNLPDPALANATHLCFLDAGGVGGGGDDDPDAERKAKRGRIERNADDDGASSVHRDVLKALARALARTEEAFFAAAEERAAQSPELGLVGSCVLVMLMKGKDVYLMNVGDSRAVLARRREPDFKDIFFRPDQDLQLLKAEVIRELEAHDRNGLQCVQLTPEHSAAAEEEVRRIRSQHLTDRQAVVNGRVKGKLSVTRAFGAGYLKQPKWNDRLLEAFKVDYIGAEPYISCTPSLRHHRISSNDRFLVLSSDGLYQYFTNKEVVDQVAMFTAEQPDGDPAKHLVGELVLRAARKAGMDCRRLLEIPHGDRRNYHDDVSIIVMSFEGRIWRSSV

SEQ ID NO: 19896 - DNA, 1920 bp, Oryza sativa subsp
  CDS (1)..(1920)
atgggcaactccctcgcctgcttctgctgcggcggcggcgccggcggccgaggcggccgccacgtcgcccccgccgcgctcccctccgacccggcctacgacgagggcctgggccactcgttctgctacgtccgccccgacaagttcgtggttcccttctccgcggatgatttggtggctgacgcgaaggcggccgcggcggcggagggggaggcgaccacgttccgggcgatatccggggcggcgctcagtgccaacgtatccacgccgctgtccacgtccgtgctgctgctgatgccggaggagtcgtcggcgtccgccaccgcgtcgtcggggtttgagagctcggagtcgttcgctgctgtgccgctgcagccggtgccgaggttctcgtccgggccgatctccgcgcccttctccggcgggttcatgtcggggcccttggagagggggttccaatctgggccactcgacgccgcgctcctctcgggccctctccctggcgccgccacctccggtcgtatgggtggcgccgtccctgcgctccgccggagcctctcccacggtggccgccgcctccgcaatttcacccgcgcgctcctcacgcgcaccgagaagtttcaggattctgcggatctaggctcgccggacgccgccgccgccgccgtcgccgcctgtgggggcgatccctgtggtctgcagtgggcgcaggggaaagccggcgaggaccgcgtccacgtcgtcgtgtcggaggagcgaggctgggtgttcgtcggcatctacgatgggttcaacggccccgacgccaccgacttcctggtatccaacctctacgccgccgtccaccgcgagctccgcggcctcctctgggatcagcgggagcagaacgtgcagcacgaccagcgccccgaccaacccggctcagccccaagcaccacggcctcagataaccaagaccagtggggtcgccgccgccgcacccgccgctcaagaccgccgcgtggcgccgacgacgaccagcggcggtggaagtgcgagtgggagcaggagcgggattgctccaacctgaagccaccaacgcagcagcgtcttcgttgcaacagcgagaacgaccacgtcgccgtgctcaaggcgctgacccgtgcgctgcacaggaccgaggaggcttacctggacatcgccgacaagatggtcggcgagttccctgagcttgcgctcatgggctcttgtgttcttgccatgctcatgaaaggagaggacatgtacatcatgaatgttggcgatagccgggctgtgttggcaacaatgggcagcgtcgatctcgagcagatcagccagggttcattcgatggatcagtcggggattgcccgccatgcttgtcggccgtgcagctcacgtcggatcacagcacttcagtggaagaggaagtaatcagaatacgaaacgagcatcctgatgatccatctgccatctccaaggatcgcgtgaagggctcgctgaaggtgaccagagcatttggtgctgggtttttgaaacagcccaagtggaatgatgcactcctggagatgttcagaattgattacgttgggtcctccccatacatatcatgcaatccatccctttttcatcataagctcagcacaagggatagattcttgatattatcttcagatggactttaccagtatttcaccaacgaggaggcagttgctcaggtcgaaatgttcatcgcaacaacccctgaaggcgaccctgcccaacatcttgtggaggaagttcttttccgtgctgccaacaaagcaggaatggactttcatgaactgatcgagataccacatggtgatcgtcggcgataccatgacgatgtatctgtcatcgtcatctctttggagggcaggatttggagatcctgcgtgtaa

SEQ ID NO: 19897 - protein, 639 aa, Oryza sativa subsp
MGNSLACFCCGGGAGGRGGRHVAPAALPSDPAYDEGLGHSFCYVRPDKFVVPFSADDLVADAKAAAAAEGEATTFRAISGAALSANVSTPLSTSVLLLMPEESSASATASSGFESSESFAAVPLQPVPRFSSGPISAPFSGGFMSGPLERGFQSGPLDAALLSGPLPGAATSGRMGGAVPALRRSLSHGGRRLRNFTRALLTRTEKFQDSADLGSPDAAAAAVAACGGDPCGLQWAQGKAGEDRVHVVVSEERGWVFVGIYDGFNGPDATDFLVSNLYAAVHRELRGLLWDQREQNVQHDQRPDQPGSAPSTTASDNQDQWGRRRRTRRSRPPRGADDDQRRWKCEWEQERDCSNLKPPTQQRLRCNSENDHVAVLKALTRALHRTEEAYLDIADKMVGEFPELALMGSCVLAMLMKGEDMYIMNVGDSRAVLATMGSVDLEQISQGSFDGSVGDCPPCLSAVQLTSDHSTSVEEEVIRIRNEHPDDPSAISKDRVKGSLKVTRAFGAGFLKQPKWNDALLEMFRIDYVGSSPYISCNPSLFHHKLSTRDRFLILSSDGLYQYFTNEEAVAQVEMFIATTPEGDPAQHLVEEVLFRAANKAGMDFHELIEIPHGDRRRYHDDVSVIVISLEGRIWRSCV

SEQ ID NO: 19898 - DNA, 1782 bp, Oryza sativa subsp
  CDS (1)..(1782)
atgggcaacagcttggcgagcctggcgacgccgtgcttcgcggacgccgccgccggtggtgggcgcgggcgcggtcaccacgccgccggcgacgacgccgttgcgttcgacgacgacgacgccgcggggggctgcaacagcatcggtcacattctgagcttcgatggacgcgatgcgccggcgttcgccatccatggcgtgttgctgccgtcgaacccgtcgacgatggcctccaccggcggcggcggcggcggcggcgcctccgtcctcaacgacggcgcgctgtccatcgggtcgtcgtcgttcgacagctccaactccttctcgttccggacgctccagccgcggcagtactccgggccactggagtactgcaccacgtcgccgtcgacgtcgggcgcgtcgtcgtcgcggcagctcggcccgcgcaccgacaagcagatcctcaacgacatctacgccaaccggcaacgccgccggtgtcaggggtccaaggggccgccgctcctcggccgcctccgcaaggcggtggcgtcgctgctgcgcgccgggccgtgcggcttccccgagcaggaggagcccgccgccatgatcaacggcgtcggcgtggtgaggaacggcgaggagagcatcagccggaacgtcgacgcggcggcggcggacgacggcgcggagagggtgcagtgggcgcgcggccaggccggggaggacagggtgcacgtggtggtgtcggaggagcacgggtggatgttcgtcggcatctacgacggcttcaatggccccgacgccaccgactacctcgccgacaacctgtacgcggccgtgtgccgcgagctcaacggcgtgctctcggaggacgagccggatccaccggaggcggcggcggcggcggggcggtgcaacgggtgcggcggagcggcgcggcaccgcgaggtgctcgacgcgatggcgcgggcgctgcggcggacggaggaggggtacttcgcggaggcggaggcgcgcgcggcggagtgcccggagctggcgatgatggggtcgtgcgtcctcgtcgtgctgatgaagggcgccgacgtgtacgccatgaacgtcggcgacagccgcgccgtgctggcgcaccaggccgagccggacctgtcccacgtcgtgctgccgcggggcagccaccacgatggcgacggcgacctcgccggcgtgaaggaggcgattaagcggcagttcgacgagtgcgagatgggggagctggcggcgctgcagctcaccatggatcatagcaccaatgtgtacaaggaggtgagaaggatcaggagtgagcacttggatgatcctggctgcatcaccaatggcagggtgaagggttgtttgaaggtgacaagagcgtttggagctggctacctaaaagagccccgttggaacaaggctctactagaggtgttccaggtggattatgtgggtagctcgccgtacatcagctgccgtccgtacatccgacaccaccggttaggggcgcaggacaacttcttgatcctctcgtcggatggtctgtatgactacttcacaaaagaggaggtggtggcacaagtggaggccttcaccgccagctaccccgacgaggaccctgccaagtacctcagccaccagattctccaccgggccgccaatcaagctgggatggggttccatgagttgctagagattcagcaaggagatcgacgacagtaccatgacgatgtctccatcattatcatctccttggagggaaaaatttggagatcatcacaatga

SEQ ID NO: 19899 - protein, 593 aa, Oryza sativa subsp
MGNSLASLATPCFADAAAGGGRGRGHHAAGDDAVAFDDDDAAGGCNSIGHILSFDGRDAPAFAIHGVLLPSNPSTMASTGGGGGGGASVLNDGALSIGSSSFDSSNSFSFRTLQPRQYSGPLEYCTTSPSTSGASSSRQLGPRTDKQILNDIYANRQRRRCQGSKGPPLLGRLRKAVASLLRAGPCGFPEQEEPAAMINGVGVVRNGEESISRNVDAAAADDGAERVQWARGQAGEDRVHVVVSEEHGWMFVGIYDGFNGPDATDYLADNLYAAVCRELNGVLSEDEPDPPEAAAAAGRCNGCGGAARHREVLDAMARALRRTEEGYFAEAEARAAECPELAMMGSCVLVVLMKGADVYAMNVGDSRAVLAHQAEPDLSHVVLPRGSHHDGDGDLAGVKEAIKRQFDECEMGELAALQLTMDHSTNVYKEVRRIRSEHLDDPGCITNGRVKGCLKVTRAFGAGYLKEPRWNKALLEVFQVDYVGSSPYISCRPYIRHHRLGAQDNFLILSSDGLYDYFTKEEVVAQVEAFTASYPDEDPAKYLSHQILHRAANQAGMGFHELLEIQQGDRRQYHDDVSIIIISLEGKIWRSSQ

SEQ ID NO: 19900 - DNA, 1920 bp, Oryza sativa subsp
  CDS (1)..(1920)
atgggcaactccctcgcctgcttctgctgcggctgctgcgccggcggccgaggcggccgccacgtcgcccccgccgcgctcccctccgacccggcctacgacgagggcctgggccactcgttctgctacgtccgccccgacaagttcgtggttcccttctccgcggatgatttggtggctgacgcgaaggcggccgcggcggcggagggggaggcgaccacgttccgggcgatatccggggcggcgctcagtgccaacgtatccacgccgctgtccacgtccgtgctgctgctgatgccggaggagtcgtcggcgtccgccaccgcgtcgtcggggtttgagagctcggagtcgttcgctgctgtgccgctgcagccggtgccgaggttctcgtccgggccgatctccgcgcccttctccggcgggttcatgtcggggcccttggagagggggttccaatctgggccactcgacgccgcgctcctctcgggccctctccctggcaccgccacctccggtcgtatgggtggcgccgtccctgcgctccgccggagcctctcccacggtggccgccgcctccgcaatttcacccgcgcgctcctcgcgcgcaccgagaagtttcaggattctgcggatctaggctcgccggacgccgccgccgccgccgtcgccgcctgtgggggcgatccctgtggtctgcagtgggcgcaggggaaagccggcgaggaccgcgtccacgtcgtcgtgtcggaggagcgaggctgggtgttcgtcggcatctacgatgggttcaacggccccgacgccaccgacttcctggtatccaacctctacgccgccgtccaccgcgagctccgcggcctcctctgggatcagcgggagcagaacgtgcagcacgaccagcgccccgaccaacccggctcagccccaagcaccacggcctcagataaccaagaccagtggggtcgccgccgccgcacccgccgctcaagaccgccgcgtggcgccgacgacgaccagcggcggtggaagtgcgagtgggagcaggagcgggattgctccaacctgaagccaccaacgcagcagcgtcttcgttgcaacagcgagaacgaccacgtcgccgtgctcaaggcgctgacccgtgcgctgcacaggaccgaggaggcttacctggacatcgccgacaagatggtcggcgagttccctgagcttgcgctcatgggctcttgtgttcttgccatgctcatgaaaggagaggacatgtacatcatgaatgttggcgatagccgggctgtgttggcaacaatggacagcgtcgatctcgagcagatcagccagggttcattcgatggatcagtcggggattgcccgccatgcttgtcggccgtgcagctcacgtcggatcacagcacttcagtggaagaggaagtaatcagaatacgaaacgagcatcctgatgatccatctgccatctccaaggatcgcgtgaagggctcgctgaaggtgaccagagcatttggtgctgggtttttgaaacagcccaagtggaatgatgcactcctggagatgttcagaattgattacgttgggtcctccccatacatatcatgcaatccatccctttttcatcataagctcagcacaagggatagattcttgatattatcttcagatggactttaccagtatttcaccaacgaggaggcagttgctcaggtcgaaatgttcatcgcaacaacccctgaaggcgaccctgcccaacatcttgtggaggaagttcttttccgtgctgccaacaaagcaggaatggactttcatgaactgatcgagataccacatggtgatcgtcggcgataccatgacgatgtatctgtcatcgtcatctctttggagggcaggatttggagatcctgcgtgtaa

SEQ ID NO: 19901 - protein, 639 aa, Oryza sativa subsp
MGNSLACFCCGCCAGGRGGRHVAPAALPSDPAYDEGLGHSFCYVRPDKFVVPFSADDLVADAKAAAAAEGEATTFRAISGAALSANVSTPLSTSVLLLMPEESSASATASSGFESSESFAAVPLQPVPRFSSGPISAPFSGGFMSGPLERGFQSGPLDAALLSGPLPGTATSGRMGGAVPALRRSLSHGGRRLRNFTRALLARTEKFQDSADLGSPDAAAAAVAACGGDPCGLQWAQGKAGEDRVHVVVSEERGWVFVGIYDGFNGPDATDFLVSNLYAAVHRELRGLLWDQREQNVQHDQRPDQPGSAPSTTASDNQDQWGRRRRTRRSRPPRGADDDQRRWKCEWEQERDCSNLKPPTQQRLRCNSENDHVAVLKALTRALHRTEEAYLDIADKMVGEFPELALMGSCVLAMLMKGEDMYIMNVGDSRAVLATMDSVDLEQISQGSFDGSVGDCPPCLSAVQLTSDHSTSVEEEVIRIRNEHPDDPSAISKDRVKGSLKVTRAFGAGFLKQPKWNDALLEMFRIDYVGSSPYISCNPSLFHHKLSTRDRFLILSSDGLYQYFTNEEAVAQVEMFIATTPEGDPAQHLVEEVLFRAANKAGMDFHELIEIPHGDRRRYHDDVSVIVISLEGRIWRSCV

SEQ ID NO: 19902 - DNA, 2212 bp, Arabidopsis thaliana
  CDS (93)..(2081)
attgatgaacaatcaatctcagctttgagttctcccaaatcctctattgactttgcgaatctaagaaaaaactgaaattaataacgtttttgatgggtaacggagtaacaaaactgagtatatgtttcacaggcggtggaggagaacgtctccggccaaaagacatctccgttcttcttccggatcctttagacgaaggtttaggtcactccttctgctacgtccgaccagacccgactctaatcagttcctcaaaagtccattcagaggaagacacaacgacgacaacgttccgtacaatctccggcgcttccgttagcgccaacacagctactcctctctcaacttctctctacgatccctacggtcacatcgaccgcgccgccgcattcgaaagcacgacttcattttcgtcaatccctcttcaaccgatccccaaaagctccggtccgatcgttttaggctcgggtccgatcgaaagagggttcctttcaggtccgatcgaaagaggattcatgtcgggtcctcttgatcgggtcgggttattctcaggtccgcttgataagccaaactcagatcatcatcatcagttccaacgtagcttctctcatggtttagctttacgggtcgggtcaagaaaacgatctttggttcggatcctccgtagagcaatctcgaaaacgatgtcaagagggcaaaactcgatcgttgctccgatcaaatccgttaaagattccgataactggggaattaggtcagaaaagagccggaatttgcacaacgagaatctcacagtgaatagcttgaactttagcagcgaagttagcttagacgacgacgtttcactcgaaaaccagaatcttcagtgggctcagggaaaagccggtgaggatcgagtacacgtggttgtatcggaggagcacgggtggctcttcgtcggaatatacgacggattcaacggtccagatgcgccggattatcttctctctcatctctatcctgtcgttcatcgagagctcaaaggattgttatgggacgattcaaatgtcgaatccaaatctcaggatttagaaaggtctaacggagacgaatcttgttcaaatcaggaaaaggatgagacttgtgagcgatggtggagatgtgaatgggatcgtgaaagtcaagatcttgaccgtcgattaaaggaacagattggtcggagaagtggatcggatcggttaacgaatcattcggaagtattagaggctctgtcacaagctctgaggaaaacagaggaagcgtatttagatactgcagataagatgctcgacgaaaatcctgaactagctttgatgggttcttgtgttttggtcatgttaatgaaaggtgaagatatttatgtgatgaatgttggtgatagtagagctgtgcttggtcagaaatcagaaccggattactggttagctaagattagacaggatttggaacggattaacgaggaaacgatgatgaatgatttggaaggttgtgaaggagatcaatcatctttagtcccgaatttatcggcttttcagctcactgttgatcacagcacaaatatagaagaagaagttgagagaatcagaaacgagcatcccgatgatgttaccgcggtaacgaatgaacgggttaaaggctccttaaaggtcacaagagcgtttggtgctggtttccttaagcagcctaaatggaacaatgcacttcttgagatgttccaaattgattacgttgggaagtctccatacatcaactgcttaccgtctctctaccaccacagattagggtccaaggaccggtttctaatactatcatcggatggtctctaccaatacttcacaaacgaagaagctgtttcagaggttgagctcttcatcacattacaaccggaaggggatccagctcaacaccttgtgcaagagcttttgtttagagctgctaagaaagctggtatggatttccatgaattgctagagataccacaaggtgaacgaagacggtatcacgatgatgtttcaatagtagtgatctctttagaaggaagaatgtggaaatcttgtgtatagaaaacaatccctatgagcatacacacaagaacaaattggtgtgttcatggagacagagatcgatctctcatcaactctgaatcatgtactatgttgatataaacaggaaataaaaaaagttttggcaactt

SEQ ID NO: 19903 - protein, 662 aa, Arabidopsis thaliana
MGNGVTKLSICFTGGGGERLRPKDISVLLPDPLDEGLGHSFCYVRPDPTLISSSKVHSEEDTTTTTFRTISGASVSANTATPLSTSLYDPYGHIDRAAAFESTTSFSSIPLQPIPKSSGPIVLGSGPIERGFLSGPIERGFMSGPLDRVGLFSGPLDKPNSDHHHQFQRSFSHGLALRVGSRKRSLVRILRRAISKTMSRGQNSIVAPIKSVKDSDNWGIRSEKSRNLHNENLTVNSLNFSSEVSLDDDVSLENQNLQWAQGKAGEDRVHVVVSEEHGWLFVGIYDGFNGPDAPDYLLSHLYPVVHRELKGLLWDDSNVESKSQDLERSNGDESCSNQEKDETCERWWRCEWDRESQDLDRRLKEQIGRRSGSDRLTNHSEVLEALSQALRKTEEAYLDTADKMLDENPELALMGSCVLVMLMKGEDIYVMNVGDSRAVLGQKSEPDYWLAKIRQDLERINEETMMNDLEGCEGDQSSLVPNLSAFQLTVDHSTNIEEEVERIRNEHPDDVTAVTNERVKGSLKVTRAFGAGFLKQPKWNNALLEMFQIDYVGKSPYINCLPSLYHHRLGSKDRFLILSSDGLYQYFTNEEAVSEVELFITLQPEGDPAQHLVQELLFRAAKKAGMDFHELLEIPQGERRRYHDDVSIVVISLEGRMWKSCV

SEQ ID NO: 19904 - DNA, 1782 bp, Oryza sativa
  CDS (1)..(1782)
atgggcaacagcttggcgagcctggcgacgccgtgcttcgcggacgccgccgccggtggtgggcgcgggcgcggtcaccacgccgccggcgacgacgccgttgcgttcgacgacgacgacgccgcggggggctgcaacagcatcggtcacattctgagcttcgatggacgcgatgcgccggcgttcgccatccatggcgtgttgctgccgtcgaacccgtcgacgatggcctccaccggcggcggcggcggcggcggcgcctccgtcctcaacgacggcgcgctgtccatcgggtcgtcgtcgttcgacagctccaactccttctcgttccggacgctccagccgcggcagtactccgggccactggagtactgcaccacgtcgccgtcgacgtcgggcgcgtcgtcgtcgcggcagctcggcccgcgcaccgacaagcagatcctcaacgacatctacgccaaccggcaacgccgccggtgtcaggggtccaaggggccgccgctcctcggccgcctccgcaaggcggtggcgtcgctgctgcgcgccgggccgtgcggcttccccgagcaggaggagcccgccgccatgatcaacggcgtcggcgtggtgaggaacggcgaggagagcatcagccggaacgtcgacgcggcggcggcggacgacggtgcggagagggtgcagtgggcgcgcggcaaggccggggaggacagggtgcacgtggtggtgtcggaggagcacgggtggatgttcgtcggcatctacgacggcttcaatggccccgacgccaccgactacctcgccgacaacctgtacgcggccgtgtgccgcgagctcaacggcgtgctctcggaggacgagccggatccaccggaggcggcggcggcggcggggcggtgcaacgggtgcggcggagcggcgcggcaccgcgaggtgctcgacgcgatggcgcgggcgctgcggcggacggaggaggggtacttcgcggaggcggaggcgcgcgcggcggagtgcccggagctggcgatgatggggtcgtgcgtcctcgtcgtgctgatgaagggcgccgacgtgtacgccatgaacgtcggcgacagccgcgccgtgctggcgcaccaggccgagccggacctgtcccacgtcgtgctgccgcggggcagccaccacgatggcgacggcgacctcgccggcgtgaaggaggcgatcaagcggcagttcgacgagtgcgagatgggggagctggcggcgctgcagctcaccatggatcacagcaccaatgtgtacaaggaggtgagaaggatcaggagtgagcacttggatgatcctggctgcatcaccaatggcagggtgaagggttgtttgaaggtgacaagagcgtttggagctggctacctaaaagagccccgttggaacaaggctctactagaggtgttccaggtggattatgtgggtagctcgccgtacatcagctgccgtccgtacatccgacaccaccggttaggggcgcaggacaagttcttgatcctctcgtcggatggtctgtatgactacttcacaaaagaggaggtggtggcacaagtggaggccttcaccgccggctaccccgacgaggaccctgccaagtacctcagccaccagattctcctccgggccgccaatcaagctgggatggggttccatgagttgctagagattcagcaaggagatcgacgacagtaccatgacgatgtctccatcattatcatctccttggagggaaaaatttggagatcatcacaatga

SEQ ID NO: 19905 - protein, 593 aa, Oryza sativa
MGNSLASLATPCFADAAAGGGRGRGHHAAGDDAVAFDDDDAAGGCNSIGHILSFDGRDAPAFAIHGVLLPSNPSTMASTGGGGGGGASVLNDGALSIGSSSFDSSNSFSFRTLQPRQYSGPLEYCTTSPSTSGASSSRQLGPRTDKQILNDIYANRQRRRCQGSKGPPLLGRLRKAVASLLRAGPCGFPEQEEPAAMINGVGVVRNGEESISRNVDAAAADDGAERVQWARGKAGEDRVHVVVSEEHGWMFVGIYDGFNGPDATDYLADNLYAAVCRELNGVLSEDEPDPPEAAAAAGRCNGCGGAARHREVLDAMARALRRTEEGYFAEAEARAAECPELAMMGSCVLVVLMKGADVYAMNVGDSRAVLAHQAEPDLSHVVLPRGSHHDGDGDLAGVKEAIKRQFDECEMGELAALQLTMDHSTNVYKEVRRIRSEHLDDPGCITNGRVKGCLKVTRAFGAGYLKEPRWNKALLEVFQVDYVGSSPYISCRPYIRHHRLGAQDKFLILSSDGLYDYFTKEEVVAQVEAFTAGYPDEDPAKYLSHQILLRAANQAGMGFHELLEIQQGDRRQYHDDVSIIIISLEGKIWRSSQ

SEQ ID NO: 19906 - DNA, 21 bp, Artificial sequence
  primer
atgggtaacggaatcgggaag

SEQ ID NO: 19907 - DNA, 23 bp, Artificial sequence
  primer
ttatacacaagatttccacattc

SEQ ID NO: 19908 - protein, 707 aa, Artificial sequence
  consensus sequence
  Variant (4)..(29): Xaa in position 4 to 29 is any amino acid
  Variant (30)..(37): Xaa in position 30 to 37 is any or no amino acid
  Variant (42)..(42): Xaa in position 42 is any amino acid
  Variant (44)..(59): Xaa in position 44 to 59 is any amino acid
  Variant (60)..(78): Xaa in position 60 to 78 is any or no amino acid
  Variant (83)..(84): Xaa in position 83 to 84 is any amino acid
  Variant (88)..(89): Xaa in position 88 to 89 is any amino acid
  Variant (91)..(92): Xaa in position 91 to 92 is any amino acid
  Variant (94)..(106): Xaa in position 94 to 106 is any amino acid
  Variant (107)..(116): Xaa in position 107 to 116 is any or no amino acid
  Variant (118)..(118): Xaa in position 118 is any amino acid
  Variant (121)..(121): Xaa in position 121 is any amino acid
  Variant (124)..(126): Xaa in position 124 to 126 is any amino acid
  Variant (130)..(140): Xaa in position 130 to 140 is any amino acid
  Variant (141)..(158): Xaa in position 141 to 158 is any or no amino acid
  Variant (160)..(160): Xaa in position 160 is any amino acid
  Variant (162)..(167): Xaa in position 162 to 167 is any amino acid
  Variant (168)..(168): Xaa in position 168 is any or no amino acid
  Variant (170)..(193): Xaa in position 170 to 193 is any amino acid
  Variant (194)..(220): Xaa in position 194 to 220 is any or no amino acid
  Variant (222)..(257): Xaa in position 222 to 257 is any amino acid
  Variant (258)..(284): Xaa in position 258 to 284 is any or no amino acid
  Variant (288)..(288): Xaa in position 288 is any amino acid
  Variant (290)..(290): Xaa in position 290 is any amino acid
  Variant (304)..(304): Xaa in position 304 is any amino acid
  Variant (307)..(307): Xaa in position 307 is any amino acid
  Variant (321)..(321): Xaa in position 321 is any amino acid
  Variant (323)..(323): Xaa in position 323 is any amino acid
  Variant (325)..(327): Xaa in position 325 to 327 is any amino acid
  Variant (330)..(331): Xaa in position 330 to 331 is any amino acid
  Variant (333)..(333): Xaa in position 333 is any amino acid
  Variant (337)..(337): Xaa in position 337 is any amino acid
  Variant (339)..(339): Xaa in position 339 is any amino acid
  Variant (341)..(365): Xaa in position 341 to 365 is any amino acid
  Variant (366)..(424): Xaa in position 366 to 424 is any or no amino acid
  Variant (426)..(427): Xaa in position 426 to 427 is any amino acid
  Variant (430)..(430): Xaa in position 430 is any amino acid
  Variant (433)..(434): Xaa in position 433 to 434 is any amino acid
  Variant (437)..(438): Xaa in position 437 to 438 is any amino acid
  Variant (444)..(446): Xaa in position 444 to 446 is any amino acid
  Variant (448)..(454): Xaa in position 448 to 454 is any amino acid
  Variant (459)..(460): Xaa in position 459 to 460 is any amino acid
  Variant (466)..(467): Xaa in position 466 to 467 is any amino acid
  Variant (472)..(472): Xaa in position 472 is any amino acid
  Variant (474)..(474): Xaa in position 474 is any amino acid
  Variant (476)..(476): Xaa in position 476 is any amino acid
  Variant (487)..(512): Xaa in position 487 to 512 is any amino acid
  Variant (513)..(529): Xaa in position 513 to 529 is any or no amino acid
  Variant (531)..(533): Xaa in position 531 to 533 is any amino acid
  Variant (536)..(538): Xaa in position 536 to 538 is any amino acid
  Variant (542)..(543): Xaa in position 542 to 543 is any amino acid
  Variant (548)..(548): Xaa in position 548 is any amino acid
  Variant (551)..(552): Xaa in position 551 to 552 is any amino acid
  Variant (555)..(555): Xaa in position 555 is any amino acid
  Variant (558)..(564): Xaa in position 558 to 564 is any amino acid
  Variant (569)..(569): Xaa in position 569 is any amino acid
  Variant (580)..(580): Xaa in position 580 is any amino acid
  Variant (588)..(589): Xaa in position 588 to 589 is any amino acid
  Variant (593)..(593): Xaa in position 593 is any amino acid
  Variant (595)..(596): Xaa in position 595 to 596 is any amino acid
  Variant (599)..(599): Xaa in position 599 is any amino acid
  Variant (601)..(602): Xaa in position 601 to 602 is any amino acid
  Variant (606)..(606): Xaa in position 606 is any amino acid
  Variant (608)..(608): Xaa in position 608 is any amino acid
  Variant (612)..(612): Xaa in position 612 is any amino acid
  Variant (615)..(615): Xaa in position 615 is any amino acid
  Variant (617)..(619): Xaa in position 617 to 619 is any amino acid
  Variant (621)..(621): Xaa in position 621 is any amino acid
  Variant (624)..(624): Xaa in position 624 is any amino acid
  Variant (632)..(632): Xaa in position 632 is any amino acid
  Variant (635)..(635): Xaa in position 635 is any amino acid
  Variant (639)..(639): Xaa in position 639 is any amino acid
  Variant (641)..(642): Xaa in position 641 to 642 is any amino acid
  Variant (645)..(645): Xaa in position 645 is any amino acid
  Variant (647)..(650): Xaa in position 647 to 650 is any amino acid
  Variant (652)..(652): Xaa in position 652 is any amino acid
  Variant (657)..(658): Xaa in position 657 to 658 is any amino acid
  Variant (660)..(661): Xaa in position 660 to 661 is any amino acid
  Variant (663)..(663): Xaa in position 663 is any amino acid
  Variant (665)..(665): Xaa in position 665 is any amino acid
  Variant (669)..(669): Xaa in position 669 is any amino acid
  Variant (676)..(676): Xaa in position 676 is any amino acid
  Variant (679)..(679): Xaa in position 679 is any amino acid
  Variant (683)..(683): Xaa in position 683 is any amino acid
  Variant (688)..(688): Xaa in position 688 is any amino acid
  Variant (695)..(696): Xaa in position 695 to 696 is any amino acid
  Variant (706)..(706): Xaa in position 706 is any amino acid
MGNXXXXXXXXXXXXXXXXXXXXXXXXXXXXXXXXXXGHSFXYXXXXXXXXXXXXXXXXXXXXXXXXXXXXXXXXXXXISGAXXSANXXTXXSXXXXXXXXXXXXXXXXXXXXXXXFXSSXSFXXXPLQXXXXXXXXXXXXXXXXXXXXXXXXXXXXXSXPXXXXXXXSXXXXXXXXXXXXXXXXXXXXXXXXXXXXXXXXXXXXXXXXXXXXXXXXXXXSXXXXXXXXXXXXXXXXXXXXXXXXXXXXXXXXXXXXXXXXXXXXXXXXXXXXXXXXXXXXXXXQWAXGXAGEDRVHVVVSEEXGWXFVGIYDGFNGPDAXDXLXXXLYXXVXRELXGXLXXXXXXXXXXXXXXXXXXXXXXXXXXXXXXXXXXXXXXXXXXXXXXXXXXXXXXXXXXXXXXXXXXXXXXXXXXXXXXXXXXXXHXXVLXALXXALXXTEEAYXXXAXXXXXXXPELAXXGSCVLXXLMKGXDXYXMNVGDSRAVLXXXXXXXXXXXXXXXXXXXXXXXXXXXXXXXXXXXXXXXXXXXLXXXQLXXXHSTXXEEEVXRIXXEHXDDXXXXXXXRVKGXLKVTRAFGAGXLKQPKWNXXLLEXFXXDYXGXXPYIXCXPSLXHHXLXXXDXFLXLSSDGLYXYFXNEEXVXXVEXFXXXXPXGDPAXXLXXEXLXRAAXKAGMDFXELXEIPXGDRRXYHDDVSXXVISLEGRIWXS

SEQ ID NO: 19909 - protein, 60 aa, Artificial sequence
  protein pattern
  Variant (5)..(5): Xaa in position 5 is Phe or Tyr
  Variant (9)..(9): Xaa in position 9 is Ala or Pro
  Variant (11)..(11): Xaa in position 11 is any amino acid
  Variant (13)..(13): Xaa in position 13 is Asp or Asn
  Variant (14)..(14): Xaa in position 14 is any amino acid
  Variant (18)..(18): Xaa in position 18 is any amino acid
  Variant (20)..(21): Xaa in position 20 to 21 is any amino acid
  Variant (24)..(24): Xaa in position 24 is any amino acid
  Variant (26)..(26): Xaa in position 26 is any amino acid
  Variant (27)..(27): Xaa in position 27 is Glu, Ser or Thr
  Variant (31)..(31): Xaa in position 31 is Asn, Ser or Thr
  Variant (33)..(33): Xaa in position 33 is any amino acid
  Variant (37)..(37): Xaa in position 37 is any amino acid
  Variant (40)..(40): Xaa in position 40 is Lys or Arg
  Variant (41)..(41): Xaa in position 41 is Ile or Leu
  Variant (42)..(42): Xaa in position 42 is Gly, Ser or Thr
  Variant (43)..(43): Xaa in position 43 is Ala, Ser or Thr
  Variant (44)..(44): Xaa in position 44 is any amino acid
  Variant (46)..(46): Xaa in position 46 is any amino acid
  Variant (49)..(49): Xaa in position 49 is Ile or Val
  Variant (57)..(57): Xaa in position 57 is Glu or Gln
  Variant (59)..(59): Xaa in position 59 is Phe or Leu
  Variant (60)..(60): Xaa in position 60 is Ser or Thr
FGAGXLKQXKXNXXLLEXFXXDYXGXXPYIXCXPSLXHHXXXXXDXFLXLSSDGLYXYXX

SEQ ID NO: 19910 - protein, 59 aa, Artificial sequence
  protein pattern
  Variant (3)..(3): Xaa in position 3 is any amino acid
  Variant (5)..(5): Xaa in position 5 is any amino acid
  Variant (11)..(11): Xaa in position 11 is Phe or Val
  Variant (14)..(14): Xaa in position 14 is any or no amino acid
  Variant (16)..(16): Xaa in position 16 is any or no amino acid
  Variant (19)..(19): Xaa in position 19 is Asp or Glu
  Variant (20)..(21): Xaa in position 20 to 21 is any amino acid
  Variant (23)..(23): Xaa in position 23 is Leu, Met or Val
  Variant (35)..(35): Xaa in position 35 is Asp or Glu
  Variant (37)..(37): Xaa in position 37 is Pro or Thr
  Variant (39)..(39): Xaa in position 39 is Phe or Tyr
  Variant (41)..(41): Xaa in position 41 is any amino acid
  Variant (42)..(42): Xaa in position 42 is Ala, Asp, Ser or Thr
  Variant (43)..(43): Xaa in position 43 is any amino acid
  Variant (46)..(47): Xaa in position 46 to 47 is any amino acid
  Variant (48)..(48): Xaa in position 48 is Leu or Val
  Variant (49)..(49): Xaa in position 49 is any amino acid
  Variant (53)..(53): Xaa in position 53 is any amino acid
  Variant (55)..(55): Xaa in position 55 is Ile, Leu or Val
  Variant (56)..(56): Xaa in position 56 is Phe or Leu
  Variant (57)..(57): Xaa in position 57 is any amino acid
  Variant (58)..(58): Xaa in position 58 is Asp, Glu or Lys
  Variant (59)..(59): Xaa in position 59 is Asp, Glu or Gln
WAXGXAGEDRXHVXVXSEXXXWXFVGIYDGFNGPXAXDXLXXXLYXXXXRELXGXXXXX

SEQ ID NO: 19911 - protein, 59 aa, Artificial sequence
  protein pattern
  Variant (2)..(2): Xaa in position 2 is any or no amino acid
  Variant (4)..(4): Xaa in position 4 is any or no amino acid
  Variant (8)..(9): Xaa in position 8 to 9 is any amino acid
  Variant (11)..(12): Xaa in position 11 to 12 is any amino acid
  Variant (13)..(13): Xaa in position 13 is Glu or Gln
  Variant (14)..(14): Xaa in position 14 is Ile, Leu or Val
  Variant (16)..(16): Xaa in position 16 is any amino acid
  Variant (20)..(22): Xaa in position 20 to 22 is any amino acid
  Variant (25)..(25): Xaa in position 25 is Asp or Gly
  Variant (27)..(27): Xaa in position 27 is His or Tyr
  Variant (30)..(30): Xaa in position 30 is Ile or Leu
  Variant (31)..(31): Xaa in position 31 is Asp or Glu
  Variant (33)..(33): Xaa in position 33 is Pro or Gln
  Variant (34)..(34): Xaa in position 34 is any amino acid
  Variant (36)..(36): Xaa in position 36 is Asp or Glu
  Variant (39)..(39): Xaa in position 39 is any amino acid
  Variant (45)..(45): Xaa in position 45 is Ser or Thr
  Variant (46)..(46): Xaa in position 46 is Ile or Val
  Variant (47)..(47): Xaa in position 47 is Ile, Met or Val
  Variant (48)..(48): Xaa in position 48 is Ile or Val
  Variant (54)..(54): Xaa in position 54 is Lys or Arg
  Variant (55)..(55): Xaa in position 55 is Ile or Met
  Variant (57)..(57): Xaa in position 57 is Lys or Arg
  Variant (59)..(59): Xaa in position 59 is Cys or Ser
PXEXDPAXXLXXXXLXRAAXXXGMXFXELXXIXXGXRRXYHDDVXXXXISLEGXXWXSX

SEQ ID NO: 19912 - protein, 39 aa, Artificial sequence
  protein pattern
  Variant (2)..(2): Xaa in position 2 is any amino acid
  Variant (3)..(6): Xaa in position 3 to 6 is any or no amino acid
  Variant (10)..(10): Xaa in position 10 is Ala or Gly
  Variant (11)..(11): Xaa in position 11 is Leu or Met
  Variant (12)..(12): Xaa in position 12 is Met or Val
  Variant (18)..(18): Xaa in position 18 is Ala or Val
  Variant (19)..(19): Xaa in position 19 is any amino acid
  Variant (24)..(24): Xaa in position 24 is any amino acid
  Variant (26)..(26): Xaa in position 26 is Ile, Met or Val
  Variant (28)..(28): Xaa in position 28 is Ala, Ile, Leu or Val
  Variant (30)..(30): Xaa in position 30 is Asn or Ser
  Variant (39)..(39): Xaa in position 39 is Ala or Gly
EXXXXXPELXXXGSCVLXXLMKGXDXYXMXVGDSRAVLX

SEQ ID NO: 19913 - protein, 19 aa, Artificial sequence
  protein pattern
  Variant (2)..(3): Xaa in position 2 to 3 is any amino acid
  Variant (4)..(5): Xaa in position 4 to 5 is any or no amino acid
  Variant (9)..(9): Xaa in position 9 is Ala or Ser
  Variant (10)..(10): Xaa in position 10 is Ile, Leu or Val
  Variant (14)..(14): Xaa in position 14 is any amino acid
  Variant (15)..(15): Xaa in position 15 is Ala or Ser
  Variant (16)..(16): Xaa in position 16 is Thr or Val
  Variant (17)..(17): Xaa in position 17 is Ala, Pro or Ser
  Variant (18)..(18): Xaa in position 18 is Ala, Leu or Val
  Variant (19)..(19): Xaa in position 19 is Pro or Ser
FXXXXSGAXXSANXXXXXX

SEQ ID NO: 19914 - protein, 16 aa, Artificial sequence
  protein pattern
  Variant (3)..(3): Xaa in position 3 is Asp, Glu or Lys
  Variant (5)..(5): Xaa in position 5 is Leu or Met
  Variant (6)..(6): Xaa in position 6 is any amino acid
  Variant (7)..(7): Xaa in position 7 is Gln or Arg
  Variant (10)..(10): Xaa in position 10 is any or no amino acid
  Variant (12)..(12): Xaa in position 12 is any or no amino acid
  Variant (15)..(15): Xaa in position 15 is Asp or Glu
  Variant (16)..(16): Xaa in position 16 is Ala or Gly
VLXAXXXALXRXTEXX

SEQ ID NO: 19915 - protein, 17 aa, Artificial sequence
  protein pattern
  Variant (2)..(2): Xaa in position 2 is Glu or His
  Variant (3)..(4): Xaa in position 3 to 4 is Ser or Thr
  Variant (5)..(5): Xaa in position 5 is any amino acid
  Variant (6)..(6): Xaa in position 6 is Asn or Ser
  Variant (8)..(9): Xaa in position 8 to 9 is Ala or Ser
  Variant (10)..(10): Xaa in position 10 is Ala, Ile, Leu or Val
  Variant (13)..(13): Xaa in position 13 is any or no amino acid
  Variant (15)..(15): Xaa in position 15 is Ala, Leu or Pro
  Variant (16)..(16): Xaa in position 16 is any amino acid
  Variant (17)..(17): Xaa in position 17 is Asn or Pro
FXXXXXFXXXPLXQXXX

SEQ ID NO: 19916 - protein, 14 aa, Artificial sequence
  protein pattern
  Variant (2)..(3): Xaa in position 2 to 3 is any amino acid
  Variant (4)..(4): Xaa in position 4 is any or no amino acid
  Variant (9)..(9): Xaa in position 9 is Cys or Thr
  Variant (11)..(11): Xaa in position 11 is Ala, Ile or Val
  Variant (12)..(12): Xaa in position 12 is any amino acid
  Variant (13)..(13): Xaa in position 13 is Ala, Pro or Ser
  Variant (14)..(14): Xaa in position 14 is Ala, Asp or Ser
DXXXGHSFXYXXXX

SEQ ID NO: 19917 - protein, 11 aa, Artificial sequence
  protein pattern
  Variant (2)..(2): Xaa in position 2 is Glu or Lys
  Variant (4)..(4): Xaa in position 4 is Ala or Val
  Variant (5)..(5): Xaa in position 5 is Ile or Val
  Variant (6)..(7): Xaa in position 6 to 7 is any amino acid
  Variant (9)..(9): Xaa in position 9 is Ala, Asp or Glu
  Variant (10)..(10): Xaa in position 10 is any amino acid
NXEXXXXVXXF

SEQ ID NO: 19918 - protein, 14 aa, Artificial sequence
  protein pattern
  Variant (2)..(2): Xaa in position 2 is Leu or Met
  Variant (3)..(3): Xaa in position 3 is Asp or Ser
  Variant (5)..(5): Xaa in position 5 is any amino acid
  Variant (6)..(6): Xaa in position 6 is Ile or Leu
  Variant (7)..(7): Xaa in position 7 is Asp or Glu
  Variant (8)..(8): Xaa in position 8 is Arg or Ser
  Variant (9)..(9): Xaa in position 9 is Ala or Gly
  Variant (10)..(12): Xaa in position 10 to 12 is any amino acid
  Variant (13)..(13): Xaa in position 13 is Gly or Ser
  Variant (14)..(14): Xaa in position 14 is Gly, Pro or Ser
FXXGXXXXXXXXXX

SEQ ID NO: 19919 - DNA, 1308 bp, Arabidopsis thaliana
  CDS (1)..(1308)
atgccagagatcgagattgccgccggcagcggcgacaacaacgacgccttattcggtaaatatgagctcggaaagcttctcggatgcggcgcattcgccaaagtcttccacgcacgtgatcgtcgtaccggccaaagcgtcgccgtgaaaatcctcaacaagaaaaaactcctcacaaatccagctctagccaacaacatcaaacgcgagatctcaatcatgagaagattatctcatccaaacatcgtcaagctccacgaagtaatggcgacaaaatcaaagatcttcttcgcaatggagtttgttaaaggaggagaactattcaacaaaatctcaaaacatggacgtcttagcgaagatttaagccggagatatttccagcaactgatctccgccgttggttattgccacgctcgcggtgtttaccaccgcgatctcaaaccagagaatctattaatagacgaaaacggaaacttaaaagtttccgatttcggtctaagcgcgttaacggatcagatccgacccgatgggttgttacataccttgtgtggtactccggcgtacgttgcgccggagattctatctaaaaaaggatatgaaggtgctaaagttgatgtatggtcttgtggaatcgtcttgttcgttctcgtcgccggttatttaccgtttaacgatccgaatgtgatgaatatgtataagaagatttataaaggagagtatcgttttcctcgttggatgtctccagatctgaaacgattcgtttctcgtcttttagatattaatcctgagactagaatcaccattgatgagattttgaaagatccttggtttgttagaggaggttttaaacagatcaagttccacgatgacgagatcgaagatcagaaagtggaatcgtcactagaagctgtgaagagtttaaacgcgtttgatttgatttcttactcgtcgggattggatttgtcgggattgtttgctggttgtagtaattcgagtggtgaatcggagaggtttttatcggaaaagtcgccggagatgttggcggaggaagtggaggggtttgcgagagaggagaatctgaggatgaagaagaagaaggaggaagagtatgggtttgagatggaggggcaaaatgggaaatttggtatcgggatttgtatttcgcggttgaatgatttgcttgtggtggtggaggcacggcggagaggtggtgatggtgattgttataaggagatgtggaatggtaaactcagggttcaacttattcgcgtttgcgatcagacgtcgtcaacaaacgcggctatttaa

SEQ ID NO: 19920 - protein, 435 aa, Arabidopsis thaliana
MPEIEIAAGSGDNNDALFGKYELGKLLGCGAFAKVFHARDRRTGQSVAVKILNKKKLLTNPALANNIKREISIMRRLSHPNIVKLHEVMATKSKIFFAMEFVKGGELFNKISKHGRLSEDLSRRYFQQLISAVGYCHARGVYHRDLKPENLLIDENGNLKVSDFGLSALTDQIRPDGLLHTLCGTPAYVAPEILSKKGYEGAKVDVWSCGIVLFVLVAGYLPFNDPNVMNMYKKIYKGEYRFPRWMSPDLKRFVSRLLDINPETRITIDEILKDPWFVRGGFKQIKFHDDEIEDQKVESSLEAVKSLNAFDLISYSSGLDLSGLFAGCSNSSGESERFLSEKSPEMLAEEVEGFAREENLRMKKKKEEEYGFEMEGQNGKFGIGICISRLNDLLVVVEARRRGGDGDCYKEMWNGKLRVQLIRVCDQTSSTNAAI

SEQ ID NO: 19921 - DNA, 1938 bp, Glycine max
  CDS (265)..(1584)
gcaccaacttataaaccagtccgcgattctccaacgccgttgttgtttcctgaaacttctcaaacagaagcaacttaagccagcaaagaacaacctttaaaccaattcattcaaaattacgtttcttgcttcgcttcccccaacccacaatttcctctcaatttccctgatcctatttaaaccaactcacattaaccctcaatttcccaaaccgatcgtgttctctctcacgagagcacggtcgccgaagaagtaagaaaaccaatgccagaaaccgaaagcgcggcggcggcggcggtggaggaggagaacaacaccgccctgttcggaaaatacgaggttggaaggctcctaggatgcggcgcgttcgcgaaggtgtaccacgcgcgcaacaccgagactgggcagagcgtggcggttaaagtcataagcaaaaagaaactaaactcgtcagggttagcttccaacgtgaaacgcgagatttccatcatgagccgcctccaccacccaaacatcgtgaaactccacgaagtgctcgctacaaaaacgaagatctactttatcttggaattcgcgaagggcggcgagctcttcgcgagaatcgcgaagagccgattcagcgaagatctcgcgagacggtattttcagcagctcatctccgccgtcgggtactgccacgcgcgcggcgttttccaccgcgacctgaagccggagaatctcctgctggacgagcagggcaaccttaaagtctccgactttggactcagcgcggtgaaggaccagataggggtggacgggttgcttcacacgctgtgtgggacccctgcttacgtggcacccgagattctcgcgaagaagggttacgatggggcgaaggttgatgtttggtcatgtgggattatcctctttgttcttgtcgctgggtatcttccgtttaatgatcctaatttgatggttatgtataagaagatttacaaaggggagtttcggtgtccgaggtggttttcgatggagttaaggaggattctgacgaggttgttggatacgaatcctgatacgagaataaccgttgatgagatcatgaaggacacgtggtttaagaaggggtataaggaggtaaagtttggggatttgggtttggagtggaagagtgagggtgagggtgtcaaggatttgaatgcttttgatataatttcgttttctacggggttgaatctttctgggttgtttgattcgtcgtgtggggtggaggagggggagaggtttttgctcagggagtcgccggagaaggtggtggagatgctggtggcggcggcggagaaggagggggttgtggtgaggatgaggaaggagtgtggggtggagttggaggggtgtgggggtaatttcgctgctttggtggaggtgtaccggttaccgggagagctggttgtggtggaggttagaagaagggatggggatggtggggtttttagggatgtgtggaggaataagctgaggccgtgtttgtgtgctgcgagtagcagtacgacgtcggatcgggatggaacaactttggcgcagccggttgccggtgattcatgattaggggttattatttttttctctctctcttctttttaattcctaattttaaataaaattgaaaaaaaataggcaggtggaggtttgaaaattgaaatgtgttatggccgaaatgtaatattggctggccattgtgaagtgggggcacaaatggatttggaacacttgtgtgaccaagggtgcattgcaagttaatgatgtatatttttatgatgcttatgtgtaaagtatactttttgcttcgcaaaaaaaaaaagataaacaaaactaaatttctacgcacaaacgccagataatcccgataaagctctataacttagggctccctttacggttccctattcacaaacttgg

SEQ ID NO: 19922 - protein, 439 aa, Glycine max
MPETESAAAAAVEEENNTALFGKYEVGRLLGCGAFAKVYHARNTETGQSVAVKVISKKKLNSSGLASNVKREISIMSRLHHPNIVKLHEVLATKTKIYFILEFAKGGELFARIAKSRFSEDLARRYFQQLISAVGYCHARGVFHRDLKPENLLLDEQGNLKVSDFGLSAVKDQIGVDGLLHTLCGTPAYVAPEILAKKGYDGAKVDVWSCGIILFVLVAGYLPFNDPNLMVMYKKIYKGEFRCPRWFSMELRRILTRLLDTNPDTRITVDEIMKDTWFKKGYKEVKFGDLGLEWKSEGEGVKDLNAFDIISFSTGLNLSGLFDSSCGVEEGERFLLRESPEKVVEMLVAAAEKEGVVVRMRKECGVELEGCGGNFAALVEVYRLPGELVVVEVRRRDGDGGVFRDVWRNKLRPCLCAASSSTTSDRDGTTLAQPVAGDS

SEQ ID NO: 19923 - DNA, 1449 bp, Arabidopsis thaliana; identical to SEQ ID NO: 1821
  CDS (1)..(1449)

SEQ ID NO: 19924 - protein, 482 aa, Arabidopsis thaliana; identical to SEQ ID NO: 1822

SEQ ID NO: 19925 - DNA, 1278 bp, Arabidopsis thaliana; identical to SEQ ID NO: 1823
  CDS (1)..(1278)

SEQ ID NO: 19926 - protein, 425 aa, Arabidopsis thaliana; identical to SEQ ID NO: 1824

SEQ ID NO: 19927 - DNA, 1536 bp, Oryza sativa (japonica cultivar-group); identical to SEQ ID NO: 2091
  CDS (1)..(1536)

SEQ ID NO: 19928 - protein, 511 aa, Oryza sativa (japonica cultivar-group); identical to SEQ ID NO: 2092

SEQ ID NO: 19929 - DNA, 1386 bp, Oryza sativa (japonica cultivar-group); identical to SEQ ID NO: 2093
  CDS (1)..(1386)

SEQ ID NO: 19930 - protein, 461 aa, Oryza sativa (japonica cultivar-group); identical to SEQ ID NO: 2094

SEQ ID NO: 19931 - DNA, 1386 bp, Oryza sativa (japonica cultivar-group); identical to SEQ ID NO: 2095
  CDS (1)..(1386)

SEQ ID NO: 19932 - protein, 461 aa, Oryza sativa (japonica cultivar-group); identical to SEQ ID NO: 2096

SEQ ID NO: 19933 - DNA, 1341 bp, Oryza sativa (japonica cultivar-group); identical to SEQ ID NO: 2101
  CDS (1)..(1341)

SEQ ID NO: 19934 - protein, 446 aa, Oryza sativa (japonica cultivar-group); identical to SEQ ID NO: 2102

SEQ ID NO: 19935 - DNA, 1431 bp, Oryza sativa (japonica cultivar-group); identical to SEQ ID NO: 2103
  CDS (1)..(1431)

SEQ ID NO: 19936 - protein, 476 aa, Oryza sativa (japonica cultivar-group); identical to SEQ ID NO: 2104

SEQ ID NO: 19937 - DNA, 1623 bp, Oryza sativa (japonica cultivar-group); identical to SEQ ID NO: 2105
  CDS (1)..(1623)

SEQ ID NO: 19938 - protein, 540 aa, Oryza sativa (japonica cultivar-group); identical to SEQ ID NO: 2106

SEQ ID NO: 19939 - DNA, 1509 bp, Oryza sativa (japonica cultivar-group); identical to SEQ ID NO: 2107
  CDS (1)..(1509)

SEQ ID NO: 19940 - protein, 502 aa, Oryza sativa (japonica cultivar-group); identical to SEQ ID NO: 2108

SEQ ID NO: 19941 - DNA, 1482 bp, Oryza sativa (japonica cultivar-group); identical to SEQ ID NO: 2109
  CDS (1)..(1482)

SEQ ID NO: 19942 - protein, 493 aa, Oryza sativa (japonica cultivar-group); identical to SEQ ID NO: 2110

SEQ ID NO: 19943 - DNA, 1311 bp, Oryza sativa (japonica cultivar-group); identical to SEQ ID NO: 2111
  CDS (1)..(1311)

SEQ ID NO: 19944 - protein, 436 aa, Oryza sativa (japonica cultivar-group); identical to SEQ ID NO: 2112

SEQ ID NO: 19945 - DNA, 1629 bp, Oryza sativa (japonica cultivar-group); identical to SEQ ID NO: 1825
  CDS (1)..(1629)

SEQ ID NO: 19946 - protein, 542 aa, Oryza sativa (japonica cultivar-group); identical to SEQ ID NO: 1826

SEQ ID NO: 19947 - DNA, 1356 bp, Oryza sativa (japonica cultivar-group); identical to SEQ ID NO: 2121
  CDS (1)..(1356)

SEQ ID NO: 19948 - protein, 451 aa, Oryza sativa (japonica cultivar-group); identical to SEQ ID NO: 2122

SEQ ID NO: 19949 - DNA, 1344 bp, Oryza sativa (japonica cultivar-group); identical to SEQ ID NO: 2125
  CDS (1)..(1344)

SEQ ID NO: 19950 - protein, 447 aa, Oryza sativa (japonica cultivar-group); identical to SEQ ID NO: 2126

SEQ ID NO: 19951 - DNA, 1365 bp, Oryza sativa (japonica cultivar-group); identical to SEQ ID NO: 2129
  CDS (1)..(1365)

SEQ ID NO: 19952 - protein, 454 aa, Oryza sativa (japonica cultivar-group); identical to SEQ ID NO: 2130

SEQ ID NO: 19953 - DNA, 1401 bp, Oryza sativa (japonica cultivar-group); identical to SEQ ID NO: 2131
  CDS (1)..(1401)

SEQ ID NO: 19954 - protein, 466 aa, Oryza sativa (japonica cultivar-group); identical to SEQ ID NO: 2132

SEQ ID NO: 19955 - DNA, 1374 bp, Oryza sativa (japonica cultivar-group); identical to SEQ ID NO: 2133
  CDS (1)..(1374)

SEQ ID NO: 19956 - protein, 457 aa, Oryza sativa (japonica cultivar-group); identical to SEQ ID NO: 2134

SEQ ID NO: 19957 - DNA, 1527 bp, Oryza sativa (japonica cultivar-group); identical to SEQ ID NO: 2139
  CDS (1)..(1527)

SEQ ID NO: 19958 - protein, 508 aa, Oryza sativa (japonica cultivar-group); identical to SEQ ID NO: 2140

SEQ ID NO: 19959 - DNA, 1362 bp, Oryza sativa (japonica cultivar-group); identical to SEQ ID NO: 2145
  CDS (1)..(1362)

SEQ ID NO: 19960 - protein, 453 aa, Oryza sativa (japonica cultivar-group); identical to SEQ ID NO: 2146

SEQ ID NO: 19961 - DNA, 1353 bp, Oryza sativa (japonica cultivar-group); identical to SEQ ID NO: 2147
  CDS (1)..(1353)

SEQ ID NO: 19962 - protein, 450 aa, Oryza sativa (japonica cultivar-group); identical to SEQ ID NO: 2148

SEQ ID NO: 19963 - DNA, 1332 bp, Oryza sativa (japonica cultivar-group); identical to SEQ ID NO: 2157
  CDS (1)..(1332)

SEQ ID NO: 19964 - protein, 443 aa, Oryza sativa (japonica cultivar-group); identical to SEQ ID NO: 2158

SEQ ID NO: 19965 - DNA, 1338 bp, Oryza sativa (japonica cultivar-group); identical to SEQ ID NO: 2159
  CDS (1)..(1338)

SEQ ID NO: 19966 - protein, 445 aa, Oryza sativa (japonica cultivar-group); identical to SEQ ID NO: 2160

SEQ ID NO: 19967 - DNA, 1215 bp, Oryza sativa (japonica cultivar-group); identical to SEQ ID NO: 2165
  CDS (1)..(1215)

SEQ ID NO: 19968 - protein, 404 aa, Oryza sativa (japonica cultivar-group); identical to SEQ ID NO: 2166

SEQ ID NO: 19969 - DNA, 1305 bp, Oryza sativa (japonica cultivar-group); identical to SEQ ID NO: 2167
  CDS (1)..(1305)

SEQ ID NO: 19970 - protein, 434 aa, Oryza sativa (japonica cultivar-group); identical to SEQ ID NO: 2168

SEQ ID NO: 19971 - DNA, 1320 bp, Oryza sativa (japonica cultivar-group); identical to SEQ ID NO: 2171
  CDS (1)..(1320)

SEQ ID NO: 19972 - protein, 439 aa, Oryza sativa (japonica cultivar-group); identical to SEQ ID NO: 2172

SEQ ID NO: 19973 - DNA, 1317 bp, Oryza sativa (japonica cultivar-group); identical to SEQ ID NO: 2173
  CDS (1)..(1317)

SEQ ID NO: 19974 - protein, 438 aa, Oryza sativa (japonica cultivar-group); identical to SEQ ID NO: 2174

SEQ ID NO: 19975 - DNA, 1344 bp, Arabidopsis thaliana; identical to SEQ ID NO: 1831
  CDS (1)..(1344)

SEQ ID NO: 19976 - protein, 447 aa, Arabidopsis thaliana; identical to SEQ ID NO: 1832

SEQ ID NO: 19977 - DNA, 1563 bp, Arabidopsis thaliana; identical to SEQ ID NO: 1833
  CDS (1)..(1563)

SEQ ID NO: 19978 - protein, 520 aa, Arabidopsis thaliana; identical to SEQ ID NO: 1834

SEQ ID NO: 19979 - DNA, 1410 bp, Arabidopsis thaliana; identical to SEQ ID NO: 1839
  CDS (1)..(1410)

SEQ ID NO: 19980 - protein, 469 aa, Arabidopsis thaliana; identical to SEQ ID NO: 1840

SEQ ID NO: 19981 - DNA, 1509 bp, Arabidopsis thaliana; identical to SEQ ID NO: 1841
  CDS (1)..(1509)

SEQ ID NO: 19982 - protein, 502 aa, Arabidopsis thaliana; identical to SEQ ID NO: 1842

SEQ ID NO: 19983 - DNA, 1368 bp, Arabidopsis thaliana; identical to SEQ ID NO: 1843
  CDS (1)..(1368)

SEQ ID NO: 19984 - protein, 455 aa, Arabidopsis thaliana; identical to SEQ ID NO: 1844

SEQ ID NO: 19985 - DNA, 1290 bp, Arabidopsis thaliana; identical to SEQ ID NO: 1815
  CDS (1)..(1290)

SEQ ID NO: 19986 - protein, 429 aa, Arabidopsis thaliana; identical to SEQ ID NO: 1816

SEQ ID NO: 19987 - DNA, 1281 bp, Arabidopsis thaliana; identical to SEQ ID NO: 1845
  CDS (1)..(1281)

SEQ ID NO: 19988 - protein, 426 aa, Arabidopsis thaliana; identical to SEQ ID NO: 1846

SEQ ID NO: 19989 - DNA, 1470 bp, Arabidopsis thaliana; identical to SEQ ID NO: 1847
  CDS (1)..(1470)

SEQ ID NO: 19990 - protein, 489 aa, Arabidopsis thaliana; identical to SEQ ID NO: 1848

SEQ ID NO: 19991 - DNA, 1338 bp, Arabidopsis thaliana; identical to SEQ ID NO: 1849
  CDS (1)..(1338)

SEQ ID NO: 19992 - protein, 445 aa, Arabidopsis thaliana; identical to SEQ ID NO: 1850

SEQ ID NO: 19993 - DNA, 1326 bp, Arabidopsis thaliana; identical to SEQ ID NO: 1851
  CDS (1)..(1326)

SEQ ID NO: 19994 - protein, 441 aa, Arabidopsis thaliana [sequence omitted]

SEQ ID NO: 19995 - DNA, 1329 bp, Arabidopsis thaliana; identical to SEQ ID NO: 1853
  CDS (1)..(1329)

SEQ ID NO: 19996 - protein, 442 aa, Arabidopsis thaliana; identical to SEQ ID NO: 1854

SEQ ID NO: 19997 - DNA, 1371 bp, Arabidopsis thaliana; identical to SEQ ID NO: 1855
  CDS (1)..(1371)

SEQ ID NO: 19998 - protein, 456 aa, Arabidopsis thaliana; identical to SEQ ID NO: 1856

SEQ ID NO: 19999 - DNA, 1452 bp, Arabidopsis thaliana; identical to SEQ ID NO: 1857
  CDS (1)..(1452)

SEQ ID NO: 20000 - protein, 483 aa, Arabidopsis thaliana; identical to SEQ ID NO: 1858

SEQ ID NO: 20001 - DNA, 1320 bp, Arabidopsis thaliana; identical to SEQ ID NO: 1859
  CDS (1)..(1320)

SEQ ID NO: 20002 - protein, 439 aa, Arabidopsis thaliana; identical to SEQ ID NO: 1860

SEQ ID NO: 20003 - DNA, 1338 bp, Arabidopsis thaliana; identical to SEQ ID NO: 1861
  CDS (1)..(1338)

SEQ ID NO: 20004 - protein, 445 aa, Arabidopsis thaliana; identical to SEQ ID NO: 1862

SEQ ID NO: 20005 - DNA, 1467 bp, Arabidopsis thaliana; identical to SEQ ID NO: 1863
  CDS (1)..(1467)

SEQ ID NO: 20006 - protein, 488 aa, Arabidopsis thaliana; identical to SEQ ID NO: 1864

SEQ ID NO: 20007 - DNA, 1440 bp, Arabidopsis thaliana; identical to SEQ ID NO: 1867
  CDS (1)..(1440)

SEQ ID NO: 20008 - protein, 479 aa, Arabidopsis thaliana; identical to SEQ ID NO: 1868

SEQ ID NO: 20009 - DNA, 1350 bp, Arabidopsis thaliana; identical to SEQ ID NO: 1869
  CDS (1)..(1350)

SEQ ID NO: 20010 - protein, 449 aa, Arabidopsis thaliana; identical to SEQ ID NO: 1870

SEQ ID NO: 20011 - DNA, 1356 bp, Arabidopsis thaliana; identical to SEQ ID NO: 1871
  CDS (1)..(1356)

SEQ ID NO: 20012 - protein, 451 aa, Arabidopsis thaliana; identical to SEQ ID NO: 1872

SEQ ID NO: 20013 - DNA, 1326 bp, Arabidopsis thaliana; identical to SEQ ID NO: 1877
  CDS (1)..(1326)

SEQ ID NO: 20014 - protein, 441 aa, Arabidopsis thaliana; identical to SEQ ID NO: 1878

SEQ ID NO: 20015 - DNA, 1356 bp, Arabidopsis thaliana; identical to SEQ ID NO: 1879
  CDS (1)..(1356)

SEQ ID NO: 20016 - protein, 451 aa, Arabidopsis thaliana; identical to SEQ ID NO: 1880

SEQ ID NO: 20017 - DNA, 1320 bp, Arabidopsis thaliana; identical to SEQ ID NO: 1881
  CDS (1)..(1320)

SEQ ID NO: 20018 - protein, 439 aa, Arabidopsis thaliana; identical to SEQ ID NO: 1882

SEQ ID NO: 20019 - DNA, 1694 bp, Populus trichocarpa; identical to SEQ ID NO: 18405
  CDS (245)..(1564)

SEQ ID NO: 20020 - protein, 439 aa, Populus trichocarpa; identical to SEQ ID NO: 1914

SEQ ID NO: 20021 - DNA, 1314 bp, Populus trichocarpa; identical to SEQ ID NO: 1915
  CDS (1)..(1314)

SEQ ID NO: 20022 - protein, 437 aa, Populus trichocarpa; identical to SEQ ID NO: 1916

SEQ ID NO: 20023 - DNA, 1356 bp, Populus trichocarpa; identical to SEQ ID NO: 1919
  CDS (1)..(1356)

SEQ ID NO: 20024 - protein, 451 aa, Populus trichocarpa; identical to SEQ ID NO: 1920

SEQ ID NO: 20025 - DNA, 1792 bp, Populus trichocarpa; identical to SEQ ID NO: 18419
  CDS (252)..(1535)

SEQ ID NO: 20026 - protein, 427 aa, Populus trichocarpa; identical to SEQ ID NO: 1928

SEQ ID NO: 20027 - DNA, 1257 bp, Populus trichocarpa; identical to SEQ ID NO: 1929
  CDS (1)..(1257)

SEQ ID NO: 20028 - protein, 418 aa, Populus trichocarpa; identical to SEQ ID NO: 1930

SEQ ID NO: 20029 - DNA, 1374 bp, Populus trichocarpa; identical to SEQ ID NO: 1933
  CDS (1)..(1374)

SEQ ID NO: 20030 - protein, 457 aa, Populus trichocarpa; identical to SEQ ID NO: 1934

SEQ ID NO: 20031 - DNA, 1872 bp, Populus trichocarpa; identical to SEQ ID NO: 18429
  CDS (1)..(1293)

SEQ ID NO: 20032 - protein, 430 aa, Populus trichocarpa; identical to SEQ ID NO: 1938

SEQ ID NO: 20033 - DNA, 1774 bp, Populus trichocarpa; identical to SEQ ID NO: 18431
  CDS (143)..(1555)

SEQ ID NO: 20034 - protein, 470 aa, Populus trichocarpa; identical to SEQ ID NO: 1940

SEQ ID NO: 20035 - DNA, 1460 bp, Populus trichocarpa; identical to SEQ ID NO: 18441
  CDS (1)..(1296)

SEQ ID NO: 20036 - protein, 431 aa, Populus trichocarpa; identical to SEQ ID NO: 1950

SEQ ID NO: 20037 - DNA, 1362 bp, Zea mays; identical to SEQ ID NO: 1955
  CDS (1)..(1362)

SEQ ID NO: 20038 - protein, 453 aa, Zea mays; identical to SEQ ID NO: 1956

SEQ ID NO: 20039 - DNA, 1395 bp, Zea mays; identical to SEQ ID NO: 1957
  CDS (1)..(1395)

SEQ ID NO: 20040 - protein, 464 aa, Zea mays; identical to SEQ ID NO: 1958

SEQ ID NO: 20041 - DNA, 1338 bp, Brassica juncea; identical to SEQ ID NO: 1959
  CDS (1)..(1338)

SEQ ID NO: 20042 - protein, 445 aa, Brassica juncea; identical to SEQ ID NO: 1960

SEQ ID NO: 20043 - DNA, 1536 bp, Oryza sativa subsp; identical to SEQ ID NO: 18455
  CDS (1)..(1536)

SEQ ID NO: 20044 - protein, 511 aa, Oryza sativa subsp; identical to SEQ ID NO: 18456

SEQ ID NO: 20045 - DNA, 1437 bp, Oryza sativa subsp; identical to SEQ ID NO: 1963
  CDS (1)..(1437)

SEQ ID NO: 20046 - protein, 478 aa, Oryza sativa subsp; identical to SEQ ID NO: 1964

SEQ ID NO: 20047 - DNA, 1482 bp, Oryza sativa subsp; identical to SEQ ID NO: 18463
  CDS (1)..(1482)

SEQ ID NO: 20048 - protein, 493 aa, Oryza sativa subsp; identical to SEQ ID NO: 18464

SEQ ID NO: 20049 - DNA, 1392 bp, Oryza sativa subsp; identical to SEQ ID NO: 18467
  CDS (1)..(1392)

SEQ ID NO: 20050 - protein, 463 aa, Oryza sativa subsp; identical to SEQ ID NO: 18468

SEQ ID NO: 20051 - DNA, 1530 bp, Oryza sativa subsp; identical to SEQ ID NO: 18469
  CDS (1)..(1530)

SEQ ID NO: 20052 - protein, 509 aa, Oryza sativa subsp; identical to SEQ ID NO: 18470

SEQ ID NO: 20053 - DNA, 1299 bp, Oryza sativa subsp; identical to SEQ ID NO: 18471
  CDS (1)..(1299)

SEQ ID NO: 20054 - protein, 432 aa, Oryza sativa subsp; identical to SEQ ID NO: 18472

SEQ ID NO: 20055 - DNA, 1371 bp, Oryza sativa subsp; identical to SEQ ID NO: 18475
  CDS (1)..(1371)

SEQ ID NO: 20056 - protein, 456 aa, Oryza sativa subsp; identical to SEQ ID NO: 18476

SEQ ID NO: 20057 - DNA, 1944 bp, Oryza sativa subsp; identical to SEQ ID NO: 2137
  CDS (1)..(1944)

SEQ ID NO: 20058 - protein, 647 aa, Oryza sativa subsp; identical to SEQ ID NO: 2138

SEQ ID NO: 20059 - DNA, 1455 bp, Oryza sativa subsp
  CDS (1)..(1455)
atgagcgtgtcgggcgggaggacgcgggtggggaggtacgagctcgggaggacgctcggcgagggcaccttcgccaaggtcaagttcgcccgcaacgcggactccggcgagaatgtcgccatcaagatcctcgacaaggacaaggtcctcaagcacaagatgatcgcccagataaagcgcgagatctccaccatgaagctcatcaggcaccccaacgtcatccggatgcatgaggtgatggccagcaagaccaaaatatacatagtgatggagcttgtcaccggtggtgaacttttcgacaagattgcttcgcgtgggaggctgaaagaggatgatgcaaggaagtattttcagcagctgatcaacgctgtcgattactgtcatagcagaggagtctatcaccgggatctcaagcccgaaaatcttctgcttgatgctagtggcactctcaaagtatcagattttgggctgagtgcactgtctcaacaagtcagagaggatggtctgttgcacactacctgtggaactcctaattatgttgctcccgaggttatcaacaacaaaggatatgatggagccaaggctgatctgtggtcatgtggagtgattctctttgtcctcatggcaggctaccttccatttgaagactcaaacctcatgtcactttacaagaagatcttcaaagcagacttcagttgcccgtcttggttctctacaagtgcgaagaagctcatcaagaaaatactagatcctaatcctagcaccaggataaccatcgcagagcttatcaacaatgagtggttcaagaagggatatcagcctccaaggtttgagacagcagatgttaacctggatgatatcaactctatttttaatgaatctggggaccaaacacagcttgttgtcgagaggcgagaagagaggccatcagtgatgaatgcttttgagttgatctctacatctcagggtctcaatcttggcacactctttgaaaagccatcgcagggttctgtgaagcgagaaacaagatttgcatcaaggctgcctgcaaacgagatattgtcgaaaattgaagcagctgctggacccatgggctttaatgtacagaagcgcaactacaagctgaagttgcaaggagagaatccaggaaggaaagcttgtgctactactctttcctgggtttatagactgaaatcagttcatccatttctaaaggtttttgaagtcacgccctcgctgtacatggttgagctccgcaaatctaacggcgacactcttgaattccataagggatggcagtcgggcacgggcagtgagataattcatatccgcgggtatgcccgttactacatgacgggcaaggaacactacccatgcccgttgcccgcgtttactcatcacatactcacggttcaacgctttaaccccaaacagagagacattatcacagtttaa

SEQ ID NO: 20060 - protein, 484 aa, Oryza sativa subsp
MSVSGGRTRVGRYELGRTLGEGTFAKVKFARNADSGENVAIKILDKDKVLKHKMIAQIKREISTMKLIRHPNVIRMHEVMASKTKIYIVMELVTGGELFDKIASRGRLKEDDARKYFQQLINAVDYCHSRGVYHRDLKPENLLLDASGTLKVSDFGLSALSQQVREDGLLHTTCGTPNYVAPEVINNKGYDGAKADLWSCGVILFVLMAGYLPFEDSNLMSLYKKIFKADFSCPSWFSTSAKKLIKKILDPNPSTRITIAELINNEWFKKGYQPPRFETADVNLDDINSIFNESGDQTQLVVERREERPSVMNAFELISTSQGLNLGTLFEKPSQGSVKRETRFASRLPANEILSKIEAAAGPMGFNVQKRNYKLKLQGENPGRKACATTLSWVYRLKSVHPFLKVFEVTPSLYMVELRKSNGDTLEFHKGWQSGTGSEIIHIRGYARYYMTGKEHYPCPLPAFTHHILTVQRFNPKQRDIITV

SEQ ID NO: 20061 - DNA, 1617 bp, Oryza sativa subsp
  CDS (1)..(1617)
atggcgaccgtctcgccggcgcggagggagccgacgccgcaggcggtgcgggcgtccccgatgccatcggcggcggcggcgttggtgaggagaggcggtggtggtagcggggggacggtgctggggaagtacgagctggggcgcgtcctgggacagggctcgttcgcgaaggtgtaccaggcgaggcacctggagaccgacgagtgcgtggcaatcaaggtgctcgacaaggagaaggccgtgaagggcgggatggtccacctcgtcaagcgcgagatcaacgtgctccgccgggtgcgccacccgaacatcgtgcagctgttcgaggtaatggccagcaagaccaagatctacttcgtcatggagtatgtccgcggcggcgagctcttctcccgcgtctccaagggacgcctcagggaggacaccgcgcggcgctacttccagcagcttgtctccgccgtcgacttctgccacgcccgcggcgtgttccaccgtgacctcaagcccgagaacctcctcgtggatgagaacggggacttgaaggtctcggacttcggcctcgccgccggccccgaccagttcgaccccgacggtctgctccacacgttctgcggcacgccggcctacgtcgcccccgaggtgctcaggcgccgcggatacgacggcgccaaggcggacatatggtcatgcggtgtcatcctctttgcgctcatggccgggtacctccctttccatgaccacaacatcatggttctgtaccggaagatctacaatggggagttcaggtgtccaaggtggttctccaaggattttactagattgataacgcgccttcttgacgcaaaccccaaaactaggatcaccgtgccagagatcattgagagcgattggttcaagaaaggatacaagccagtcaagttttacattgaggatgacaagctctacaacctgtctgatgacgtgctgaacttggagcctgctgatcctgttcccccaccattgggtttggcacctcctgttcctccacctccacaaggggatgatcctgatggttcagggtctgagtcagattcatcagtcgtatcctgcccggccacattgtcaactggggagagccagagagtccgtgggtcactaccacgcccagcaagccttaatgcatttgatatcatatcattctcaaaaggattcaacttgtctgggctgtttgaggagagggggaacgagatcaggtttgtatctggtgagcccatgtctgacattgtaaaaaagctggaggagattgcaaaggtcaagagcttcacagtgcggaggaaggactggcgggtgagcatagagggtacacgcgaaggagttaaggggcctctaaccataggcgcggagatatttgagcttacaccctcccttgtagtagtggaagtaaaaagaaaggcaggtgataatgaagagtatgaggatttctgcaacatggagttgaagccaggaatgcagcaccttgtgcaccagatgctcccagctccaaatggaactcctgtgagtgagaaggttgaaaggtcttcaagcttacaggctcccctcaccctgaagttgataggaacagaaggcagcatgagctag

SEQ ID NO: 20062 - protein, 538 aa, Oryza sativa subsp
MATVSPARREPTPQAVRASPMPSAAAALVRRGGGGSGGTVLGKYELGRVLGQGSFAKVYQARHLETDECVAIKVLDKEKAVKGGMVHLVKREINVLRRVRHPNIVQLFEVMASKTKIYFVMEYVRGGELFSRVSKGRLREDTARRYFQQLVSAVDFCHARGVFHRDLKPENLLVDENGDLKVSDFGLAAGPDQFDPDGLLHTFCGTPAYVAPEVLRRRGYDGAKADIWSCGVILFALMAGYLPFHDHNIMVLYRKIYNGEFRCPRWFSKDFTRLITRLLDANPKTRITVPEIIESDWFKKGYKPVKFYIEDDKLYNLSDDVLNLEPADPVPPPLGLAPPVPPPPQGDDPDGSGSESDSSVVSCPATLSTGESQRVRGSLPRPASLNAFDIISFSKGFNLSGLFEERGNEIRFVSGEPMSDIVKKLEEIAKVKSFTVRRKDWRVSIEGTREGVKGPLTIGAEIFELTPSLVVVEVKRKAGDNEEYEDFCNMELKPGMQHLVHQMLPAPNGTPVSEKVERSSSLQAPLTLKLIGTEGSMS

SEQ ID NO: 20063 - DNA, 1494 bp, Oryza sativa subsp
  CDS (1)..(1494)
atggccgcgaccccgccgtcgtcgcagcaccggcggccgctgtcctcctccgcctccgccgcctccctcgctggcaagccgcgggggggcgggctcctgctcgggcggtacgagctcggccgcctcctcggccacggcaccttcgccaaggtgtaccaggcgcggagcgcggattccggggagccggtcgcgatcaaggtgctcgacaaggagaaggcgatgcggcacggcctcgtcccgcacatcaagcgggagatcgccatcctccgccgcgtgatggccaccaagtccaagatctacttcgtgatggagctcgtccgcggcggggagctgttcggccgcgtcgccaaggggcggctcaaggaggacaccgcgcggcgctacttccagcagctcgtctccgccgtcgggttctgccacgcgcgcggcgtgttccaccgcgacctcaagcccgagaacctcctcgtcgacgagcacggcgacctcaaggtctccgacttcggcctctccgccgtcgccgaccagttccaccccgacggcctcctccacaccttctgcggcacgccctcctacgtcgcgcccgaggtgctcgcgcgccgcggctacgacggcgccaaggcggacatatggtcctgcggcatcatcctcttcgtgctcatggctggctaccttccgttccatgaccagaatctcatggccatgtaccgaaagatttacaggggggaattccggtgcccgagatggttctccaaggatctttccagtctactgaatcgcatccttgacacgaacccagagacaaggatcactgtcaaagaggtcatggagagcaggtggttccagaagggattccggccggtcagattctatgttgaggatgatcaggttcacagcttggcagatggtgataatgatatgccggagttggaacctagtgagcctcctcctcctcctccgtttccgccgccgccgccgcagcaagatgatgacggtgaggagtcgggatgggagtcggactcatccgtggcatcatgtcctgccacattgtcatctgaggagcgtcggcaaagacctctcgggtctctcacacggccagcaagtcttaatgcgttcgatatcatatcgttctcaaagggatttgatttgtcggggttgtttgaggagcgagggagtgaagtgaggttcatatcggcagagcctatgcaaacaatcatcacaaaattggaggagatcgcaaaggtgaagagcttcttcgttcggcgaaaagactggcgagtgagcatagaaggcacgagggaaggtttgaagggtccattgacaatcggcgctgagatatttgagctcacaccaagcctggtggtagtggaggtgaagaagaaggcaggggataaggaagaatatgatgacttctgtaacagggagttgaaacctgggatgcagcatctcgtacaccatatgggatcagttccaaatataccttctgatacggagtag

SEQ ID NO: 20064 - protein, 497 aa, Oryza sativa subsp
MAATPPSSQHRRPLSSSASAASLAGKPRGGGLLLGRYELGRLLGHGTFAKVYQARSADSGEPVAIKVLDKEKAMRHGLVPHIKREIAILRRVMATKSKIYFVMELVRGGELFGRVAKGRLKEDTARRYFQQLVSAVGFCHARGVFHRDLKPENLLVDEHGDLKVSDFGLSAVADQFHPDGLLHTFCGTPSYVAPEVLARRGYDGAKADIWSCGIILFVLMAGYLPFHDQNLMAMYRKIYRGEFRCPRWFSKDLSSLLNRILDTNPETRITVKEVMESRWFQKGFRPVRFYVEDDQVHSLADGDNDMPELEPSEPPPPPPFPPPPPQQDDDGEESGWESDSSVASCPATLSSEERRQRPLGSLTRPASLNAFDIISFSKGFDLSGLFEERGSEVRFISAEPMQTIITKLEEIAKVKSFFVRRKDWRVSIEGTREGLKGPLTIGAEIFELTPSLVVVEVKKKAGDKEEYDDFCNRELKPGMQHLVHHMGSVPNIPSDTE

SEQ ID NO: 20065 - DNA, 1353 bp, Oryza sativa subsp
  CDS (1)..(1353)
atggcggcggcggcggaggagggggaggggaagaagggcggcggcacggtgctgcaggggaggtacgagatggggcgggtgctcggccacggcaacttcgggcgggtgcacgtggcgcgggacctgaggaccgggaggagcgtggcggtgaaggtggtggcgaaggagaaggtggtgcgcgccgggatgatggagcagatcaagcgggagatcgccgtcatgaagcgcgtctcccaccccaacatcgtcgagctccacgaggtgatggccacgcgctccaagatctacctcgcgctcgagctcgtccgcggcggggagctcttcggccgcatcgtccgcctcggccgcgtcagggaggacgccgcgcggcactacttccggcagctcgtctccgccgtcgacttctgccactcccgcggcgtctaccaccgcgacctcaagccggagaacctgctgctcgacgaggccgggaacctcaaggtggtcgacttcggcctcagcgcgctcgccgaccacgcccgcgccgacggcctcctccacacgctctgcggcacgccggggtacgccgcgcccgaggtgctccgcgacaagggctacgacggcgccaaggccgacctctggtcctgcggcgtcatcctctacgtgctcctcgccgggtccctcccgttccccgacgacaacatcgtcaccctgtaccggaaggcccagcgcggcgactaccggtgcccggcgtggctgtccaccgacgcgcgccgcctcatccccaggctgctcgaccccaacccgaccacccgcatcagcgtcgcgcagctcgtcgagacgccgtggttcaagaagacgtccatctccaggcctgtgagcatagagcttcctccggcctttgccgatcctgctccggctaaggaggaggccgagaaggacgagccggagacgctgaacgcgttccacctgatatcactctcggaggggttcgacctctcgccgctgttcgaggggactcgggccaaggggaggcgggacggtggcatgctgttcgcgacgcgggagccagcgagcggcgtgatctcccgcctcgagggggtggcggcgcgcggcggcggccggatgcgggtgaccaagagcggcgcccgcggcgtgcgcctggagggcgcggagcgcggcggggccaagggccgcctcgccgtggccgccgacatcttcagcgtggcgccctccgtcctcgtcgtcgacgtcaagaaggacggcggcgacacgctcgagtaccgctcattctgcagcgaggagctccggccggcgctccaggacatcgtctggggcgcagccgccgacccaacgccgaccgccgccgtctga

SEQ ID NO: 20066 - protein, 450 aa, Oryza sativa subsp
MAAAAEEGEGKKGGGTVLQGRYEMGRVLGHGNFGRVHVARDLRTGRSVAVKVVAKEKVVRAGMMEQIKREIAVMKRVSHPNIVELHEVMATRSKIYLALELVRGGELFGRIVRLGRVREDAARHYFRQLVSAVDFCHSRGVYHRDLKPENLLLDEAGNLKVVDFGLSALADHARADGLLHTLCGTPGYAAPEVLRDKGYDGAKADLWSCGVILYVLLAGSLPFPDDNIVTLYRKAQRGDYRCPAWLSTDARRLIPRLLDPNPTTRISVAQLVETPWFKKTSISRPVSIELPPAFADPAPAKEEAEKDEPETLNAFHLISLSEGFDLSPLFEGTRAKGRRDGGMLFATREPASGVISRLEGVAARGGGRMRVTKSGARGVRLEGAERGGAKGRLAVAADIFSVAPSVLVVDVKKDGGDTLEYRSFCSEELRPALQDIVWGAAADPTPTAAV

SEQ ID NO: 20067 - DNA, 1341 bp, Medicago truncatula; identical to SEQ ID NO: 1969
  CDS (1)..(1341)

SEQ ID NO: 20068 - protein, 446 aa, Medicago truncatula; identical to SEQ ID NO: 1970

SEQ ID NO: 20069 - DNA, 2055 bp, Oryza sativa; identical to SEQ ID NO: 18509
  CDS (474)..(1793)

SEQ ID NO: 20070 - protein, 439 aa, Oryza sativa; identical to SEQ ID NO: 1992

SEQ ID NO: 20071 - DNA, 2129 bp, Sorghum bicolor; identical to SEQ ID NO: 18511
  CDS (418)..(1740)

SEQ ID NO: 20072 - protein, 440 aa, Sorghum bicolor; identical to SEQ ID NO: 1994

SEQ ID NO: 20073 - DNA, 1323 bp, Sorghum bicolor; identical to SEQ ID NO: 1995
  CDS (1)..(1323)

SEQ ID NO: 20074 - protein, 440 aa, Sorghum bicolor; identical to SEQ ID NO: 1996

SEQ ID NO: 20075 - DNA, 1296 bp, Arabidopsis thaliana; identical to SEQ ID NO: 1999
  CDS (1)..(1296)

SEQ ID NO: 20076 - protein, 431 aa, Arabidopsis thaliana; identical to SEQ ID NO: 2000

SEQ ID NO: 20077 - DNA, 2303 bp, Sorghum bicolor; identical to SEQ ID NO: 18519
  CDS (454)..(1839)

SEQ ID NO: 20078 - protein, 461 aa, Sorghum bicolor; identical to SEQ ID NO: 2002

SEQ ID NO: 20079 - DNA, 1461 bp, Ostreococcus tauri
  CDS (1)..(1461)
atgccgcgcgaggtctcgcgcgtcggcgcgtacgcgctcaagcgctcgctcggcaaaggcgcgttcgggttcgtcaagctcggggtgcaggataagacgggacgcaaggtggcggtgaaggacggcgcgagagagactgacgcgtcgtgcgcgacgtggggacagatactcgatcgagaaaacttgctgcgcgtggacgagcaagagcagttgaaggcggagatcaaggcgttggcggacctgttccatccgtgcatcgtcgatctgatagaggtgctcacgaacgagacgtcggtgtttatggtgatgacgtactgccccgggggagagctgtacgacgtgatccgagcgaagggggcgctgaacgaagaacaggcgagacgacactttcagcggttgatacaaggggttgatttttgtcacaagaaacggatatatcatcgcgatttaaagccggagaacttgttcctggatgaaaacggtgatctgtgcatcggggatttcggtctcgccgcgttgcgagaggatgaggaggataacaacctgcggacaatttgcgggacgccgcacttcgcggcgcccgaggtcatgggcggctctagacggttagtcggaaacaagaattttaagacggtaaacacaaaaacgcggactgaggggtacgacggcgcgcccgcggacgtgtggtcgtgcggatgtattttgtactttttactcaccggggtctttccgttcgacgggcagaacttcgtgcagctgcaaatgctggtgcaaaagaccgagccgtactttgcgccgcagcgaatctcaaaaccttgcgaaaaactaatcagggggatgttggtcaaggatccagcgaagcggtggacgatcgagcaggtgatgaagtcgagttggttcaagactgattacgagcccgtgcaagtgcaagagtcgaagaaggattctcgtcactacgacgacgaagaccccgcgctcgaggaattctggagccccgacacgggtctcgtcgttaagactgcgggtgagtcaagtatgagcgaagtcgacaaaatgcgaccgatcaaacaactcaacgcgtttgagctcataaatctcgccgcatttgatgtcgagagtattttcgatgaagatgagaacacggtgagcaacgccacgcgtttcatgagcaaggagagcatagacaaggttcaggcggcggttatcaagcgcgccgaacaggatctcaacacggtcgcgaagagaaagacgctttcaagagtcacatttgaagacgtaaacaacggagtcgtcgtcacgatgcgaacctatcaggtcattccgggcgtttgtgtgtacgattttagtcgcgacgaaggagggcgcgatcggtttcacgcgtggttccaaaagctccgtgacccgagcgggcctgtcggtgcgttgatcaacatagacgatgcacagcatactgctccatga

SEQ ID NO: 20080 - protein, 486 aa, Ostreococcus tauri
MPREVSRVGAYALKRSLGKGAFGFVKLGVQDKTGRKVAVKDGARETDASCATWGQILDRENLLRVDEQEQLKAEIKALADLFHPCIVDLIEVLTNETSVFMVMTYCPGGELYDVIRAKGALNEEQARRHFQRLIQGVDFCHKKRIYHRDLKPENLFLDENGDLCIGDFGLAALREDEEDNNLRTICGTPHFAAPEVMGGSRRLVGNKNFKTVNTKTRTEGYDGAPADVWSCGCILYFLLTGVFPFDGQNFVQLQMLVQKTEPYFAPQRISKPCEKLIRGMLVKDPAKRWTIEQVMKSSWFKTDYEPVQVQESKKDSRHYDDEDPALEEFWSPDTGLVVKTAGESSMSEVDKMRPIKQLNAFELINLAAFDVESIFDEDENTVSNATRFMSKESIDKVQAAVIKRAEQDLNTVAKRKTLSRVTFEDVNNGVVVTMRTYQVIPGVCVYDFSRDEGGRDRFHAWFQKLRDPSGPVGALINIDDAQHTAP

SEQ ID NO: 20081 - DNA, 1266 bp, Arabidopsis thaliana; identical to SEQ ID NO: 2003
  CDS (1)..(1266)

SEQ ID NO: 20082 - protein, 421 aa, Arabidopsis thaliana; identical to SEQ ID NO: 2004

SEQ ID NO: 20083 - DNA, 1533 bp, Medicago truncatula; identical to SEQ ID NO: 2005
  CDS (1)..(1533)

SEQ ID NO: 20084 - protein, 510 aa, Medicago truncatula; identical to SEQ ID NO: 2006

SEQ ID NO: 20085 - DNA, 1308 bp, Medicago truncatula; identical to SEQ ID NO: 2009
  CDS (1)..(1308)

SEQ ID NO: 20086 - protein, 435 aa, Medicago truncatula; identical to SEQ ID NO: 2010

SEQ ID NO: 20087 - DNA, 1916 bp, Nicotiana tabacum; identical to SEQ ID NO: 18535
  CDS (133)..(1572)

SEQ ID NO: 20088 - protein, 479 aa, Nicotiana tabacum; identical to SEQ ID NO: 2012

SEQ ID NO: 20089 - DNA, 1987 bp, Trifolium pratense; identical to SEQ ID NO: 18537
  CDS (472)..(1848)

SEQ ID NO: 20090 - protein, 458 aa, Trifolium pratense; identical to SEQ ID NO: 2014

SEQ ID NO: 20091 - DNA, 1266 bp, Glossina morsitans morsitans
  CDS (1)..(1266)
atgccgttatttggcaaaaaggattccggcaagaaaataaaatcaaaggacataagagaactgaataaaacagtaccgatcgaagataaatatatactgcatgatacgctgggcacaggggctttttctgaagtccgcctagcggtgagtagagaaaatccggatcagcattacgctgttaagataatcgataaaaaagcgctcaagggcaaagaggaatcactcgagaatgagatacgtgtactacgaagatttagtgcgaatcagcaaattgacggtgaattagaaccgggcaccagacttacacatcccaatatagtacaattgtatgagacattcgaagataaatcaaagatttatcttgtaatggaattagtcactggtggtgagttgttcgacagaattgtagaaaaaggttcctatacggaaaaggatgcctccgatttaattaggcaaatattggaggcagttgcttatatgcataaagagggcgttgtccatagagacttaaaaccggagaatttactcttttacagtcccgatgatgatgccaagattatgattagcgattttggtctttcgaaaactgaagattcgggcacaatggctacagcgtgcggcacaccaggctacgtggctccagaagttttggcccaaaaaccttatggcaaagctgtcgatgtatggagtataggcgttatttcttatatcctattatgcggttaccctccattctacgatgaaaacgatgccaatctttttgcacagatacttaagggcgatttcgaatttgattcaccctattgggatgatatcagtgaatcagccaaagattttatacgtcatttaatgtgtgtggatgttaaaaaacgctacacctgtgaacaggctttagcacatccttggatatccggcaatgctgccggcaataaaaacattcatgctacggtttcagagcaacttaaaaagaatttcgccaaatcacgttggaaacaagcctacattgcggccacagttatacggcaaatgcaacgcatggcattaagtagtagcaatagctccggtgagggcggaagtaaaactaatctgctaaaggatagcaaactgaatgtaccatcggacagtagtcaacgcagcgatacggatgaaagcattcatgtcgagaatattgaaacgacaaaaacgacaacatcgaatgctgagattaaaaaccaaagaatctcatcgccaacctcttgtttaaatggcagtggccaagcaaaataa

SEQ ID NO: 20092 - protein, 421 aa, Glossina morsitans morsitans
MPLFGKKDSGKKIKSKDIRELNKTVPIEDKYILHDTLGTGAFSEVRLAVSRENPDQHYAVKIIDKKALKGKEESLENEIRVLRRFSANQQIDGELEPGTRLTHPNIVQLYETFEDKSKIYLVMELVTGGELFDRIVEKGSYTEKDASDLIRQILEAVAYMHKEGVVHRDLKPENLLFYSPDDDAKIMISDFGLSKTEDSGTMATACGTPGYVAPEVLAQKPYGKAVDVWSIGVISYILLCGYPPFYDENDANLFAQILKGDFEFDSPYWDDISESAKDFIRHLMCVDVKKRYTCEQALAHPWISGNAAGNKNIHATVSEQLKKNFAKSRWKQAYIAATVIRQMQRMALSSSNSSGEGGSKTNLLKDSKLNVPSDSSQRSDTDESIHVENIETTKTTTSNAEIKNQRISSPTSCLNGSGQAK

SEQ ID NO: 20093 - DNA, 1365 bp, Oryza sativa subsp; identical to SEQ ID NO: 2177
  CDS (1)..(1365)

SEQ ID NO: 20094 - protein, 454 aa, Oryza sativa subsp; identical to SEQ ID NO: 2178

SEQ ID NO: 20095 - DNA, 1581 bp, Triticum aestivum; identical to SEQ ID NO: 2015
  CDS (1)..(1581)

SEQ ID NO: 20096 - protein, 526 aa, Triticum aestivum; identical to SEQ ID NO: 2016

SEQ ID NO: 20097 - DNA, 1747 bp, Solanum lycopersicum; identical to SEQ ID NO: 18551
  CDS (137)..(1477)

SEQ ID NO: 20098 - protein, 446 aa, Solanum lycopersicum; identical to SEQ ID NO: 2018

SEQ ID NO: 20099 - DNA, 1892 bp, Lotus japonicus; identical to SEQ ID NO: 18561
  CDS (296)..(1621)

SEQ ID NO: 20100 - protein, 441 aa, Lotus japonicus; identical to SEQ ID NO: 2024

SEQ ID NO: 20101 - DNA, 1506 bp, Oryza sativa subsp; identical to SEQ ID NO: 2025
  CDS (1)..(1506)

SEQ ID NO: 20102 - protein, 501 aa, Oryza sativa subsp; identical to SEQ ID NO: 2026

SEQ ID NO: 20103 - DNA, 1356 bp, Oryza sativa subsp; identical to SEQ ID NO: 2135
  CDS (1)..(1356)

SEQ ID NO: 20104 - protein, 451 aa, Oryza sativa subsp; identical to SEQ ID NO: 2136

SEQ ID NO: 20105 - DNA, 1335 bp, Oryza sativa subsp; identical to SEQ ID NO: 2153
  CDS (1)..(1335)

SEQ ID NO: 20106 - protein, 444 aa, Oryza sativa subsp; identical to SEQ ID NO: 2154

SEQ ID NO: 20107 - DNA, 1437 bp, Gossypium hirsutum; identical to SEQ ID NO: 2027
  CDS (1)..(1437)

SEQ ID NO: 20108 - protein, 478 aa, Gossypium hirsutum; identical to SEQ ID NO: 2028

SEQ ID NO: 20109 - DNA, 1632 bp, Malus domestica; identical to SEQ ID NO: 4568
  CDS (1)..(1632)

SEQ ID NO: 20110 - protein, 543 aa, Malus domestica; identical to SEQ ID NO: 4569

SEQ ID NO: 20111 - DNA, 1371 bp, Oryza sativa subsp; identical to SEQ ID NO: 2163
  CDS (1)..(1371)

SEQ ID NO: 20112 - protein, 456 aa, Oryza sativa subsp; identical to SEQ ID NO: 2164

SEQ ID NO: 20113 - DNA, 1356 bp, Oryza sativa subsp; identical to SEQ ID NO: 2161
  CDS (1)..(1356)

SEQ ID NO: 20114 - protein, 451 aa, Oryza sativa subsp; identical to SEQ ID NO: 2162

SEQ ID NO: 20115 - DNA, 1351 bp, Nicotiana tabacum; identical to SEQ ID NO: 18593
  CDS (49)..(1290)

SEQ ID NO: 20116 - protein, 413 aa, Nicotiana tabacum; identical to SEQ ID NO: 2030

SEQ ID NO: 20117 - DNA, 1359 bp, Arabidopsis thaliana; identical to SEQ ID NO: 2031
  CDS (1)..(1359)

SEQ ID NO: 20118 - protein, 452 aa, Arabidopsis thaliana; identical to SEQ ID NO: 2032

SEQ ID NO: 20119 - DNA, 1840 bp, Pisum sativum; identical to SEQ ID NO: 18597
  CDS (48)..(1598)

SEQ ID NO: 20120 - protein, 516 aa, Pisum sativum; identical to SEQ ID NO: 2034

SEQ ID NO: 20121 - DNA, 1308 bp, Arabidopsis thaliana; identical to SEQ ID NO: 2035
  CDS (1)..(1308)

SEQ ID NO: 20122 - protein, 435 aa, Arabidopsis thaliana; identical to SEQ ID NO: 2036

SEQ ID NO: 20123 - DNA, 1622 bp, Persea americana; identical to SEQ ID NO: 18603
  CDS (89)..(1450)

SEQ ID NO: 20124 - protein, 453 aa, Persea americana; identical to SEQ ID NO: 2038

SEQ ID NO: 20125 - DNA, 2084 bp, Glycine max; identical to SEQ ID NO: 18607
  CDS (427)..(1743)
  misc_feature (244)..(244): s is g or c

SEQ ID NO: 20126 - protein, 438 aa, Glycine max; identical to SEQ ID NO: 2042

SEQ ID NO: 20127 - DNA, 1969 bp, Brassica napus; identical to SEQ ID NO: 18613
  CDS (288)..(1613)

SEQ ID NO: 20128 - protein, 441 aa, Brassica napus; identical to SEQ ID NO: 2046

SEQ ID NO: 20129 - DNA, 1290 bp, Arabidopsis thaliana; identical to SEQ ID NO: 2047
  CDS (1)..(1290)

SEQ ID NO: 20130 - protein, 429 aa, Arabidopsis thaliana; identical to SEQ ID NO: 2048

SEQ ID NO: 20131 - DNA, 1464 bp, Arabidopsis thaliana; identical to SEQ ID NO: 2049
  CDS (1)..(1464)

SEQ ID NO: 20132 - protein, 487 aa, Arabidopsis thaliana; identical to SEQ ID NO: 2050

SEQ ID NO: 20133 - DNA, 1425 bp, Oryza sativa subsp; identical to SEQ ID NO: 2051
  CDS (1)..(1425)

SEQ ID NO: 20134 - protein, 474 aa, Oryza sativa subsp; identical to SEQ ID NO: 2052

SEQ ID NO: 20135 - DNA, 1344 bp, Arabidopsis thaliana; identical to SEQ ID NO: 2053
  CDS (1)..(1344)

SEQ ID NO: 20136 - protein, 447 aa, Arabidopsis thaliana; identical to SEQ ID NO: 2054

SEQ ID NO: 20137 - DNA, 1443 bp, Arabidopsis thaliana; identical to SEQ ID NO: 2057
  CDS (1)..(1443)

SEQ ID NO: 20138 - protein, 480 aa, Arabidopsis thaliana; identical to SEQ ID NO: 2058

SEQ ID NO: 20139 - DNA, 1290 bp, Arabidopsis thaliana; identical to SEQ ID NO: 18627
  CDS (1)..(1290)

SEQ ID NO: 20140 - protein, 429 aa, Arabidopsis thaliana; identical to SEQ ID NO: 18628

SEQ ID NO: 20141 - DNA, 1371 bp, Arabidopsis thaliana; identical to SEQ ID NO: 2061
  CDS (1)..(1371)

SEQ ID NO: 20142 - protein, 456 aa, Arabidopsis thaliana; identical to SEQ ID NO: 2062

SEQ ID NO: 20143 - DNA, 1365 bp, Arabidopsis thaliana
  CDS (1)..(1365)
atggtgataaagggaatgcgtgttggtaagtacgagcttgggaggacactcggagagggaaattccgcaaaagttaaatttgctatagatactcttaccggcgaatcattcgccatcaaaatcatcgagaagtcgtgtatcacacgtcttaacgtctcttttcagattaagagagagattcgaacactcaaagttttgaagcatccaaacattgtccgattacatgaggtaataatactacttgtcttggctagcaaaaccaagatttacatggttctggaatgtgtcactggaggagacttatttgacagaattgtaagattcctattagctccggtgacggttttgttagttagcaagaggttggtctcgaaaggaaagctttcggaaacacaaggacgaaaaatgtttcagcagttgattgatggagtcagctattgtcataacaagggcgtttttcacagggatctcaagctagagaatgttcttcttgatgcaaagggtcacattaagatcactgattttggccttagtgctctgtctcaacattatagggaagatgggttgctacatacaacttgtggtagtcctaactatgtcgcgcctgaggttctagctaatgagggctatgatggtgcagcatcagatatatggtcatgtggagtaatcttgtatgttattcttacgggatgtctcccttttgatgatgcaaaccttgcagttatttgccggaagatattcaaaggggatcccccaatacctagatggatatcactgggagctaaaactatgatcaagagaatgcttgatcctaatccagtcacgagggtgacaatcgcaggtataaaggctcatgattggtttaaacatgactacactccttcaaactacgatgacgacgatgatgtatacttgatccaagaagatgtttttatgatgaaggaatatgaagaagagaagagccctgattctccaaccattatcaacgcttttcagttgattggaatgtcctcgtttctcgacctctcaggtttctttgagacagagaaattatcagagaggcagataagattcacgtcaaatagtttagctaaagatttgttggagaacatcgaaacgattttcacggagatgggcttttgtttacagaagaaacatgcaaagttaaaagcaatcaaagaagaaagcactcaaaaaaggcaatgcggtttatcggtaacggctgaggttttcgagataagtccgtccctgaatgtggttgaactaagaaaatcacatggcgattcgtctctatataaacagttgtacgagcgattattgaatgagctgggctcatcatcacaagtacaggagcttttagcgtag

SEQ ID NO: 20144 - protein, 454 aa, Arabidopsis thaliana
MVIKGMRVGKYELGRTLGEGNSAKVKFAIDTLTGESFAIKIIEKSCITRLNVSFQIKREIRTLKVLKHPNIVRLHEVIILLVLASKTKIYMVLECVTGGDLFDRIVRFLLAPVTVLLVSKRLVSKGKLSETQGRKMFQQLIDGVSYCHNKGVFHRDLKLENVLLDAKGHIKITDFGLSALSQHYREDGLLHTTCGSPNYVAPEVLANEGYDGAASDIWSCGVILYVILTGCLPFDDANLAVICRKIFKGDPPIPRWISLGAKTMIKRMLDPNPVTRVTIAGIKAHDWFKHDYTPSNYDDDDDVYLIQEDVFMMKEYEEEKSPDSPTIINAFQLIGMSSFLDLSGFFETEKLSERQIRFTSNSLAKDLLENIETIFTEMGFCLQKKHAKLKAIKEESTQKRQCGLSVTAEVFEISPSLNVVELRKSHGDSSLYKQLYERLLNELGSSSQVQELLA

SEQ ID NO: 20145 - DNA, 1395 bp, Arabidopsis thaliana; identical to SEQ ID NO: 2063
  CDS (1)..(1395)

SEQ ID NO: 20146 - protein, 464 aa, Arabidopsis thaliana; identical to SEQ ID NO: 2064

SEQ ID NO: 20147 - DNA, 1362 bp, Arabidopsis thaliana; identical to SEQ ID NO: 2065
  CDS (1)..(1362)

SEQ ID NO: 20148 - protein, 453 aa, Arabidopsis thaliana; identical to SEQ ID NO: 2066

SEQ ID NO: 20149 - DNA, 1557 bp, Zea mays; identical to SEQ ID NO: 18639
  CDS (1)..(1557)

SEQ ID NO: 20150 - protein, 518 aa, Zea mays; identical to SEQ ID NO: 2068

SEQ ID NO: 20151 - DNA, 1563 bp, Oryza sativa; identical to SEQ ID NO: 2069
  CDS (1)..(1563)

SEQ ID NO: 20152 - protein, 520 aa, Oryza sativa; identical to SEQ ID NO: 2070

SEQ ID NO: 20153 - DNA, 1266 bp, Arabidopsis thaliana; identical to SEQ ID NO: 2071
  CDS (1)..(1266)

SEQ ID NO: 20154 - protein, 421 aa, Arabidopsis thaliana; identical to SEQ ID NO: 2072

SEQ ID NO: 20155 - DNA, 2443 bp, Mesembryanthemum crystallinum; identical to SEQ ID NO: 18647
  CDS (658)..(2046)

SEQ ID NO: 20156 - protein, 462 aa, Mesembryanthemum crystallinum; identical to SEQ ID NO: 2074

SEQ ID NO: 20157 - DNA, 1335 bp, Arabidopsis thaliana; identical to SEQ ID NO: 2079
  CDS (1)..(1335)

SEQ ID NO: 20158 - protein, 444 aa, Arabidopsis thaliana; identical to SEQ ID NO: 2080

SEQ ID NO: 20159 - DNA, 1350 bp, Oryza sativa subsp; identical to SEQ ID NO: 2115
  CDS (1)..(1350)

SEQ ID NO: 20160 - protein, 449 aa, Oryza sativa subsp; identical to SEQ ID NO: 2116

SEQ ID NO: 20161 - DNA, 1266 bp, Arabidopsis thaliana; identical to SEQ ID NO: 2081
  CDS (1)..(1266)

SEQ ID NO: 20162 - protein, 421 aa, Arabidopsis thaliana; identical to SEQ ID NO: 2082

SEQ ID NO: 20163 - DNA, 1341 bp, Arabidopsis thaliana; identical to SEQ ID NO: 2083
  CDS (1)..(1341)

SEQ ID NO: 20164 - protein, 446 aa, Arabidopsis thaliana; identical to SEQ ID NO: 2084

SEQ ID NO: 20165 - DNA, 1281 bp, Oryza sativa; identical to SEQ ID NO: 2097
  CDS (1)..(1281)

SEQ ID NO: 20166 - protein, 426 aa, Oryza sativa; identical to SEQ ID NO: 2098

SEQ ID NO: 20167 - DNA, 1350 bp, Oryza sativa; identical to SEQ ID NO: 2149
  CDS (1)..(1350)

SEQ ID NO: 20168 - protein, 449 aa, Oryza sativa; identical to SEQ ID NO: 2150

SEQ ID NO: 20169 - DNA, 1323 bp, Brassica napus; identical to SEQ ID NO: 2179
  CDS (1)..(1323)

SEQ ID NO: 20170 - protein, 440 aa, Brassica napus; identical to SEQ ID NO: 2180

SEQ ID NO: 20171 - DNA, 1332 bp, Brassica napus; identical to SEQ ID NO: 2181
  CDS (1)..(1332)

SEQ ID NO: 20172 - protein, 443 aa, Brassica napus; identical to SEQ ID NO: 2182

SEQ ID NO: 20173 - DNA, 1338 bp, Brassica napus; identical to SEQ ID NO: 2183
  CDS (1)..(1338)

SEQ ID NO: 20174 - protein, 445 aa, Brassica napus; identical to SEQ ID NO: 2184

SEQ ID NO: 20175 - DNA, 1476 bp, Brassica napus; identical to SEQ ID NO: 2185
  CDS (1)..(1476)

SEQ ID NO: 20176 - protein, 491 aa, Brassica napus; identical to SEQ ID NO: 2186

SEQ ID NO: 20177 - DNA, 1416 bp, Brassica napus; identical to SEQ ID NO: 2187
  CDS (1)..(1416)

SEQ ID NO: 20178 - protein, 471 aa, Brassica napus; identical to SEQ ID NO: 2188

SEQ ID NO: 20179 - DNA, 1326 bp, Brassica napus; identical to SEQ ID NO: 2189
  CDS (1)..(1326)

SEQ ID NO: 20180 - protein, 441 aa, Brassica napus; identical to SEQ ID NO: 2190

SEQ ID NO: 20181 - DNA, 1395 bp, Zea mays; identical to SEQ ID NO: 2193
  CDS (1)..(1395)

SEQ ID NO: 20182 - protein, 464 aa, Zea mays; identical to SEQ ID NO: 2194

SEQ ID NO: 20183 - DNA, 1344 bp, Glycine max; identical to SEQ ID NO: 2195
  CDS (1)..(1344)

SEQ ID NO: 20184 - protein, 447 aa, Glycine max; identical to SEQ ID NO: 2196

SEQ ID NO: 20185 - DNA, 1386 bp, Glycine max; identical to SEQ ID NO: 2199
  CDS (1)..(1386)

SEQ ID NO: 20186 - protein, 461 aa, Glycine max; identical to SEQ ID NO: 2200

SEQ ID NO: 20187 - DNA, 1320 bp, Triticum aestivum; identical to SEQ ID NO: 2201
  CDS (1)..(1320)

SEQ ID NO: 20188 - protein, 439 aa, Triticum aestivum; identical to SEQ ID NO: 2202

SEQ ID NO: 20189 - DNA, 1524 bp, Linum usitatissimum; identical to SEQ ID NO: 2203
  CDS (1)..(1524)

SEQ ID NO: 20190 - protein, 507 aa, Linum usitatissimum; identical to SEQ ID NO: 2204

SEQ ID NO: 20191 - DNA, 1350 bp, Zea mays; identical to SEQ ID NO: 2205
  CDS (1)..(1350)

SEQ ID NO: 20192 - protein, 449 aa, Zea mays; identical to SEQ ID NO: 2206

SEQ ID NO: 20193 - DNA, 1356 bp, Zea mays; identical to SEQ ID NO: 2209
  CDS (1)..(1356)

SEQ ID NO: 20194 - protein, 451 aa, Zea mays; identical to SEQ ID NO: 2210

SEQ ID NO: 20195 - DNA, 1338 bp, Zea mays; identical to SEQ ID NO: 2211
  CDS (1)..(1338)

SEQ ID NO: 20196 - protein, 445 aa, Zea mays; identical to SEQ ID NO: 2212

SEQ ID NO: 20197 - DNA, 1356 bp, Zea mays; identical to SEQ ID NO: 2353
  CDS (1)..(1356)

SEQ ID NO: 20198 - protein, 451 aa, Zea mays; identical to SEQ ID NO: 2354

SEQ ID NO: 20199 - DNA, 1308 bp, Brassica napus; identical to SEQ ID NO: 2213
  CDS (1)..(1308)

SEQ ID NO: 20200 - protein, 435 aa, Brassica napus; identical to SEQ ID NO: 2214

SEQ ID NO: 20201 - DNA, 1452 bp, Brassica napus; identical to SEQ ID NO: 2215
  CDS (1)..(1452)

SEQ ID NO: 20202 - protein, 483 aa, Brassica napus; identical to SEQ ID NO: 2216

SEQ ID NO: 20203 - DNA, 1392 bp, Brassica napus; identical to SEQ ID NO: 2217
  CDS (1)..(1392)

SEQ ID NO: 20204 - protein, 463 aa, Brassica napus; identical to SEQ ID NO: 2218

SEQ ID NO: 20205 - DNA, 1299 bp, Brassica napus; identical to SEQ ID NO: 2219
  CDS (1)..(1299)

SEQ ID NO: 20206 - protein, 432 aa, Brassica napus; identical to SEQ ID NO: 2220

SEQ ID NO: 20207 - DNA, 1323 bp, Brassica napus; identical to SEQ ID NO: 2221
  CDS (1)..(1323)

SEQ ID NO: 20208 - protein, 440 aa, Brassica napus; identical to SEQ ID NO: 2222

SEQ ID NO: 20209 - DNA, 1341 bp, Brassica napus; identical to SEQ ID NO: 2225
  CDS (1)..(1341)

SEQ ID NO: 20210 - protein, 446 aa, Brassica napus; identical to SEQ ID NO: 2226

SEQ ID NO: 20211 - DNA, 1452 bp, Brassica napus; identical to SEQ ID NO: 18737
  CDS (1)..(1452)

SEQ ID NO: 20212 - protein, 483 aa, Brassica napus; identical to SEQ ID NO: 2192

SEQ ID NO: 20213 - DNA, 1326 bp, Brassica napus; identical to SEQ ID NO: 2227
  CDS (1)..(1326)

SEQ ID NO: 20214 - protein, 441 aa, Brassica napus; identical to SEQ ID NO: 2228

SEQ ID NO: 20215 - DNA, 1461 bp, Brassica napus; identical to SEQ ID NO: 2229
  CDS (1)..(1461)

SEQ ID NO: 20216 - protein, 486 aa, Brassica napus; identical to SEQ ID NO: 2230

SEQ ID NO: 20217 - DNA, 1299 bp, Brassica napus; identical to SEQ ID NO: 2231
  CDS (1)..(1299)

SEQ ID NO: 20218 - protein, 432 aa, Brassica napus; identical to SEQ ID NO: 2232

SEQ ID NO: 20219 - DNA, 1323 bp, Brassica napus; identical to SEQ ID NO: 2235
  CDS (1)..(1323)

SEQ ID NO: 20220 - protein, 440 aa, Brassica napus; identical to SEQ ID NO: 2236

SEQ ID NO: 20221 - DNA, 1389 bp, Brassica napus; identical to SEQ ID NO: 2237
  CDS (1)..(1389)

SEQ ID NO: 20222 - protein, 462 aa, Brassica napus; identical to SEQ ID NO: 2238

SEQ ID NO: 20223 - DNA, 1299 bp, Brassica napus; identical to SEQ ID NO: 2239
  CDS (1)..(1299)

SEQ ID NO: 20224 - protein, 432 aa, Brassica napus; identical to SEQ ID NO: 2240

SEQ ID NO: 20225 - DNA, 1338 bp, Brassica napus; identical to SEQ ID NO: 2243
  CDS (1)..(1338)

SEQ ID NO: 20226 - protein, 445 aa, Brassica napus; identical to SEQ ID NO: 2244

SEQ ID NO: 20227 - DNA, 1338 bp, Glycine max; identical to SEQ ID NO: 2245
  CDS (1)..(1338)

SEQ ID NO: 20228 - protein, 445 aa, Glycine max; identical to SEQ ID NO: 2246

SEQ ID NO: 20229 - DNA, 1323 bp, Zea mays; identical to SEQ ID NO: 2247
  CDS (1)..(1323)

SEQ ID NO: 20230 - protein, 440 aa, Zea mays; identical to SEQ ID NO: 2248

SEQ ID NO: 20231 - DNA, 1389 bp, Glycine max; identical to SEQ ID NO: 2249
  CDS (1)..(1389)

SEQ ID NO: 20232 - protein, 462 aa, Glycine max; identical to SEQ ID NO: 2250

SEQ ID NO: 20233 - DNA, 1350 bp, Zea mays; identical to SEQ ID NO: 2327
  CDS (1)..(1350)

SEQ ID NO: 20234 - protein, 449 aa, Zea mays; identical to SEQ ID NO: 2328

SEQ ID NO: 20235 - DNA, 1269 bp, Glycine max; identical to SEQ ID NO: 2253
  CDS (1)..(1269)

SEQ ID NO: 20236 - protein, 422 aa, Glycine max; identical to SEQ ID NO: 2254

SEQ ID NO: 20237 - DNA, 1383 bp, Glycine max; identical to SEQ ID NO: 2255
  CDS (1)..(1383)

SEQ ID NO: 20238 - protein, 460 aa, Glycine max; identical to SEQ ID NO: 2256

SEQ ID NO: 20239 - DNA, 1314 bp, Glycine max; identical to SEQ ID NO: 18765
  CDS (1)..(1314)

SEQ ID NO: 20240 - protein, 437 aa, Glycine max; identical to SEQ ID NO: 1820

SEQ ID NO: 20241 - DNA, 1341 bp, Glycine max; identical to SEQ ID NO: 2259
  CDS (1)..(1341)

SEQ ID NO: 20242 - protein, 446 aa, Glycine max; identical to SEQ ID NO: 2260

SEQ ID NO: 20243 - DNA, 1323 bp, Glycine max; identical to SEQ ID NO: 2261
  CDS (1)..(1323)

SEQ ID NO: 20244 - protein, 440 aa, Glycine max; identical to SEQ ID NO: 2262

SEQ ID NO: 20245 - DNA, 1326 bp, Glycine max; identical to SEQ ID NO: 2265
  CDS (1)..(1326)

SEQ ID NO: 20246 - protein, 441 aa, Glycine max; identical to SEQ ID NO: 2266

SEQ ID NO: 20247 - DNA, 1341 bp, Glycine max; identical to SEQ ID NO: 2267
  CDS (1)..(1341)

SEQ ID NO: 20248 - protein, 446 aa, Glycine max; identical to SEQ ID NO: 2268

SEQ ID NO: 20249 - DNA, 1389 bp, Glycine max; identical to SEQ ID NO: 2269
  CDS (1)..(1389)

SEQ ID NO: 20250 - protein, 462 aa, Glycine max; identical to SEQ ID NO: 2270

SEQ ID NO: 20251 - DNA, 1350 bp, Glycine max; identical to SEQ ID NO: 2271
  CDS (1)..(1350)

SEQ ID NO: 20252 - protein, 449 aa, Glycine max; identical to SEQ ID NO: 2272

SEQ ID NO: 20253 - DNA, 1362 bp, Glycine max; identical to SEQ ID NO: 2273
  CDS (1)..(1362)

SEQ ID NO: 20254 - protein, 453 aa, Glycine max; identical to SEQ ID NO: 2274

SEQ ID NO: 20255 - DNA, 1335 bp, Glycine max; identical to SEQ ID NO: 2275
  CDS (1)..(1335)

SEQ ID NO: 20256 - protein, 444 aa, Glycine max; identical to SEQ ID NO: 2276

SEQ ID NO: 20257 - DNA, 1479 bp, Glycine max; identical to SEQ ID NO: 18785
  CDS (1)..(1479)

SEQ ID NO: 20258 - protein, 492 aa, Glycine max; identical to SEQ ID NO: 18786

SEQ ID NO: 20259 - DNA, 1383 bp, Glycine max; identical to SEQ ID NO: 2277
  CDS (1)..(1383)

SEQ ID NO: 20260 - protein, 460 aa, Glycine max; identical to SEQ ID NO: 2278

SEQ ID NO: 20261 - DNA, 1344 bp, Glycine max; identical to SEQ ID NO: 2279
  CDS (1)..(1344)

SEQ ID NO: 20262 - protein, 447 aa, Glycine max; identical to SEQ ID NO: 2280

SEQ ID NO: 20263 - DNA, 1293 bp, Glycine max; identical to SEQ ID NO: 2281
  CDS (1)..(1293)

SEQ ID NO: 20264 - protein, 430 aa, Glycine max; identical to SEQ ID NO: 2282

SEQ ID NO: 20265 - DNA, 1332 bp, Glycine max; identical to SEQ ID NO: 2283
  CDS (1)..(1332)

SEQ ID NO: 20266 - protein, 443 aa, Glycine max; identical to SEQ ID NO: 2284

SEQ ID NO: 20267 - DNA, 1386 bp, Glycine max; identical to SEQ ID NO: 2285
  CDS (1)..(1386)

SEQ ID NO: 20268 - protein, 461 aa, Glycine max; identical to SEQ ID NO: 2286

SEQ ID NO: 20269 - DNA, 1326 bp, Glycine max; identical to SEQ ID NO: 2197
  CDS (1)..(1326)

SEQ ID NO: 20270 - protein, 441 aa, Glycine max; identical to SEQ ID NO: 2198

SEQ ID NO: 20271 - DNA, 1479 bp, Glycine max; identical to SEQ ID NO: 18799
  CDS (1)..(1479)

SEQ ID NO: 20272 - protein, 492 aa, Glycine max; identical to SEQ ID NO: 18800

SEQ ID NO: 20273 - DNA, 1344 bp, Oryza sativa; identical to SEQ ID NO: 2289
  CDS (1)..(1344)

SEQ ID NO: 20274 - protein, 447 aa, Oryza sativa; identical to SEQ ID NO: 2290

SEQ ID NO: 20275 - DNA, 1371 bp, Oryza sativa; identical to SEQ ID NO: 2291
  CDS (1)..(1371)

SEQ ID NO: 20276 - protein, 456 aa, Oryza sativa; identical to SEQ ID NO: 2292

SEQ ID NO: 20277 - DNA, 1341 bp, Zea mays; identical to SEQ ID NO: 2293
  CDS (1)..(1341)

SEQ ID NO: 20278 - protein, 446 aa, Zea mays; identical to SEQ ID NO: 2294

SEQ ID NO: 20279 - DNA, 1323 bp, Zea mays; identical to SEQ ID NO: 2295
  CDS (1)..(1323)

SEQ ID NO: 20280 - protein, 440 aa, Zea mays; identical to SEQ ID NO: 2296

SEQ ID NO: 20281 - DNA, 1356 bp, Zea mays; identical to SEQ ID NO: 18809
  CDS (1)..(1356)

SEQ ID NO: 20282 - protein, 451 aa, Zea mays; identical to SEQ ID NO: 2332

SEQ ID NO: 20283 - DNA, 1335 bp, Glycine max; identical to SEQ ID NO: 2299
  CDS (1)..(1335)

SEQ ID NO: 20284 - protein, 444 aa, Glycine max; identical to SEQ ID NO: 2300

SEQ ID NO: 20285 - DNA, 1332 bp, Triticum aestivum; identical to SEQ ID NO: 2301
  CDS (1)..(1332)

SEQ ID NO: 20286 - protein, 443 aa, Triticum aestivum; identical to SEQ ID NO: 2302

SEQ ID NO: 20287 - DNA, 1557 bp, Zea mays; identical to SEQ ID NO: 18815
  CDS (1)..(1557)

SEQ ID NO: 20288 - protein, 518 aa, Zea mays; identical to SEQ ID NO: 2334

SEQ ID NO: 20289 - DNA, 1293 bp, Zea mays; identical to SEQ ID NO: 2303
  CDS (1)..(1293)

SEQ ID NO: 20290 - protein, 430 aa, Zea mays; identical to SEQ ID NO: 2304

SEQ ID NO: 20291 - DNA, 1347 bp, Zea mays; identical to SEQ ID NO: 2305
  CDS (1)..(1347)

SEQ ID NO: 20292 - protein, 448 aa, Zea mays; identical to SEQ ID NO: 2306

SEQ ID NO: 20293 - DNA, 1332 bp, Zea mays; identical to SEQ ID NO: 2309
  CDS (1)..(1332)

SEQ ID NO: 20294 - protein, 443 aa, Zea mays; identical to SEQ ID NO: 2310

SEQ ID NO: 20295 - DNA, 1362 bp, Zea mays; identical to SEQ ID NO: 2311
  CDS (1)..(1362)

SEQ ID NO: 20296 - protein, 453 aa, Zea mays; identical to SEQ ID NO: 2312

SEQ ID NO: 20297 - DNA, 1392 bp, Zea mays; identical to SEQ ID NO: 2313
  CDS (1)..(1392)

SEQ ID NO: 20298 - protein, 463 aa, Zea mays; identical to SEQ ID NO: 2314

SEQ ID NO: 20299 - DNA, 1317 bp, Zea mays; identical to SEQ ID NO: 2315
  CDS (1)..(1317)

SEQ ID NO: 20300 - protein, 438 aa, Zea mays; identical to SEQ ID NO: 2316

SEQ ID NO: 20301 - DNA, 1455 bp, Zea mays; identical to SEQ ID NO: 2317
  CDS (1)..(1455)

SEQ ID NO: 20302 - protein, 484 aa, Zea mays; identical to SEQ ID NO: 2318

SEQ ID NO: 20303 - DNA, 1356 bp, Zea mays; identical to SEQ ID NO: 2319
  CDS (1)..(1356)

SEQ ID NO: 20304 - protein, 451 aa, Zea mays; identical to SEQ ID NO: 2320

SEQ ID NO: 20305 - DNA, 1350 bp, Zea mays; identical to SEQ ID NO: 2321
  CDS (1)..(1350)

SEQ ID NO: 20306 - protein, 449 aa, Zea mays; identical to SEQ ID NO: 2322

SEQ ID NO: 20307 - DNA, 1290 bp, Zea mays; identical to SEQ ID NO: 2323
  CDS (1)..(1290)

SEQ ID NO: 20308 - protein, 429 aa, Zea mays; identical to SEQ ID NO: 2324

SEQ ID NO: 20309 - DNA, 1383 bp, Zea mays; identical to SEQ ID NO: 2325
  CDS (1)..(1383)

SEQ ID NO: 20310 - protein, 460 aa, Zea mays; identical to SEQ ID NO: 2326

SEQ ID NO: 20311 - DNA, 1380 bp, Zea mays; identical to SEQ ID NO: 2335
  CDS (1)..(1380)

SEQ ID NO: 20312 - protein, 459 aa, Zea mays; identical to SEQ ID NO: 2336

SEQ ID NO: 20313 - DNA, 1317 bp, Zea mays; identical to SEQ ID NO: 2337
  CDS (1)..(1317)

SEQ ID NO: 20314 - protein, 438 aa, Zea mays; identical to SEQ ID NO: 2338

SEQ ID NO: 20315 - DNA, 1350 bp, Zea mays; identical to SEQ ID NO: 2339
  CDS (1)..(1350)

SEQ ID NO: 20316 - protein, 449 aa, Zea mays; identical to SEQ ID NO: 2340

SEQ ID NO: 20317 - DNA, 1332 bp, Zea mays; identical to SEQ ID NO: 2341
  CDS (1)..(1332)

SEQ ID NO: 20318 - protein, 443 aa, Zea mays; identical to SEQ ID NO: 2342

SEQ ID NO: 20319 - DNA, 1383 bp, Zea mays; identical to SEQ ID NO: 2343
  CDS (1)..(1383)

SEQ ID NO: 20320 - protein, 460 aa, Zea mays; identical to SEQ ID NO: 2344

SEQ ID NO: 20321 - DNA, 1356 bp, Zea mays; identical to SEQ ID NO: 18847
  CDS (1)..(1356)

SEQ ID NO: 20322 - protein, 451 aa, Zea mays; identical to SEQ ID NO: 2298

SEQ ID NO: 20323 - DNA, 1323 bp, Zea mays; identical to SEQ ID NO: 2345
  CDS (1)..(1323)

SEQ ID NO: 20324 - protein, 440 aa, Zea mays; identical to SEQ ID NO: 2346

SEQ ID NO: 20325 - DNA, 1332 bp, Zea mays; identical to SEQ ID NO: 2347
  CDS (1)..(1332)

SEQ ID NO: 20326 - protein, 443 aa, Zea mays; identical to SEQ ID NO: 2348

SEQ ID NO: 20327 - DNA, 1395 bp, Zea mays; identical to SEQ ID NO: 2329
  CDS (1)..(1395)

SEQ ID NO: 20328 - protein, 464 aa, Zea mays; identical to SEQ ID NO: 2330

SEQ ID NO: 20329 - DNA, 1338 bp, Zea mays; identical to SEQ ID NO: 2349
  CDS (1)..(1338)

SEQ ID NO: 20330 - protein, 445 aa, Zea mays; identical to SEQ ID NO: 2350

SEQ ID NO: 20331 - DNA, 1344 bp, Zea mays; identical to SEQ ID NO: 2355
  CDS (1)..(1344)

SEQ ID NO: 20332 - protein, 447 aa, Zea mays; identical to SEQ ID NO: 2356

SEQ ID NO: 20333 - DNA, 1356 bp, Zea mays; identical to SEQ ID NO: 2357
  CDS (1)..(1356)

SEQ ID NO: 20334 - protein, 451 aa, Zea mays; identical to SEQ ID NO: 2358

SEQ ID NO: 20335 - DNA, 1512 bp, Zea mays; identical to SEQ ID NO: 2359
  CDS (1)..(1512)

SEQ ID NO: 20336 - protein, 503 aa, Zea mays; identical to SEQ ID NO: 2360

SEQ ID NO: 20337 - DNA, 20 bp, Artificial sequence
  primer
atgccagagatcgagattgc

SEQ ID NO: 20338 - DNA, 23 bp, Artificial sequence
  primer
ttaaatagccgcgtttgttgacg

SEQ ID NO: 20339 - protein, 639 aa, Artificial sequence
  consensus sequence
  Variant (3)..(3): Xaa in position 3 is any amino acid
  Variant (5)..(7): Xaa in position 5 to 7 is any amino acid
  Variant (9)..(9): Xaa in position 9 is any amino acid
  Variant (11)..(11): Xaa in position 11 is any amino acid
  Variant (16)..(17): Xaa in position 16 to 17 is any amino acid
  Variant (19)..(26): Xaa in position 19 to 26 is any amino acid
  Variant (27)..(57): Xaa in position 27 to 57 is any or no amino acid
  Variant (60)..(60): Xaa in position 60 is any amino acid
  Variant (62)..(64): Xaa in position 62 to 64 is any amino acid
  Variant (66)..(74): Xaa in position 66 to 74 is any amino acid
  Variant (75)..(91): Xaa in position 75 to 91 is any or no amino acid
  Variant (93)..(93): Xaa in position 93 is any amino acid
  Variant (97)..(102): Xaa in position 97 to 102 is any amino acid
  Variant (103)..(119): Xaa in position 103 to 119 is any or no amino acid
  Variant (123)..(123): Xaa in position 123 is any amino acid
  Variant (125)..(125): Xaa in position 125 is any amino acid
  Variant (127)..(127): Xaa in position 127 is any amino acid
  Variant (129)..(129): Xaa in position 129 is any amino acid
  Variant (130)..(133): Xaa in position 130 to 133 is any or no amino acid
  Variant (135)..(135): Xaa in position 135 is any amino acid
  Variant (137)..(137): Xaa in position 137 is any amino acid
  Variant (139)..(139): Xaa in position 139 is any amino acid
  Variant (143)..(145): Xaa in position 143 to 145 is any amino acid
  Variant (147)..(149): Xaa in position 147 to 149 is any amino acid
  Variant (150)..(150): Xaa in position 150 is any or no amino acid
  Variant (156)..(159): Xaa in position 156 to 159 is any amino acid
  Variant (160)..(178): Xaa in position 160 to 178 is any or no amino acid
  Variant (180)..(180): Xaa in position 180 is any amino acid
  Variant (182)..(182): Xaa in position 182 is any amino acid
  Variant (184)..(185): Xaa in position 184 to 185 is any amino acid
  Variant (188)..(188): Xaa in position 188 is any amino acid
  Variant (191)..(191): Xaa in position 191 is any amino acid
  Variant (194)..(195): Xaa in position 194 to 195 is any amino acid
  Variant (198)..(199): Xaa in position 198 to 199 is any amino acid
  Variant (202)..(203): Xaa in position 202 to 203 is any amino acid
  Variant (206)..(206): Xaa in position 206 is any amino acid
  Variant (219)..(222): Xaa in position 219 to 222 is any amino acid
  Variant (223)..(227): Xaa in position 223 to 227 is any or no amino acid
  Variant (230)..(230): Xaa in position 230 is any amino acid
  Variant (238)..(240): Xaa in position 238 to 240 is any amino acid
  Variant (241)..(251): Xaa in position 241 to 251 is any or no amino acid
  Variant (258)..(258): Xaa in position 258 is any amino acid
  Variant (263)..(263): Xaa in position 263 is any amino acid
  Variant (270)..(273): Xaa in position 270 to 273 is any amino acid
  Variant (275)..(275): Xaa in position 275 is any amino acid
  Variant (276)..(293): Xaa in position 276 to 293 is any or no amino acid
  Variant (297)..(299): Xaa in position 297 to 299 is any amino acid
  Variant (301)..(301): Xaa in position 301 is any amino acid
  Variant (309)..(309): Xaa in position 309 is any amino acid
  Variant (312)..(312): Xaa in position 312 is any amino acid
  Variant (315)..(315): Xaa in position 315 is any amino acid
  Variant (319)..(321): Xaa in position 319 to 321 is any amino acid
  Variant (322)..(322): Xaa in position 322 is any or no amino acid
  Variant (324)..(327): Xaa in position 324 to 327 is any amino acid
  Variant (329)..(329): Xaa in position 329 is any amino acid
  Variant (330)..(332): Xaa in position 330 to 332 is any or no amino acid
  Variant (334)..(337): Xaa in position 334 to 337 is any amino acid
  Variant (338)..(340): Xaa in position 338 to 340 is any or no amino acid
  Variant (342)..(342): Xaa in position 342 is any amino acid
  Variant (344)..(344): Xaa in position 344 is any amino acid
  Variant (345)..(346): Xaa in position 345 to 346 is any or no amino acid
  Variant (348)..(352): Xaa in position 348 to 352 is any amino acid
  Variant (354)..(357): Xaa in position 354 to 357 is any amino acid
  Variant (359)..(360): Xaa in position 359 to 360 is any amino acid
  Variant (363)..(364): Xaa in position 363 to 364 is any amino acid
  Variant (366)..(375): Xaa in position 366 to 375 is any amino acid
  Variant (376)..(376): Xaa in position 376 is any or no amino acid
  Variant (379)..(386): Xaa in position 379 to 386 is any amino acid
  Variant (387)..(467): Xaa in position 387 to 467 is any or no amino acid
  Variant (471)..(472): Xaa in position 471 to 472 is any amino acid
  Variant (474)..(474): Xaa in position 474 is any amino acid
  Variant (475)..(477): Xaa in position 475 to 477 is any or no amino acid
  Variant (479)..(479): Xaa in position 479 is any amino acid
  Variant (481)..(481): Xaa in position 481 is any amino acid
  Variant (482)..(482): Xaa in position 482 is any or no amino acid
  Variant (484)..(484): Xaa in position 484 is any amino acid
  Variant (485)..(485): Xaa in position 485 is any or no amino acid
  Variant (488)..(492): Xaa in position 488 to 492 is any amino acid
  Variant (493)..(508): Xaa in position 493 to 508 is any or no amino acid
  Variant (511)..(523): Xaa in position 511 to 523 is any amino acid
  Variant (525)..(532): Xaa in position 525 to 532 is any amino acid
  Variant (533)..(561): Xaa in position 533 to 561 is any or no amino acid
  Variant (563)..(566): Xaa in position 563 to 566 is any amino acid
  Variant (567)..(580): Xaa in position 567 to 580 is any or no amino acid
  Variant (582)..(583): Xaa in position 582 to 583 is any amino acid
  Variant (584)..(587): Xaa in position 584 to 587 is any or no amino acid
  Variant (589)..(591): Xaa in position 589 to 591 is any amino acid
  Variant (592)..(592): Xaa in position 592 is any or no amino acid
  Variant (595)..(597): Xaa in position 595 to 597 is any amino acid
  Variant (598)..(599): Xaa in position 598 to 599 is any or no amino acid
  Variant (602)..(611): Xaa in position 602 to 611 is any amino acid
  Variant (612)..(638): Xaa in position 612 to 638 is any or no amino acid
YEXGXXXGXGXFAKVXXAXXXXXXXXXXXXXXXXXXXXXXXXXXXXXXXXXXXXXXXVAXKXXXKXXXXXXXXXXXXXXXXXXXXXXXXXXIXREIXXXXXXXXXXXXXXXXXXXXXXXHPNXVXLXEXXXXXVXAXKXKIYXXXEXXXXGGELFXXXXXXXXXXXXXXXXXXXXXXXGXLXEXXARXYFXQLXXAVXXCHXXGVXHRDLKPENLLLDXXXXXXXXXLKXSDFGLSAXXXXXXXXXXXXXXDGLLHTXCGTPXYVAPEVXXXXGXXXXXXXXXXXXXXXXXXXYDGXXXDXWSCGVILXVLXAGXLPFXXXXNXXXXYXXXXIXXXXXXXPXWXXXSXXXXXLXXXXLXXNPXXRXXXXXXXXXXXWFXXXXXXXXXXXXXXXXXXXXXXXXXXXXXXXXXXXXXXXXXXXXXXXXXXXXXXXXXXXXXXXXXXXXXXXXXXXXXXXXXXXXXXXXXNAFXXIXXXXSXGXXLXXLFXXXXXXXXXXXXXXXXXXXXXRFXXXXXXXXXXXXXEXXXXXXXXXXXXXXXXXXXXXXXXXXXXXXXXXXXXXGXXXXXXXXXXXXXXXXXXEXXXXXXPXXXXVEXXXXXGDXXXXXXXXXXXXXXXXXXXXXXXXXXXXXXXXXXXXXL

SEQ ID NO: 20340 - protein, 28 aa, Artificial sequence
  protein pattern
  Variant (2)..(2): Xaa in position 2 is any amino acid
  Variant (5)..(5): Xaa in position 5 is Ile, Met or Val
  Variant (6)..(6): Xaa in position 6 is any amino acid
  Variant (7)..(7): Xaa in position 7 is Ala, Gly, Ser or Thr
  Variant (8)..(8): Xaa in position 8 is Ile, Leu, Met or Val
  Variant (9)..(9): Xaa in position 9 is any amino acid
  Variant (10)..(10): Xaa in position 10 is Phe, His or Tyr
  Variant (13)..(13): Xaa in position 13 is any amino acid
  Variant (14)..(14): Xaa in position 14 is Lys or Arg
  Variant (17)..(17): Xaa in position 17 is any amino acid
  Variant (23)..(23): Xaa in position 23 is Leu or Pro
  Variant (26)..(26): Xaa in position 26 is any or no amino acid
  Variant (28)..(28): Xaa in position 28 is Ile, Leu or Val
FXQLXXXXXXCHXXGVXHRDLKXENXLX

SEQ ID NO: 20341 - protein, 24 aa, Artificial sequence
  protein pattern
  Variant (2)..(2): Xaa in position 2 is any amino acid
  Variant (4)..(4): Xaa in position 4 is Ala, Pro or Ser
  Variant (7)..(7): Xaa in position 7 is Ile, Leu or Val
  Variant (8)..(8): Xaa in position 8 is Ile or Val
  Variant (10)..(10): Xaa in position 10 is Phe or Tyr
  Variant (12)..(12): Xaa in position 12 is any or no amino acid
  Variant (14)..(14): Xaa in position 14 is any amino acid
  Variant (15)..(15): Xaa in position 15 is any or no amino acid
  Variant (17)..(17): Xaa in position 17 is any amino acid
  Variant (21)..(22): Xaa in position 21 to 22 is any amino acid
  Variant (23)..(23): Xaa in position 23 is any or no amino acid
DXWXCGXXLXVXLXXGXLPFXXXN

SEQ ID NO: 20342 - protein, 20 aa, Artificial sequence
  protein pattern
  Variant (3)..(3): Xaa in position 3 is any or no amino acid
  Variant (5)..(5): Xaa in position 5 is any amino acid
  Variant (6)..(6): Xaa in position 6 is any or no amino acid
  Variant (8)..(8): Xaa in position 8 is any amino acid
  Variant (11)..(11): Xaa in position 11 is Ser or Thr
  Variant (13)..(13): Xaa in position 13 is Ala, Gly, Asn or Ser
  Variant (14)..(14): Xaa in position 14 is Phe or Tyr
  Variant (15)..(15): Xaa in position 15 is Ala, Ile or Val
  Variant (16)..(16): Xaa in position 16 is Ala or Ser
  Variant (19)..(19): Xaa in position 19 is Ile, Leu or Val
  Variant (20)..(20): Xaa in position 20 is Ile or Leu
DGXLXXTXCGXPXXXXPEXX

SEQ ID NO: 20343 - protein, 23 aa, Artificial sequence
  protein pattern
  Variant (2)..(2): Xaa in position 2 is any amino acid
  Variant (3)..(3): Xaa in position 3 is Ile or Val
  Variant (4)..(4): Xaa in position 4 is Ile, Leu or Val
  Variant (5)..(5): Xaa in position 5 is any amino acid
  Variant (6)..(6): Xaa in position 6 is Ile, Leu or Met
  Variant (7)..(7): Xaa in position 7 is any amino acid
  Variant (10)..(10): Xaa in position 10 is any amino acid
  Variant (12)..(12): Xaa in position 12 is any amino acid
  Variant (13)..(14): Xaa in position 13 to 14 is any or no amino acid
  Variant (16)..(17): Xaa in position 16 to 17 is any or no amino acid
  Variant (19)..(19): Xaa in position 19 is any amino acid
  Variant (20)..(20): Xaa in position 20 is Phe, Ile, Leu or Met
  Variant (21)..(21): Xaa in position 21 is Ala, Ile or Val
  Variant (22)..(22): Xaa in position 22 is Ile, Leu, Met or Val
PXXXXXXEVXAXXXKXXIXXXXE

SEQ ID NO: 20344 - protein, 28 aa, Artificial sequence
  protein pattern
  Variant (3)..(3): Xaa in position 3 is Ile, Leu, Met or Val
  Variant (5)..(5): Xaa in position 5 is Lys or Arg
  Variant (6)..(6): Xaa in position 6 is any amino acid
  Variant (7)..(7): Xaa in position 7 is Ile or Leu
  Variant (9)..(9): Xaa in position 9 is any amino acid
  Variant (11)..(11): Xaa in position 11 is Ala, Asn, Ser or Thr
  Variant (13)..(17): Xaa in position 13 to 17 is any or no amino acid
  Variant (19)..(19): Xaa in position 19 is Lys or Arg
  Variant (20)..(22): Xaa in position 20 to 22 is any amino acid
  Variant (23)..(23): Xaa in position 23 is Ala, Gly, Ser or Thr
  Variant (24)..(27): Xaa in position 24 to 27 is any amino acid
  Variant (28)..(28): Xaa in position 28 is Ala, Asp, Gly, Asn, Pro, Ser or Thr
YEXGXXXGXGXFXXXXXAXXXXXXXXXX

SEQ ID NO: 20345 - protein, 15 aa, Artificial sequence
  protein pattern
  Variant (2)..(3): Xaa in position 2 to 3 is any amino acid
  Variant (4)..(4): Xaa in position 4 is Asp, Glu, Gly or Ser
  Variant (5)..(5): Xaa in position 5 is any amino acid
  Variant (6)..(6): Xaa in position 6 is Ile or Leu
  Variant (8)..(8): Xaa in position 8 is Ile, Met or Val
  Variant (9)..(9): Xaa in position 9 is any amino acid
DXXXXXKXXDFGLSA

SEQ ID NO: 20346 - DNA, 309 bp, Arabidopsis thaliana; identical to SEQ ID NO: 2751
  CDS (1)..(309)

SEQ ID NO: 20347 - protein, 102 aa, Arabidopsis thaliana; identical to SEQ ID NO: 2752

SEQ ID NO: 20348 - DNA, 309 bp, Glycine max; identical to SEQ ID NO: 3656
  CDS (1)..(309)

SEQ ID NO: 20349 - protein, 102 aa, Glycine max; identical to SEQ ID NO: 2906

SEQ ID NO: 20350 - DNA, 511 bp, Glycine max; identical to SEQ ID NO: 2575
  CDS (108)..(416)

SEQ ID NO: 20351 - protein, 102 aa, Glycine max; identical to SEQ ID NO: 2576

SEQ ID NO: 20352 - DNA, 306 bp, Glycine max; identical to SEQ ID NO: 2815
  CDS (1)..(306)

SEQ ID NO: 20353 - protein, 101 aa, Glycine max; identical to SEQ ID NO: 2816

SEQ ID NO: 20354 - DNA, 309 bp, Glycine max; identical to SEQ ID NO: 2579
  CDS (1)..(309)

SEQ ID NO: 20355 - protein, 102 aa, Glycine max; identical to SEQ ID NO: 2580

SEQ ID NO: 20356 - DNA, 312 bp, Sorghum bicolor; identical to SEQ ID NO: 2581
  CDS (1)..(312)

SEQ ID NO: 20357 - protein, 103 aa, Sorghum bicolor; identical to SEQ ID NO: 2582

SEQ ID NO: 20358 - DNA, 315 bp, Zea mays; identical to SEQ ID NO: 2583
  CDS (1)..(315)

SEQ ID NO: 20359 - protein, 104 aa, Zea mays; identical to SEQ ID NO: 2584

SEQ ID NO: 20360 - DNA, 312 bp, Zea mays; identical to SEQ ID NO: 2585
  CDS (1)..(312)

SEQ ID NO: 20361 - protein, 103 aa, Zea mays; identical to SEQ ID NO: 2586

SEQ ID NO: 20362 - DNA, 315 bp, Zea mays; identical to SEQ ID NO: 2587
  CDS (1)..(315)

SEQ ID NO: 20363 - protein, 104 aa, Zea mays; identical to SEQ ID NO: 2588

SEQ ID NO: 20364 - DNA, 405 bp, Oryza sativa (japonica cultivar-group); identical to SEQ ID NO: 2593
  CDS (1)..(405)

SEQ ID NO: 20365 - protein, 134 aa, Oryza sativa (japonica cultivar-group); identical to SEQ ID NO: 2594

SEQ ID NO: 20366 - DNA, 477 bp, Oryza sativa (japonica cultivar-group); identical to SEQ ID NO: 2595
  CDS (1)..(477)

SEQ ID NO: 20367 - protein, 158 aa, Oryza sativa (japonica cultivar-group); identical to SEQ ID NO: 2596

SEQ ID NO: 20368 - DNA, 309 bp, Arabidopsis thaliana; identical to SEQ ID NO: 2597
  CDS (1)..(309)

SEQ ID NO: 20369 - protein, 102 aa, Arabidopsis thaliana; identical to SEQ ID NO: 2598

SEQ ID NO: 20370 - DNA, 261 bp, Bordetella pertussis Tohama I
  CDS (1)..(261): transl_table=11
atgcagaaagtagtgatgtacagcaaggactattgtccctactgtgcgcgcgcccaggcgctgctcaagcagcgcggcgtcgccgatctcgaaatcatccgtatcgaccaggatccgtcgcaacgcgacatcatgatcgagcgcaccggccggcgcacggtcccgcagattttcatcggcgagacccatgtcggcgggagcgacgacctgcaggcgctggaccgctcaggcggcctgctcccgctgctcaacggcggctga

SEQ ID NO: 20371 - protein, 86 aa, Bordetella pertussis Tohama I
MQKVVMYSKDYCPYCARAQALLKQRGVADLEIIRIDQDPSQRDIMIERTGRRTVPQIFIGETHVGGSDDLQALDRSGGLLPLLNGG

SEQ ID NO: 20372 - DNA, 294 bp, Bordetella bronchiseptica RB50
  CDS (1)..(294): transl_table=11
gtgcccgccatcccatccccacccggagcgaccatgcagaaagtagtgatgtacagcaaggactattgtccctactgtgcgcgcgcccaggcgctgctcaagcagcgcggcgtcgccgatctcgaaatcatccgtatcgaccaggatccgtcgcaacgcgacatcatgatcgagcgcaccggccggcgcacggtcccgcagattttcatcggcgagacccatgtcggcgggagcgacgacctgcaggcgctggaccgctcaggcggcctgctcccgctgctcaacggcggctga

SEQ ID NO: 20373 - protein, 97 aa, Bordetella bronchiseptica RB50
MPAIPSPPGATMQKVVMYSKDYCPYCARAQALLKQRGVADLEIIRIDQDPSQRDIMIERTGRRTVPQIFIGETHVGGSDDLQALDRSGGLLPLLNGG

SEQ ID NO: 20374 - DNA, 258 bp, Pseudoalteromonas tunicata D2; identical to SEQ ID NO: 3001
  CDS (1)..(258): transl_table=11

SEQ ID NO: 20375 - protein, 85 aa, Pseudoalteromonas tunicata D2; identical to SEQ ID NO: 3002

SEQ ID NO: 20376 - DNA, 384 bp, Medicago truncatula; identical to SEQ ID NO: 2643
  CDS (1)..(384)

SEQ ID NO: 20377 - protein, 127 aa, Medicago truncatula; identical to SEQ ID NO: 2644

SEQ ID NO: 20378 - DNA, 315 bp, Oryza sativa subsp; identical to SEQ ID NO: 3345
  CDS (1)..(315)

SEQ ID NO: 20379 - protein, 104 aa, Oryza sativa subsp; identical to SEQ ID NO: 3346

SEQ ID NO: 20380 - DNA, 393 bp, Oryza sativa subsp; identical to SEQ ID NO: 3347
  CDS (1)..(393)

SEQ ID NO: 20381 - protein, 130 aa, Oryza sativa subsp; identical to SEQ ID NO: 3348

SEQ ID NO: 20382 - DNA, 306 bp, Vitis vinifera; identical to SEQ ID NO: 2645
  CDS (1)..(306)
  misc_feature (225)..(225): r is g or a
  misc_feature (273)..(273): y is t or c

SEQ ID NO: 20383 - protein, 101 aa, Vitis vinifera; identical to SEQ ID NO: 2646

SEQ ID NO: 20384 - DNA, 324 bp, Vitis vinifera; identical to SEQ ID NO: 2647
  CDS (1)..(324)

SEQ ID NO: 20385 - protein, 107 aa, Vitis vinifera; identical to SEQ ID NO: 2648

SEQ ID NO: 20386 - DNA, 321 bp, Vitis vinifera; identical to SEQ ID NO: 2649
  CDS (1)..(321)

SEQ ID NO: 20387 - protein, 106 aa, Vitis vinifera; identical to SEQ ID NO: 2650

SEQ ID NO: 20388 - DNA, 345 bp, Vitis vinifera; identical to SEQ ID NO: 2651
  CDS (1)..(345)

SEQ ID NO: 20389 - protein, 114 aa, Vitis vinifera; identical to SEQ ID NO: 2652

SEQ ID NO: 20390 - DNA, 414 bp, Vitis vinifera; identical to SEQ ID NO: 2653
  CDS (1)..(414)
  misc_feature (18)..(18): y is t or c
  misc_feature (63)..(63): m is a or c

SEQ ID NO: 20391 - protein, 137 aa, Vitis vinifera; identical to SEQ ID NO: 2654

SEQ ID NO: 20392 - DNA, 315 bp, Fritillaria agrestis; identical to SEQ ID NO: 2655
  CDS (1)..(315)

SEQ ID NO: 20393 - protein, 104 aa, Fritillaria agrestis; identical to SEQ ID NO: 2656

SEQ ID NO: 20394 - DNA, 309 bp, Plantago major; identical to SEQ ID NO: 2659
  CDS (1)..(309)

SEQ ID NO: 20395 - protein, 102 aa, Plantago major; identical to SEQ ID NO: 2660

SEQ ID NO: 20396 - DNA, 312 bp, Musa acuminata; identical to SEQ ID NO: 3023
  CDS (1)..(312)

SEQ ID NO: 20397 - protein, 103 aa, Musa acuminata; identical to SEQ ID NO: 3024

SEQ ID NO: 20398 - DNA, 312 bp, Musa acuminata; identical to SEQ ID NO: 2661
  CDS (1)..(312)

SEQ ID NO: 20399 - protein, 103 aa, Musa acuminata; identical to SEQ ID NO: 2662

SEQ ID NO: 20400 - DNA, 357 bp, Medicago truncatula; identical to SEQ ID NO: 2665
  CDS (1)..(357)

SEQ ID NO: 20401 - protein, 118 aa, Medicago truncatula; identical to SEQ ID NO: 2666

SEQ ID NO: 20402 - DNA, 366 bp, Medicago truncatula; identical to SEQ ID NO: 2669
  CDS (1)..(366)

SEQ ID NO: 20403 - protein, 121 aa, Medicago truncatula; identical to SEQ ID NO: 2670

SEQ ID NO: 20404 - DNA, 399 bp, Beta vulgaris; identical to SEQ ID NO: 2671
  CDS (1)..(399)

SEQ ID NO: 20405 - protein, 132 aa, Beta vulgaris; identical to SEQ ID NO: 2672

SEQ ID NO: 20406 - DNA, 321 bp, Beta vulgaris; identical to SEQ ID NO: 2673
  CDS (1)..(321)

SEQ ID NO: 20407 - protein, 106 aa, Beta vulgaris; identical to SEQ ID NO: 2674

SEQ ID NO: 20408 - DNA, 309 bp, Beta vulgaris; identical to SEQ ID NO: 2675
  CDS (1)..(309)

SEQ ID NO: 20409 - protein, 102 aa, Beta vulgaris; identical to SEQ ID NO: 2676

SEQ ID NO: 20410 - DNA, 309 bp, Beta vulgaris; identical to SEQ ID NO: 2677
  CDS (1)..(309)

SEQ ID NO: 20411 - protein, 102 aa, Beta vulgaris; identical to SEQ ID NO: 2678

SEQ ID NO: 20412 - DNA, 309 bp, Beta vulgaris; identical to SEQ ID NO: 2679
  CDS (1)..(309)

SEQ ID NO: 20413 - protein, 102 aa, Beta vulgaris; identical to SEQ ID NO: 2680

SEQ ID NO: 20414 - DNA, 318 bp, Plantago major; identical to SEQ ID NO: 2687
  CDS (1)..(318)

SEQ ID NO: 20415 - protein, 105 aa, Plantago major; identical to SEQ ID NO: 2688

SEQ ID NO: 20416 - DNA, 327 bp, Solanum lycopersicum; identical to SEQ ID NO: 2701
  CDS (1)..(327)

SEQ ID NO: 20417 - protein, 108 aa, Solanum lycopersicum; identical to SEQ ID NO: 2702

SEQ ID NO: 20418 - DNA, 315 bp, Vernicia fordii; identical to SEQ ID NO: 2703
  CDS (1)..(315)

SEQ ID NO: 20419 - protein, 104 aa, Vernicia fordii; identical to SEQ ID NO: 2704

SEQ ID NO: 20420 - DNA, 312 bp, Arabidopsis thaliana; identical to SEQ ID NO: 2707
  CDS (1)..(312)

SEQ ID NO: 20421 - protein, 103 aa, Arabidopsis thaliana; identical to SEQ ID NO: 2708

SEQ ID NO: 20422 - DNA, 312 bp, Arabidopsis thaliana; identical to SEQ ID NO: 2709
  CDS (1)..(312)

SEQ ID NO: 20423 - protein, 103 aa, Arabidopsis thaliana; identical to SEQ ID NO: 2710

SEQ ID NO: 20424 - DNA, 309 bp, Arabidopsis thaliana; identical to SEQ ID NO: 2711
  CDS (1)..(309)

SEQ ID NO: 20425 - protein, 102 aa, Arabidopsis thaliana; identical to SEQ ID NO: 2712

SEQ ID NO: 20426 - DNA, 309 bp, Arabidopsis thaliana; identical to SEQ ID NO: 2713
  CDS (1)..(309)

SEQ ID NO: 20427 - protein, 102 aa, Arabidopsis thaliana; identical to SEQ ID NO: 2714

SEQ ID NO: 20428 - DNA, 300 bp, Arabidopsis thaliana; identical to SEQ ID NO: 2715
  CDS (1)..(300)

SEQ ID NO: 20429 - protein, 99 aa, Arabidopsis thaliana; identical to SEQ ID NO: 2716

SEQ ID NO: 20430 - DNA, 336 bp, Arabidopsis thaliana; identical to SEQ ID NO: 2723
  CDS (1)..(336)

SEQ ID NO: 20431 - protein, 111 aa, Arabidopsis thaliana; identical to SEQ ID NO: 2724

SEQ ID NO: 20432 - DNA, 435 bp, Arabidopsis thaliana; identical to SEQ ID NO: 2731
  CDS (1)..(435)

SEQ ID NO: 20433 - protein, 144 aa, Arabidopsis thaliana; identical to SEQ ID NO: 2732

SEQ ID NO: 20434 - DNA, 411 bp, Arabidopsis thaliana; identical to SEQ ID NO: 2733
  CDS (1)..(411)

SEQ ID NO: 20435 - protein, 136 aa, Arabidopsis thaliana; identical to SEQ ID NO: 2734

SEQ ID NO: 20436 - DNA, 423 bp, Arabidopsis thaliana; identical to SEQ ID NO: 2735
  CDS (1)..(423)

SEQ ID NO: 20437 - protein, 140 aa, Arabidopsis thaliana; identical to SEQ ID NO: 2736

SEQ ID NO: 20438 - DNA, 309 bp, Arabidopsis thaliana; identical to SEQ ID NO: 2739
  CDS (1)..(309)

SEQ ID NO: 20439 - protein, 102 aa, Arabidopsis thaliana; identical to SEQ ID NO: 2740

SEQ ID NO: 20440 - DNA, 309 bp, Arabidopsis thaliana; identical to SEQ ID NO: 2741
  CDS (1)..(309)

SEQ ID NO: 20441 - protein, 102 aa, Arabidopsis thaliana; identical to SEQ ID NO: 2742

SEQ ID NO: 20442 - DNA, 309 bp, Arabidopsis thaliana; identical to SEQ ID NO: 2743
  CDS (1)..(309)

SEQ ID NO: 20443 - protein, 102 aa, Arabidopsis thaliana; identical to SEQ ID NO: 2744

SEQ ID NO: 20444 - DNA, 309 bp, Arabidopsis thaliana; identical to SEQ ID NO: 2745
  CDS (1)..(309)

SEQ ID NO: 20445 - protein, 102 aa, Arabidopsis thaliana; identical to SEQ ID NO: 2746

SEQ ID NO: 20446 - DNA, 309 bp, Arabidopsis thaliana; identical to SEQ ID NO: 2573
  CDS (1)..(309)

SEQ ID NO: 20447 - protein, 102 aa, Arabidopsis thaliana; identical to SEQ ID NO: 2574

SEQ ID NO: 20448 - DNA, 309 bp, Arabidopsis thaliana; identical to SEQ ID NO: 2747
  CDS (1)..(309)

SEQ ID NO: 20449 - protein, 102 aa, Arabidopsis thaliana; identical to SEQ ID NO: 2748

SEQ ID NO: 20450 - DNA, 309 bp, Arabidopsis thaliana; identical to SEQ ID NO: 2749
  CDS (1)..(309)

SEQ ID NO: 20451 - protein, 102 aa, Arabidopsis thaliana; identical to SEQ ID NO: 2750

SEQ ID NO: 20452 - DNA, 378 bp, Oryza sativa; identical to SEQ ID NO: 2753
  CDS (1)..(378)

SEQ ID NO: 20453 - protein, 125 aa, Oryza sativa; identical to SEQ ID NO: 2754

SEQ ID NO: 20454 - DNA, 312 bp, Oryza sativa; identical to SEQ ID NO: 2755
  CDS (1)..(312)

SEQ ID NO: 20455 - protein, 103 aa, Oryza sativa; identical to SEQ ID NO: 2756

SEQ ID NO: 20456 - DNA, 378 bp, Oryza sativa; identical to SEQ ID NO: 2759
  CDS (1)..(378)

SEQ ID NO: 20457 - protein, 125 aa, Oryza sativa; identical to SEQ ID NO: 2760

SEQ ID NO: 20458 - DNA, 408 bp, Oryza sativa; identical to SEQ ID NO: 2761
  CDS (1)..(408)

SEQ ID NO: 20459 - protein, 135 aa, Oryza sativa; identical to SEQ ID NO: 2762

SEQ ID NO: 20460 - DNA, 408 bp, Oryza sativa; identical to SEQ ID NO: 2765
  CDS (1)..(408)

SEQ ID NO: 20461 - protein, 135 aa, Oryza sativa; identical to SEQ ID NO: 2766

SEQ ID NO: 20462 - DNA, 345 bp, Oryza sativa; identical to SEQ ID NO: 2769
  CDS (1)..(345)

SEQ ID NO: 20463 - protein, 114 aa, Oryza sativa; identical to SEQ ID NO: 2770

SEQ ID NO: 20464 - DNA, 399 bp, Oryza sativa; identical to SEQ ID NO: 2773
  CDS (1)..(399)

SEQ ID NO: 20465 - protein, 132 aa, Oryza sativa; identical to SEQ ID NO: 2774

SEQ ID NO: 20466 - DNA, 327 bp, Oryza sativa; identical to SEQ ID NO: 2781
  CDS (1)..(327)

SEQ ID NO: 20467 - protein, 108 aa, Oryza sativa; identical to SEQ ID NO: 2782

SEQ ID NO: 20468 - DNA, 330 bp, Oryza sativa; identical to SEQ ID NO: 2783
  CDS (1)..(330)

SEQ ID NO: 20469 - protein, 109 aa, Oryza sativa; identical to SEQ ID NO: 2784

SEQ ID NO: 20470 - DNA, 330 bp, Oryza sativa; identical to SEQ ID NO: 2785
  CDS (1)..(330)

SEQ ID NO: 20471 - protein, 109 aa, Oryza sativa; identical to SEQ ID NO: 2786

SEQ ID NO: 20472 - DNA, 330 bp, Oryza sativa; identical to SEQ ID NO: 2787
  CDS (1)..(330)

SEQ ID NO: 20473 - protein, 109 aa, Oryza sativa; identical to SEQ ID NO: 2788

SEQ ID NO: 20474 - DNA, 312 bp, Oryza sativa; identical to SEQ ID NO: 2789
  CDS (1)..(312)

SEQ ID NO: 20475 - protein, 103 aa, Oryza sativa; identical to SEQ ID NO: 2790

SEQ ID NO: 20476 - DNA, 315 bp, Oryza sativa; identical to SEQ ID NO: 2791
  CDS (1)..(315)

SEQ ID NO: 20477 - protein, 104 aa, Oryza sativa; identical to SEQ ID NO: 2792

SEQ ID NO: 20478 - DNA, 309 bp, Brassica napus; identical to SEQ ID NO: 2793
  CDS (1)..(309)

SEQ ID NO: 20479 - protein, 102 aa, Brassica napus; identical to SEQ ID NO: 2794

SEQ ID NO: 20480 - DNA, 309 bp, Brassica napus; identical to SEQ ID NO: 2795
  CDS (1)..(309)

SEQ ID NO: 20481 - protein, 102 aa, Brassica napus; identical to SEQ ID NO: 2796

SEQ ID NO: 20482 - DNA, 309 bp, Brassica napus; identical to SEQ ID NO: 2797
  CDS (1)..(309)

SEQ ID NO: 20483 - protein, 102 aa, Brassica napus; identical to SEQ ID NO: 2798

SEQ ID NO: 20484 - DNA, 309 bp, Brassica napus; identical to SEQ ID NO: 2799
  CDS (1)..(309)

SEQ ID NO: 20485 - protein, 102 aa, Brassica napus; identical to SEQ ID NO: 2800

SEQ ID NO: 20486 - DNA, 309 bp, Brassica napus; identical to SEQ ID NO: 2801
  CDS (1)..(309)

SEQ ID NO: 20487 - protein, 102 aa, Brassica napus; identical to SEQ ID NO: 2802

SEQ ID NO: 20488 - DNA, 318 bp, Brassica napus; identical to SEQ ID NO: 2803
  CDS (1)..(318)

SEQ ID NO: 20489 - protein, 105 aa, Brassica napus; identical to SEQ ID NO: 2804

SEQ ID NO: 20490 - DNA, 300 bp, Brassica napus; identical to SEQ ID NO: 2805
  CDS (1)..(300)

SEQ ID NO: 20491 - protein, 99 aa, Brassica napus; identical to SEQ ID NO: 2806

SEQ ID NO: 20492 - DNA, 309 bp, Brassica napus; identical to SEQ ID NO: 2807
  CDS (1)..(309)

SEQ ID NO: 20493 - protein, 102 aa, Brassica napus; identical to SEQ ID NO: 2808

SEQ ID NO: 20494 - DNA, 306 bp, Glycine max; identical to SEQ ID NO: 2811
  CDS (1)..(306)

SEQ ID NO: 20495 - protein, 101 aa, Glycine max; identical to SEQ ID NO: 2812

SEQ ID NO: 20496 - DNA, 315 bp, Triticum aestivum; identical to SEQ ID NO: 2813
  CDS (1)..(315)

SEQ ID NO: 20497 - protein, 104 aa, Triticum aestivum; identical to SEQ ID NO: 2814

SEQ ID NO: 20498 - DNA, 309 bp, Brassica napus; identical to SEQ ID NO: 2817
  CDS (1)..(309)

SEQ ID NO: 20499 - protein, 102 aa, Brassica napus; identical to SEQ ID NO: 2818

SEQ ID NO: 20500 - DNA, 309 bp, Brassica napus; identical to SEQ ID NO: 2819
  CDS (1)..(309)

SEQ ID NO: 20501 - protein, 102 aa, Brassica napus; identical to SEQ ID NO: 2820

SEQ ID NO: 20502 - DNA, 399 bp, Glycine max; identical to SEQ ID NO: 2821
  CDS (1)..(399)

SEQ ID NO: 20503 - protein, 132 aa, Glycine max; identical to SEQ ID NO: 2822

SEQ ID NO: 20504 - DNA, 312 bp, Triticum aestivum; identical to SEQ ID NO: 2823
  CDS (1)..(312)

SEQ ID NO: 20505 - protein, 103 aa, Triticum aestivum; identical to SEQ ID NO: 2824

SEQ ID NO: 20506 - DNA, 414 bp, Triticum aestivum; identical to SEQ ID NO: 2825
  CDS (1)..(414)

SEQ ID NO: 20507 - protein, 137 aa, Triticum aestivum; identical to SEQ ID NO: 2826

SEQ ID NO: 20508 - DNA, 414 bp, Zea mays; identical to SEQ ID NO: 2827
  CDS (1)..(414)

SEQ ID NO: 20509 - protein, 137 aa, Zea mays; identical to SEQ ID NO: 2828

SEQ ID NO: 20510 - DNA, 312 bp, Hordeum vulgare; identical to SEQ ID NO: 2833
  CDS (1)..(312)

SEQ ID NO: 20511 - protein, 103 aa, Hordeum vulgare; identical to SEQ ID NO: 2834

SEQ ID NO: 20512 - DNA, 309 bp, Brassica napus; identical to SEQ ID NO: 2843
  CDS (1)..(309)

SEQ ID NO: 20513 - protein, 102 aa, Brassica napus; identical to SEQ ID NO: 2844

SEQ ID NO: 20514 - DNA, 309 bp, Brassica napus; identical to SEQ ID NO: 2845
  CDS (1)..(309)

SEQ ID NO: 20515 - protein, 102 aa, Brassica napus; identical to SEQ ID NO: 2846

SEQ ID NO: 20516 - DNA, 435 bp, Brassica napus; identical to SEQ ID NO: 2849
  CDS (1)..(435)

SEQ ID NO: 20517 - protein, 144 aa, Brassica napus; identical to SEQ ID NO: 2850

SEQ ID NO: 20518 - DNA, 435 bp, Brassica napus; identical to SEQ ID NO: 2851
  CDS (1)..(435)

SEQ ID NO: 20519 - protein, 144 aa, Brassica napus; identical to SEQ ID NO: 2852

SEQ ID NO: 20520 - DNA, 309 bp, Brassica napus; identical to SEQ ID NO: 2853
  CDS (1)..(309)

SEQ ID NO: 20521 - protein, 102 aa, Brassica napus; identical to SEQ ID NO: 2854

SEQ ID NO: 20522 - DNA, 300 bp, Brassica napus; identical to SEQ ID NO: 2855
  CDS (1)..(300)

SEQ ID NO: 20523 - protein, 99 aa, Brassica napus; identical to SEQ ID NO: 2856

SEQ ID NO: 20524 - DNA, 336 bp, Brassica napus; identical to SEQ ID NO: 2859
  CDS (1)..(336)

SEQ ID NO: 20525 - protein, 111 aa, Brassica napus; identical to SEQ ID NO: 2860

SEQ ID NO: 20526 - DNA, 309 bp, Brassica napus; identical to SEQ ID NO: 2861
  CDS (1)..(309)

SEQ ID NO: 20527 - protein, 102 aa, Brassica napus; identical to SEQ ID NO: 2862

SEQ ID NO: 20528 - DNA, 309 bp, Brassica napus; identical to SEQ ID NO: 2865
  CDS (1)..(309)

SEQ ID NO: 20529 - protein, 102 aa, Brassica napus; identical to SEQ ID NO: 2866

SEQ ID NO: 20530 - DNA, 300 bp, Brassica napus; identical to SEQ ID NO: 2867
  CDS (1)..(300)

SEQ ID NO: 20531 - protein, 99 aa, Brassica napus; identical to SEQ ID NO: 2868

SEQ ID NO: 20532 - DNA, 309 bp, Brassica napus; identical to SEQ ID NO: 2869
  CDS (1)..(309)

SEQ ID NO: 20533 - protein, 102 aa, Brassica napus; identical to SEQ ID NO: 2870

SEQ ID NO: 20534 - DNA, 309 bp, Brassica napus; identical to SEQ ID NO: 2871
  CDS (1)..(309)

SEQ ID NO: 20535 - protein, 102 aa, Brassica napus; identical to SEQ ID NO: 2872

SEQ ID NO: 20536 - DNA, 309 bp, Brassica napus; identical to SEQ ID NO: 2873
  CDS (1)..(309)

SEQ ID NO: 20537 - protein, 102 aa, Brassica napus; identical to SEQ ID NO: 2874

SEQ ID NO: 20538 - DNA, 312 bp, Brassica napus; identical to SEQ ID NO: 2875
  CDS (1)..(312)

SEQ ID NO: 20539 - protein, 103 aa, Brassica napus; identical to SEQ ID NO: 2876

SEQ ID NO: 20540 - DNA, 426 bp, Brassica napus; identical to SEQ ID NO: 2877
  CDS (1)..(426)

SEQ ID NO: 20541 - protein, 141 aa, Brassica napus; identical to SEQ ID NO: 2878

SEQ ID NO: 20542 - DNA, 309 bp, Brassica napus; identical to SEQ ID NO: 2879
  CDS (1)..(309)

SEQ ID NO: 20543 - protein, 102 aa, Brassica napus; identical to SEQ ID NO: 2880

SEQ ID NO: 20544 - DNA, 333 bp, Glycine max; identical to SEQ ID NO: 2881
  CDS (1)..(333)

SEQ ID NO: 20545 - protein, 110 aa, Glycine max; identical to SEQ ID NO: 2882

SEQ ID NO: 20546 - DNA, 324 bp, Glycine max; identical to SEQ ID NO: 2883
  CDS (1)..(324)

SEQ ID NO: 20547 - protein, 107 aa, Glycine max; identical to SEQ ID NO: 2884

SEQ ID NO: 20548 - DNA, 399 bp, Glycine max; identical to SEQ ID NO: 2887
  CDS (1)..(399)

SEQ ID NO: 20549 - protein, 132 aa, Glycine max; identical to SEQ ID NO: 2888

SEQ ID NO: 20550 - DNA, 309 bp, Glycine max; identical to SEQ ID NO: 2889
  CDS (1)..(309)

SEQ ID NO: 20551 - protein, 102 aa, Glycine max; identical to SEQ ID NO: 2890

SEQ ID NO: 20552 - DNA, 309 bp, Glycine max; identical to SEQ ID NO: 2899
  CDS (1)..(309)

SEQ ID NO: 20553 - protein, 102 aa, Glycine max; identical to SEQ ID NO: 2900

SEQ ID NO: 20554 - DNA, 306 bp, Glycine max; identical to SEQ ID NO: 2903
  CDS (1)..(306)

SEQ ID NO: 20555 - protein, 101 aa, Glycine max; identical to SEQ ID NO: 2904

SEQ ID NO: 20556 - DNA, 318 bp, Glycine max; identical to SEQ ID NO: 2907
  CDS (1)..(318)

SEQ ID NO: 20557 - protein, 105 aa, Glycine max; identical to SEQ ID NO: 2908

SEQ ID NO: 20558 - DNA, 402 bp, Glycine max; identical to SEQ ID NO: 2909
  CDS (1)..(402)

SEQ ID NO: 20559 - protein, 133 aa, Glycine max; identical to SEQ ID NO: 2910

SEQ ID NO: 20560 - DNA, 309 bp, Glycine max; identical to SEQ ID NO: 2911
  CDS (1)..(309)

SEQ ID NO: 20561 - protein, 102 aa, Glycine max; identical to SEQ ID NO: 2912

SEQ ID NO: 20562 - DNA, 402 bp, Glycine max; identical to SEQ ID NO: 2913
  CDS (1)..(402)

SEQ ID NO: 20563 - protein, 133 aa, Glycine max; identical to SEQ ID NO: 2914

SEQ ID NO: 20564 - DNA, 393 bp, Zea mays; identical to SEQ ID NO: 2917
  CDS (1)..(393)

SEQ ID NO: 20565 - protein, 130 aa, Zea mays; identical to SEQ ID NO: 2918

SEQ ID NO: 20566 - DNA, 345 bp, Zea mays; identical to SEQ ID NO: 2919
  CDS (1)..(345)

SEQ ID NO: 20567 - protein, 114 aa, Zea mays; identical to SEQ ID NO: 2920

SEQ ID NO: 20568 - DNA, 312 bp, Zea mays; identical to SEQ ID NO: 2921
  CDS (1)..(312)

SEQ ID NO: 20569 - protein, 103 aa, Zea mays; identical to SEQ ID NO: 2922

SEQ ID NO: 20570 - DNA, 342 bp, Zea mays; identical to SEQ ID NO: 2923
  CDS (1)..(342)

SEQ ID NO: 20571 - protein, 113 aa, Zea mays; identical to SEQ ID NO: 2924

SEQ ID NO: 20572 - DNA, 315 bp, Zea mays; identical to SEQ ID NO: 2929
  CDS (1)..(315)

SEQ ID NO: 20573 - protein, 104 aa, Zea mays; identical to SEQ ID NO: 2930

SEQ ID NO: 20574 - DNA, 21 bp, Artificial sequence
  primer
atggacaaagttgtgagaatg

SEQ ID NO: 20575 - DNA, 22 bp, Artificial sequence
  primer
ttaacatagattggcttgaaac

SEQ ID NO: 20576 - protein, 107 aa, Artificial sequence
  consensus sequence
  Variant (3)..(3): Xaa in position 3 is any amino acid
  Variant (5)..(8): Xaa in position 5 to 8 is any amino acid
  Variant (9)..(9): Xaa in position 9 is any or no amino acid
  Variant (11)..(18): Xaa in position 11 to 18 is any amino acid
  Variant (20)..(23): Xaa in position 20 to 23 is any amino acid
  Variant (24)..(24): Xaa in position 24 is any or no amino acid
  Variant (26)..(31): Xaa in position 26 to 31 is any amino acid
  Variant (32)..(32): Xaa in position 32 is any or no amino acid
  Variant (34)..(34): Xaa in position 34 is any amino acid
  Variant (36)..(44): Xaa in position 36 to 44 is any amino acid
  Variant (45)..(46): Xaa in position 45 to 46 is any or no amino acid
  Variant (49)..(52): Xaa in position 49 to 52 is any amino acid
  Variant (53)..(68): Xaa in position 53 to 68 is any or no amino acid
  Variant (71)..(71): Xaa in position 71 is any amino acid
  Variant (74)..(74): Xaa in position 74 is any amino acid
  Variant (77)..(79): Xaa in position 77 to 79 is any amino acid
  Variant (81)..(88): Xaa in position 81 to 88 is any amino acid
  Variant (90)..(91): Xaa in position 90 to 91 is any amino acid
  Variant (93)..(93): Xaa in position 93 is any amino acid
  Variant (95)..(95): Xaa in position 95 is any amino acid
  Variant (97)..(97): Xaa in position 97 is any amino acid
  Variant (99)..(102): Xaa in position 99 to 102 is any amino acid
  Variant (103)..(106): Xaa in position 103 to 106 is any or no amino acid
VVXFXXXXXCXXXXXXXXLXXXXXGXXXXXXXEXDXXXXXXXXXXXALXXXXXXXXXXXXXXXXXXXXVPXVFXGGXXXGXXXXXXXXHXXGXLXPXLXXXXXXXXA

SEQ ID NO: 20577 - protein, 27 aa, Artificial sequence
  protein pattern
  Variant (2)..(2): Xaa in position 2 is any amino acid
  Variant (3)..(3): Xaa in position 3 is Ile or Val
  Variant (5)..(5): Xaa in position 5 is Ile or Val
  Variant (6)..(6): Xaa in position 6 is Gly or Ser
  Variant (7)..(7): Xaa in position 7 is Glu, Gly or Gln
  Variant (8)..(10): Xaa in position 8 to 10 is any amino acid
  Variant (12)..(12): Xaa in position 12 is Ala, Gly, Pro, Ser or Thr
  Variant (13)..(19): Xaa in position 13 to 19 is any amino acid
  Variant (20)..(20): Xaa in position 20 is His, Asp or Gln
  Variant (21)..(22): Xaa in position 21 to 22 is any amino acid
  Variant (24)..(24): Xaa in position 24 is any amino acid
  Variant (26)..(26): Xaa in position 26 is any amino acid
PXXFXXXXXXGXXXXXXXXXXXGXLXP

SEQ ID NO: 20578 - DNA, 1509 bp, Arabidopsis thaliana; identical to SEQ ID NO: 1841
  CDS (1)..(1509)

SEQ ID NO: 20579 - protein, 502 aa, Arabidopsis thaliana; identical to SEQ ID NO: 1842

SEQ ID NO: 20580 - DNA, 1620 bp, Zea mays
  CDS (1)..(1620)
  misc_feature (96)..(96): n is a, g, c or t
atgggcctgcctccgctgccggccgtgctacctaatcgccgcgcttgttttcccaccgcccgatggccgccatcacgccgccgacgcagtcggagnccgtcgccgcagacggggcgcccggcctcgtctgccgccgccgcggccaagcgtggagggggcggggctggtgccgccggcgggccgctgatggggaagtacgagctggggcgcctcctggggcacggcaccttcgcgaaggtgtaccacgcgcggcacgtcgacacgggggacaacgttgccatcaaggtgctcgacaaggagaaggccgtgaagagcgggctcgtcccgcacatcaagcgcgagatcgctgtgctacgccgcgtgcgccacccgaacatcgtgcacctgttcgaggttatggccacgaagactaagatctacttcgtcatggagctcgtccgcggcggcgagctcttctcccgcgtctccaagggccgactcagggaggacaccgcgcgccgctacttccagcagctcgtctccgccgtggggttctgccacgcccgcggcgtcttccaccgcgacctgaagcccgagaatctactcgtcgacgagcaggggaacctcaaggtatcggattttgggctctccgccgtcgccgagcagttccgtcccgacggcctgctccacaccttctgcggcacgccggcctatgtggcccccgaagtgctcggccgccgcgggtacgacggcgccaaggcagacgtgtggtcgtgcggtgtcatcctctttgtgctcatggccggatatctccctttccatgacaaaaacatcatggccatgtacaagaagatttacaagggcgagttccgctgtgcgaggtggttctccaaagaccttaccagcttgctgatgcgcattcttcacactaatcccaacactcggatcactttgccggagatcatggagtcccgctggttcaagaaaggattcaagcctgtcaagttctatatcgaggatgaccagctgcataacgttatagatgacgaagatggcctgttagatatgggacctgctggtcctgttcctccaccattgccacctccaccgccacctctatctccaccaaaggttgatggtgatgaatcagggtcggactcagactcgtcgatctcatcctgccctgcttcaatgttatctgatgagagccaaaggccccgtggctctctaccacgtccagcaagtcttaatgcctttgatatcatatcattttcaaggggatttaacttatcagggttatttgaggagaaaggggatgaagtgaggttcatctcggctgagcccatgtcagatatcataaccaaattggaggacatagcgaagctgaagagcttcaagttgcggaggaaggactggcgcatctgcctggagggtacaagggaaggagttaaggggccattaacaattggcgcggagatatttgaactcacacctccccttgtaatggtggaggtaaaaaagaaggcaggggataatgaagagtacgagaacttctgtgacaaggaattgaagccagggatgcagcaccttgtccaccatatggtccgagctccaagtatgctgcttactgatgccaagtga

SEQ ID NO: 20581 - protein, 539 aa, Zea mays
  misc_feature (32)..(32): The Xaa at location 32 stands for Arg, or Ser.
MGLPPLPAVLPNRRACFPTARWPPSRRRRSRXPSPQTGRPASSAAAAAKRGGGGAGAAGGPLMGKYELGRLLGHGTFAKVYHARHVDTGDNVAIKVLDKEKAVKSGLVPHIKREIAVLRRVRHPNIVHLFEVMATKTKIYFVMELVRGGELFSRVSKGRLREDTARRYFQQLVSAVGFCHARGVFHRDLKPENLLVDEQGNLKVSDFGLSAVAEQFRPDGLLHTFCGTPAYVAPEVLGRRGYDGAKADVWSCGVILFVLMAGYLPFHDKNIMAMYKKIYKGEFRCARWFSKDLTSLLMRILHTNPNTRITLPEIMESRWFKKGFKPVKFYIEDDQLHNVIDDEDGLLDMGPAGPVPPPLPPPPPPLSPPKVDGDESGSDSDSSISSCPASMLSDESQRPRGSLPRPASLNAFDIISFSRGFNLSGLFEEKGDEVRFISAEPMSDIITKLEDIAKLKSFKLRRKDWRICLEGTREGVKGPLTIGAEIFELTPPLVMVEVKKKAGDNEEYENFCDKELKPGMQHLVHHMVRAPSMLLTDAK

SEQ ID NO: 20582 - DNA, 2022 bp, Glycine max
  CDS (76)..(1629)
tgaagctccatcaccactagcgaacacttccattgtttttatctcacaggatcgatcgatatcaccagcatcaccatggcagaggtggcgccgccgaagaaggaaaacccgaaccttctcctggggcggttcgagctcgggaagctcctcgggcacggaaccttcgcgaaggtccaccacgcgcgcaacatcaaaaccggagaaggagtcgccatcaagatcatcaacaaggagaaaatcctaaaggggggtttggtctcccacataaagcgcgagatctccattctccggcgcgtgcgccaccccaacatcgtgcaactcttcgaagtgatggccaccaagaccaagatctacttcgtcatggagtacgtgcgtggcggcgaactcttcaacaaggtcgcaaagggaagattaaaagaagaagttgcgagaaattactttcagcagttagtttccgcggtggagttttgccacgcgcgcggcgtgttccacagggacctgaagcccgagaacctgttgctggacgaggatgggaaccttaaagtctccgactttggtctcagtgccgtgtcggatcagataaggcaggacgggctgttccacacgttttgtgggacacctgcgtatgttgctcctgaggtcttgtcgcggaaaggctacgatggtgcaaaggttgatatttggtcttgtggggttgttttgtttgttctgatggccggctatttgcccttcaatgaccgtaacgttatggctatgtataagaagatttacaagggtgagtttcggtgtcccaggtggttttcttctgaacttacaagacttctctctaggcttcttgatactaaccctcagacaaggatttctattcctgaagtcatggagaatcgctggttcaagaagggtttcaagcagattaagttttatgtggaggatgatagagtttgtagttttgacgagaaactgttacttcatcatgatgatgatttggcaacatcggattctgaggttgagattaggaggaagaatagtaatggttcgttgccgaggcctgcgagtttgaatgcgtttgacatcatatcgttttctcagggctttgatctatcagggttgtttgaggaaaagggtgatgaggcgaggtttgtgtcatctgctccggtgtcgaagattatatcaaaattggaggaggttgctcagttggttagtttcagtgtgaggaagaaagattgcagggtgagcttggaggggtgtagagaaggtgtgaaggggcctttgactattgctgctgaggtttttgagttgacaccttccttggtggtggtggaggtcaagaaaaagggaggggataaggccgagtatgagaagttttgtaactctgagttgagacccgcgttggagaatttagggatggaggaatctgcttcttcttcttcttcttgtcatcaatctacacacactcaatctgaattccaacaacatcgaacactttctgactctgcccttaacagacattcagataatgaatgtttgttcgaacgagagttaggtctagcagatgagactagtatctcacaacatggtgaatcaaagttcgaatgtcaacaggaaaatatggccatgtttactatctgaccatgtcttgagcactatgattgtttccaaagaatgaaaacaaaaaagataatgaatgcttgcattaattaaggtagcaggagaatgacagaagatgatagcatactatttctctcttgttgttttaggctgtgtgtaagttaaattttactttctttttccctcgagaattttccggcatttttaggtttgctccttgactggagcattagattctactgtatttgtatgtccaaatgttgtgtttctgtaaggctaatttaatttaaatatagtgaatgaagtgtacatgtcaacagttcacatgtcttggtaaattgctctgtaactgtatttatttccattctttattgcaagtaatgagaaaataataatgcaactttcttgtgattc

SEQ ID NO: 20583 - protein, 517 aa, Glycine max
MAEVAPPKKENPNLLLGRFELGKLLGHGTFAKVHHARNIKTGEGVAIKIINKEKILKGGLVSHIKREISILRRVRHPNIVQLFEVMATKTKIYFVMEYVRGGELFNKVAKGRLKEEVARNYFQQLVSAVEFCHARGVFHRDLKPENLLLDEDGNLKVSDFGLSAVSDQIRQDGLFHTFCGTPAYVAPEVLSRKGYDGAKVDIWSCGVVLFVLMAGYLPFNDRNVMAMYKKIYKGEFRCPRWFSSELTRLLSRLLDTNPQTRISIPEVMENRWFKKGFKQIKFYVEDDRVCSFDEKLLLHHDDDLATSDSEVEIRRKNSNGSLPRPASLNAFDIISFSQGFDLSGLFEEKGDEARFVSSAPVSKIISKLEEVAQLVSFSVRKKDCRVSLEGCREGVKGPLTIAAEVFELTPSLVVVEVKKKGGDKAEYEKFCNSELRPALENLGMEESASSSSSCHQSTHTQSEFQQHRTLSDSALNRHSDNECLFERELGLADETSISQHGESKFECQQENMAMFTI

SEQ ID NO: 20584 - DNA, 1449 bp, Arabidopsis thaliana; identical to SEQ ID NO: 1821
  CDS (1)..(1449)

SEQ ID NO: 20585 - protein, 482 aa, Arabidopsis thaliana; identical to SEQ ID NO: 1822

SEQ ID NO: 20586 - DNA, 1278 bp, Arabidopsis thaliana; identical to SEQ ID NO: 1823
  CDS (1)..(1278)

SEQ ID NO: 20587 - protein, 425 aa, Arabidopsis thaliana; identical to SEQ ID NO: 1824

SEQ ID NO: 20588 - DNA, 1536 bp, Oryza sativa (japonica cultivar-group); identical to SEQ ID NO: 2091
  CDS (1)..(1536)

SEQ ID NO: 20589 - protein, 511 aa, Oryza sativa (japonica cultivar-group); identical to SEQ ID NO: 2092

SEQ ID NO: 20590 - DNA, 1386 bp, Oryza sativa (japonica cultivar-group); identical to SEQ ID NO: 2093
  CDS (1)..(1386)

SEQ ID NO: 20591 - protein, 461 aa, Oryza sativa (japonica cultivar-group); identical to SEQ ID NO: 2094

SEQ ID NO: 20592 - DNA, 1386 bp, Oryza sativa (japonica cultivar-group); identical to SEQ ID NO: 2095
  CDS (1)..(1386)

SEQ ID NO: 20593 - protein, 461 aa, Oryza sativa (japonica cultivar-group); identical to SEQ ID NO: 2096

SEQ ID NO: 20594 - DNA, 1341 bp, Oryza sativa (japonica cultivar-group); identical to SEQ ID NO: 2101
  CDS (1)..(1341)

SEQ ID NO: 20595 - protein, 446 aa, Oryza sativa (japonica cultivar-group); identical to SEQ ID NO: 2102

SEQ ID NO: 20596 - DNA, 1431 bp, Oryza sativa (japonica cultivar-group); identical to SEQ ID NO: 2103
  CDS (1)..(1431)

SEQ ID NO: 20597 - protein, 476 aa, Oryza sativa (japonica cultivar-group); identical to SEQ ID NO: 2104

SEQ ID NO: 20598 - DNA, 1623 bp, Oryza sativa (japonica cultivar-group); identical to SEQ ID NO: 2105
  CDS (1)..(1623)

SEQ ID NO: 20599 - protein, 540 aa, Oryza sativa (japonica cultivar-group); identical to SEQ ID NO: 2106

SEQ ID NO: 20600 - DNA, 1509 bp, Oryza sativa (japonica cultivar-group); identical to SEQ ID NO: 2107
  CDS (1)..(1509)

SEQ ID NO: 20601 - protein, 502 aa, Oryza sativa (japonica cultivar-group); identical to SEQ ID NO: 2108

SEQ ID NO: 20602 - DNA, 1482 bp, Oryza sativa (japonica cultivar-group); identical to SEQ ID NO: 2109
  CDS (1)..(1482)

SEQ ID NO: 20603 - protein, 493 aa, Oryza sativa (japonica cultivar-group); identical to SEQ ID NO: 2110

SEQ ID NO: 20604 - DNA, 1311 bp, Oryza sativa (japonica cultivar-group); identical to SEQ ID NO: 2111
  CDS (1)..(1311)

SEQ ID NO: 20605 - protein, 436 aa, Oryza sativa (japonica cultivar-group); identical to SEQ ID NO: 2112

SEQ ID NO: 20606 - DNA, 1629 bp, Oryza sativa (japonica cultivar-group); identical to SEQ ID NO: 1825
  CDS (1)..(1629)

SEQ ID NO: 20607 - protein, 542 aa, Oryza sativa (japonica cultivar-group); identical to SEQ ID NO: 1826

SEQ ID NO: 20608 - DNA, 1356 bp, Oryza sativa (japonica cultivar-group); identical to SEQ ID NO: 2121
  CDS (1)..(1356)

SEQ ID NO: 20609 - protein, 451 aa, Oryza sativa (japonica cultivar-group); identical to SEQ ID NO: 2122

SEQ ID NO: 20610 - DNA, 1344 bp, Oryza sativa (japonica cultivar-group); identical to SEQ ID NO: 2125
  CDS (1)..(1344)

SEQ ID NO: 20611 - protein, 447 aa, Oryza sativa (japonica cultivar-group); identical to SEQ ID NO: 2126

SEQ ID NO: 20612 - DNA, 1365 bp, Oryza sativa (japonica cultivar-group); identical to SEQ ID NO: 2129
  CDS (1)..(1365)

SEQ ID NO: 20613 - protein, 454 aa, Oryza sativa (japonica cultivar-group); identical to SEQ ID NO: 2130

SEQ ID NO: 20614 - DNA, 1401 bp, Oryza sativa (japonica cultivar-group); identical to SEQ ID NO: 2131
  CDS (1)..(1401)

SEQ ID NO: 20615 - protein, 466 aa, Oryza sativa (japonica cultivar-group); identical to SEQ ID NO: 2132

SEQ ID NO: 20616 - DNA, 1374 bp, Oryza sativa (japonica cultivar-group); identical to SEQ ID NO: 2133
  CDS (1)..(1374)

SEQ ID NO: 20617 - protein, 457 aa, Oryza sativa (japonica cultivar-group); identical to SEQ ID NO: 2134

SEQ ID NO: 20618 - DNA, 1527 bp, Oryza sativa (japonica cultivar-group); identical to SEQ ID NO: 2139
  CDS (1)..(1527)

SEQ ID NO: 20619 - protein, 508 aa, Oryza sativa (japonica cultivar-group); identical to SEQ ID NO: 2140

SEQ ID NO: 20620 - DNA, 1545 bp, Oryza sativa (japonica cultivar-group); identical to SEQ ID NO: 2143
  CDS (1)..(1545)

SEQ ID NO: 20621 - protein, 514 aa, Oryza sativa (japonica cultivar-group); identical to SEQ ID NO: 2144

SEQ ID NO: 20622 - DNA, 1362 bp, Oryza sativa (japonica cultivar-group); identical to SEQ ID NO: 2145
  CDS (1)..(1362)

SEQ ID NO: 20623 - protein, 453 aa, Oryza sativa (japonica cultivar-group); identical to SEQ ID NO: 2146

SEQ ID NO: 20624 - DNA, 1353 bp, Oryza sativa (japonica cultivar-group); identical to SEQ ID NO: 2147
  CDS (1)..(1353)

SEQ ID NO: 20625 - protein, 450 aa, Oryza sativa (japonica cultivar-group); identical to SEQ ID NO: 2148

SEQ ID NO: 20626 - DNA, 1332 bp, Oryza sativa (japonica cultivar-group); identical to SEQ ID NO: 2157
  CDS (1)..(1332)

SEQ ID NO: 20627 - protein, 443 aa, Oryza sativa (japonica cultivar-group); identical to SEQ ID NO: 2158

SEQ ID NO: 20628 - DNA, 1338 bp, Oryza sativa (japonica cultivar-group); identical to SEQ ID NO: 2159
  CDS (1)..(1338)

SEQ ID NO: 20629 - protein, 445 aa, Oryza sativa (japonica cultivar-group); identical to SEQ ID NO: 2160

SEQ ID NO: 20630 - DNA, 1215 bp, Oryza sativa (japonica cultivar-group); identical to SEQ ID NO: 2165
  CDS (1)..(1215)

SEQ ID NO: 20631 - protein, 404 aa, Oryza sativa (japonica cultivar-group); identical to SEQ ID NO: 2166

SEQ ID NO: 20632 - DNA, 1305 bp, Oryza sativa (japonica cultivar-group); identical to SEQ ID NO: 2167
  CDS (1)..(1305)

SEQ ID NO: 20633 - protein, 434 aa, Oryza sativa (japonica cultivar-group); identical to SEQ ID NO: 2168

SEQ ID NO: 20634 - DNA, 1320 bp, Oryza sativa (japonica cultivar-group); identical to SEQ ID NO: 2171
  CDS (1)..(1320)

SEQ ID NO: 20635 - protein, 439 aa, Oryza sativa (japonica cultivar-group); identical to SEQ ID NO: 2172

SEQ ID NO: 20636 - DNA, 1317 bp, Oryza sativa (japonica cultivar-group); identical to SEQ ID NO: 2173
  CDS (1)..(1317)

SEQ ID NO: 20637 - protein, 438 aa, Oryza sativa (japonica cultivar-group); identical to SEQ ID NO: 2174

SEQ ID NO: 20638 - DNA, 1344 bp, Arabidopsis thaliana; identical to SEQ ID NO: 1831
  CDS (1)..(1344)

SEQ ID NO: 20639 - protein, 447 aa, Arabidopsis thaliana; identical to SEQ ID NO: 1832

SEQ ID NO: 20640 - DNA, 1563 bp, Arabidopsis thaliana; identical to SEQ ID NO: 1833
  CDS (1)..(1563)

SEQ ID NO: 20641 - protein, 520 aa, Arabidopsis thaliana; identical to SEQ ID NO: 1834

SEQ ID NO: 20642 - DNA, 1299 bp, Arabidopsis thaliana; identical to SEQ ID NO: 1835
  CDS (1)..(1299)

SEQ ID NO: 20643 - protein, 432 aa, Arabidopsis thaliana; identical to SEQ ID NO: 1836

SEQ ID NO: 20644 - DNA, 1410 bp, Arabidopsis thaliana; identical to SEQ ID NO: 1839
  CDS (1)..(1410)

SEQ ID NO: 20645 - protein, 469 aa, Arabidopsis thaliana; identical to SEQ ID NO: 1840

SEQ ID NO: 20646 - DNA, 1368 bp, Arabidopsis thaliana; identical to SEQ ID NO: 1843
  CDS (1)..(1368)

SEQ ID NO: 20647 - protein, 455 aa, Arabidopsis thaliana; identical to SEQ ID NO: 1844

SEQ ID NO: 20648 - DNA, 1290 bp, Arabidopsis thaliana; identical to SEQ ID NO: 1815
  CDS (1)..(1290)

SEQ ID NO: 20649 - protein, 429 aa, Arabidopsis thaliana; identical to SEQ ID NO: 1816

SEQ ID NO: 20650 - DNA, 1281 bp, Arabidopsis thaliana; identical to SEQ ID NO: 1845
  CDS (1)..(1281)

SEQ ID NO: 20651 - protein, 426 aa, Arabidopsis thaliana; identical to SEQ ID NO: 1846

SEQ ID NO: 20652 - DNA, 1470 bp, Arabidopsis thaliana; identical to SEQ ID NO: 1847
  CDS (1)..(1470)

SEQ ID NO: 20653 - protein, 489 aa, Arabidopsis thaliana; identical to SEQ ID NO: 1848

SEQ ID NO: 20654 - DNA, 1338 bp, Arabidopsis thaliana; identical to SEQ ID NO: 1849
  CDS (1)..(1338)

SEQ ID NO: 20655 - protein, 445 aa, Arabidopsis thaliana; identical to SEQ ID NO: 1850

SEQ ID NO: 20656 - DNA, 1326 bp, Arabidopsis thaliana; identical to SEQ ID NO: 1851
  CDS (1)..(1326)

SEQ ID NO: 20657 - protein, 441 aa, Arabidopsis thaliana [sequence omitted]

SEQ ID NO: 20658 - DNA, 1329 bp, Arabidopsis thaliana; identical to SEQ ID NO: 1853
  CDS (1)..(1329)

SEQ ID NO: 20659 - protein, 442 aa, Arabidopsis thaliana; identical to SEQ ID NO: 1854

SEQ ID NO: 20660 - DNA, 1371 bp, Arabidopsis thaliana; identical to SEQ ID NO: 1855
  CDS (1)..(1371)

SEQ ID NO: 20661 - protein, 456 aa, Arabidopsis thaliana; identical to SEQ ID NO: 1856

SEQ ID NO: 20662 - DNA, 1452 bp, Arabidopsis thaliana; identical to SEQ ID NO: 1857
  CDS (1)..(1452)

SEQ ID NO: 20663 - protein, 483 aa, Arabidopsis thaliana; identical to SEQ ID NO: 1858

SEQ ID NO: 20664 - DNA, 1320 bp, Arabidopsis thaliana; identical to SEQ ID NO: 1859
  CDS (1)..(1320)

SEQ ID NO: 20665 - protein, 439 aa, Arabidopsis thaliana; identical to SEQ ID NO: 1860

SEQ ID NO: 20666 - DNA, 1338 bp, Arabidopsis thaliana; identical to SEQ ID NO: 1861
  CDS (1)..(1338)

SEQ ID NO: 20667 - protein, 445 aa, Arabidopsis thaliana; identical to SEQ ID NO: 1862

SEQ ID NO: 20668 - DNA, 1467 bp, Arabidopsis thaliana; identical to SEQ ID NO: 1863
  CDS (1)..(1467)

SEQ ID NO: 20669 - protein, 488 aa, Arabidopsis thaliana; identical to SEQ ID NO: 1864

SEQ ID NO: 20670 - DNA, 1440 bp, Arabidopsis thaliana; identical to SEQ ID NO: 1867
  CDS (1)..(1440)

SEQ ID NO: 20671 - protein, 479 aa, Arabidopsis thaliana; identical to SEQ ID NO: 1868

SEQ ID NO: 20672 - DNA, 1350 bp, Arabidopsis thaliana; identical to SEQ ID NO: 1869
  CDS (1)..(1350)

SEQ ID NO: 20673 - protein, 449 aa, Arabidopsis thaliana; identical to SEQ ID NO: 1870

SEQ ID NO: 20674 - DNA, 1356 bp, Arabidopsis thaliana; identical to SEQ ID NO: 1871
  CDS (1)..(1356)

SEQ ID NO: 20675 - protein, 451 aa, Arabidopsis thaliana; identical to SEQ ID NO: 1872

SEQ ID NO: 20676 - DNA, 1326 bp, Arabidopsis thaliana; identical to SEQ ID NO: 1877
  CDS (1)..(1326)

SEQ ID NO: 20677 - protein, 441 aa, Arabidopsis thaliana; identical to SEQ ID NO: 1878

SEQ ID NO: 20678 - DNA, 1356 bp, Arabidopsis thaliana; identical to SEQ ID NO: 1879
  CDS (1)..(1356)

SEQ ID NO: 20679 - protein, 451 aa, Arabidopsis thaliana; identical to SEQ ID NO: 1880

SEQ ID NO: 20680 - DNA, 1320 bp, Arabidopsis thaliana; identical to SEQ ID NO: 1881
  CDS (1)..(1320)

SEQ ID NO: 20681 - protein, 439 aa, Arabidopsis thaliana; identical to SEQ ID NO: 1882

SEQ ID NO: 20682 - DNA, 1586 bp, Populus trichocarpa; identical to SEQ ID NO: 18397
  CDS (13)..(1407)

SEQ ID NO: 20683 - protein, 464 aa, Populus trichocarpa; identical to SEQ ID NO: 1906

SEQ ID NO: 20684 - DNA, 1694 bp, Populus trichocarpa; identical to SEQ ID NO: 18405
  CDS (245)..(1564)

SEQ ID NO: 20685 - protein, 439 aa, Populus trichocarpa; identical to SEQ ID NO: 1914

SEQ ID NO: 20686 - DNA, 1314 bp, Populus trichocarpa; identical to SEQ ID NO: 1915
  CDS (1)..(1314)

SEQ ID NO: 20687 - protein, 437 aa, Populus trichocarpa; identical to SEQ ID NO: 1916

SEQ ID NO: 20688 - DNA, 1356 bp, Populus trichocarpa; identical to SEQ ID NO: 1919
  CDS (1)..(1356)

SEQ ID NO: 20689 - protein, 451 aa, Populus trichocarpa; identical to SEQ ID NO: 1920

SEQ ID NO: 20690 - DNA, 1317 bp, Populus trichocarpa; identical to SEQ ID NO: 1925
  CDS (1)..(1317)

SEQ ID NO: 20691 - protein, 438 aa, Populus trichocarpa; identical to SEQ ID NO: 1926

SEQ ID NO: 20692 - DNA, 1374 bp, Populus trichocarpa; identical to SEQ ID NO: 1931
  CDS (1)..(1374)

SEQ ID NO: 20693 - protein, 457 aa, Populus trichocarpa; identical to SEQ ID NO: 1932

SEQ ID NO: 20694 - DNA, 1374 bp, Populus trichocarpa; identical to SEQ ID NO: 1933
  CDS (1)..(1374)

SEQ ID NO: 20695 - protein, 457 aa, Populus trichocarpa; identical to SEQ ID NO: 1934

SEQ ID NO: 20696 - DNA, 1581 bp, Populus trichocarpa; identical to SEQ ID NO: 1935
  CDS (1)..(1581)

SEQ ID NO: 20697 - protein, 526 aa, Populus trichocarpa; identical to SEQ ID NO: 1936

SEQ ID NO: 20698 - DNA, 1774 bp, Populus trichocarpa; identical to SEQ ID NO: 18431
  CDS (143)..(1555)

SEQ ID NO: 20699 - protein, 470 aa, Populus trichocarpa; identical to SEQ ID NO: 1940

SEQ ID NO: 20700 - DNA, 1374 bp, Populus trichocarpa; identical to SEQ ID NO: 1943
  CDS (1)..(1374)

SEQ ID NO: 20701 - protein, 457 aa, Populus trichocarpa; identical to SEQ ID NO: 1944

SEQ ID NO: 20702 - DNA, 1362 bp, Zea mays; identical to SEQ ID NO: 1955
  CDS (1)..(1362)

SEQ ID NO: 20703 - protein, 453 aa, Zea mays; identical to SEQ ID NO: 1956

SEQ ID NO: 20704 - DNA, 1395 bp, Zea mays; identical to SEQ ID NO: 1957
  CDS (1)..(1395)

SEQ ID NO: 20705 - protein, 464 aa, Zea mays; identical to SEQ ID NO: 1958

SEQ ID NO: 20706 - DNA, 1338 bp, Brassica juncea; identical to SEQ ID NO: 1959
  CDS (1)..(1338)

SEQ ID NO: 20707 - protein, 445 aa, Brassica juncea; identical to SEQ ID NO: 1960

SEQ ID NO: 20708 - DNA, 1536 bp, Oryza sativa subsp; identical to SEQ ID NO: 18455
  CDS (1)..(1536)

SEQ ID NO: 20709 - protein, 511 aa, Oryza sativa subsp; identical to SEQ ID NO: 18456

SEQ ID NO: 20710 - DNA, 1482 bp, Oryza sativa subsp; identical to SEQ ID NO: 18463
  CDS (1)..(1482)

SEQ ID NO: 20711 - protein, 493 aa, Oryza sativa subsp; identical to SEQ ID NO: 18464

SEQ ID NO: 20712 - DNA, 1530 bp, Oryza sativa subsp; identical to SEQ ID NO: 18469
  CDS (1)..(1530)

SEQ ID NO: 20713 - protein, 509 aa, Oryza sativa subsp; identical to SEQ ID NO: 18470

SEQ ID NO: 20714 - DNA, 1356 bp, Oryza sativa subsp; identical to SEQ ID NO: 18477
  CDS (1)..(1356)

SEQ ID NO: 20715 - protein, 451 aa, Oryza sativa subsp; identical to SEQ ID NO: 18478

SEQ ID NO: 20716 - DNA, 1944 bp, Oryza sativa subsp; identical to SEQ ID NO: 2137
  CDS (1)..(1944)

SEQ ID NO: 20717 - protein, 647 aa, Oryza sativa subsp; identical to SEQ ID NO: 2138

SEQ ID NO: 20718 - DNA, 1533 bp, Oryza sativa subsp; identical to SEQ ID NO: 18481
  CDS (1)..(1533)

SEQ ID NO: 20719 - protein, 510 aa, Oryza sativa subsp; identical to SEQ ID NO: 18482

SEQ ID NO: 20720 - DNA, 1506 bp, Oryza sativa subsp; identical to SEQ ID NO: 18483
  CDS (1)..(1506)

SEQ ID NO: 20721 - protein, 501 aa, Oryza sativa subsp; identical to SEQ ID NO: 18484

SEQ ID NO: 20722 - DNA, 1383 bp, Oryza sativa subsp; identical to SEQ ID NO: 18485
  CDS (1)..(1383)

SEQ ID NO: 20723 - protein, 460 aa, Oryza sativa subsp; identical to SEQ ID NO: 18486

SEQ ID NO: 20724 - DNA, 1455 bp, Oryza sativa subsp; identical to SEQ ID NO: 20059
  CDS (1)..(1455)

SEQ ID NO: 20725 - protein, 484 aa, Oryza sativa subsp; identical to SEQ ID NO: 20060

SEQ ID NO: 20726 - DNA, 1317 bp, Oryza sativa subsp; identical to SEQ ID NO: 18493
  CDS (1)..(1317)

SEQ ID NO: 20727 - protein, 438 aa, Oryza sativa subsp; identical to SEQ ID NO: 18494

SEQ ID NO: 20728 - DNA, 1530 bp, Oryza sativa subsp
  CDS (1)..(1530)
atgtatagggctaagagggctgcattatctccaaaggtgaagcgccgtgtagggaagtatgagctcgggcgcaccattggagaaggaacctttgcaaaggtccggtttgcgaagaacactgaaaatgacgaaccagttgctatcaaaatccttgacaaggagaaggttcagaagcacagattggttgaacagattaggcgtgaaatttgtactatgaagttagtaaagcatcctaatgttgttcggctgttcgaggtcatgggaagtaaagcaagaattttcattgttctggaatatgttactggaggagagctctttgaaatcattgcaactaatggaaggttgaaggaggaggaagcacgaaaatactttcaacaacttatcaatgcagttgactactgccacagtaggggtgtgtaccacagagacttgaagttagaaaatttgctgcttgatgcttctggaaacctgaaagtatctgactttggtttgagtgctttaaccgagcaagtgaaggctgacggtttgctgcacacgacatgtggaactcctaattatgttgctccagaggtgattgaggacagaggctatgatggggcagctgcagatatctggtcttgtggggtaatcctttatgttctgcttgctgggtttttaccatttgaggatgacaacatcattgctctttataaaaagatctctgaagctcagtttacctgtccctcttggttttctactggagctaagaagctgatcaccagaattctggatcccaaccctacaactaggatcaccatttctcaaatactggaagatccttggttcaaaaagggttacaaaccgcctgtatttgacgagaaatatgaaactagttttgacgatgtcgatgctgcttttggagactccgaagaccggcatgtcaaagaagaaactgaagatcagcctacctctatgaacgcgtttgaactcatttcactgaatcaggcactgaatctggacaatttgttcgaggcaaaaaaggagtataaaagagagacaagattcacatcacaatgtcctccaaaagaaattatcaccaagattgaagaagctgcaaagccacttggatttgatattcaaaagaaaaattacaagatgcgcatggagaacctgaaagcaggtagaaaaggcaatctcaatgttgcaactgaggttttccaagtagctccatccttacatgtggttgagctcaagaaggcaaagggggacactctggagttccaaaaggtgccattctttgacaccggaaatttcgctatttccaacttgctatttactgccaagtttaaccaaaatcaattctgctgtgaaacaacagttctacagaaccctgtcgacccagctcaaggacgtggtctggaagtgcgacggcgaggtcgaaggcaacggcgccgcggcgtgaacgtggtttttgccatggctttcggggcaccggttcttcgtgtacatagctgctctgccatcatcaatggggtgttcgccgtagagtag

SEQ ID NO: 20729 - protein, 509 aa, Oryza sativa subsp
MYRAKRAALSPKVKRRVGKYELGRTIGEGTFAKVRFAKNTENDEPVAIKILDKEKVQKHRLVEQIRREICTMKLVKHPNVVRLFEVMGSKARIFIVLEYVTGGELFEIIATNGRLKEEEARKYFQQLINAVDYCHSRGVYHRDLKLENLLLDASGNLKVSDFGLSALTEQVKADGLLHTTCGTPNYVAPEVIEDRGYDGAAADIWSCGVILYVLLAGFLPFEDDNIIALYKKISEAQFTCPSWFSTGAKKLITRILDPNPTTRITISQILEDPWFKKGYKPPVFDEKYETSFDDVDAAFGDSEDRHVKEETEDQPTSMNAFELISLNQALNLDNLFEAKKEYKRETRFTSQCPPKEIITKIEEAAKPLGFDIQKKNYKMRMENLKAGRKGNLNVATEVFQVAPSLHVVELKKAKGDTLEFQKVPFFDTGNFAISNLLFTAKFNQNQFCCETTVLQNPVDPAQGRGLEVRRRGRRQRRRGVNVVFAMAFGAPVLRVHSCSAIINGVFAVE

SEQ ID NO: 20730 - DNA, 1500 bp, Oryza sativa subsp
  CDS (1)..(1500)
atgacgacggagcggtacgagttcgggccgctcgtcggcgagggcaacttcgccaaggtgtacctcggccggcacagggccaccggcgaggaggtcgccatcaaggtgatggacaaggagaagctcgtcaggctcggcgccacggagctgatcaagcgggagatcgccgtcatgcagcggctgcgccacccgaacgtcgtccgcatccacgaggtcatggccaacaagcgccgcatctgcgtcgtcatggagtacgtccgcggcggcgcgctctaccgctacttccgcaggggccccagcggcggcgccgccggcctccgggagcacgaggcgcgccggttcttccagcagctcgtctccgccgtcgcctactgccactcccgcggcgtgttccaccgcgacatcaagctggacaacctcctcgtcgacgagcaggggaacctcaaggtcgccgacttcggcctctccgcgctcgccgacatggagcggcgagaggcccacctccagaccgtctgcgggacgccgctgttcctcgcgcccgaggtgttcaagcgccggggctacgacggcgccaaggccgacgtctgggcatgcggcgtcgtcctctacgtgctcctcaccggccgcaagcctttccccgacgagcacgtctccaggctctaccgcctgatcgggcagaaccagttccagtgcccgccgtcgttcagccctgaccttgcccgtctcgtgcgccgcctcctccagcccgaccccgaccgccgcatcaccataccagagatcatggagatgaggtggttcaagaggggattcaaggaggtcacctactacatcgacagcaacgaccgcctccgcagcctcgacggcctcgacggcgagccggagctgtacgactccgacaccgacacgatcgagtcctcgtcgtcgtcggaatctcccaccccggtggccggaacgccccgcggcatgcacacctcggtgtcggcgccggctctgtccgagctcgaccgcatggaggacagcgcgtccctcccgctcccgctcccgctcccgccccggccgcgcatgccgcggcccaagagcctgaacgcgttcgacatcatcgcgtcgtcgccgagcttcgacctgtcggggctgttcgaggagcgcggcgagaggatgcgcttcgtgtccggcgcgccggtggccgacattatcgccaagctgcaggagatcgccgggatggtgagcttcacggcgcggaccaaggactgccaggtgagcatcgaggcgacgcggaacgggcagaagggcgcgctcgccatctccgccaaggtgttcgagctcacgcgggagctcgtcatggtccaggtgtgcaagaaggccggcgacaccgccgagtaccgcaggttctgcgacaacgagctcaaggccggcctgcgcggcctcgtcgtcgacgccctgccgcctccggtggagggcggcggccatggcggcgcggctgctgcggctgaagccgaatga

SEQ ID NO: 20731 - protein, 499 aa, Oryza sativa subsp
MTTERYEFGPLVGEGNFAKVYLGRHRATGEEVAIKVMDKEKLVRLGATELIKREIAVMQRLRHPNVVRIHEVMANKRRICVVMEYVRGGALYRYFRRGPSGGAAGLREHEARRFFQQLVSAVAYCHSRGVFHRDIKLDNLLVDEQGNLKVADFGLSALADMERREAHLQTVCGTPLFLAPEVFKRRGYDGAKADVWACGVVLYVLLTGRKPFPDEHVSRLYRLIGQNQFQCPPSFSPDLARLVRRLLQPDPDRRITIPEIMEMRWFKRGFKEVTYYIDSNDRLRSLDGLDGEPELYDSDTDTIESSSSSESPTPVAGTPRGMHTSVSAPALSELDRMEDSASLPLPLPLPPRPRMPRPKSLNAFDIIASSPSFDLSGLFEERGERMRFVSGAPVADIIAKLQEIAGMVSFTARTKDCQVSIEATRNGQKGALAISAKVFELTRELVMVQVCKKAGDTAEYRRFCDNELKAGLRGLVVDALPPPVEGGGHGGAAAAAEAE

SEQ ID NO: 20732 - DNA, 1320 bp, Oryza sativa; identical to SEQ ID NO: 1991
  CDS (1)..(1320)

SEQ ID NO: 20733 - protein, 439 aa, Oryza sativa; identical to SEQ ID NO: 1992

SEQ ID NO: 20734 - DNA, 1323 bp, Sorghum bicolor; identical to SEQ ID NO: 1993
  CDS (1)..(1323)

SEQ ID NO: 20735 - protein, 440 aa, Sorghum bicolor; identical to SEQ ID NO: 1994

SEQ ID NO: 20736 - DNA, 1323 bp, Sorghum bicolor; identical to SEQ ID NO: 1995
  CDS (1)..(1323)

SEQ ID NO: 20737 - protein, 440 aa, Sorghum bicolor; identical to SEQ ID NO: 1996

SEQ ID NO: 20738 - DNA, 1296 bp, Arabidopsis thaliana; identical to SEQ ID NO: 1999
  CDS (1)..(1296)

SEQ ID NO: 20739 - protein, 431 aa, Arabidopsis thaliana; identical to SEQ ID NO: 2000

SEQ ID NO: 20740 - DNA, 1386 bp, Sorghum bicolor; identical to SEQ ID NO: 2001
  CDS (1)..(1386)

SEQ ID NO: 20741 - protein, 461 aa, Sorghum bicolor; identical to SEQ ID NO: 2002

SEQ ID NO: 20742 - DNA, 1266 bp, Arabidopsis thaliana; identical to SEQ ID NO: 2003
  CDS (1)..(1266)

SEQ ID NO: 20743 - protein, 421 aa, Arabidopsis thaliana; identical to SEQ ID NO: 2004

SEQ ID NO: 20744 - DNA, 1533 bp, Medicago truncatula; identical to SEQ ID NO: 2005
  CDS (1)..(1533)

SEQ ID NO: 20745 - protein, 510 aa, Medicago truncatula; identical to SEQ ID NO: 2006

SEQ ID NO: 20746 - DNA, 1308 bp, Medicago truncatula; identical to SEQ ID NO: 2009
  CDS (1)..(1308)

SEQ ID NO: 20747 - protein, 435 aa, Medicago truncatula; identical to SEQ ID NO: 2010

SEQ ID NO: 20748 - DNA, 1440 bp, Nicotiana tabacum; identical to SEQ ID NO: 2011
  CDS (1)..(1440)

SEQ ID NO: 20749 - protein, 479 aa, Nicotiana tabacum; identical to SEQ ID NO: 2012

SEQ ID NO: 20750 - DNA, 1987 bp, Trifolium pratense; identical to SEQ ID NO: 18537
  CDS (472)..(1848)

SEQ ID NO: 20751 - protein, 458 aa, Trifolium pratense; identical to SEQ ID NO: 2014

SEQ ID NO: 20752 - DNA, 1365 bp, Oryza sativa subsp; identical to SEQ ID NO: 2177
  CDS (1)..(1365)

SEQ ID NO: 20753 - protein, 454 aa, Oryza sativa subsp; identical to SEQ ID NO: 2178

SEQ ID NO: 20754 - DNA, 1581 bp, Triticum aestivum; identical to SEQ ID NO: 2015
  CDS (1)..(1581)

SEQ ID NO: 20755 - protein, 526 aa, Triticum aestivum; identical to SEQ ID NO: 2016

SEQ ID NO: 20756 - DNA, 1341 bp, Solanum lycopersicum; identical to SEQ ID NO: 2017
  CDS (1)..(1341)

SEQ ID NO: 20757 - protein, 446 aa, Solanum lycopersicum; identical to SEQ ID NO: 2018

SEQ ID NO: 20758 - DNA, 1892 bp, Lotus japonicus; identical to SEQ ID NO: 18561
  CDS (296)..(1621)

SEQ ID NO: 20759 - protein, 441 aa, Lotus japonicus; identical to SEQ ID NO: 2024

SEQ ID NO: 20760 - DNA, 1506 bp, Oryza sativa subsp; identical to SEQ ID NO: 2025
  CDS (1)..(1506)

SEQ ID NO: 20761 - protein, 501 aa, Oryza sativa subsp; identical to SEQ ID NO: 2026

SEQ ID NO: 20762 - DNA, 1356 bp, Oryza sativa subsp; identical to SEQ ID NO: 2135
  CDS (1)..(1356)

SEQ ID NO: 20763 - protein, 451 aa, Oryza sativa subsp; identical to SEQ ID NO: 2136

SEQ ID NO: 20764 - DNA, 1335 bp, Oryza sativa subsp; identical to SEQ ID NO: 2153
  CDS (1)..(1335)

SEQ ID NO: 20765 - protein, 444 aa, Oryza sativa subsp; identical to SEQ ID NO: 2154

SEQ ID NO: 20766 - DNA, 1437 bp, Gossypium hirsutum; identical to SEQ ID NO: 2027
  CDS (1)..(1437)

SEQ ID NO: 20767 - protein, 478 aa, Gossypium hirsutum; identical to SEQ ID NO: 2028

SEQ ID NO: 20768 - DNA, 1371 bp, Oryza sativa subsp; identical to SEQ ID NO: 2163
  CDS (1)..(1371)

SEQ ID NO: 20769 - protein, 456 aa, Oryza sativa subsp; identical to SEQ ID NO: 2164

SEQ ID NO: 20770 - DNA, 1356 bp, Oryza sativa subsp; identical to SEQ ID NO: 2161
  CDS (1)..(1356)

SEQ ID NO: 20771 - protein, 451 aa, Oryza sativa subsp; identical to SEQ ID NO: 2162

SEQ ID NO: 20772 - DNA, 1242 bp, Nicotiana tabacum; identical to SEQ ID NO: 2029
  CDS (1)..(1242)

SEQ ID NO: 20773 - protein, 413 aa, Nicotiana tabacum; identical to SEQ ID NO: 2030

SEQ ID NO: 20774 - DNA, 1359 bp, Arabidopsis thaliana; identical to SEQ ID NO: 2031
  CDS (1)..(1359)

SEQ ID NO: 20775 - protein, 452 aa, Arabidopsis thaliana; identical to SEQ ID NO: 2032

SEQ ID NO: 20776 - DNA, 1840 bp, Pisum sativum; identical to SEQ ID NO: 18597
  CDS (48)..(1598)

SEQ ID NO: 20777 - protein, 516 aa, Pisum sativum; identical to SEQ ID NO: 2034

SEQ ID NO: 20778 - DNA, 1308 bp, Arabidopsis thaliana; identical to SEQ ID NO: 2035
  CDS (1)..(1308)

SEQ ID NO: 20779 - protein, 435 aa, Arabidopsis thaliana; identical to SEQ ID NO: 2036

SEQ ID NO: 20780 - DNA, 1622 bp, Persea americana; identical to SEQ ID NO: 18603
  CDS (89)..(1450)

SEQ ID NO: 20781 - protein, 453 aa, Persea americana; identical to SEQ ID NO: 2038

SEQ ID NO: 20782 - DNA, 2084 bp, Glycine max; identical to SEQ ID NO: 18607
  CDS (427)..(1743)
  misc_feature (244)..(244): s is g or c

SEQ ID NO: 20783 - protein, 438 aa, Glycine max; identical to SEQ ID NO: 2042

SEQ ID NO: 20784 - DNA, 1326 bp, Brassica napus; identical to SEQ ID NO: 2045
  CDS (1)..(1326)

SEQ ID NO: 20785 - protein, 441 aa, Brassica napus; identical to SEQ ID NO: 2046

SEQ ID NO: 20786 - DNA, 1290 bp, Arabidopsis thaliana; identical to SEQ ID NO: 2047
  CDS (1)..(1290)

SEQ ID NO: 20787 - protein, 429 aa, Arabidopsis thaliana; identical to SEQ ID NO: 2048

SEQ ID NO: 20788 - DNA, 1464 bp, Arabidopsis thaliana; identical to SEQ ID NO: 2049
  CDS (1)..(1464)

SEQ ID NO: 20789 - protein, 487 aa, Arabidopsis thaliana; identical to SEQ ID NO: 2050

SEQ ID NO: 20790 - DNA, 1425 bp, Oryza sativa subsp; identical to SEQ ID NO: 2051
  CDS (1)..(1425)

SEQ ID NO: 20791 - protein, 474 aa, Oryza sativa subsp; identical to SEQ ID NO: 2052

SEQ ID NO: 20792 - DNA, 1344 bp, Arabidopsis thaliana; identical to SEQ ID NO: 2053
  CDS (1)..(1344)

SEQ ID NO: 20793 - protein, 447 aa, Arabidopsis thaliana; identical to SEQ ID NO: 2054

SEQ ID NO: 20794 - DNA, 1443 bp, Arabidopsis thaliana; identical to SEQ ID NO: 2057
  CDS (1)..(1443)

SEQ ID NO: 20795 - protein, 480 aa, Arabidopsis thaliana; identical to SEQ ID NO: 2058

SEQ ID NO: 20796 - DNA, 1290 bp, Arabidopsis thaliana; identical to SEQ ID NO: 18627
  CDS (1)..(1290)

SEQ ID NO: 20797 - protein, 429 aa, Arabidopsis thaliana; identical to SEQ ID NO: 18628

SEQ ID NO: 20798 - DNA, 1371 bp, Arabidopsis thaliana; identical to SEQ ID NO: 2061
  CDS (1)..(1371)

SEQ ID NO: 20799 - protein, 456 aa, Arabidopsis thaliana; identical to SEQ ID NO: 2062

SEQ ID NO: 20800 - DNA, 1395 bp, Arabidopsis thaliana; identical to SEQ ID NO: 2063
  CDS (1)..(1395)

SEQ ID NO: 20801 - protein, 464 aa, Arabidopsis thaliana; identical to SEQ ID NO: 2064

SEQ ID NO: 20802 - DNA, 1362 bp, Arabidopsis thaliana; identical to SEQ ID NO: 2065
  CDS (1)..(1362)

SEQ ID NO: 20803 - protein, 453 aa, Arabidopsis thaliana; identical to SEQ ID NO: 2066

SEQ ID NO: 20804 - DNA, 1557 bp, Zea mays; identical to SEQ ID NO: 2067
  CDS (1)..(1557)

SEQ ID NO: 20805 - protein, 518 aa, Zea mays; identical to SEQ ID NO: 2068

SEQ ID NO: 20806 - DNA, 1563 bp, Oryza sativa; identical to SEQ ID NO: 2069
  CDS (1)..(1563)

SEQ ID NO: 20807 - protein, 520 aa, Oryza sativa; identical to SEQ ID NO: 2070

SEQ ID NO: 20808 - DNA, 1266 bp, Arabidopsis thaliana; identical to SEQ ID NO: 2071
  CDS (1)..(1266)

SEQ ID NO: 20809 - protein, 421 aa, Arabidopsis thaliana; identical to SEQ ID NO: 2072

SEQ ID NO: 20810 - DNA, 1389 bp, Mesembryanthemum crystallinum; identical to SEQ ID NO: 2073
  CDS (1)..(1389)

SEQ ID NO: 20811 - protein, 462 aa, Mesembryanthemum crystallinum; identical to SEQ ID NO: 2074

SEQ ID NO: 20812 - DNA, 1335 bp, Arabidopsis thaliana; identical to SEQ ID NO: 2079
  CDS (1)..(1335)

SEQ ID NO: 20813 - protein, 444 aa, Arabidopsis thaliana; identical to SEQ ID NO: 2080

SEQ ID NO: 20814 - DNA, 1350 bp, Oryza sativa subsp; identical to SEQ ID NO: 2115
  CDS (1)..(1350)

SEQ ID NO: 20815 - protein, 449 aa, Oryza sativa subsp; identical to SEQ ID NO: 2116

SEQ ID NO: 20816 - DNA, 1266 bp, Arabidopsis thaliana; identical to SEQ ID NO: 2081
  CDS (1)..(1266)

SEQ ID NO: 20817 - protein, 421 aa, Arabidopsis thaliana; identical to SEQ ID NO: 2082

SEQ ID NO: 20818 - DNA, 1341 bp, Arabidopsis thaliana; identical to SEQ ID NO: 2083
  CDS (1)..(1341)

SEQ ID NO: 20819 - protein, 446 aa, Arabidopsis thaliana; identical to SEQ ID NO: 2084

SEQ ID NO: 20820 - DNA, 1281 bp, Oryza sativa; identical to SEQ ID NO: 2097
  CDS (1)..(1281)

SEQ ID NO: 20821 - protein, 426 aa, Oryza sativa; identical to SEQ ID NO: 2098

SEQ ID NO: 20822 - DNA, 1350 bp, Oryza sativa; identical to SEQ ID NO: 2149
  CDS (1)..(1350)

SEQ ID NO: 20823 - protein, 449 aa, Oryza sativa; identical to SEQ ID NO: 2150

SEQ ID NO: 20824 - DNA, 1323 bp, Brassica napus; identical to SEQ ID NO: 2179
  CDS (1)..(1323)

SEQ ID NO: 20825 - protein, 440 aa, Brassica napus; identical to SEQ ID NO: 2180

SEQ ID NO: 20826 - DNA, 1332 bp, Brassica napus; identical to SEQ ID NO: 2181
  CDS (1)..(1332)

SEQ ID NO: 20827 - protein, 443 aa, Brassica napus; identical to SEQ ID NO: 2182

SEQ ID NO: 20828 - DNA, 1338 bp, Brassica napus; identical to SEQ ID NO: 2183
  CDS (1)..(1338)

SEQ ID NO: 20829 - protein, 445 aa, Brassica napus; identical to SEQ ID NO: 2184

SEQ ID NO: 20830 - DNA, 1476 bp, Brassica napus; identical to SEQ ID NO: 2185
  CDS (1)..(1476)

SEQ ID NO: 20831 - protein, 491 aa, Brassica napus; identical to SEQ ID NO: 2186

SEQ ID NO: 20832 - DNA, 1416 bp, Brassica napus; identical to SEQ ID NO: 2187
  CDS (1)..(1416)

SEQ ID NO: 20833 - protein, 471 aa, Brassica napus; identical to SEQ ID NO: 2188

SEQ ID NO: 20834 - DNA, 1326 bp, Brassica napus; identical to SEQ ID NO: 2189
  CDS (1)..(1326)

SEQ ID NO: 20835 - protein, 441 aa, Brassica napus; identical to SEQ ID NO: 2190

SEQ ID NO: 20836 - DNA, 1395 bp, Zea mays; identical to SEQ ID NO: 2193
  CDS (1)..(1395)

SEQ ID NO: 20837 - protein, 464 aa, Zea mays; identical to SEQ ID NO: 2194

SEQ ID NO: 20838 - DNA, 1476 bp, Glycine max
  CDS (1)..(1476)
atgttggaaacggagaaggattttgattccaagctgaagattcaggggaattcctcatcttccaatggtggtgggaatgtacagagatccaaaagctttgcttttagggctccccaggagaattacaccatccaggactttgaattgggcaagatctacggtgttggctcttattctaaggttgtgagggcaaagaagaaggacactggaactgtgtatgcattgaagatcatggacaaaaaatttattaccaaagagaataaaacagcttatgtgaagttggaacgcattgtgctagatcaattggatcatccaggcattgtgcggttatatttcacatttcaagactcattttctctatacatggctcttgaatcctgtgaaggtggagaactttttgatcaaataaccaggaaaggtcgtctatcagaggatgaggcacgattctatgcagctgaagttgttgatgctctcgaatacatacataatttgggagtcatacatcgtgatattaagccagagaacttattacttacagctgaaggacatattaaaatagccgattttgggagtgtgaagcctatgcaggatagccaaataactgtccttccaaatgcagcatcagatgacaaagcctgcacttttgtgggaacagctgcttatgttcctccagaggttcttaattcctctccagcaacttttggaaatgacctttgggcacttggctgcacattataccaaatgctttctggaacttccccttttaaagacgcgagtgaatggcttatttttcaaagaattatagcaagagatcttagatttccagattacttttctgacgaagcaagagacctcattgaccgcctgttggatttggaccccagcaggagaccaggtgctgcacctgatggttatgctattttaaaaaggcacccatttttcaagggggttgactgggataacttgagggcacaaattcctccaaaacttgctccagaacctgggactcagtcgcctgtggctgatgatgttcatgactcatcttggagtccttctcacattggggatggttctgcagcttcggttagacaacctgatggtgctacatcttccgaggggaccggtcacataactaggctagcttcaattgattccttcgattcaaaatggcaacaatttttggaacctggggaatctgttcttatgatctctatggtgaagaaattacaaaaactaacaagcaagaaggtgcagctcatccttaccaacaaaccaaagttgatctatgtggacccatcaaagctaattgtgaagggaaatataatatggtctgataatccaaatgatttaagcatccaagtggctagtccatcaaatttcaagatttgcacacctaaaaaggtaatgtcgtttgaggacgcaaagcaaagagcatgccagtggaaaaaggcaattgaaggactccaaaaccggtga

SEQ ID NO: 20839 - protein, 491 aa, Glycine max
MLETEKDFDSKLKIQGNSSSSNGGGNVQRSKSFAFRAPQENYTIQDFELGKIYGVGSYSKVVRAKKKDTGTVYALKIMDKKFITKENKTAYVKLERIVLDQLDHPGIVRLYFTFQDSFSLYMALESCEGGELFDQITRKGRLSEDEARFYAAEVVDALEYIHNLGVIHRDIKPENLLLTAEGHIKIADFGSVKPMQDSQITVLPNAASDDKACTFVGTAAYVPPEVLNSSPATFGNDLWALGCTLYQMLSGTSPFKDASEWLIFQRIIARDLRFPDYFSDEARDLIDRLLDLDPSRRPGAAPDGYAILKRHPFFKGVDWDNLRAQIPPKLAPEPGTQSPVADDVHDSSWSPSHIGDGSAASVRQPDGATSSEGTGHITRLASIDSFDSKWQQFLEPGESVLMISMVKKLQKLTSKKVQLILTNKPKLIYVDPSKLIVKGNIIWSDNPNDLSIQVASPSNFKICTPKKVMSFEDAKQRACQWKKAIEGLQNR

SEQ ID NO: 20840 - DNA, 1344 bp, Glycine max; identical to SEQ ID NO: 2195
  CDS (1)..(1344)

SEQ ID NO: 20841 - protein, 447 aa, Glycine max; identical to SEQ ID NO: 2196

SEQ ID NO: 20842 - DNA, 1386 bp, Glycine max; identical to SEQ ID NO: 2199
  CDS (1)..(1386)

SEQ ID NO: 20843 - protein, 461 aa, Glycine max; identical to SEQ ID NO: 2200

SEQ ID NO: 20844 - DNA, 1320 bp, Triticum aestivum; identical to SEQ ID NO: 2201
  CDS (1)..(1320)

SEQ ID NO: 20845 - protein, 439 aa, Triticum aestivum; identical to SEQ ID NO: 2202

SEQ ID NO: 20846 - DNA, 1515 bp, Zea mays
  CDS (1)..(1515)
atggcggtcggcggcgacgacgacagcatggagcgggacttcgccgccaggctgcgcctcgcgcattcgccctccccggccacgcctgccgccgccgcctcatccccccccaccgccgctggggggatcgccttccgcgcgccgcaggagcagttcaccgccgacgacttcgtactcggcaagatctacggcgtcggctcgtactccaaggtggtgcgggccaagaagaaggacactggtcgcgtctacgcgcttaagatcatggacaagaagttcatcaccaaggagaacaagatctcctacgtcaagatggagcgtattgtactcgaccagctcgaccaccctggcgtcatcaggctcttcttcactttccaggacacatactccctctacatggcgctcgagtcgtgcgaaggcggggagttattcgaccaaattgttcggaaaggtcggctctctgaggacgatgcacggttctatgctgctgaaattgttgatatattggagtacttgcatggccttggcctaattcatcgggatgtcaagccagaaaatctactgcttacttctgatgggcacatcaagattgctgactttggtagtgtgaagcctacaagggatactcctatcaaagttctcccaaattcaactactgaaagggcctgtacatttgttggaaccgctgcatatgtaccacctgaggtcctgaactctgccccagcaacctttggaaatgatttatgggcattgggatgcacactgtaccaaatgctttctggctcttcgccatttaaagatgctagtgagtggttaattttccagagaatcattgcaagggacctcaaatttccagagtatttttcagctgaagctagagatcttgttgacaaattgctggatgttgatccaggcaaaaggccaggtgcaggacctgatggttattcttccttgaaggagcatcctttcttcagaggcatagactggaagaacctgaggaagacacggccacctaagctcgcaattgatgcaaatgcaaatgaagatgaggatagccaagattcaaattggttggcacacatgggaagtgtggcagtcaaccaacagtcaaatactgttggtaataatggtgccccgtcatcatctgaagtgcgctcccatatatctaaattagcttccatcgactcattcgactcaaaatggcaagaattcctggaccccggcgagtctgtagtcttaatatcaaagctgaagaagattaataagctagcaaacaagaagatccagttgatcctcactgacaaacctcaattgatttgtgttgacccttcaaaaatggtggccaagggaaacattatttggtctgatgacccaagtgaactcagtgtgcaagtatcagattcttcacattttagaatatgcacgccaaagaaggtgtcaacatttgaggatgcgaaacagcgtgcttggcaatggaagaaggcaattgaagacctccaacgctgccaaaggaattaa

SEQ ID NO: 20847 - protein, 504 aa, Zea mays
MAVGGDDDSMERDFAARLRLAHSPSPATPAAAASSPPTAAGGIAFRAPQEQFTADDFVLGKIYGVGSYSKVVRAKKKDTGRVYALKIMDKKFITKENKISYVKMERIVLDQLDHPGVIRLFFTFQDTYSLYMALESCEGGELFDQIVRKGRLSEDDARFYAAEIVDILEYLHGLGLIHRDVKPENLLLTSDGHIKIADFGSVKPTRDTPIKVLPNSTTERACTFVGTAAYVPPEVLNSAPATFGNDLWALGCTLYQMLSGSSPFKDASEWLIFQRIIARDLKFPEYFSAEARDLVDKLLDVDPGKRPGAGPDGYSSLKEHPFFRGIDWKNLRKTRPPKLAIDANANEDEDSQDSNWLAHMGSVAVNQQSNTVGNNGAPSSSEVRSHISKLASIDSFDSKWQEFLDPGESVVLISKLKKINKLANKKIQLILTDKPQLICVDPSKMVAKGNIIWSDDPSELSVQVSDSSHFRICTPKKVSTFEDAKQRAWQWKKAIEDLQRCQRN

SEQ ID NO: 20848 - DNA, 1524 bp, Linum usitatissimum; identical to SEQ ID NO: 2203
  CDS (1)..(1524)

SEQ ID NO: 20849 - protein, 507 aa, Linum usitatissimum; identical to SEQ ID NO: 2204

SEQ ID NO: 20850 - DNA, 1350 bp, Zea mays; identical to SEQ ID NO: 2205
  CDS (1)..(1350)

SEQ ID NO: 20851 - protein, 449 aa, Zea mays; identical to SEQ ID NO: 2206

SEQ ID NO: 20852 - DNA, 1356 bp, Zea mays; identical to SEQ ID NO: 2209
  CDS (1)..(1356)

SEQ ID NO: 20853 - protein, 451 aa, Zea mays; identical to SEQ ID NO: 2210

SEQ ID NO: 20854 - DNA, 1338 bp, Zea mays; identical to SEQ ID NO: 2211
  CDS (1)..(1338)

SEQ ID NO: 20855 - protein, 445 aa, Zea mays; identical to SEQ ID NO: 2212

SEQ ID NO: 20856 - DNA, 1356 bp, Zea mays; identical to SEQ ID NO: 2353
  CDS (1)..(1356)

SEQ ID NO: 20857 - protein, 451 aa, Zea mays; identical to SEQ ID NO: 2354

SEQ ID NO: 20858 - DNA, 1308 bp, Brassica napus; identical to SEQ ID NO: 2213
  CDS (1)..(1308)

SEQ ID NO: 20859 - protein, 435 aa, Brassica napus; identical to SEQ ID NO: 2214

SEQ ID NO: 20860 - DNA, 1452 bp, Brassica napus; identical to SEQ ID NO: 2215
  CDS (1)..(1452)

SEQ ID NO: 20861 - protein, 483 aa, Brassica napus; identical to SEQ ID NO: 2216

SEQ ID NO: 20862 - DNA, 1392 bp, Brassica napus; identical to SEQ ID NO: 2217
  CDS (1)..(1392)

SEQ ID NO: 20863 - protein, 463 aa, Brassica napus; identical to SEQ ID NO: 2218

SEQ ID NO: 20864 - DNA, 1299 bp, Brassica napus; identical to SEQ ID NO: 2219
  CDS (1)..(1299)

SEQ ID NO: 20865 - protein, 432 aa, Brassica napus; identical to SEQ ID NO: 2220

SEQ ID NO: 20866 - DNA, 1323 bp, Brassica napus; identical to SEQ ID NO: 2221
  CDS (1)..(1323)

SEQ ID NO: 20867 - protein, 440 aa, Brassica napus; identical to SEQ ID NO: 2222

SEQ ID NO: 20868 - DNA, 1341 bp, Brassica napus; identical to SEQ ID NO: 2225
  CDS (1)..(1341)

SEQ ID NO: 20869 - protein, 446 aa, Brassica napus; identical to SEQ ID NO: 2226

SEQ ID NO: 20870 - DNA, 1452 bp, Brassica napus; identical to SEQ ID NO: 18737
  CDS (1)..(1452)

SEQ ID NO: 20871 - protein, 483 aa, Brassica napus; identical to SEQ ID NO: 2192

SEQ ID NO: 20872 - DNA, 1326 bp, Brassica napus; identical to SEQ ID NO: 2227
  CDS (1)..(1326)

SEQ ID NO: 20873 - protein, 441 aa, Brassica napus; identical to SEQ ID NO: 2228

SEQ ID NO: 20874 - DNA, 1461 bp, Brassica napus; identical to SEQ ID NO: 2229
  CDS (1)..(1461)

SEQ ID NO: 20875 - protein, 486 aa, Brassica napus; identical to SEQ ID NO: 2230

SEQ ID NO: 20876 - DNA, 1299 bp, Brassica napus; identical to SEQ ID NO: 2231
  CDS (1)..(1299)

SEQ ID NO: 20877 - protein, 432 aa, Brassica napus; identical to SEQ ID NO: 2232

SEQ ID NO: 20878 - DNA, 1323 bp, Brassica napus; identical to SEQ ID NO: 2235
  CDS (1)..(1323)

SEQ ID NO: 20879 - protein, 440 aa, Brassica napus; identical to SEQ ID NO: 2236

SEQ ID NO: 20880 - DNA, 1389 bp, Brassica napus; identical to SEQ ID NO: 2237
  CDS (1)..(1389)

SEQ ID NO: 20881 - protein, 462 aa, Brassica napus; identical to SEQ ID NO: 2238

SEQ ID NO: 20882 - DNA, 1299 bp, Brassica napus; identical to SEQ ID NO: 2239
  CDS (1)..(1299)

SEQ ID NO: 20883 - protein, 432 aa, Brassica napus; identical to SEQ ID NO: 2240

SEQ ID NO: 20884 - DNA, 1338 bp, Brassica napus; identical to SEQ ID NO: 2243
  CDS (1)..(1338)

SEQ ID NO: 20885 - protein, 445 aa, Brassica napus; identical to SEQ ID NO: 2244

SEQ ID NO: 20886 - DNA, 1338 bp, Glycine max; identical to SEQ ID NO: 2245
  CDS (1)..(1338)

SEQ ID NO: 20887 - protein, 445 aa, Glycine max; identical to SEQ ID NO: 2246

SEQ ID NO: 20888 - DNA, 1323 bp, Zea mays; identical to SEQ ID NO: 2247
  CDS (1)..(1323)

SEQ ID NO: 20889 - protein, 440 aa, Zea mays; identical to SEQ ID NO: 2248

SEQ ID NO: 20890 - DNA, 1389 bp, Glycine max; identical to SEQ ID NO: 2249
  CDS (1)..(1389)

SEQ ID NO: 20891 - protein, 462 aa, Glycine max; identical to SEQ ID NO: 2250

SEQ ID NO: 20892 - DNA, 1350 bp, Zea mays; identical to SEQ ID NO: 2327
  CDS (1)..(1350)

SEQ ID NO: 20893 - protein, 449 aa, Zea mays; identical to SEQ ID NO: 2328

SEQ ID NO: 20894 - DNA, 1269 bp, Glycine max; identical to SEQ ID NO: 2253
  CDS (1)..(1269)

SEQ ID NO: 20895 - protein, 422 aa, Glycine max; identical to SEQ ID NO: 2254

SEQ ID NO: 20896 - DNA, 1383 bp, Glycine max; identical to SEQ ID NO: 2255
  CDS (1)..(1383)

SEQ ID NO: 20897 - protein, 460 aa, Glycine max; identical to SEQ ID NO: 2256

SEQ ID NO: 20898 - DNA, 1314 bp, Glycine max; identical to SEQ ID NO: 18765
  CDS (1)..(1314)

SEQ ID NO: 20899 - protein, 437 aa, Glycine max; identical to SEQ ID NO: 1820

SEQ ID NO: 20900 - DNA, 1341 bp, Glycine max; identical to SEQ ID NO: 2259
  CDS (1)..(1341)

SEQ ID NO: 20901 - protein, 446 aa, Glycine max; identical to SEQ ID NO: 2260

SEQ ID NO: 20902 - DNA, 1323 bp, Glycine max; identical to SEQ ID NO: 2261
  CDS (1)..(1323)

SEQ ID NO: 20903 - protein, 440 aa, Glycine max; identical to SEQ ID NO: 2262

SEQ ID NO: 20904 - DNA, 1476 bp, Glycine max
  CDS (1)..(1476)
atgttggaaacggagaaggattttgattccaagctgaagattcaggggaattcctcatcttccaatggtggtgggaatgtacagagatccaaaagctttgcttttagggctccccaggagaattacaccatccaggactttgaattgggcaagatctacggtgttggctcttattctaaggttgtgagggcaaagaagaaggacactggaactgtgtatgcattgaagatcatggacaaaaaatttattaccaaagagaataaaacagcttatgtgaagttggaacgcattgtgctagatcaattggatcatccaggcattgtgcggttatatttcacatttcaagactcattttctctatacatggcacttgaatcctgtgaaggtggagaactttttgatcaaataaccaggaaaggtcgtctatcagagaatgaggcacgattctatgcagctgaagttatcgatgctcttgaatacatacataatttgggagtcatacatcgtgatattaagccagagaacttattacttacagctgaaggacatattaaaatagccgattttgggagtgtgaagcctatgcaggatagccaaataactgtccttccaaatgcagcatcagatgacaaagcctgcacttttgtgggaacagctgcttatgttcctccagaggttcttaattcctctccagcaacttttggaaatgacctttgggcacttggctgcacattataccaaatgctttctggaacttccccttttaaagacgcaagtgaatggcttatttttcaaagaattatagcaagagaacttagatttccagattacttttctgacgaagcaagagaccttattgaccgcctgttggatttggaccccagcaggagaccaggtgctggacctgatggttatgctattttaaaaagtcacccatttttcaagggggttgactgggataacttgagggcacaaattcctccaaaacttgctccagaacctgggactcagtcgcctgcgtctgatgatgttcatgactcatcgtggagtccttctcacattggggatggttctgcagcttcggttagacaacctgacggtgctacatcttctgaggggactggtcacataactaggctagcttcaattgattccttcgattcaaaatggcagcaatttttggaacctggggaatctgttcttatgatctctatggtgaagaaattacaaaaactaacaagcaagaaggtgcaactcatccttaccaacaaaccaaagctgatctatgtagacccatcaaagctaattgtgaagggaaatataatatggtctgataatccaaatgatttaagcatccaagtggctagtccatcaaatttcaagatttgcacacctaaaaaggtaatgtcgtttgaggacgcaaagcaaagagcatggcagtggaaaaaggctattgaaggacttcaaaaccggtga

SEQ ID NO: 20905 - protein, 491 aa, Glycine max
MLETEKDFDSKLKIQGNSSSSNGGGNVQRSKSFAFRAPQENYTIQDFELGKIYGVGSYSKVVRAKKKDTGTVYALKIMDKKFITKENKTAYVKLERIVLDQLDHPGIVRLYFTFQDSFSLYMALESCEGGELFDQITRKGRLSENEARFYAAEVIDALEYIHNLGVIHRDIKPENLLLTAEGHIKIADFGSVKPMQDSQITVLPNAASDDKACTFVGTAAYVPPEVLNSSPATFGNDLWALGCTLYQMLSGTSPFKDASEWLIFQRIIARELRFPDYFSDEARDLIDRLLDLDPSRRPGAGPDGYAILKSHPFFKGVDWDNLRAQIPPKLAPEPGTQSPASDDVHDSSWSPSHIGDGSAASVRQPDGATSSEGTGHITRLASIDSFDSKWQQFLEPGESVLMISMVKKLQKLTSKKVQLILTNKPKLIYVDPSKLIVKGNIIWSDNPNDLSIQVASPSNFKICTPKKVMSFEDAKQRAWQWKKAIEGLQNR

SEQ ID NO: 20906 - DNA, 1326 bp, Glycine max; identical to SEQ ID NO: 2265
  CDS (1)..(1326)

SEQ ID NO: 20907 - protein, 441 aa, Glycine max; identical to SEQ ID NO: 2266

SEQ ID NO: 20908 - DNA, 1341 bp, Glycine max; identical to SEQ ID NO: 2267
  CDS (1)..(1341)

SEQ ID NO: 20909 - protein, 446 aa, Glycine max; identical to SEQ ID NO: 2268

SEQ ID NO: 20910 - DNA, 1389 bp, Glycine max; identical to SEQ ID NO: 2269
  CDS (1)..(1389)

SEQ ID NO: 20911 - protein, 462 aa, Glycine max; identical to SEQ ID NO: 2270

SEQ ID NO: 20912 - DNA, 1350 bp, Glycine max; identical to SEQ ID NO: 2271
  CDS (1)..(1350)

SEQ ID NO: 20913 - protein, 449 aa, Glycine max; identical to SEQ ID NO: 2272

SEQ ID NO: 20914 - DNA, 1362 bp, Glycine max; identical to SEQ ID NO: 2273
  CDS (1)..(1362)

SEQ ID NO: 20915 - protein, 453 aa, Glycine max; identical to SEQ ID NO: 2274

SEQ ID NO: 20916 - DNA, 1476 bp, Glycine max
  CDS (1)..(1476)
atgttggaaatggagaaggattttgattccaagctgaagattcaggggaattcctcatcttccaatggtgctgggaatgtacagagatccaaaagctttgcttttagggcaccccaggagaattacactatccaggactttgaattgggcaagatctatggtgttggctcttattctaaggttgtgagggcaaagaagaaggacactggaattgtgtacgcattgaagatcatggacaaaaaatttattaccaaagagaacaaaacagcttatgtgaagttggaacgcattgtgctagatcaattggatcatccaggcattgtgcggttatatttcacatttcaagactcattttctctatacatggcacttgaatcctgtgaaggtggagaactttttgatcaaataaccaggaaaggtcgtctatcagagaatgaggcacgattctatgcagctgaagttatcgatgctcttgaatacatacataatttgggagtcatacatcgtgatattaagccagagaacttattacttaccgctgaaggacatattaaaatagccgattttgggagtgtgaagcctatgcaggatagccaaataactgtccttccaaatgcagcatcagatgacaaagcctgcacttttgtgggaacagctgcttatgttcctccagaggttcttaattcctctccagcaacttttggaaatgacctttgggcacttggctgcacattataccaaatgctttctggaacttccccttttaaagacgcgagtgaatggcttatttttcaaagaattatagcaagagaacttagatttccagattacttttctgacgaagcaagagaccttattgaccgcctgttggatttggaccccagcaggagaccaggtgctggacctgatggttatgctattttaaaaagtcacccatttttcaagggggttgactgggataacttgagggcacaaattcctccaaaacttgctccagaacctgggactcagtcgcctgcgtctgatgatgttcatgactcatcgtggagtccttctcacattggggatggttctgcagcttcggttagacaacctgacggtgctacatcttctgaggggactggtcacataactaggctagcttcaattgattccttcgattcaaaatggcagcaatttttggaacctggggaatctgttcttatgatctctatggtgaagaaattacaaaaactaacaagcaagaaggtgcaactcatccttaccaacaaaccaaagctgatctatgtagacccatcaaagctaattgtgaagggaaatataatatggtctgataatccaaatgatttaagcatccaagtggctagtccatcaaatttcaagatttgcacacctaaaaaggtaatgtcgtttgaggacgcaaagcaaagagcatggcagtggaaaaaggctattgaaggacttcaaaaccggtga

SEQ ID NO: 20917 - protein, 491 aa, Glycine max
MLEMEKDFDSKLKIQGNSSSSNGAGNVQRSKSFAFRAPQENYTIQDFELGKIYGVGSYSKVVRAKKKDTGIVYALKIMDKKFITKENKTAYVKLERIVLDQLDHPGIVRLYFTFQDSFSLYMALESCEGGELFDQITRKGRLSENEARFYAAEVIDALEYIHNLGVIHRDIKPENLLLTAEGHIKIADFGSVKPMQDSQITVLPNAASDDKACTFVGTAAYVPPEVLNSSPATFGNDLWALGCTLYQMLSGTSPFKDASEWLIFQRIIARELRFPDYFSDEARDLIDRLLDLDPSRRPGAGPDGYAILKSHPFFKGVDWDNLRAQIPPKLAPEPGTQSPASDDVHDSSWSPSHIGDGSAASVRQPDGATSSEGTGHITRLASIDSFDSKWQQFLEPGESVLMISMVKKLQKLTSKKVQLILTNKPKLIYVDPSKLIVKGNIIWSDNPNDLSIQVASPSNFKICTPKKVMSFEDAKQRAWQWKKAIEGLQNR

SEQ ID NO: 20918 - DNA, 1335 bp, Glycine max; identical to SEQ ID NO: 2275
  CDS (1)..(1335)

SEQ ID NO: 20919 - protein, 444 aa, Glycine max; identical to SEQ ID NO: 2276

SEQ ID NO: 20920 - DNA, 1479 bp, Glycine max; identical to SEQ ID NO: 18785
  CDS (1)..(1479)

SEQ ID NO: 20921 - protein, 492 aa, Glycine max; identical to SEQ ID NO: 18786

SEQ ID NO: 20922 - DNA, 1383 bp, Glycine max; identical to SEQ ID NO: 2277
  CDS (1)..(1383)

SEQ ID NO: 20923 - protein, 460 aa, Glycine max; identical to SEQ ID NO: 2278

SEQ ID NO: 20924 - DNA, 1344 bp, Glycine max; identical to SEQ ID NO: 2279
  CDS (1)..(1344)

SEQ ID NO: 20925 - protein, 447 aa, Glycine max; identical to SEQ ID NO: 2280

SEQ ID NO: 20926 - DNA, 1293 bp, Glycine max; identical to SEQ ID NO: 2281
  CDS (1)..(1293)

SEQ ID NO: 20927 - protein, 430 aa, Glycine max; identical to SEQ ID NO: 2282

SEQ ID NO: 20928 - DNA, 1332 bp, Glycine max; identical to SEQ ID NO: 2283
  CDS (1)..(1332)

SEQ ID NO: 20929 - protein, 443 aa, Glycine max; identical to SEQ ID NO: 2284

SEQ ID NO: 20930 - DNA, 1386 bp, Glycine max; identical to SEQ ID NO: 2285
  CDS (1)..(1386)

SEQ ID NO: 20931 - protein, 461 aa, Glycine max; identical to SEQ ID NO: 2286

SEQ ID NO: 20932 - DNA, 1326 bp, Glycine max; identical to SEQ ID NO: 2197
  CDS (1)..(1326)

SEQ ID NO: 20933 - protein, 441 aa, Glycine max; identical to SEQ ID NO: 2198

SEQ ID NO: 20934 - DNA, 1479 bp, Glycine max; identical to SEQ ID NO: 18799
  CDS (1)..(1479)

SEQ ID NO: 20935 - protein, 492 aa, Glycine max; identical to SEQ ID NO: 18800

SEQ ID NO: 20936 - DNA, 1344 bp, Oryza sativa; identical to SEQ ID NO: 2289
  CDS (1)..(1344)

SEQ ID NO: 20937 - protein, 447 aa, Oryza sativa; identical to SEQ ID NO: 2290

SEQ ID NO: 20938 - DNA, 1371 bp, Oryza sativa; identical to SEQ ID NO: 2291
  CDS (1)..(1371)

SEQ ID NO: 20939 - protein, 456 aa, Oryza sativa; identical to SEQ ID NO: 2292

SEQ ID NO: 20940 - DNA, 1341 bp, Zea mays; identical to SEQ ID NO: 2293
  CDS (1)..(1341)

SEQ ID NO: 20941 - protein, 446 aa, Zea mays; identical to SEQ ID NO: 2294

SEQ ID NO: 20942 - DNA, 1323 bp, Zea mays; identical to SEQ ID NO: 2295
  CDS (1)..(1323)

SEQ ID NO: 20943 - protein, 440 aa, Zea mays; identical to SEQ ID NO: 2296

SEQ ID NO: 20944 - DNA, 1356 bp, Zea mays; identical to SEQ ID NO: 18809
  CDS (1)..(1356)

SEQ ID NO: 20945 - protein, 451 aa, Zea mays; identical to SEQ ID NO: 2332

SEQ ID NO: 20946 - DNA, 1335 bp, Glycine max; identical to SEQ ID NO: 2299
  CDS (1)..(1335)

SEQ ID NO: 20947 - protein, 444 aa, Glycine max; identical to SEQ ID NO: 2300

SEQ ID NO: 20948 - DNA, 1332 bp, Triticum aestivum; identical to SEQ ID NO: 2301
  CDS (1)..(1332)

SEQ ID NO: 20949 - protein, 443 aa, Triticum aestivum; identical to SEQ ID NO: 2302

SEQ ID NO: 20950 - DNA, 1557 bp, Zea mays; identical to SEQ ID NO: 18815
  CDS (1)..(1557)

SEQ ID NO: 20951 - protein, 518 aa, Zea mays; identical to SEQ ID NO: 2334

SEQ ID NO: 20952 - DNA, 1293 bp, Zea mays; identical to SEQ ID NO: 2303
  CDS (1)..(1293)

SEQ ID NO: 20953 - protein, 430 aa, Zea mays; identical to SEQ ID NO: 2304

SEQ ID NO: 20954 - DNA, 1347 bp, Zea mays; identical to SEQ ID NO: 2305
  CDS (1)..(1347)

SEQ ID NO: 20955 - protein, 448 aa, Zea mays; identical to SEQ ID NO: 2306

SEQ ID NO: 20956 - DNA, 1332 bp, Zea mays; identical to SEQ ID NO: 2309
  CDS (1)..(1332)

SEQ ID NO: 20957 - protein, 443 aa, Zea mays; identical to SEQ ID NO: 2310

SEQ ID NO: 20958 - DNA, 1362 bp, Zea mays; identical to SEQ ID NO: 2311
  CDS (1)..(1362)

SEQ ID NO: 20959 - protein, 453 aa, Zea mays; identical to SEQ ID NO: 2312

SEQ ID NO: 20960 - DNA, 1392 bp, Zea mays; identical to SEQ ID NO: 2313
  CDS (1)..(1392)

SEQ ID NO: 20961 - protein, 463 aa, Zea mays; identical to SEQ ID NO: 2314

SEQ ID NO: 20962 - DNA, 1317 bp, Zea mays; identical to SEQ ID NO: 2315
  CDS (1)..(1317)

SEQ ID NO: 20963 - protein, 438 aa, Zea mays; identical to SEQ ID NO: 2316

SEQ ID NO: 20964 - DNA, 1455 bp, Zea mays; identical to SEQ ID NO: 2317
  CDS (1)..(1455)

SEQ ID NO: 20965 - protein, 484 aa, Zea mays; identical to SEQ ID NO: 2318

SEQ ID NO: 20966 - DNA, 1356 bp, Zea mays; identical to SEQ ID NO: 2319
  CDS (1)..(1356)

SEQ ID NO: 20967 - protein, 451 aa, Zea mays; identical to SEQ ID NO: 2320

SEQ ID NO: 20968 - DNA, 1350 bp, Zea mays; identical to SEQ ID NO: 2321
  CDS (1)..(1350)

SEQ ID NO: 20969 - protein, 449 aa, Zea mays; identical to SEQ ID NO: 2322

SEQ ID NO: 20970 - DNA, 1290 bp, Zea mays; identical to SEQ ID NO: 2323
  CDS (1)..(1290)

SEQ ID NO: 20971 - protein, 429 aa, Zea mays; identical to SEQ ID NO: 2324

SEQ ID NO: 20972 - DNA, 1383 bp, Zea mays; identical to SEQ ID NO: 2325
  CDS (1)..(1383)

SEQ ID NO: 20973 - protein, 460 aa, Zea mays; identical to SEQ ID NO: 2326

SEQ ID NO: 20974 - DNA, 1380 bp, Zea mays; identical to SEQ ID NO: 2335
  CDS (1)..(1380)

SEQ ID NO: 20975 - protein, 459 aa, Zea mays; identical to SEQ ID NO: 2336

SEQ ID NO: 20976 - DNA, 1317 bp, Zea mays; identical to SEQ ID NO: 2337
  CDS (1)..(1317)

SEQ ID NO: 20977 - protein, 438 aa, Zea mays; identical to SEQ ID NO: 2338

SEQ ID NO: 20978 - DNA, 1350 bp, Zea mays; identical to SEQ ID NO: 2339
  CDS (1)..(1350)

SEQ ID NO: 20979 - protein, 449 aa, Zea mays; identical to SEQ ID NO: 2340

SEQ ID NO: 20980 - DNA, 1332 bp, Zea mays; identical to SEQ ID NO: 2341
  CDS (1)..(1332)

SEQ ID NO: 20981 - protein, 443 aa, Zea mays; identical to SEQ ID NO: 2342

SEQ ID NO: 20982 - DNA, 1383 bp, Zea mays; identical to SEQ ID NO: 2343
  CDS (1)..(1383)

SEQ ID NO: 20983 - protein, 460 aa, Zea mays; identical to SEQ ID NO: 2344

SEQ ID NO: 20984 - DNA, 1356 bp, Zea mays; identical to SEQ ID NO: 18847
  CDS (1)..(1356)

SEQ ID NO: 20985 - protein, 451 aa, Zea mays; identical to SEQ ID NO: 2298

SEQ ID NO: 20986 - DNA, 1323 bp, Zea mays; identical to SEQ ID NO: 2345
  CDS (1)..(1323)

SEQ ID NO: 20987 - protein, 440 aa, Zea mays; identical to SEQ ID NO: 2346

SEQ ID NO: 20988 - DNA, 1332 bp, Zea mays; identical to SEQ ID NO: 2347
  CDS (1)..(1332)

SEQ ID NO: 20989 - protein, 443 aa, Zea mays; identical to SEQ ID NO: 2348

SEQ ID NO: 20990 - DNA, 1395 bp, Zea mays; identical to SEQ ID NO: 2329
  CDS (1)..(1395)

SEQ ID NO: 20991 - protein, 464 aa, Zea mays; identical to SEQ ID NO: 2330

SEQ ID NO: 20992 - DNA, 1338 bp, Zea mays; identical to SEQ ID NO: 2349
  CDS (1)..(1338)

SEQ ID NO: 20993 - protein, 445 aa, Zea mays; identical to SEQ ID NO: 2350

SEQ ID NO: 20994 - DNA, 1344 bp, Zea mays; identical to SEQ ID NO: 2355
  CDS (1)..(1344)

SEQ ID NO: 20995 - protein, 447 aa, Zea mays; identical to SEQ ID NO: 2356

SEQ ID NO: 20996 - DNA, 1356 bp, Zea mays; identical to SEQ ID NO: 2357
  CDS (1)..(1356)

SEQ ID NO: 20997 - protein, 451 aa, Zea mays; identical to SEQ ID NO: 2358

SEQ ID NO: 20998 - DNA, 1512 bp, Zea mays; identical to SEQ ID NO: 2359
  CDS (1)..(1512)

SEQ ID NO: 20999 - protein, 503 aa, Zea mays; identical to SEQ ID NO: 2360

SEQ ID NO: 21000 - DNA, 20 bp, Artificial sequence
  primer
atggctcaagtactatctac

SEQ ID NO: 21001 - DNA, 26 bp, Artificial sequence
  primer
tcactgttcaatttcaggtggcaaac

SEQ ID NO: 21002 - protein, 600 aa, Artificial sequence
  consensus sequence
  Variant (3)..(3): Xaa in position 3 is any amino acid
  Variant (5)..(7): Xaa in position 5 to 7 is any amino acid
  Variant (9)..(9): Xaa in position 9 is any amino acid
  Variant (11)..(11): Xaa in position 11 is any amino acid
  Variant (16)..(17): Xaa in position 16 to 17 is any amino acid
  Variant (19)..(26): Xaa in position 19 to 26 is any amino acid
  Variant (27)..(57): Xaa in position 27 to 57 is any or no amino acid
  Variant (60)..(60): Xaa in position 60 is any amino acid
  Variant (62)..(64): Xaa in position 62 to 64 is any amino acid
  Variant (66)..(75): Xaa in position 66 to 75 is any amino acid
  Variant (76)..(89): Xaa in position 76 to 89 is any or no amino acid
  Variant (91)..(91): Xaa in position 91 is any amino acid
  Variant (95)..(100): Xaa in position 95 to 100 is any amino acid
  Variant (101)..(102): Xaa in position 101 to 102 is any or no amino acid
  Variant (106)..(106): Xaa in position 106 is any amino acid
  Variant (108)..(108): Xaa in position 108 is any amino acid
  Variant (110)..(110): Xaa in position 110 is any amino acid
  Variant (113)..(113): Xaa in position 113 is any amino acid
  Variant (115)..(115): Xaa in position 115 is any amino acid
  Variant (117)..(117): Xaa in position 117 is any amino acid
  Variant (121)..(123): Xaa in position 121 to 123 is any amino acid
  Variant (125)..(127): Xaa in position 125 to 127 is any amino acid
  Variant (128)..(128): Xaa in position 128 is any or no amino acid
  Variant (134)..(139): Xaa in position 134 to 139 is any amino acid
  Variant (140)..(146): Xaa in position 140 to 146 is any or no amino acid
  Variant (148)..(148): Xaa in position 148 is any amino acid
  Variant (150)..(151): Xaa in position 150 to 151 is any amino acid
  Variant (154)..(154): Xaa in position 154 is any amino acid
  Variant (157)..(157): Xaa in position 157 is any amino acid
  Variant (160)..(161): Xaa in position 160 to 161 is any amino acid
  Variant (164)..(165): Xaa in position 164 to 165 is any amino acid
  Variant (168)..(169): Xaa in position 168 to 169 is any amino acid
  Variant (172)..(172): Xaa in position 172 is any amino acid
  Variant (185)..(186): Xaa in position 185 to 186 is any amino acid
  Variant (188)..(188): Xaa in position 188 is any amino acid
  Variant (189)..(193): Xaa in position 189 to 193 is any or no amino acid
  Variant (196)..(196): Xaa in position 196 is any amino acid
  Variant (204)..(207): Xaa in position 204 to 207 is any amino acid
  Variant (208)..(221): Xaa in position 208 to 221 is any or no amino acid
  Variant (228)..(228): Xaa in position 228 is any amino acid
  Variant (233)..(233): Xaa in position 233 is any amino acid
  Variant (240)..(243): Xaa in position 240 to 243 is any amino acid
  Variant (245)..(245): Xaa in position 245 is any amino acid
  Variant (246)..(247): Xaa in position 246 to 247 is any or no amino acid
  Variant (251)..(253): Xaa in position 251 to 253 is any amino acid
  Variant (255)..(255): Xaa in position 255 is any amino acid
  Variant (261)..(261): Xaa in position 261 is any amino acid
  Variant (263)..(263): Xaa in position 263 is any amino acid
  Variant (266)..(266): Xaa in position 266 is any amino acid
  Variant (269)..(269): Xaa in position 269 is any amino acid
  Variant (273)..(275): Xaa in position 273 to 275 is any amino acid
  Variant (276)..(276): Xaa in position 276 is any or no amino acid
  Variant (278)..(281): Xaa in position 278 to 281 is any amino acid
  Variant (283)..(283): Xaa in position 283 is any amino acid
  Variant (284)..(285): Xaa in position 284 to 285 is any or no amino acid
  Variant (288)..(294): Xaa in position 288 to 294 is any amino acid
  Variant (296)..(296): Xaa in position 296 is any amino acid
  Variant (298)..(298): Xaa in position 298 is any amino acid
  Variant (300)..(304): Xaa in position 300 to 304 is any amino acid
  Variant (306)..(309): Xaa in position 306 to 309 is any amino acid
  Variant (311)..(313): Xaa in position 311 to 313 is any amino acid
  Variant (315)..(316): Xaa in position 315 to 316 is any amino acid
  Variant (318)..(327): Xaa in position 318 to 327 is any amino acid
  Variant (328)..(331): Xaa in position 328 to 331 is any or no amino acid
  Variant (334)..(357): Xaa in position 334 to 357 is any amino acid
  Variant (358)..(430): Xaa in position 358 to 430 is any or no amino acid
  Variant (434)..(435): Xaa in position 434 to 435 is any amino acid
  Variant (437)..(438): Xaa in position 437 to 438 is any amino acid
  Variant (439)..(439): Xaa in position 439 is any or no amino acid
  Variant (441)..(441): Xaa in position 441 is any amino acid
  Variant (443)..(443): Xaa in position 443 is any amino acid
  Variant (444)..(444): Xaa in position 444 is any or no amino acid
  Variant (446)..(447): Xaa in position 446 to 447 is any amino acid
  Variant (450)..(455): Xaa in position 450 to 455 is any amino acid
  Variant (456)..(471): Xaa in position 456 to 471 is any or no amino acid
  Variant (473)..(485): Xaa in position 473 to 485 is any amino acid
  Variant (487)..(494): Xaa in position 487 to 494 is any amino acid
  Variant (495)..(523): Xaa in position 495 to 523 is any or no amino acid
  Variant (525)..(528): Xaa in position 525 to 528 is any amino acid
  Variant (529)..(542): Xaa in position 529 to 542 is any or no amino acid
  Variant (544)..(545): Xaa in position 544 to 545 is any amino acid
  Variant (546)..(548): Xaa in position 546 to 548 is any or no amino acid
  Variant (550)..(552): Xaa in position 550 to 552 is any amino acid
  Variant (553)..(553): Xaa in position 553 is any or no amino acid
  Variant (555)..(557): Xaa in position 555 to 557 is any amino acid
  Variant (559)..(559): Xaa in position 559 is any amino acid
  Variant (560)..(560): Xaa in position 560 is any or no amino acid
  Variant (563)..(564): Xaa in position 563 to 564 is any amino acid
  Variant (566)..(569): Xaa in position 566 to 569 is any amino acid
  Variant (570)..(599): Xaa in position 570 to 599 is any or no amino acid
YEXGXXXGXGXFAKVXXAXXXXXXXXXXXXXXXXXXXXXXXXXXXXXXXXXXXXXXXVAXKXXXKXXXXXXXXXXXXXXXXXXXXXXXXIXREIXXXXXXXXHPNXVXLXEVXAXKXKIYXXXEXXXXGGELFXXXXXXXXXXXXXLXEXXARXYFXQLXXAVXXCHXXGVXHRDLKPENLLLDXXGXXXXXXLKXSDFGLSAXXXXXXXXXXXXXXXXXXDGLLHTXCGTPXYVAPEVXXXXGXXXYDGXXXDXWSCGVXLXVLXAGXLPFXXXXNXXXXYXXXKIXXXXXXXPXWXSXXXXXLXXXXLXXXPXXRXXXXXXXXXXXXXXWFXXXXXXXXXXXXXXXXXXXXXXXXXXXXXXXXXXXXXXXXXXXXXXXXXXXXXXXXXXXXXXXXXXXXXXXXXXXXXXXXXXXXXXXXXXXXXXXXXNAFXXIXXXSXGXXLXXLFXXXXXXXXXXXXXXXXXXXXXXFXXXXXXXXXXXXXEXXXXXXXXXXXXXXXXXXXXXXXXXXXXXXXXXXXXXGXXXXXXXXXXXXXXXXXXEXXXXXPXXXXVXXXKXXGDXXEXXXXXXXXXXXXXXXXXXXXXXXXXXXXXXXXXXL

SEQ ID NO: 21003 - protein, 30 aa, Artificial sequence
  protein pattern
  Variant (3)..(3): Xaa in position 3 is any or no amino acid
  Variant (5)..(5): Xaa in position 5 is any or no amino acid
  Variant (7)..(7): Xaa in position 7 is Ile or Val
  Variant (8)..(8): Xaa in position 8 is any amino acid
  Variant (9)..(9): Xaa in position 9 is Ala, Gly or Ser
  Variant (10)..(10): Xaa in position 10 is Ile, Leu or Val
  Variant (11)..(11): Xaa in position 11 is any amino acid
  Variant (12)..(12): Xaa in position 12 is Phe, His or Tyr
  Variant (15)..(15): Xaa in position 15 is any amino acid
  Variant (16)..(16): Xaa in position 16 is Lys or Arg
  Variant (17)..(17): Xaa in position 17 is Asp, Glu, Gly or Gln
  Variant (19)..(19): Xaa in position 19 is any amino acid
  Variant (23)..(23): Xaa in position 23 is Ile or Leu
  Variant (25)..(25): Xaa in position 25 is Leu or Pro
  Variant (26)..(26): Xaa in position 26 is Asp, Glu or Gln
  Variant (28)..(28): Xaa in position 28 is any or no amino acid
  Variant (30)..(30): Xaa in position 30 is Ile, Leu or Val
YFXQXLXXXXXXCHXXXVXHRDXKXXNXLX

SEQ ID NO: 21004 - protein, 21 aa, Artificial sequence
  protein pattern
  Variant (4)..(5): Xaa in position 4 to 5 is Ile or Val
  Variant (7)..(7): Xaa in position 7 is Phe or Tyr
  Variant (9)..(9): Xaa in position 9 is any or no amino acid
  Variant (11)..(11): Xaa in position 11 is any amino acid
  Variant (12)..(12): Xaa in position 12 is any or no amino acid
  Variant (14)..(14): Xaa in position 14 is any amino acid
  Variant (18)..(18): Xaa in position 18 is any amino acid
  Variant (19)..(19): Xaa in position 19 is Asp, Glu or Gly
  Variant (20)..(20): Xaa in position 20 is any amino acid
  Variant (21)..(21): Xaa in position 21 is Asp or Asn
SCGXXLXVXLXXGXLPFXXXX

SEQ ID NO: 21005 - protein, 22 aa, Artificial sequence
  protein pattern
  Variant (3)..(3): Xaa in position 3 is any amino acid
  Variant (4)..(4): Xaa in position 4 is Ile or Val
  Variant (6)..(6): Xaa in position 6 is any amino acid
  Variant (7)..(7): Xaa in position 7 is Ile, Leu or Met
  Variant (8)..(8): Xaa in position 8 is any amino acid
  Variant (9)..(9): Xaa in position 9 is Asp or Glu
  Variant (11)..(11): Xaa in position 11 is any amino acid
  Variant (12)..(12): Xaa in position 12 is Ala or Gly
  Variant (13)..(13): Xaa in position 13 is Gly, Asn, Ser or Thr
  Variant (14)..(16): Xaa in position 14 to 16 is any amino acid
  Variant (17)..(17): Xaa in position 17 is Ile or Val
  Variant (18)..(18): Xaa in position 18 is any amino acid
  Variant (19)..(19): Xaa in position 19 is Phe, Ile, Leu, Met or Val
  Variant (20)..(21): Xaa in position 20 to 21 is any amino acid
HPXXVXXXXVXXXXXXXXXXXE

SEQ ID NO: 21006 - protein, 27 aa, Artificial sequence
  protein pattern
  Variant (2)..(2): Xaa in position 2 is Ile, Leu, Met or Val
  Variant (4)..(4): Xaa in position 4 is Lys or Arg
  Variant (5)..(5): Xaa in position 5 is any amino acid
  Variant (6)..(6): Xaa in position 6 is Ile or Leu
  Variant (8)..(8): Xaa in position 8 is any amino acid
  Variant (10)..(10): Xaa in position 10 is Asn, Ser or Thr
  Variant (12)..(16): Xaa in position 12 to 16 is any or no amino acid
  Variant (18)..(18): Xaa in position 18 is Lys or Arg
  Variant (19)..(21): Xaa in position 19 to 21 is any amino acid
  Variant (22)..(22): Xaa in position 22 is Ala, Gly, Ser or Thr
  Variant (23)..(26): Xaa in position 23 to 26 is any amino acid
  Variant (27)..(27): Xaa in position 27 is Ala, Gly, Asn, Ser or Thr
EXGXXXGXGXFXXXXXAXXXXXXXXXX

SEQ ID NO: 21007 - protein, 15 aa, Artificial sequence
  protein pattern
  Variant (2)..(5): Xaa in position 2 to 5 is any amino acid
  Variant (6)..(6): Xaa in position 6 is Ile, Leu or Val
  Variant (8)..(8): Xaa in position 8 is Ile, Leu, Met or Val
  Variant (14)..(14): Xaa in position 14 is Ala, Cys, Asn, Ser or Thr
  Variant (15)..(15): Xaa in position 15 is Ala, Thr or Val
DXXXXXKXSDFGLXX

SEQ ID NO: 21008 - DNA, 2154 bp, Arabidopsis thaliana
  CDS (1)..(2154)
atggaggagctagatcgttcacgtgcttttgccagagacgtcaaacgtatcgtcgttaaggttgggacagcagttgttactggaaaaggtggaagattggctcttggtcgtttaggagcactgtgtgaacagcttgcggaattaaactcggatggatttgaggtgatattggtgtcatctggtgcggttggtcttggcaggcaaaggcttcgttatcgacaattagtcaatagcagctttgcggatcttcagaagcctcagactgaacttgatgggaaggcttgtgctggtgttggacaaagcagtcttatggcttactatgagactatgtttgaccagcttgatgtgacggcagctcaacttctggtgaatgacagtagttttagagacaaggatttcaggaagcaacttaatgaaactgtcaagtctatgcttgatttgagggttattccaattttcaatgagaatgatgctattagcacccgaagagccccatatcaggattcttctggtattttctgggataacgatagcttagctgctctactggcgttggaactgaaagctgatcttctgattcttctgagcgatgttgaaggtctttacacaggccctccaagtgatcctaactcaaagttgatccacacttttgttaaagaaaaacatcaagatgagattacattcggcgacaaatcaagattagggagagggggtatgactgcaaaagtcaaagctgcagtcaatgcagcttatgctgggattcctgtcatcataaccagtgggtattcagctgagaacatagataaagtcctcagaggactacgtgttggaaccttgtttcatcaagatgctcgtttatgggctccgatcacagattctaatgctcgtgacatggcagttgctgcgagggaaagttccagaaagcttcaggccttatcttcggaagacaggaaaaaaattctgcttgatattgccgatgcccttgaagcaaatgttactacaatcaaagctgagaatgagttagatgtagcttctgcacaagaggctgggttggaagagtcaatggtggctcgcttagttatgacacctggaaagatctcgagccttgcagcttcagttcgtaagctagctgatatggaagatccaatcggccgtgttttaaagaaaacagaggtggcagatggtcttgtcttagagaagacctcatcaccattaggcgtacttctgattgtttttgaatcccgacctgatgcacttgtacagatagcttcacttgccatccgtagtggaaatggtcttctgctgaagggtggaaaggaggcccggcgatcaaatgctatcttacacaaggtgatcactgatgcaattccagagactgttgggggtaaactcattggacttgtgacttcaagagaagagattcctgatttgcttaagcttgatgacgttatcgatcttgtgatcccaagaggaagcaacaagcttgttactcagataaaaaatactacaaaaatccctgtgctaggtcatgctgatggaatctgtcatgtatatgtcgacaaggcttgtgatacggatatggcaaagcgcatagtttctgatgcaaagttggactatccagcagcctgtaatgcgatggaaacccttcttgtgcataaggatctagagcagaatgctgtgcttaatgagcttatttttgctctgcagagcaatggagtcactttgtatggtggaccaagggcaagtaagatactgaacataccagaagcacggtcattcaaccatgagtactgtgccaaggcttgcactgttgaagttgtagaagacgtttatggtgctatagatcacattcaccgacatgggagtgcacacacagactgcattgtgacagaggatcacgaagttgcagagctattccttcgccaagtggatagcgctgctgtgttccacaacgccagcacaagattctcagatggtttccgatttggacttggtgcagaggtgggggtaagcacgggcaggatccatgctcgtggtccagtcggggtcgaaggattacttacaacgagatggataatgagaggaaaaggacaagttgtcgacggagacaatggaattgtttacacccatcaggacattcccatccaagcttaa

SEQ ID NO: 21009 - protein, 717 aa, Arabidopsis thaliana [sequence omitted]

SEQ ID NO: 21010 - DNA, 2499 bp, Glycine max
  CDS (59)..(2323)
acccgccggtccgctgccaaccacactgaacaacaaacacagtctgtttggtcagagtatggagaacacagatccttgtagacattttctcaaggatgttaagcgcatcataatcaaggttgggactgctgtggtcactcgccaagatggaaggttagctgttggaaaattaggggcactctgtgagcagattaaggagctgaattctcttggttatgagattattttggtgtcatcaggtgctgttggccttggtcgccaaaggcttagatacagaaaattaattaacagcagctttgctgaccttcagaagccgcaagttgaacttgatggcaaggcttgtgctgctgttggacaaaacagccttatggctctttatgatgttttgtttagtcagctggatgtgacatctgctcagcttcttgtgacggacaatgattttagagacaaagatttcagaatgcagctcagcgaaactatgaaatcattgttagcattaaaagttattcccatattcaacgagaacgatgcagttagtactaggaaagctccatatgaggattcttctggcatattttgggataatgacagtttatcagctttattggcattggaattaaaagctgatcttcttattttgttgagtgatgtagagggtctctatagtggccctccaagtgatccacgttcaaaacttattcatacatacattaaggaaaagcatcaaagtgaaattacttttggagacaagtctagagtgggaagaggtggaatgactgctaaagtaaaggcttctattcatgcagctgaagctggcattcctgttatcattactagtggttatgcagctgaaaatatcattaaagttctccaaggacaacggattggaaccctcttccataaagatgcacataaatgggccccggtaaaagaggttgatgctcgtgagatggcagttgcagctagggactgttccagacggcttcaggccttatcttcagaagagaggaaacaaattttgctaaaaatagctgatgccctggaagcacatcaaaatgagatcaggattgaaaatgaagctgatgttgctgatgcaaaagaagcaggatatgaaaaatccttggttgctagactgcttgcaagccttgctaacaacattcgaattattgcaaacatggaagatccaattggtcgagtgttaaaacgaactgagcttgcagaggggctgattttggagaaaacatcatcttctttaggagttcttttaattgtttttgagtctcgccctgatgcactagtacagatagcttctttggcaatccgaagtgggaatgggcttctcttgaaaggaggcaaggaggctaagcgatcaaatgcaattttgcacaaagtaattactgaagccataccagatattgttggctcaaaacttattggacttgtgacatcaagagcagaaattcctgagctacttaagttggatgatgtaattgatctagtgattccaagaggcagcaacaaacttgtcactcagatcaagagttccactaaaattcctgtcctgggtcatgcagatggaatttgtcatgtctatgttgataaatctgctgatctggagatggcaaggcggattgtactagatgcaaaaatagactatccagcaggctgcaatgccatggaaactcttcttgttcacaaggacttggtagagaaaggttggctcaatagtattattattgacctacggacagaaggtgttacattgtatggaggacccaaggcaagtcctttgttaaatattccaatggctcgtatgttacatcatgagtacaattcgttggcatgcacagttgaaattgtggatgatgtttatgcagctattgatcatataaatctttatggaaggcatgccactctttatttcttgataattgcacatactgattccgttgttgcagaagatcatgaagtagccaatgtgtttctacgccaagtagacagtgctgctgttttccacaatgctagtacaagattcagtgatggggcacgatttggactaggtgcagaggttggaataagtacaagcaggattcatgctcggggtccagtaggagttgatggattgttaacaaccagatggattctcaaaggaagtggacaaatagtggatggtgacaaagcaattgactacactcacagagaccttgggctaaagttgtacaattcagtggaggagggatatttatgctatctggtgctgctgcttttacgttcaagatgttatacaagggaattgctattctccccaacgttagaaaattgatgttcattgtgtgaagcttaatttgaatggtctaactgctttactttcttttgtagcctttttcatttgttttgacagttgagaacggtataaaattgtacaatttaataaaatagggtcatttgtatcaaataaaaaaaaaaaaagggtggtcggttttagaggatccaagctta

SEQ ID NO: 21011 - protein, 754 aa, Glycine max
MENTDPCRHFLKDVKRIIIKVGTAVVTRQDGRLAVGKLGALCEQIKELNSLGYEIILVSSGAVGLGRQRLRYRKLINSSFADLQKPQVELDGKACAAVGQNSLMALYDVLFSQLDVTSAQLLVTDNDFRDKDFRMQLSETMKSLLALKVIPIFNENDAVSTRKAPYEDSSGIFWDNDSLSALLALELKADLLILLSDVEGLYSGPPSDPRSKLIHTYIKEKHQSEITFGDKSRVGRGGMTAKVKASIHAAEAGIPVIITSGYAAENIIKVLQGQRIGTLFHKDAHKWAPVKEVDAREMAVAARDCSRRLQALSSEERKQILLKIADALEAHQNEIRIENEADVADAKEAGYEKSLVARLLASLANNIRIIANMEDPIGRVLKRTELAEGLILEKTSSSLGVLLIVFESRPDALVQIASLAIRSGNGLLLKGGKEAKRSNAILHKVITEAIPDIVGSKLIGLVTSRAEIPELLKLDDVIDLVIPRGSNKLVTQIKSSTKIPVLGHADGICHVYVDKSADLEMARRIVLDAKIDYPAGCNAMETLLVHKDLVEKGWLNSIIIDLRTEGVTLYGGPKASPLLNIPMARMLHHEYNSLACTVEIVDDVYAAIDHINLYGRHATLYFLIIAHTDSVVAEDHEVANVFLRQVDSAAVFHNASTRFSDGARFGLGAEVGISTSRIHARGPVGVDGLLTTRWILKGSGQIVDGDKAIDYTHRDLGLKLYNSVEEGYLCYLVLLLLRSRCYTRELLFSPTLEN

SEQ ID NO: 21012 - DNA, 3145 bp, Zea mays
  CDS (495)..(2648)
ctccccttgctggccaaatcgatcgctccccttcaggctccaggctccggagcttgctggcattcaccgacacaaccggggttaaggaggcctaaccttcgactggaggaacggtgatcctacaagacctgaacgagatgcgctgctttggacagaccctaccgaggacaactgccgtacatgagaggggcagtcgtaggacagccaccatcccttcccggattgcctgatcctcatggcgaggaggctgagggactcctcctgatggggactggaggccattcggctcgaggttgccatttttgttccctcacccagtccgtctcaccacttcaaaaaccctctcctctctcatccgccttcctggcgattgcggcgacgaggtgacgatagagctgcccccgcaaggaaaacggacaagagaggcggaggctgatagggagaggagacggaggaccaagagcggcgtcgatctaaaagcgttggcggcggccatggccaccgcggaccggacccggactttcatgaaggacgtcaaacgcgtcatcatcaaggtgggcactgcagtcgtcacgaggggtgatgatgggcgactggctgtgggccggttggggtgtctttgtgagcaggtaaaagagctgaatgtcttaggatacgaggtgatccttgtgacctcaggtgctgttggtgtggggaagcagaggctcaagtacaggaagcttgtcaatagcagctttgctgatctgcaaaagccacagacggagctggatggaaaggcttgcgctgctgttggtcagagtggcctcatggctctttatgatatgctatttactcaacttgatgtgtcctcctcgcaacttcttgtgacagatagtgattttgagaatccaaactttcgggagaggctctgtgaaactgttgagtcactattagatcttaaagttgtaccaatatttaatgaaaatgatgccatcagcactagaaaggctccatatgaggattcatctggtatattctgggataatgacagtttagctggtcttttggctattgaacttaaagcagatctccttgttctactaagtgacgtagatggtctatacagcggtccacctagcgaaccgggatcaaagatcattcatacctacatcaaagataaacattacagtggaataacttttggggataagtcacgtgtaggtagaggaggaatgacagctaaagtgaaggctgcttttgtggcttcgaacagtggcacacctgttgttattacaagtggatttgcatctcagagcattgttagagttctccaaggagagaagattggtactctcttccataaggatgcaagtctgtgggagccatccaaggatgttagtgctcgtgagatggctgttgctgcaagagaatgttcaaggcgtctgcagaatttatcatcggatgaacgcaagaaaatattgttagacattgcagatgctttggaacaaaatgaggatctaattagaactgaaaatgaagctgatgtatctgcagcacaagatgctggatatcagaaatctttggttgatagattgacattgaagccagaaaagatagcaagccttgcgaaatccatacgcactcttgcaaatatggaagacccaatcaaccagatactcaaaagaacagaggttgctgaagacttagtgctcgaaaaaacatcttgccctctgggtgtgctgttgattgtttttgagtccaggcctgatgccttagtccagattgcgtctttagcgattcgaagtggcaatggtcttctcctgaaaggtggaaaagaagccatgagatcgaacacagtattacataaggttataactggcgcaattcctgacaacgtgggtcaaaaacttattggccttgttacaagtagagatgaaatcgctgatttactaaagcttgatgatgtcattgatcttgtcattccaagaggcagcaataagctggtttcgcaaatcaaggcatcaactaagatacctgtcctcggtcatgcggatggtatttgtcatgtatacattgacaaatcagctgacatgaatatggcaaaacgaatagtgatggatgccaaaactgattacccagcagcctgcaatgctatggagacattgcttgttcataaagaccttataaaggctccaggtcttgatgatatactcctatcactcaaaacagaaggagttgctatttatggagggcctgttgcacatgaagtactgtgtattccgaaagcagattcattccatcatgaatatagctctatggcctgcacaattgagttcgttgatgatgtacagtcagcaattaaccatatacatcgttatggaagtgcacatacagattgcattatcaccacagatgataaagtagcagaaacttttctgcgtcaagttgatagtgctgctgtatttcataatgcgagtacacgattctctgatggggctcgttttggattgggtgccgaggttggcataagcacagggcgtatacatgctcgcgggcctgtgggtgttgaaggtctcttaacaacacgctggatcatgcgaggaagtgggcaagtggtgaatggtgacaagaatgttgcatacacccataagaaccttcccttacaatgaggctgtttttgtgcttgatcaggattcgtgtctatccagtgatgtttgatagtttcatcaggcaggagcatagaatggtgaatcttttcgattgaggactgtgaatccatggatgttcagtcattgtttgtgtagacattgtggtgagcttggaggccaccccacctccccaataaagcagtgctgggagtaatagagcactgatgtactgagggtgcctaggttaaacaagaggaaccggttatatttgttttgcggtcgaacacaaacaatttttgttggtgacttgtttcttatgattctacatatttcaaggtttatgtgctgtcctaaaagggggccttgatacccgtacccaattcgccttagtgagtcgtattttggatactgtaggcatactgtaacgacagcaaaagctggctgcagtagccacagctgtactgctgcaaatagctgttactaaaatatcgtgcatcacatgtcggccacaattaccc

SEQ ID NO: 21013 - protein, 717 aa, Zea mays
MATADRTRTFMKDVKRVIIKVGTAVVTRGDDGRLAVGRLGCLCEQVKELNVLGYEVILVTSGAVGVGKQRLKYRKLVNSSFADLQKPQTELDGKACAAVGQSGLMALYDMLFTQLDVSSSQLLVTDSDFENPNFRERLCETVESLLDLKVVPIFNENDAISTRKAPYEDSSGIFWDNDSLAGLLAIELKADLLVLLSDVDGLYSGPPSEPGSKIIHTYIKDKHYSGITFGDKSRVGRGGMTAKVKAAFVASNSGTPVVITSGFASQSIVRVLQGEKIGTLFHKDASLWEPSKDVSAREMAVAARECSRRLQNLSSDERKKILLDIADALEQNEDLIRTENEADVSAAQDAGYQKSLVDRLTLKPEKIASLAKSIRTLANMEDPINQILKRTEVAEDLVLEKTSCPLGVLLIVFESRPDALVQIASLAIRSGNGLLLKGGKEAMRSNTVLHKVITGAIPDNVGQKLIGLVTSRDEIADLLKLDDVIDLVIPRGSNKLVSQIKASTKIPVLGHADGICHVYIDKSADMNMAKRIVMDAKTDYPAACNAMETLLVHKDLIKAPGLDDILLSLKTEGVAIYGGPVAHEVLCIPKADSFHHEYSSMACTIEFVDDVQSAINHIHRYGSAHTDCIITTDDKVAETFLRQVDSAAVFHNASTRFSDGARFGLGAEVGISTGRIHARGPVGVEGLLTTRWIMRGSGQVVNGDKNVAYTHKNLPLQ

SEQ ID NO: 21014 - DNA, 2549 bp, Oryza sativa
  CDS (99)..(2249)
gcggctgcggcggcaaggcggcgagacgtgggagagggatttacaggtagagggagagggtggaggaggagaggctgaggctaggaagcggtttcgccatggcgagcgtcgacccgtcccggagcttcgtgagggacgtgaagcgcgtcatcatcaaggtgggcactgcagttgtctccagacaagatggaagattggctttgggcagggttggagctctgtgcgagcaggttaaggaactgaactctttaggatacgaagtgattttggtcacctcaggtgctgttggagtggggcgacagcgacttaggtaccggaagcttgtcaatagcagctttgctgatctgcaaaagccacagatggagttagatggaaaggcttgtgccgctgttggtcagagtggactgatggctctttacgatatgttgtttaaccaactggatgtctcgtcatctcaacttcttgtcaccgacagtgattttgagaacccaaagttccgggagcaactcactgaaactgttgagtcattattagatcttaaagttataccaatatttaatgaaaatgatgccatcagcactagaaaggctccatatgaggattcatctggtatattctgggataatgacagtttagcaggactgttggcactggaactgaaagctgatctccttattctgctcagtgatgtggatgggttgtatagtggtccaccaagtgaaccatcatcaaaaatcatacacacttatattaaagaaaagcatcagcaagaaatcacttttggagacaaatctcgtgtaggtagaggaggcatgacagcaaaagtgaaggctgctgtcttggcttcaaatagcggcacacctgtggttattacaagtgggtttgaaaatcggagcattcttaaagttcttcatggggaaaaaattggtactctctttcacaagaatgcgaatttgtgggaatcatctaaggatgttagtactcgtgagatggctgttgccgcaagagattgttcaaggcatctacagaatttgtcatcagaggaacgaaaaaagatattgctagatgttgcagatgctttggaggcaaatgaggatttaataaggtctgagaatgaagctgatgtagctgcggcccaagttgctggatatgagaagcctttggttgctagattgactataaaaccaggaaagatagcaagccttgcaaaatctattcgtacccttgcaaatatggaagaccctataaaccagatacttaaaaagacagaggttgctgatgatttagttcttgagaaaacatcttgcccattaggtgttctcttaattgtttttgagtcccgacctgatgccttggttcagattgcatctttggcaattcgaagtggtaatggtcttctcctaaaaggtggaaaagaagctatcagatcaaacacgatattgcataaggttataactgatgctattcctcgtaatgttggtgaaaaacttattggccttgttacaactagagatgagatcgcagatttgctaaagcttgatgatgtcattgatcttgtcactccaagaggaagtaataagcttgtctctcaaatcaaggcgtcaactaagattcctgttcttgggcatgctgatggtatatgccacgtatatattgacaaatcagctgacatggatatggcaaaacttattgtaatggatgcaaaaactgattacccagcagcctgcaatgcaatggagaccttactagttcataaggatcttatgaagagtccaggccttgacgacatattagtagcactaaaaacagaaggagttaatatttatggtggacctattgcgcacaaagctctgggatttccaaaagctgtttcatttcatcatgagtatagttctatggcctgcactgttgagtttgttgatgatgttcaatcagcaattgaccatattcatcgttatggaagtgctcatacagattgtatcgtcactacagatgataaggtagcagagacttttctacgcagagttgatagtgctgctgtatttcataatgcaagtacgagattctctgatggggctcgttttggattgggtgctgaggttggcataagcacagggcgtatccatgcccgtggaccagtgggtgttgaaggtctcttaactacacgatggatcttgcgaggacgtgggcaagtggtgaatggtgacaaggatgtcgtgtacacccataagagtcttcctttgcaatgaggtcaaatgctccttttagcctgttcaggagtaggtgaatatccttttaagaatggattgactactttattttgtcatcttgtacaagcatcttattgcggcattccgatggattattgattttgggggttcccactttcaaatgtgacaccaaaaataaattcatcagttctgagagcaagattttggaggttcagcttctccatgtaataagtaaattcagttctgagaacttgtgtaccaacgcgctatgttgcttgtaatgagcgatactaacatctgtgattgcacatatactaa

SEQ ID NO: 21015 - protein, 716 aa, Oryza sativa [sequence omitted]

SEQ ID NO: 21016 - DNA, 2529 bp, Viridiplantae
  CDS (120)..(2303)
ccattatcttcctcctctcacgttctcctcttcttcttcgtagtggcggtgactcagtccgatcgagttgactcgctctctctctctctctctgtcttgtttttgataagaagctagctatggaggatgagatagatcgttcccgcgctttcgccaaggacgttaagcgtatcgttgtcaaggttgggacagcagttgttacagggaaaggtggaagattggctcttggccgcttaggagctatctgcgagcagcttgctgaattgaactcggatggttttgaggtcattttggtgtcttctggtgcggttggtcttggtcgtcagaggcttagatacagacaattagtcaacagcagctttgcagaccttcagaagccacagactgaacttgatgggaaggcttgtgctggtgttggacagagcagtctcatggcttactatgagactatgtttgaccagatggatgtgacggtggctcaaatgctggtgactgatagcagtttcagagataaggatttcaggaagcaacttagtgagacagtcaaagctatgatgaaaatgagagttattccagttttcaacgagaatgatgctataagcactcgaaaagccccttacaaggattctactggtatattttgggataatgacagcttagctgctctactggcgcttgagctgaaagctgatcttttgattcttcttagtgacgttgagggtctttacactggtcctccaagcgatcctaagtcaaagttaatccacacatacgttaaagagaaacaccaggaagagattacctttggcgagaagtccagattaggacgaggtggtatgactgcaaaagttaaagctgctgttaatgcagcttatggtggcattcctgttatcataaccagtgggtatgcagctgagaatatagctaaagttcttaaaggactgcgtgttggtaccttgttccaccaagatgcacatttgtgggctagagtcgtagatactacttctcgtgacatggcagttgctgcaagggaaagttctagaaagcttcaggctttgtcttcagaagataggaaaaacattctactagatatagccaacgctctagaagcaaatgagaaaataattaaggctgagaatgatttagatgttgctgcagcacaagaagctggatatgaagagtctttggtagctcgtttagttatgaagcctggaaagatctcaagccttgcagcttctattcgccagctagctgaaatggaagacccaattggtcgtgttctaaagaaaactgaggttgcagatggtcttattttagagaaaacctcatcaccattaggtgttcttctgattgtttttgaatcccgtcctgatgcacttgttcagatagcttcacttgcaatcaggagtggaaatggtcttctgctgaagggtggaaaagaggctcgtcgatcaaatgctatcttacacaaggtgatcactgatgcaattccgaagactgttggaggtaaactcataggacttgtgacttcgagagatgagattcctgatttgctcaagcttgatgatgttattgatcttgtgatcccaagaggcagcaacaagcttgtttctcagataaaaaactcaacgaaaatcccagtgctagggcatgcggatggtatctgtcatgtgtatgttgacaagtcttgtaaagtagacatggcaaaacgtgttgtttcagatgcaaagttagactatccagcagcctgtaacgctatggaaacccttcttgtacataaggatctagagcagaatggtgtgctaaacgagcttatatatgccctgcaagccaatggtgtcactttgtatggtgggccaaaagcaagtggtaaactgaacattccggaagtaaaatcatttcatcacgagtacagttccaaggcctgcaccgttgaaattgtagaagacgtacacggtgctatagatcatattcaccaacacgggagtgcacacactgattgcatagtgacagaagatagtgaagtggcagagatcttcctccgccaagtggacagtgctgctgttatccacaatgcaagcacaagattctgtgatggttttcgatttggacttggtgctgaggtgggaataagcacaagcaggatccatgcccgtggtccagttggagtagaaggattattgacaacgagatggataatgagaggaaaaggacaagtggtggatggagacaatggagtcgcttacactcataaggaccttcctgtcttagaaaggacaaaggcagtgcagaacgggcattagttctatctatgctaatgtcatattatattttactcttttcttatgattgaagtttattttttttctcgtttactaggatatagtgttgtggatttgcaataagtggtcttttgataatagtaaagtgtgtattagccttttcgtcatgtcaaaaagaaactcgttataagccaatgtaacctttctatttctctcaatcgcaaaaaaaaaaaaaaaaaaaaaaaaa

SEQ ID NO: 21017 - protein, 727 aa, Viridiplantae
MEDEIDRSRAFAKDVKRIVVKVGTAVVTGKGGRLALGRLGAICEQLAELNSDGFEVILVSSGAVGLGRQRLRYRQLVNSSFADLQKPQTELDGKACAGVGQSSLMAYYETMFDQMDVTVAQMLVTDSSFRDKDFRKQLSETVKAMMKMRVIPVFNENDAISTRKAPYKDSTGIFWDNDSLAALLALELKADLLILLSDVEGLYTGPPSDPKSKLIHTYVKEKHQEEITFGEKSRLGRGGMTAKVKAAVNAAYGGIPVIITSGYAAENIAKVLKGLRVGTLFHQDAHLWARVVDTTSRDMAVAARESSRKLQALSSEDRKNILLDIANALEANEKIIKAENDLDVAAAQEAGYEESLVARLVMKPGKISSLAASIRQLAEMEDPIGRVLKKTEVADGLILEKTSSPLGVLLIVFESRPDALVQIASLAIRSGNGLLLKGGKEARRSNAILHKVITDAIPKTVGGKLIGLVTSRDEIPDLLKLDDVIDLVIPRGSNKLVSQIKNSTKIPVLGHADGICHVYVDKSCKVDMAKRVVSDAKLDYPAACNAMETLLVHKDLEQNGVLNELIYALQANGVTLYGGPKASGKLNIPEVKSFHHEYSSKACTVEIVEDVHGAIDHIHQHGSAHTDCIVTEDSEVAEIFLRQVDSAAVIHNASTRFCDGFRFGLGAEVGISTSRIHARGPVGVEGLLTTRWIMRGKGQVVDGDNGVAYTHKDLPVLERTKAVQNGH

SEQ ID NO: 21018 - DNA, 2208 bp, Oryza sativa (japonica cultivar-group)
  CDS (1)..(2208)
atggggagaggagggatcggcggcgcggggctggtggcggcggtcgcgaaggcggacgtggagaacaccgactccacccgcggcttcgtcaaggacgtgaagcgcatcatcatcaaggtcggcaccgctgttgtgactgggccgaatggccggttggctatgggcaggctcggtgctctgtgtgaacaggtgaagcagctaaattttgaggggtacgaggtgattctggtcacctctggtgctgttggtgttgggaggcagaggctcaagtaccggaagctcgtcaatagcagtttcgctgatctgcagaacccacagatggacatggacgggaaggcctgcgctgccgtcggtcagagtgtgctgatggcgatctatgacacgttatttagccagcttgacgtaacatcatctcagcttcttgttacggatcgtgattttatggatccaagttttgggaaccagctccgcgagactgttaattctctgttagatctcaaggttataccagtatttaatgagaatgacgccatcagtaccaggaggcaaccatacgaggattcatctggcatattctgggataacgatagtttggccagactgttagcgcaagaacttaaagctgatctccttatcatgctcagtgatgtggaggggctctatagcggtccacctagcgatccacaatcgaagattatccacacatacgtccatgaacaacatgggaagttaattagctttggggagaaatctcgtgtgggaagaggtggaatgcaagctaaagtagcagctgcttttactgcttcatcaaaaggaatacctgttgtaattgccagtggatttgcaatcgatagcattattaaggtcatgcgaggagagaaaatcggtacgcttttccatagggaagcaaaccagtggggttgttccaaggaagcaacagcgcgtgagatggccgttgctgcaagagattgctccagacatctacagaaattgtcgtctgaggagcgtaagaagattttgctagacatcgccgatgctctagaagcaaatgaagatctaattacatccgagaaccaagctgatctggatttggcgcaagatattggttacgataaatcattggttgctcggatgaccataaagccaggaaagataaaaagcctcgcaggatcaattcgtgaaatcgctgatatggaggaccctatttcccatacactgaaaagaacagaggttgctaaagatcttgtttttgagaaaacatattgcccattgggtgttctcctaattatttttgagtcccgtcctgatgccttggtacagattgcatctttagcaatccgaagtggaaatggtcttctcttgaaaggaggaaaagaagctatgagatcaaacacaatactgcataaggtcataactggtgcaattccagatgttgttggtaaaaaacttattggcctagtgaaaaacaaagatgaaattgctgatttgctcaagcttgatgatgtgattgatcttgtaataccaagaggtagcaataagctcgtttcccagatcaaagcagcaaccaagattcctgttcttggtcatgctgacggtatctgccatgtttatattgacaaatcagctgacatggacatggcaaaacgtattgtattggacgcaaaggttgattatccagcagcgtgtaatgccatggaaacgttacttgttcataaagatctgaacaggacagaaggccttgacgatttattggtggagcttgaaaaggaaggggtagttatctatggcgggcctgttgcacatgacactttgaaactaccaaaggtagattcatttcatcatgagtataactcaatggcatgcaccctcgaatttgttgatgatgtgcagtcagcaattgaccatataaatcgctatggaagtgcacacacagattgcattatcactactgatggaaaggcagcagagacttttctacagcaagttgatagtgctgcggtattccataatgcaagcacacggttctgtgatggggctcgctttggtctaggtgctgaggttggcataagcacagggcgcatacatgctcgggggcctgttggcgttgatggactcctaacaactcgatgcattttacgaggaagtggacaagtagtgaacggcgacaagggagttgtttacacccacagggagctccctttgcagtga

SEQ ID NO: 21019 - protein, 735 aa, Oryza sativa (japonica cultivar-group)
MGRGGIGGAGLVAAVAKADVENTDSTRGFVKDVKRIIIKVGTAVVTGPNGRLAMGRLGALCEQVKQLNFEGYEVILVTSGAVGVGRQRLKYRKLVNSSFADLQNPQMDMDGKACAAVGQSVLMAIYDTLFSQLDVTSSQLLVTDRDFMDPSFGNQLRETVNSLLDLKVIPVFNENDAISTRRQPYEDSSGIFWDNDSLARLLAQELKADLLIMLSDVEGLYSGPPSDPQSKIIHTYVHEQHGKLISFGEKSRVGRGGMQAKVAAAFTASSKGIPVVIASGFAIDSIIKVMRGEKIGTLFHREANQWGCSKEATAREMAVAARDCSRHLQKLSSEERKKILLDIADALEANEDLITSENQADLDLAQDIGYDKSLVARMTIKPGKIKSLAGSIREIADMEDPISHTLKRTEVAKDLVFEKTYCPLGVLLIIFESRPDALVQIASLAIRSGNGLLLKGGKEAMRSNTILHKVITGAIPDVVGKKLIGLVKNKDEIADLLKLDDVIDLVIPRGSNKLVSQIKAATKIPVLGHADGICHVYIDKSADMDMAKRIVLDAKVDYPAACNAMETLLVHKDLNRTEGLDDLLVELEKEGVVIYGGPVAHDTLKLPKVDSFHHEYNSMACTLEFVDDVQSAIDHINRYGSAHTDCIITTDGKAAETFLQQVDSAAVFHNASTRFCDGARFGLGAEVGISTGRIHARGPVGVDGLLTTRCILRGSGQVVNGDKGVVYTHRELPLQ

SEQ ID NO: 21020 - DNA, 2331 bp, Drosophila melanogaster
  CDS (1)..(2331)
atgctgcaaaacagtttcaaactggcccagagccttcgaaacggcttctacagaaacgcctggcgagcgttcagctcccacggaccccggcagccactggtttcgccggagcggcgcttggaaaaggcgcatccaaccttcacggaaaggagtcagttgaagtacgcccggaggctggtggtcaagttgggcagtgcagtcattactcgagaggacaaccatggactagccctcggccgtctggcctctattgtggagcaggttgccgagtgccatttggaaggacgtgaagtgatgatggtcaccagcggagcggtggcctttggaaagcagaagctcgcccaggagctgctcatgtcgctgtccatgcgcgagacactaaacccaaaagatagcaaagagtttgacggcgctacgctggaaccgcgagcagcggctgcggtgggtcagtcgggtctgatgtccctctacgacgcgatgtttgcccagtacggcgtcaagatagcccaggtgctcgtgaccaagccggacttttacaacgaggaaacacgcaacaatctcttctgcacgctctccgaattaattagcctgaatattgtgccaatcataaatactaacgacgccgtctccccgccaatgttcatacgtgacgacgagccagccggcggagcccggaggggtattcccattaaggacaacgacagcttgtctgccatgctggccgccgaggtgcaggcggatctgctaatcctcatgtcggacgtcgatggcatctacaataagccgccgtgggaggacggggccaagctgatgcacacatacaccagcgacgacagcaacagcatcgagtttggcaaaaagtcaaaggtgggtactggcggcatggactccaaggtgaaggcagccacctgggccctggaccggggcgtcagcgtggtcatctgcaacggaatgcaggagaaggccatcaaaaccataattggcggccggaaggtgggcaccttcttcacggaggccaccgagagcgccaatgcagtgccagtcgaggtgatggccgagaacgcgcgaaccgggagtcgccagatgcaggccctcacgcccgctcagagggccagtgctgtcaacaccctggccgatctgttggtgagccgcgagaagtttatcctggacgccaatgccaaggacctggccgaggcgcagaagagcggactggccaagccgttgctgtcgcggctctcgctcaacccggccaagctaaagaacctctccgttggcctgaagcaaatcgccgaggacagtcacaagaatgttggtcgtgtcctgagacgcacccgccttgcggatcagctggagctcaagcaggtcactgtgcccataggcgtcctactggtcatcttcgaatcccgcccagactcgctgcctcaagtggccgccttggcaatggcctcggccaacggactgctcctcaaggggggcaaggaggcggcacacagcaacaaggcccttatggagctggtcaaggaggcgctggccaccgtgggagcggagcacgccgtgtcactggtttccacgcgcgaggagatcagcgatctgctgtccatggagaaccacatcgacctgatcattccgcgcggctcctccgacctggtgcgcagcatccagcagcagtcgctgcacatccccgtgctgggccacgccgaaggcgtctgccacgtctatatcgacagggatgcggatctggagaaggccctgcgcattgcacgcgacgccaagtgcgattatccggctgcttgcaacgccatggagaccctgctgatccacgaggacctgatgagtggcgcaatcttcggcgatgtctgcaacatgctgaaacgtgagggcgtcaaaatctatgccggaccccggctgaaccagcagctgacatttggcccgccggcggccaagagcctgaagcacgagtacggcgccctcgagtgctgcatcgaggttgtgcccagcctggacgaggccattaatcacatccatacgtacggcagcagccacacggatgtcattgttacggaaaatgatgcggcggccaggcagttcctgggcagcgtggacagcgcctgtgtgttccacaacgccagctcccggtttgcggacggtttccggtttggccttggtgccgaggtgggcatctccactgcccggatccacgcccgcgggcctgtgggagtggaggggctgctgaccaccaagtggatcctcgaggggcaggaccatgccgccgccgacttcgccgagggaggtggccgcacgtggctgcacgaaaccctgccgctggactaa

SEQ ID NO: 21021 - protein, 776 aa, Drosophila melanogaster
MLQNSFKLAQSLRNGFYRNAWRAFSSHGPRQPLVSPERRLEKAHPTFTERSQLKYARRLVVKLGSAVITREDNHGLALGRLASIVEQVAECHLEGREVMMVTSGAVAFGKQKLAQELLMSLSMRETLNPKDSKEFDGATLEPRAAAAVGQSGLMSLYDAMFAQYGVKIAQVLVTKPDFYNEETRNNLFCTLSELISLNIVPIINTNDAVSPPMFIRDDEPAGGARRGIPIKDNDSLSAMLAAEVQADLLILMSDVDGIYNKPPWEDGAKLMHTYTSDDSNSIEFGKKSKVGTGGMDSKVKAATWALDRGVSVVICNGMQEKAIKTIIGGRKVGTFFTEATESANAVPVEVMAENARTGSRQMQALTPAQRASAVNTLADLLVSREKFILDANAKDLAEAQKSGLAKPLLSRLSLNPAKLKNLSVGLKQIAEDSHKNVGRVLRRTRLADQLELKQVTVPIGVLLVIFESRPDSLPQVAALAMASANGLLLKGGKEAAHSNKALMELVKEALATVGAEHAVSLVSTREEISDLLSMENHIDLIIPRGSSDLVRSIQQQSLHIPVLGHAEGVCHVYIDRDADLEKALRIARDAKCDYPAACNAMETLLIHEDLMSGAIFGDVCNMLKREGVKIYAGPRLNQQLTFGPPAAKSLKHEYGALECCIEVVPSLDEAINHIHTYGSSHTDVIVTENDAAARQFLGSVDSACVFHNASSRFADGFRFGLGAEVGISTARIHARGPVGVEGLLTTKWILEGQDHAAADFAEGGGRTWLHETLPLD

SEQ ID NO: 21022 - DNA, 2361 bp, Nasonia vitripennis
  CDS (1)..(2361)
atgtacacgtccctgctgcagctgaggtcggccagctgtctcggcggtctcaggaggtactcgtccggcaagcatctgcctctatcccttcaccctgctgcgggtaaccgagtggacctgcgtcgggagctgcagacgggcgagcgtccgcgacgagcaaccttcacggagcgcaaccagctgaagtacgcccggaggctggtggtcaagctgggcagtgccgtcatcacgagggaagacgagcacggtctggcgctcggaagactcgccagcatagtcgagcaggtggccgagtgccagaacgagggcagggagtgcatcatggtcaccagcggagccgtggctttcggaaagcagaagctcgctcaggaactgctcatgtccctgtcgatgagggagacgctcagtcccgccgatcacaccagggaacacgctgccacgatgctggagccgagagcagcggcagcggttggccagtccggcctgatgtccctctacgacgcgatgttcgcccagtacggcgtgaagctcgcccaggtcctggtgaccaagccggacttcctcaacgaggaaacccgcaagaacctcttcagtaccttgagcgaacttatcagcctgaacgtcgtgcccatcatcaacaccaacgacgcggtatcgccaccgccgcaggccgacgaggagatcgccggcagcggaggtcgccgtggaatcgctatcaaggacaacgactccctcgcggccatgctggcggccgaggttcaggcggacctgttgatcctcatgagcgacgtcgatggaatttacaacctcccgccctggcaggacggtgccaggatgctgcacaccttcagctcggaccagaggggatcgatcaagttcggagagaagagcaaggtcggcaccggtggcatggactcgaaggtcaacgctgccctctgggcgctcgacaggggagtcagcgtggtcatctgtaacggaatgcaggagaaggccatcaagagtattatggggggaaggaagattggaacgttctttaccgagaccaccagcagctcggcacccgtcgaggttatcgcggagaatgcccgcgtgggtggccgagtgctccagtctctgcttccggaggaaagggctagctgcatcaacacgcttgccggacttctggagtcgcgtcagaacgacattctcgatgctaacggtaaggacctcgacgacgctcgcaagactggtttggccaaacctttgatgtcgaggctgtcgctgacacccgccaagctcaagtcgctgagggacggcctgagacagatcgcggactcctcgctcaccaacgttggcagggttatcaggaggaccaagttggccgatggactggagctgaagcagatcactgtgcccatcggagtgctgctggttatcttcgagtcgagacccgacagcttgccacaggtcgcagctctggcgatgtcctccgcgaacggtctcctcctcaagggaggcaaggaagccatgcacagcaaccgcttcctcatggacctcgtgaaggagtccctcagctccgtcggagcagccaacgccatatccttggtgtccacccgggaggagatcggcgaccttctctcgatggagaagcacatcgacctaatcatcccgcgaggcagttcggaactagtccgcagcatccagacccagtcgaagcacatcccggtactcggccacgccgagggcatctgccacgtgtacgtcgacaaggaagccgacccacagaaagccctgaggatcatccgcgactccaagtgcgactacccggccgcctgtaacgccatggagacgctcttgatccacgagagccacatgaccgacaacttcttcacggacgtctgcagtctgctgcaaaaggagggggtgaaaatctacgccggaccgaagctccgcaaactgctgacgttcggtccgccaccggccaacagcatgaagatcgagtacggcgcgctggagtgcacgatcgaggtggtctctagcctcgaagacgcggtgaatcacatccacaagtacggaagcggacacaccgacgtcattgtcacggaggaccagaggagcgcgagttacttccagcgcgaggtcgacagcgcctgcgtcttccacaatgccagtacccgatttgccgacggctatagattcggcctcggcgccgaggtcggcatctcgacggcgcgaatccacgcgcgtggaccggtaggtgtggacggccttctgacgaccaaatgggtgctgagcggtgacggccatgcggcctcggacttcgctgacggcggctcgagaacttttgtgcatcagagcttgccgctcgacgacaaggcgtga

SEQ ID NO: 21023 - protein, 786 aa, Nasonia vitripennis
MYTSLLQLRSASCLGGLRRYSSGKHLPLSLHPAAGNRVDLRRELQTGERPRRATFTERNQLKYARRLVVKLGSAVITREDEHGLALGRLASIVEQVAECQNEGRECIMVTSGAVAFGKQKLAQELLMSLSMRETLSPADHTREHAATMLEPRAAAAVGQSGLMSLYDAMFAQYGVKLAQVLVTKPDFLNEETRKNLFSTLSELISLNVVPIINTNDAVSPPPQADEEIAGSGGRRGIAIKDNDSLAAMLAAEVQADLLILMSDVDGIYNLPPWQDGARMLHTFSSDQRGSIKFGEKSKVGTGGMDSKVNAALWALDRGVSVVICNGMQEKAIKSIMGGRKIGTFFTETTSSSAPVEVIAENARVGGRVLQSLLPEERASCINTLAGLLESRQNDILDANGKDLDDARKTGLAKPLMSRLSLTPAKLKSLRDGLRQIADSSLTNVGRVIRRTKLADGLELKQITVPIGVLLVIFESRPDSLPQVAALAMSSANGLLLKGGKEAMHSNRFLMDLVKESLSSVGAANAISLVSTREEIGDLLSMEKHIDLIIPRGSSELVRSIQTQSKHIPVLGHAEGICHVYVDKEADPQKALRIIRDSKCDYPAACNAMETLLIHESHMTDNFFTDVCSLLQKEGVKIYAGPKLRKLLTFGPPPANSMKIEYGALECTIEVVSSLEDAVNHIHKYGSGHTDVIVTEDQRSASYFQREVDSACVFHNASTRFADGYRFGLGAEVGISTARIHARGPVGVDGLLTTKWVLSGDGHAASDFADGGSRTFVHQSLPLDDKA

SEQ ID NO: 21024 - DNA, 2199 bp, Apis mellifera
  CDS (1)..(2199)
atgttcaacgaccgcagccagttgaattacaccagacgtttggtggtgaaattgggcagcgccgttatcacgagggaggacgaacacggactggcactgggtcggttggcgtccatagtcgaacaggtagccgagtgccaaaacggaggtcgtgaatgtattatggtaactagcggagcggtcgcattcggcaaacagaaactcgcccaggaactgttgatgtccttatcaatgagggaaacgctgagtcctggcggccacatgagaaaacgctcgggcactcctttggaacctagagcggcagccgcggtgggtcaatcgggtctaatgtctctatacgacgccatgttcgcccaatatggcgtgaaactggcccaagtgttggtcaccaaaccggatttctacaacgaggagacccgcaacaacttgttcagcactttgagcgagttgctcagcttgaacatagtccccataatcaataccaacgacgcggtgtcacctccgccacacgttgacgaggaagtcgctggaagcggcggaagaagagggatttccatcaaggacaacgattccttggccgccatgttggccgccgagattcaagcggacttgttaatcttgatgagcgatgtagatggcatttacaatctgcctccttggcaagatggcgccaaaatgctgcatacgtttagcatggatcttagagacacgattaaatttgggcaaaaatcgaaggtcggtacaggtggcatggatgcgaaagttaatgccgcgctttgggcccttgatcgaggtgtctccgtagtaatttgcaatggaactcaagaaaaggctataaagaatattttatctgggagaaagataggtactttcttcacacagacgaccgaaatttccatgcctgtagaggttgtcgccgaagaggctcgaactggaagccgaacactgcaagctcttcgaccagaagaacgagcgagctgtatcaacacgttagctgatcttctggagtcacggcaaaaggaaatattggaggctaacagaaaggatctcgaggctgcggagaaaactggtctggcgaaagctttactttctcgcctttcgttaacacccgccaaactgaaatctttgagctctggtttgcgacaaattgctaatgattccttaacgaatgtgggacgcgtgctcagaaggacaaaactggccgagggtctggaattgagacaaataactgtccccatcggtgtactgttggtgatttttgaatcacggcccgacagtttacctcaagtagccgcattagcgatgtccagtgccaacggcctccttctgaaaggaggcaaagaagcgacaaacagcaataaatatttgatggagttggtgaaggaggcgttgggtccggttggtgctgcaaacgcgatatctttaatttcgaccagggaggacgtcggcgatttattgtcgatgggaaaacacatagatctcgtaattcctcgaggcagctcagatctcgttcgtagcattcaggaacaatcgaaacatattcccgtattgggacacgcggaaggtatctgtcacgtgttcgtggatagagatgcggatcttgttaaagctctaaagatcatcagagactcgaaatgcgattaccctgctgcttgcaacgctatggagacattgcttattcacgagagtcatatgaagagtaactttttcaacgatgtgtgcagcatgctgcaaaaggaaggagtcaaagttaattccggaccaaaactgaggaaacaattaacattcggaccaccagctgcgaaaagtatgaagaccgagtacggcgctcttgagtgtgcaatcgaggtcgtatcagacatcgaggatgcaataaatcatattcacaaatatggcagtggacatacggattgcattgttaccgagaataaagaaagagccacctatttccagagagaagtggacagtgcgtgcgtttttcacaatgccagtactcgattctccgatggttatagattcggtcttggtgccgaggttggaatttctaccgcacgaattcatgcacggggtccagtaggagtggatggattgttgactacaaaatgggtattgcaaggtaatggtcatgcagctgcagattttggagagggtggcgaagtttggcttcatcaatctttacctctcaatgaatctgaatga

SEQ ID NO: 21025 - protein, 732 aa, Apis mellifera
MFNDRSQLNYTRRLVVKLGSAVITREDEHGLALGRLASIVEQVAECQNGGRECIMVTSGAVAFGKQKLAQELLMSLSMRETLSPGGHMRKRSGTPLEPRAAAAVGQSGLMSLYDAMFAQYGVKLAQVLVTKPDFYNEETRNNLFSTLSELLSLNIVPIINTNDAVSPPPHVDEEVAGSGGRRGISIKDNDSLAAMLAAEIQADLLILMSDVDGIYNLPPWQDGAKMLHTFSMDLRDTIKFGQKSKVGTGGMDAKVNAALWALDRGVSVVICNGTQEKAIKNILSGRKIGTFFTQTTEISMPVEVVAEEARTGSRTLQALRPEERASCINTLADLLESRQKEILEANRKDLEAAEKTGLAKALLSRLSLTPAKLKSLSSGLRQIANDSLTNVGRVLRRTKLAEGLELRQITVPIGVLLVIFESRPDSLPQVAALAMSSANGLLLKGGKEATNSNKYLMELVKEALGPVGAANAISLISTREDVGDLLSMGKHIDLVIPRGSSDLVRSIQEQSKHIPVLGHAEGICHVFVDRDADLVKALKIIRDSKCDYPAACNAMETLLIHESHMKSNFFNDVCSMLQKEGVKVNSGPKLRKQLTFGPPAAKSMKTEYGALECAIEVVSDIEDAINHIHKYGSGHTDCIVTENKERATYFQREVDSACVFHNASTRFSDGYRFGLGAEVGISTARIHARGPVGVDGLLTTKWVLQGNGHAAADFGEGGEVWLHQSLPLNESE

SEQ ID NO: 21026 - DNA, 2259 bp, Strongylocentrotus purpuratus
  CDS (1)..(2259)
atgtcttccctgaggtccgtatcaacgactgcagggtgtaagaagtcggcgacgtcgagagcggagctgaagagcagcaaaaggatagtcctgaagctaggtagtgctgtgatcacaagagacgatgagtgtgggttggccctaggtaggctggcttccatcgtagaacaggtttcagagctccaatcttcaggcagacaggtcgtactggtcaccagtggagctgtggcattcgggaagcagaggctacgccatgaagtcatgctgtcaaagagcatcaaacaaactcttgccccaaattcttctagcattattcagatggattcaagagcctgtgctgctgctggacagagtggtttgatgtctctgtacgaagctatgttctcacaatatgggctcactactgctcaggtactggtgaccaagccggacttctaccacgactacacccgcagcaacctccggggcaccatgcaggagctgctgcggatgaacatcatccccatcatcaactccaacgatgcggtggtcccgcccccagaggaggacaaggacttggccggggtaagaacaggggtcataagtatcaaagacaatgacagccttgcagcccgtcttgctattgagatcaatgctgatctacttgtcctgctttccgacgtcgacggcatcttctccgctcctcctggtcaagagggggcgtccttcttagatacggtctaccctggagacacagctttcattgagtttaaagggacttctcgtgttgggcttggcggtatggaatcaaaggtcaaagcagccaactgggcgctggagcgcggctgctccgtcgtgatcggcaacggcatgaacagggacgacatcgtcctcaacatcctcaacgggcggaaggtgggcaccttcttcacggagaccaaacccacgggcgtgtccccggagatgcaggctataaaagccagagacggtggcaggctactccaggcactcacttccgaacagagagctgaggtaataatacgtctagctgacctcttgattgaaaggtcatcaaccatcatggcggctaacaggagggacattgatgaggctaggctaagtaatatgactggacctaacctgtccagactagcgctgaccgatgccaagctgaagagcctgtccgacggtctgaggcagattgcggccacctctcacaagaatgttggccgagagatcaagaggacattgctgtccgatggcatgttgctgcgacaggtcaccgtgccgatcggagtgctcatggttatcttcgagtccaggccagactgtctgccgcaggtagcagcactggccatcagcagtgccaatggtctactcctgaagggaggcaaggaagcaagttatagtaatgaggtgctacactctctagtagaagaagccctggagatgcatgatgccaaagatgctgtagcactgatcagtaccagagagcaggtcggtgacttgctgaagatgtccgacgacattgacctggtcattccacgaggttccaaggagatggttcagctcattcagcagcagagtgagggtatcccagtcctcggacacagcgagggcatctgtcatgtctacatcgacgaggaggcggatctcgacatggccctgaagattatccgtgattctaagtgcgattatccagccgcctgcaacgctatggagacgctactcatccacaaaaagttcagacatactcaagtctttgaagatatccttgatatgctgagagcagaaaatgtcaaattcaacccaggccctcgcttggcccgatccctcaagtttggaccacgggaggcagactcgatgagcatcgagtacggtggcctggagtgcgcagtagaaatagttgacgacgtcacaggtgcaatcaaccatgtccacaaacatggcagctcccatacagatgtgattgttacaaataatgaagagacagcggatgaattcatgaagaacgtggacagtgcctgtgtcttccacaatgccagcactcgtttctctgatggataccgatttggattgggagctgaagtcggtatcagcaccacaaggatccacgcccggggaccggttggggtggagggcctcctcaccaccaagtggatccttgagggatccggagacactgtgcaggagtacgcagcaggagggagcaagatgtttgtacaccaggagctcgaggtggagaatggggaggaggtcctggagtcttcatcagcatag

SEQ ID NO: 21027 - protein, 752 aa, Strongylocentrotus purpuratus
MSSLRSVSTTAGCKKSATSRAELKSSKRIVLKLGSAVITRDDECGLALGRLASIVEQVSELQSSGRQVVLVTSGAVAFGKQRLRHEVMLSKSIKQTLAPNSSSIIQMDSRACAAAGQSGLMSLYEAMFSQYGLTTAQVLVTKPDFYHDYTRSNLRGTMQELLRMNIIPIINSNDAVVPPPEEDKDLAGVRTGVISIKDNDSLAARLAIEINADLLVLLSDVDGIFSAPPGQEGASFLDTVYPGDTAFIEFKGTSRVGLGGMESKVKAANWALERGCSVVIGNGMNRDDIVLNILNGRKVGTFFTETKPTGVSPEMQAIKARDGGRLLQALTSEQRAEVIIRLADLLIERSSTIMAANRRDIDEARLSNMTGPNLSRLALTDAKLKSLSDGLRQIAATSHKNVGREIKRTLLSDGMLLRQVTVPIGVLMVIFESRPDCLPQVAALAISSANGLLLKGGKEASYSNEVLHSLVEEALEMHDAKDAVALISTREQVGDLLKMSDDIDLVIPRGSKEMVQLIQQQSEGIPVLGHSEGICHVYIDEEADLDMALKIIRDSKCDYPAACNAMETLLIHKKFRHTQVFEDILDMLRAENVKFNPGPRLARSLKFGPREADSMSIEYGGLECAVEIVDDVTGAINHVHKHGSSHTDVIVTNNEETADEFMKNVDSACVFHNASTRFSDGYRFGLGAEVGISTTRIHARGPVGVEGLLTTKWILEGSGDTVQEYAAGGSKMFVHQELEVENGEEVLESSSA

SEQ ID NO: 21028 - DNA, 2397 bp, Tribolium castaneum
  CDS (1)..(2397)
atgtttagtgctaatttaattaaaagcggccgttttgtggctttcaacggagtcggtttctttaagattccgggacagattgcggccaaaagacccgacgctttaacacctgtcaggaccgcagccacaacgcccggcctttggctgcccaagctctcacaggtcgtcaacgagaaacgagcttttcaagagaaaaagcagtcgactttcaccgatcgaagccaactaaaatatgccagaagactagtggtgaaattaggaagtgctgtgattactcgagaagatgaacacggactagctttgggacggctcgcttcaattgtagaacaggttgcagaatgccagaacgagggcagagagtgcattatggtgacaagcggtgctgtggcctttggaaaacagaaattgacccaggaattgctcatgtctctgtcgatgagggaaaccctctcacctacggatcacacaagagaggatgctggcacccttctggagccgcgtgctgcagccgccgtgggccaatcaggccttatgtccctttacgacgccatgttcgcccaatacggcgtgaaaatcgcccaagtattagtaacaaaacccgacttttacaacgaagagacgcgtcgaaacctcttcagcaccctgtcggagctgatcagcttgaacatcgtgcccatcatcaacaccaacgatgccgtttcgccgcctccacaagtcgacgaaccgatcggaggcaaaggcggcaaaaaggggatcagcatcaaggataacgacagtttggcggcgatgcttgccgccgaagtccagtcagatctcctcattttgatgtcggatgtggacggaatctacaacaagccgccatgggaggagggagccagattcctccacactttcacgtcggatctcagacatactattgaattcggacaaaagtcgaaggttggaaccggaggaatggactcgaaggtgaatgccgccacgtgggcgctggatcgaggcgtttcggtggttatctgcaacgggatgcaggaaaaagccatcaagaccatcttgtcggggaggaaagttggcactttcttcaccgattctagcgtcggggggtccctgcccacggaaatcgtcgccgaaaatgcccgcgccggcggaagggagctgcagaacttaacccccgatcagcgggcctcttgtgttcacactctggccgatctcctcgtctcgaagcaatcggaaatcctggacgccaacgcgaaagatttatccgaagcgacgaaatccggtttagcgaaaccgcttctttcccgtttgtcgctcacgcccgccaaactgcgcaacttatcggtgggtctgaaacagatcgctgattccagccaccagaatgtgggtcgcgtcctcaggaggaccaaactggccgatggtctagacctcacgcagatcaccgttcccattggagtcctgcttgtcatcttcgagtcgcgaccggactctttgccccaagtggccgccttggccatcgcgtccgccaatggattgttgctcaaaggtggaaaggaagcggcccacagcaataaggccctcatggaactcgttaaggaagcgctcgggacggttggggccaccaatgcaatttctctcgtctccactcgggaagaaatcggcgatttactgtcgatggagcaacacatcgatctcatcatccctcgcggttcgagcgaattagttcgaagcattcaatcgcaaagtcaacatatcccagtgttgggccatgccgaaggcatatgtcatgtgtacgtcgacaacgctgatttgagcaaggctttgaagattattagagacgcgaaatgcgattatccggcggcatgcaacgcgatggaaactctcctcatccatgaagatctgatgcaaggagacttcttttccgacatttgcaatatgttgaaacacgaaggagtcaaaatcaatgcaggccccgttctcaacaagctcctcaccttcggcccgcctcttgccaagacgatgaagcacgaatatggggctttggagtgctgcattgaagtcgtcaaaagcatggacgaagcggtcaaccacatccacacctatggaagtggacacaccgaagtcatcgtcaccgaaaattccgagagtgctcgaaacttccaacggcgcgttgacagcgcctgtgtgttccacaacgccagttcgcgatttgctgacggtttccggttcggtttgggggctgaggttggcatcagcactgccaggatccacgctagaggtcccgtaggagtcgagggacttcttaccactaaatgggtgctctcagggaatgggcatgccgctgctgatttcgccgaagggggatcatgcacttggctccatgaaagtcttccagtcaattaa

SEQ ID NO: 21029 - protein, 798 aa, Tribolium castaneum
MFSANLIKSGRFVAFNGVGFFKIPGQIAAKRPDALTPVRTAATTPGLWLPKLSQVVNEKRAFQEKKQSTFTDRSQLKYARRLVVKLGSAVITREDEHGLALGRLASIVEQVAECQNEGRECIMVTSGAVAFGKQKLTQELLMSLSMRETLSPTDHTREDAGTLLEPRAAAAVGQSGLMSLYDAMFAQYGVKIAQVLVTKPDFYNEETRRNLFSTLSELISLNIVPIINTNDAVSPPPQVDEPIGGKGGKKGISIKDNDSLAAMLAAEVQSDLLILMSDVDGIYNKPPWEEGARFLHTFTSDLRHTIEFGQKSKVGTGGMDSKVNAATWALDRGVSVVICNGMQEKAIKTILSGRKVGTFFTDSSVGGSLPTEIVAENARAGGRELQNLTPDQRASCVHTLADLLVSKQSEILDANAKDLSEATKSGLAKPLLSRLSLTPAKLRNLSVGLKQIADSSHQNVGRVLRRTKLADGLDLTQITVPIGVLLVIFESRPDSLPQVAALAIASANGLLLKGGKEAAHSNKALMELVKEALGTVGATNAISLVSTREEIGDLLSMEQHIDLIIPRGSSELVRSIQSQSQHIPVLGHAEGICHVYVDNADLSKALKIIRDAKCDYPAACNAMETLLIHEDLMQGDFFSDICNMLKHEGVKINAGPVLNKLLTFGPPLAKTMKHEYGALECCIEVVKSMDEAVNHIHTYGSGHTEVIVTENSESARNFQRRVDSACVFHNASSRFADGFRFGLGAEVGISTARIHARGPVGVEGLLTTKWVLSGNGHAAADFAEGGSCTWLHESLPVN

SEQ ID NO: 21030 - DNA, 2268 bp, Oryza sativa subsp
  CDS (1)..(2268)
atggcgagcgtcgacccgtcccggagcttcgtgagggacgtgaagcgcgtcatcatcaagattatcaggagtggggctttgcttgggcttttctgtggtttacttgatgtgacggcctatgtcgaagttgccaatctttcgactctggtgggcactgcagttgtctccagacaagatggaagattggctttgggcagggttggagctctgtgcgagcaggtgcctaaccaaagaaaagtggcaatgcaggttaaggaactgaactctttaggatacgaagtgattttggtcacctcaggtgctgttggagtggggcgacagcgacttaggtaccggaagcttgtcaatagcagctttgctgatctgcaaaagccacagatggagttagatggaaaggcttgtgccgctgttggtcagagtggactgatggctctttacgatatgttgtttaaccaactggatgtctcgtcatctcaacttcttgtcaccgacagtgattttgagaacccaaagttccgggagcaactcactgaaactgttgagtcattattagatcttaaagttataccaatatttaatgaaaatgatgccatcagcactagaaaggctccatatgaggattcatctggtatattctgggataatgacagtttagcaggactgttggcactggaactgaaagctgatctccttattctgctcagtgatgtggatgggttgtatagtggtccaccaagtgaaccatcatcaaaaatcatacacacttatattaaagaaaagcatcagcaagaaatcacttttggagacaaatctcgtgtaggtagaggaggcatgacagcaaaagtgaaggctgctgtcttggcttcaaatagcggcacacctgtggttattacaagtgggtttgaaaatcggagcattcttaaagttcttcatggggaaaaaattggtactctctttcacaagaatgcgaatttgtgggaatcatctaaggatgttagtgctcgtgagatggctgttgccgcaagagattgttcaaggcgtctacagaatttgtcatcagaggaacggaaaaagatattgctagatgttgcagatgctttggaggcaaatgaggatttaataaggtctgagaatgaagctgatgtagctgcggcccaagttgctggatatgagaagcctttggttgctagattgactataaaaccaggaaagatagcaagccttgcaaaatctattcgtacccttgcaaatatggaagaccctataaaccagatacttaaaaagacagaggttgctgatgatttagttcttgagaaaacatcttgcccattaggtgttctcttaattgtttttgagtcccgacctgatgccttggttcagattgcatctttggcaattcgaagtggtaatggtcttctcctaaaaggtggaaaagaagctatcagatcaaacacgatattgcataaggttataactgatgctattcctcgtaatgttggtgaaaaacttattggccttgttacaactagagatgagatcgcagatttgctaaagcttgatgatgtcattgatcttgtcattccaagaggaagtaataagcttgtctctcaaatcaaggcgtcaactaagattcctgttcttgggcatgctgatggtatatgccacgtatatattgacaaatcagctgacatggatatggcaaaacatattgtaatggatgcaaaaattgattacccagcagcctgcaatgcaatggagaccttactagttcataaggatcttatgaagagtccaggccttgacgacatattagtagcactaaaaacagaaggagttaatatttatggtggacctattgcgcacaaagctctgggatttccaaaagctgtttcatttcatcatgagtatagttctatggcctgcactgttgagtttgttgatgatgttcaatcagcaattgaccatattcatcgttatggaagtgctcatacagattgtatcgtcactacagatgataaggtagcagagacttttctacgcagagttgatagtgctgctgtatttcataatgcaagtacgagattctctgatggggctcgttttggattgggtgctgaggttggcataagcacagggcgtatccatgcccgtggaccagtgggtgttgaaggtctcttaactacacgatggatcttgcgagggcgtgggcaagtggtgaatggtgacaaggatgtcgtgtacacccataagagtcttcctttgcaatga

SEQ ID NO: 21031 - protein, 755 aa, Oryza sativa subsp
MASVDPSRSFVRDVKRVIIKIIRSGALLGLFCGLLDVTAYVEVANLSTLVGTAVVSRQDGRLALGRVGALCEQVPNQRKVAMQVKELNSLGYEVILVTSGAVGVGRQRLRYRKLVNSSFADLQKPQMELDGKACAAVGQSGLMALYDMLFNQLDVSSSQLLVTDSDFENPKFREQLTETVESLLDLKVIPIFNENDAISTRKAPYEDSSGIFWDNDSLAGLLALELKADLLILLSDVDGLYSGPPSEPSSKIIHTYIKEKHQQEITFGDKSRVGRGGMTAKVKAAVLASNSGTPVVITSGFENRSILKVLHGEKIGTLFHKNANLWESSKDVSAREMAVAARDCSRRLQNLSSEERKKILLDVADALEANEDLIRSENEADVAAAQVAGYEKPLVARLTIKPGKIASLAKSIRTLANMEDPINQILKKTEVADDLVLEKTSCPLGVLLIVFESRPDALVQIASLAIRSGNGLLLKGGKEAIRSNTILHKVITDAIPRNVGEKLIGLVTTRDEIADLLKLDDVIDLVIPRGSNKLVSQIKASTKIPVLGHADGICHVYIDKSADMDMAKHIVMDAKIDYPAACNAMETLLVHKDLMKSPGLDDILVALKTEGVNIYGGPIAHKALGFPKAVSFHHEYSSMACTVEFVDDVQSAIDHIHRYGSAHTDCIVTTDDKVAETFLRRVDSAAVFHNASTRFSDGARFGLGAEVGISTGRIHARGPVGVEGLLTTRWILRGRGQVVNGDKDVVYTHKSLPLQ

SEQ ID NO: 21032 - DNA, 2268 bp, Oryza sativa subsp
  CDS (1)..(2268)
atggcgagcgtcgacccgtcccggagcttcgtgagggacgtgaagcgcgtcatcatcaagattatcaggagtggggctttgcttgggcttttctgtggtttacttgatgtgacggcctatgtcgaagttgccaatctttcgactctggtgggcactgcagttgtctccagacaagatggaagattggctttgggcagggttggagctctgtgcgagcaggtgcctaaccaaagaaaagtggcaatgcaggttaaggaactgaactctttaggatacgaagtgattttggtcacctcaggtgctgttggagtggggcgacagcgacttaggtaccggaagcttgtcaatagcagctttgctgatctgcaaaagccacagatggagttagatggaaaggcttgtgccgctgttggtcagagtggactgatggctctttacgatatgttgtttaaccaactggatgtctcgtcatctcaacttcttgtcaccgacagtgattttgagaacccaaagttccgggagcaactcactgaaactgttgagtcattattagatcttaaagttataccaatatttaatgaaaatgatgccatcagcactagaaaggctccatatgaggattcatctggtatattctgggataatgacagtttagcaggactgttggcactggaactgaaagctgatctccttattctgctcagtgatgtggatgggttgtatagtggtccaccaagtgaaccatcatcaaaaatcatacacacttatattaaagaaaagcatcagcaagaaatcacttttggagacaaatctcgtgtaggtagaggaggcatgacagcaaaagtgaaggctgctgtcttggcttcaaatagcggcacacctgtggttattacaagtgggtttgaaaatcggagcattcttaaagttcttcatggggaaaaaattggtactctctttcacaagaatgcgaatttgtgggaatcatctaaggatgttagtactcgtgagatggctgttgccgcaagagattgttcaaggcatctacagaatttgtcatcagaggaacgaaaaaagatattgctagatgttgcagatgctttggaggcaaatgaggatttaataaggtctgagaatgaagctgatgtagctgcggcccaagttgctggatatgagaagcctttggttgctagattgactataaaaccaggaaagatagcaagccttgcaaaatctattcgtacccttgcaaatatggaagaccctataaaccagatacttaaaaagacagaggttgctgatgatttagttcttgagaaaacatcttgcccattaggtgttctcttaattgtttttgagtcccgacctgatgccttggttcagattgcatctttggcaattcgaagtggtaatggtcttctcctaaaaggtggaaaagaagctatcagatcaaacacgatattgcataaggttataactgatgctattcctcgtaatgttggtgaaaaacttattggccttgttacaactagagatgagatcgcagatttgctaaagcttgatgatgtcattgatcttgtcattccaagaggaagtaataagcttgtctctcaaatcaaggcgtcaactaagattcctgttcttgggcatgctgatggtatatgccacgtatatattgacaaatcagctgacatggatatggcaaaacatattgtaatggatgcaaaaattgattacccagcagcctgcaatgcaatggagaccttactagttcataaggatcttatgaagagtccaggccttgacgacatattagtagcactaaaaacagaaggagttaatatttatggtggacctattgcgcacaaagctctgggatttccaaaagctgtttcatttcatcatgagtatagttctatggcctgcactgttgagtttgttgatgatgttcaatcagcaattgaccatattcatcgttatggaagtgctcatacagattgtatcgtcactacagatgataaggtagcagagacttttctacgcagagttgatagtgctgctgtatttcataatgcaagtacgagattctctgatggggctcgttttggattgggtgctgaggttggcataagcacagggcgtatccatgcccgtggaccagtgggtgttgaaggtctcttaactacacgatggatcttgcgagggcgtgggcaagtggtgaatggtgacaaggatgtcgtgtacacccataagagtcttcctttgcaatga

SEQ ID NO: 21033 - protein, 755 aa, Oryza sativa subsp
MASVDPSRSFVRDVKRVIIKIIRSGALLGLFCGLLDVTAYVEVANLSTLVGTAVVSRQDGRLALGRVGALCEQVPNQRKVAMQVKELNSLGYEVILVTSGAVGVGRQRLRYRKLVNSSFADLQKPQMELDGKACAAVGQSGLMALYDMLFNQLDVSSSQLLVTDSDFENPKFREQLTETVESLLDLKVIPIFNENDAISTRKAPYEDSSGIFWDNDSLAGLLALELKADLLILLSDVDGLYSGPPSEPSSKIIHTYIKEKHQQEITFGDKSRVGRGGMTAKVKAAVLASNSGTPVVITSGFENRSILKVLHGEKIGTLFHKNANLWESSKDVSTREMAVAARDCSRHLQNLSSEERKKILLDVADALEANEDLIRSENEADVAAAQVAGYEKPLVARLTIKPGKIASLAKSIRTLANMEDPINQILKKTEVADDLVLEKTSCPLGVLLIVFESRPDALVQIASLAIRSGNGLLLKGGKEAIRSNTILHKVITDAIPRNVGEKLIGLVTTRDEIADLLKLDDVIDLVIPRGSNKLVSQIKASTKIPVLGHADGICHVYIDKSADMDMAKHIVMDAKIDYPAACNAMETLLVHKDLMKSPGLDDILVALKTEGVNIYGGPIAHKALGFPKAVSFHHEYSSMACTVEFVDDVQSAIDHIHRYGSAHTDCIVTTDDKVAETFLRRVDSAAVFHNASTRFSDGARFGLGAEVGISTGRIHARGPVGVEGLLTTRWILRGRGQVVNGDKDVVYTHKSLPLQ

SEQ ID NO: 21034 - DNA, 2406 bp, Aedes aegypti
  CDS (1)..(2406)
atgtcatcatgcttgcggggtttgggtttgtgccgaggtgcacttttgctgagaagcagattccagcaaccggtgctgaaaaatggcagaagtttttcggtcgttggcggtcagggcgttggaccgtacctgacggagcaagcaacaatccgatctgcgcgcccatcatcaaaccgcaccctgcactcgattcacgatcgtgaacgggccacaatctccgagcgtagtcaactgaagtacgctcgccgtatggtcgtgaagctaggaagtgcggtcatcacccgagaagacgaacatggactggcactgggccgattggcgtcgatcgtcgaacaggtggccgagtaccacgtggagggccgggagtgtatcatggtgactagcggagcggtcgccttcggaaagcagaaactgacccaagaactgctgatgagtatgtcgatgagagaaaccttatcaccaacggatcacacccgacaggacgccggaacaatgctggaaccacgtgctgcggcagccgtcggccagtcgggtctgatgtcactatacgatgccatgtttgcgcagtacggtatcaagactgcgcaggttttggtgacggagcctgacttctacaacgaagaaacccggaagaatctgttcagtaccttgtccgagttgatcagcttgaatattgtgccgattattaacacgaacgatgccgtgatgccaccgatgttcatcgttgatcaagaagtgtccgcaactggcaaaaagaagggaatcaaaatcagggacaacgacagtttgtctgcgctgcttgccgcagaaatccacgctgatctgttgattctcatgtcggacgttgatggaatctacaacaagccaccatgggaagacggtgctaggctgatgcatacgtacactcaagctgataaggatctcattaagttcggacaaaagtccaaggtgggaacgggtggaatggattccaaggtcactgccgcaacttgggctctcgatcgcggtgttagcgtcgtcatttgtaacggtacacaggaaaaggccatcaagcatatcctaacgggcagaaaggttggcacgttctttacggatttctcagcggagaaggccacacccgtcgagtcgatggcggaagacgctcggcttggtagtcgtgtcatgcagaatctctcggcagctgatcgcgctttgtgcgtgaacaccttggccgatttgctgatatccaagcagtcgtacattttggaagcgaacgcgaaggatctggacgaagcgaagaaatcaggggttgctaagccactgttgtcgcgtctgtctctgactccggcgaagatcgagagcttggcggttggattgaagcagatcgctgatgacagccataagaacgttggtcgtgtccttcggagaactaaacttgccgacggattggaactgaagcaaataaccgtcccgatcggagtacttctggtcatttttgaatcccgtcctgattcgctaccgcaagtagcggccctcgccatggcttccggtaatggtctattgctcaagggtggtaaggaggcagcgtacagtaataaggcactgatggagctggtgaaggaagccttgggaacggtcggagccacgaaggccatttcactcgtgtcaacccgtgaagagatcagcgatctgctttcgatggacaaacacatcgatctgatcattccacgaggatcgagtgagctggtcaggagcattcagcaaaagtcacagcacattccagtgatgggtcatgctgaaggaatctgccacgtgtacgtcgacaaggatgccagcccagagaaggccctgaagatcatccgcgatgccaagtgcgattatccagcagcttgtaacgcgatggaaaccctattgatccacgaggacttgctggctggtaatttcttcacggacgtgtgcaacatgctcaagcgggaaggtgttaagatcaactccggtccgaaactgaatcaacttttgacgtttggacctccacaagccaaatcgcttaagttcgaatatggtgctctggaatgcagcatcgaagtggtgaaagatctggaggaagccattgaccacgtgcatacgtatggcagcggacacaccgatgttatcgtgactgagaatgattcggctgcacgttatttccaaaaccatgtggatagtgcgtgcgttttccataatgcgagcagccggtttgccgacggattccggttcggattgggggccgaggttggtatctcgacggcacgaatccacgctcgaggacccgttggagtggaaggccttttgacgaccaagtgggttttggacggagtggatcatgccgcggcggacttcagcgatggttcgcgcaaatggattcatgagtcgctgccgattgactga

SEQ ID NO: 21035 - protein, 801 aa, Aedes aegypti
MSSCLRGLGLCRGALLLRSRFQQPVLKNGRSFSVVGGQGVGPYLTEQATIRSARPSSNRTLHSIHDRERATISERSQLKYARRMVVKLGSAVITREDEHGLALGRLASIVEQVAEYHVEGRECIMVTSGAVAFGKQKLTQELLMSMSMRETLSPTDHTRQDAGTMLEPRAAAAVGQSGLMSLYDAMFAQYGIKTAQVLVTEPDFYNEETRKNLFSTLSELISLNIVPIINTNDAVMPPMFIVDQEVSATGKKKGIKIRDNDSLSALLAAEIHADLLILMSDVDGIYNKPPWEDGARLMHTYTQADKDLIKFGQKSKVGTGGMDSKVTAATWALDRGVSVVICNGTQEKAIKHILTGRKVGTFFTDFSAEKATPVESMAEDARLGSRVMQNLSAADRALCVNTLADLLISKQSYILEANAKDLDEAKKSGVAKPLLSRLSLTPAKIESLAVGLKQIADDSHKNVGRVLRRTKLADGLELKQITVPIGVLLVIFESRPDSLPQVAALAMASGNGLLLKGGKEAAYSNKALMELVKEALGTVGATKAISLVSTREEISDLLSMDKHIDLIIPRGSSELVRSIQQKSQHIPVMGHAEGICHVYVDKDASPEKALKIIRDAKCDYPAACNAMETLLIHEDLLAGNFFTDVCNMLKREGVKINSGPKLNQLLTFGPPQAKSLKFEYGALECSIEVVKDLEEAIDHVHTYGSGHTDVIVTENDSAARYFQNHVDSACVFHNASSRFADGFRFGLGAEVGISTARIHARGPVGVEGLLTTKWVLDGVDHAAADFSDGSRKWIHESLPID

SEQ ID NO: 21036 - DNA, 2603 bp, Medicago sativa
  CDS (55)..(2313)
cggcacgagcatagctgtactatcatccttcatccctgtttctctccaccaaagatggcgaacgccgacccttgtagagaatttgtcaaagatgttaagcgcataatcatcaaggttggaactgctgttgttactcgccaagatggaagattagcagttggaaaattaggggcactctgtgagcagattaaggagctaaacattcttggttatgaagttattttggtttcatcaggtgctgttggcctcggtcgacaaaggcttagatacagaaaattgattcaaagcagttttgctgaccttcagaagccacaagttgaacttgatggcaaggcttgtgctgctgttggacaaagcagccttatggctacttatgatattttgtttagtcagctggatgtgacatctgctcagcttcttgttactgacaatgattttagagaccaagattttagaaagcaactttctgaaactgtgagatcacttctagcactaaaagttattccaatattcaacgagaacgacgcagtcagtactaggaaagctccatacgaggattcttctggcatattttgggataatgacagtttatcagctttgttggccttggaattaaaagcagatcttcttattttgttgagtgatgtagatggtctttataatggccctccaagtgatccactatcaaaacttattcacacatacatcaaggagaagcatcaaaatgaaattacttttggagacaagtctagggttggaagagggggaatgacagccaaagtaaaagcttctgttcatgctgctgatgccggaattcctgttatcattaccagtggtaatgcagctgaaaatctcactaaaattctccaaggacagcgtattggtaccctcttccataaagatgcacataagtgggtcccttcaaaagaggttgatgtacgcgagatggctgttgccgctagggactgttccagacggcttcaggtctctttaatatctgaacagttagaaaatgtctctcggatccctggatattaccaagcttcagtatatcgttcgttccaaaacatgctaatctccaatcttacgttacaggccgtgtcttcggaagaaaggaaacaaattttgctaaatatagctgatgcattgcaatcacgtgagaaagagatcaggattgaaaatgaagctgatgttgttgctgcacaagaagcaggatacgaaaaatccttggttgctaggctggttttaaagagtgagaagatcgtaggccttgccaacaacatacgaattattgcaaacatggaagatccgattggtcgagttttaaaacgaactgagcttgcagagggggttattttggagaaaacgtcatctcctttgggagttcttttaattattttcgagtctcgccctgatgcattggtacagatagcttccttggcaatacgaagtgggaatgggcttctcttgaaaggaggcaaggaggctaatcgatcaaatgccattttgcacaaagtaattactgaagccatacctgatactgttggttcaaaacttattggacttgtgacatcaagagctgaaatacctgagctacttaagctggatgatgtaattgatctggtgattccaagaggcagcaataaacttgtttctgatattaagagttcgacgaaaatccctgttctaggtcatgctgatgggatttgtcacgtctatgttgataaatctgctaatttggagatggctaagcagattgtactcgatgcaaaaacagattgtccatcaggatgcaatgccatggaaacacttcttgttcataaggatttggtagagaaaggctggctcaatagtattagtgacgatttgcggtcggaaggtgttactttatatggaggaccgaaagcaagttctctgttgaatgttccacttgctcgttcattacatcatgagtactgttcgttggcttgcaccttggaaatcgtggatgatgtttatgcagctattcatcatataaatctttatggaagtgcacataccgattccattgtcacagaagatcatgaagtagctgatgtatttcttcgtcaagtcgacagtgctgctgtttttcacaatgctagtacaagattcagcgatggagcacgatttggattaggcgcagaggttggaataagcacaagcaggattcatgctcggggtccagtaggagttgatggattgttaacaaccagatggcttctcaaaggaagtggacaagtagtagatggtgataaaacagttacctacacccacaaagacctaactacttgatttttgctactgaaaatccgcatgaagcgacggcaggcaaggaagttcacttgattgtaatttattttcttgggtatttttcttctgtgttcagagttaggttcaaattgtacaatattcaattgagagaagggatgataatttgcattacttgttgctgcatttgtattcattgtgtttgtacaataaacatgtttccttcccaacattaggaaattggtgatcattgtgtaagaatttttttcaagtaattgaagtttccacagttgttcaaaaaaaaaaaaaaaaaa

SEQ ID NO: 21037 - protein, 752 aa, Medicago sativa
MANADPCREFVKDVKRIIIKVGTAVVTRQDGRLAVGKLGALCEQIKELNILGYEVILVSSGAVGLGRQRLRYRKLIQSSFADLQKPQVELDGKACAAVGQSSLMATYDILFSQLDVTSAQLLVTDNDFRDQDFRKQLSETVRSLLALKVIPIFNENDAVSTRKAPYEDSSGIFWDNDSLSALLALELKADLLILLSDVDGLYNGPPSDPLSKLIHTYIKEKHQNEITFGDKSRVGRGGMTAKVKASVHAADAGIPVIITSGNAAENLTKILQGQRIGTLFHKDAHKWVPSKEVDVREMAVAARDCSRRLQVSLISEQLENVSRIPGYYQASVYRSFQNMLISNLTLQAVSSEERKQILLNIADALQSREKEIRIENEADVVAAQEAGYEKSLVARLVLKSEKIVGLANNIRIIANMEDPIGRVLKRTELAEGVILEKTSSPLGVLLIIFESRPDALVQIASLAIRSGNGLLLKGGKEANRSNAILHKVITEAIPDTVGSKLIGLVTSRAEIPELLKLDDVIDLVIPRGSNKLVSDIKSSTKIPVLGHADGICHVYVDKSANLEMAKQIVLDAKTDCPSGCNAMETLLVHKDLVEKGWLNSISDDLRSEGVTLYGGPKASSLLNVPLARSLHHEYCSLACTLEIVDDVYAAIHHINLYGSAHTDSIVTEDHEVADVFLRQVDSAAVFHNASTRFSDGARFGLGAEVGISTSRIHARGPVGVDGLLTTRWLLKGSGQVVDGDKTVTYTHKDLTT

SEQ ID NO: 21038 - DNA, 2405 bp, Triticum aestivum
  CDS (83)..(2233)
tcactgcagataagagagggaggggcgagcgagagggaagggagaggcggcgcgccgagccagcccacttccgcccgcggccatggccggcgccgaccccaaccggagctccatgaaggacgtgaagcgcatcatcatcaaggtgggcactgcagttatcaccagaaatgatggaagactggctttgggcaggattggagccctgtgcgagcaggtcaaggatcttaatgctcaaggatatgaggtgattatggtcacctcgggcgctgttggtgtggggcgacagcggctcaggtaccgcaagctcgtcaatagcagctttgctgatctgcagaagccacagatggagctggacgggaaggcctgcgctgctgttggtcagagtgggctgatggcactctatgacatgttgtttacccaacttgatgtgtcatcatcacaacttctcgtgacagatagtgacttcgacaattcaaatttccgggagcgactccgcgaaactgtcgagtcattattagagcttagagttattccaatatttaatgaaaatgatgccatcagtacgaggaaggctccatacgaggattcatctggtatattctgggataatgacagtttggcaggtctactggcattggaactgaaagctgatctcctcgttctgcttagtgatgtggatggcctctacagcggtccaccaagtgaaccttcatcgaagttaatacatacttatatcaaggaaaaacattatcatgaaattacttttggagacaagtcccgtgttggtagaggtggcatgacagctaaagtccaagctgctgtgtgggctgcaacgggtggtgtacctgttgttattacaagtggatgtgcatctcagagccttgttaaagttctccgtggggaaaaaattggtaccctttttcataaaaatgcaagtttgtgggaaccatccaaggacaccagtgtccgtgaaatggctgttgctgcacgggattgtccaaggcatctacagaatttgtcatcagaggagcgcaagaaaatattattagatgttgcggatgctttagaggcaaatgaggatttaattagatccgagaatgaagcagatttagcagcagcacatgaggctgggtatgagagtgctttggtttctagattgactctgaaaccaggaaagatagcaagccttgccaaatctgttcgcactcttgcgaatatggaagaccctattaacgagatactgaaaaggacagaggttgctgatggtttagttcttgagaaaacatcttgccctttgggtgttctattgattatttttgagtcccgacctgatgccttagtccagattgcgtctttagccattcgaagtggtaatggtcttctcctaaaaggtggaaaagaagcaatgagatcaaacgcaatattgcataaggttataaccaatgctattcctgacaatgttggtgaaaaattgattggccttattacaactagagatgaaattgcggatttgctgaagcatgatgatgtcattgatcttgtcattccaagagggagtaataagcttgttgctcaaatcaaatcatcaacaaagattcctgttcttggccatgctgatggtgtttgtcatgtatatattgacaaatcagcagacatggatatggcaaaacgtattgtgatggatgcaaaaattgattacccagctgcctgcaacgcaatggagacgttgcttgttcataaagatcttatgaagattccagaacttaatgacatactagtagcactcaaggcagcaggagttaatctttattgcgggcctgttgcgcataaagtattgggctacccgaaagcagattcattacatctggagtacagttctatggcttgcactgttgagatagttgatgatgtacaatcagcaattgaccatatacatcgctatggaagtgcacatacagactgtgtggtcactacagatgataaagtagcagagacctttctacgtcaagttgatagtgctgccgtattatacaacgcgagtacaagattctccgatggtgctcgttttgggctcggtgctgaggttggcataagtacaggccgtatacatgcacgtggacctgtgggtgttgaaggtcttttaactacacgatggctcttacgagggaaagggcaagtggtgaatggtgacaaggatgttgagtacacccataagagtcttcctttgcaatgagaaaatggcgtggtaaggattccgcgaaaaccctctgaagtatgagagtctcaccagaccaaggaaagaaaaccggtggatcaattaatttgtgtacaaaccatcttactgtggcggatcggtggatcaatttgtatgagcttggaggcttcggctctccggtgttataata

SEQ ID NO: 21039 - protein, 716 aa, Triticum aestivum
MAGADPNRSSMKDVKRIIIKVGTAVITRNDGRLALGRIGALCEQVKDLNAQGYEVIMVTSGAVGVGRQRLRYRKLVNSSFADLQKPQMELDGKACAAVGQSGLMALYDMLFTQLDVSSSQLLVTDSDFDNSNFRERLRETVESLLELRVIPIFNENDAISTRKAPYEDSSGIFWDNDSLAGLLALELKADLLVLLSDVDGLYSGPPSEPSSKLIHTYIKEKHYHEITFGDKSRVGRGGMTAKVQAAVWAATGGVPVVITSGCASQSLVKVLRGEKIGTLFHKNASLWEPSKDTSVREMAVAARDCPRHLQNLSSEERKKILLDVADALEANEDLIRSENEADLAAAHEAGYESALVSRLTLKPGKIASLAKSVRTLANMEDPINEILKRTEVADGLVLEKTSCPLGVLLIIFESRPDALVQIASLAIRSGNGLLLKGGKEAMRSNAILHKVITNAIPDNVGEKLIGLITTRDEIADLLKHDDVIDLVIPRGSNKLVAQIKSSTKIPVLGHADGVCHVYIDKSADMDMAKRIVMDAKIDYPAACNAMETLLVHKDLMKIPELNDILVALKAAGVNLYCGPVAHKVLGYPKADSLHLEYSSMACTVEIVDDVQSAIDHIHRYGSAHTDCVVTTDDKVAETFLRQVDSAAVLYNASTRFSDGARFGLGAEVGISTGRIHARGPVGVEGLLTTRWLLRGKGQVVNGDKDVEYTHKSLPLQ

SEQ ID NO: 21040 - DNA, 2260 bp, Triticum aestivum
  CDS (109)..(2259)
tctgcggcgacgaggaaaatacactgcagataagagagagggaggggcgagcgagcgagacagggagaggcggcgcgccgagccagccagcccacaccgcccgcggccatggccggcgccgaccccaaccggagcttcatgaaggacgtgaagcgcatcatcatcaaggtgggcactgcagttatcaccagaaatgatggaagactggctttgggcaggattggagccctgtgcgagcaggtcaaggatcttaatgctcaaggatatgaggtgattatggtcacctcgggcgctgtcggtgtggggcgacagcggctcaggtaccggaagcttgtcaatagcagctttgctgatctgcaaaagccacagatggagctggatggaaaggcgtgcgctgctgttggtcagagtgggctgatggcactctatgacatgttgtttacccaacttgatgtgtcatcatcacaacttcttgtgacagatagtgacttcgacaattcaaatttccgggagcgactccgcgaaactgtcgagtcattattagagcttagagttattccaatatttaatgaaaatgatgccatcagtacgaggaaggctccatacgaggattcatctggtatattctgggataatgacagtttggcaggtctactggcattggaactgaaagctgatctccttgttctgcttagtgatgtggatggcctctacagcggtccaccaagtgaaccttcatcaaagttaatacatacttatatcaaggaaaaacattatcatgaaattacttttggagacaagtcccgtgttggtagaggtggcatgacagctaaagtccaagctgctgtgtgggcttcaacgggtggtgtacctgttgttattacaagtggatgtgcatctcagagccttgttaaagttctccgtggggaaaaaattggtactctttttcataaaaatgcaagtttgtgggaaccatccaaggagaccagtgtccgtgaaatggctgttgctgcacgggattgttcaaggcgtctacagaatttgtcatcagaggagcgcaagaaaatattgttagatgttgcggatgctttagaggcaaatgaggatttaattagatccgagaatgaagcagatttagcagcagcacatgaggctgggtatgagagtgctttggtttctagattgactctgaaaccaggaaagatagcaagccttgccaaatctgttcgcactcttgcgaatatggaagaccctattaacgagatactgaaaaggacagaggttgctgatggtttagttcttgagaaaacatcttgccctttgggtgttctattgattatttttgagtcccgacctgatgccttagtccagattgcgtctttagccattcgaagtggtaatggtcttctcctaaaaggtggaaaagaagcaatgagatcaaacgcaatattgcataaggttataaccaatgctattcctgacaatgttggcgaaaaattgattggccttattacaactagagatgaaattgcggatttgctaaagcatgatgatgtcattgatcttgtcattccaagagggagtaataagcttgttgctcaaatcaaatcatcaacaaagattcctgttcttggccatgctgatggtgtttgtcatgtatatattgacaaatcagcagacatggatatggcaaaacgtattgtgatggatgcaaaaattgattacccagctgcctgcaacgcaatggagacgttgcttgttcataaagatcttatgaagactccagaactcaatgacatactagtagcactcaagacagcaggagttaatctttattgtgggcctgttgcgcataaagtattgggctacccaaaagcagattcattacatctggagtacagttctatggcttgcacagttgagatagttgatgatgtacaatcagcaattgaccatatacatcgctatggaagtgcacatacagactgtgtggtcactacagatgataaagtagcagagacctttctacgtcaagttgatagtgctgccgtattatacaacgcgagtacaagattctccgatggtgctcgttttggactcggtgctgaggttggcataagtacaggccgtatacatgcacgtggacctgtgggtgttgaaggtcttttaactacacgatggctcttacgagggaaagggcaagtggtgaatggtgacaaggatgttgagtacacccataagagccttcctttgcaatgag

SEQ ID NO: 21041 - protein, 716 aa, Triticum aestivum
MAGADPNRSFMKDVKRIIIKVGTAVITRNDGRLALGRIGALCEQVKDLNAQGYEVIMVTSGAVGVGRQRLRYRKLVNSSFADLQKPQMELDGKACAAVGQSGLMALYDMLFTQLDVSSSQLLVTDSDFDNSNFRERLRETVESLLELRVIPIFNENDAISTRKAPYEDSSGIFWDNDSLAGLLALELKADLLVLLSDVDGLYSGPPSEPSSKLIHTYIKEKHYHEITFGDKSRVGRGGMTAKVQAAVWASTGGVPVVITSGCASQSLVKVLRGEKIGTLFHKNASLWEPSKETSVREMAVAARDCSRRLQNLSSEERKKILLDVADALEANEDLIRSENEADLAAAHEAGYESALVSRLTLKPGKIASLAKSVRTLANMEDPINEILKRTEVADGLVLEKTSCPLGVLLIIFESRPDALVQIASLAIRSGNGLLLKGGKEAMRSNAILHKVITNAIPDNVGEKLIGLITTRDEIADLLKHDDVIDLVIPRGSNKLVAQIKSSTKIPVLGHADGVCHVYIDKSADMDMAKRIVMDAKIDYPAACNAMETLLVHKDLMKTPELNDILVALKTAGVNLYCGPVAHKVLGYPKADSLHLEYSSMACTVEIVDDVQSAIDHIHRYGSAHTDCVVTTDDKVAETFLRQVDSAAVLYNASTRFSDGARFGLGAEVGISTGRIHARGPVGVEGLLTTRWLLRGKGQVVNGDKDVEYTHKSLPLQ

SEQ ID NO: 21042 - DNA, 2181 bp, Chorispora bungeana
  CDS (1)..(2181)
atggaggagctagatcgttcacgcgcttttggcaaagacgttaagcgtatcgtcgttaaggtagggaccgcagttgttactggaaaaggtggaagattggctcttggtcgcttgggagcactttgtgagcagcttgcggaattaaactcggatggatttgaggtgattttggtgtcatctggtgcggttggccttggccgtcaaaggcttcgatacagacaattagtcaatagcagctttgcggatcttcagaagcctcagactgaacttgatgggaaagcttgtgctggtgttggacaaagcagtctcatggcttattatgaaactatgttcgaccagctggatgtgacggcggctcaacttctggtgaatgacagtagttttagagacaaggaattcaggcagcaacttaatgaaacagtcaagccgatgcttgatttgagggttattccaattttcaatgagaatgatgctattagcacccgaagagccccatatcaggattcttctggtatcttctgggataacgacagcttggctgctttactggcgctggaactgaaagctgatcttctgattcttctgagtgatgtcgaaggtctatacacaggacctccaagtgatcctaactcaaagttgatccacacctttgtaaaagaaaaacatcaagacgagattacatttggcgacaagtccaggttagggagaggtggtatgactgcaaaagtcaaagctgcagtgaatgcagcttatgctgggattcctgtcatcattaccagtgggtattcagctgagaacatagataaagtcctcagaggactgcgtgttggaaccttgttccatcaagatgctcgtttatgggctccgatcacagattctagtgctcgtgacatggcagttgctgcaagggaaagttccagaaagcttcaggccttaacttcagaagataggaacaaaattctgcatgatattgccgatgctcttgaagcaaatgaaaaaacaatcaaagctgagaatgagttagatgtagctgcagcacaagaggctggatttgaagagtcgttggtggctcgcttagttatgacgcctgggaagatctcgagccttgcagcttcagttcgtaagctagctgaaatggaagatccaatcggccgtgttttaaagaaaacagaggtggcagatgggcttttgttagagaagacctcatccccattaggcgtactcctggttatttttgaatctcgccctgatgcacttgtgcggatagcttcacttgccatccggagtggaaatggtcttctattgaaaggtggaaaggaggcccggcgatcaaatgctatcttacacaaggtgatcactgatgcaattccagagacagtcggaggtaaactcattgggcttgtgacttcaagagaagagattcctgatctgctcaagcttgatgacattatagatcttgtgatcccaagaggaagcaacaagcttgtttcccacataaagaactccccgaaaatcccagtgctaggccatgctgatggaatctgtcatgtatatgttgataagtctggtaaactggacatggcaaagcgcattgtttccgatgcaaagttggactatcgagcagcctgtaatgcaatgggaacccgtcttgtgcataaggatctagagcaggaaggtgtgctcaatgagcttattttcgctctgcagaccaatggtgtaactttatatggtggacccagagcaagtgcagtactgagcatcccagaagcacggtcattccatcatgagtactgttccaaggcttgcaccgttgaagttgtagaagacgtctatggagctatagatcatatacaccgacatgggagtggacacacagactgcattgtgacagaggatcccgaagttgcagagctattcctccgccaagtagacagtgctgctgtattccacaacgcaagcacaagattctcagatggttttcgattcggacttggtgctgaggtgggaataagcacaagcaggatccatgcccgtggtccagtcggagttgaaaaattacttacaacgagatggttaatgagaggaaacggacaagttgtggatggaaacaatggaattgtttacacccataaggatcttcctgtcttacaaaggacagaggctgttgagaatggaatttag

SEQ ID NO: 21043 - protein, 726 aa, Chorispora bungeana
MEELDRSRAFGKDVKRIVVKVGTAVVTGKGGRLALGRLGALCEQLAELNSDGFEVILVSSGAVGLGRQRLRYRQLVNSSFADLQKPQTELDGKACAGVGQSSLMAYYETMFDQLDVTAAQLLVNDSSFRDKEFRQQLNETVKPMLDLRVIPIFNENDAISTRRAPYQDSSGIFWDNDSLAALLALELKADLLILLSDVEGLYTGPPSDPNSKLIHTFVKEKHQDEITFGDKSRLGRGGMTAKVKAAVNAAYAGIPVIITSGYSAENIDKVLRGLRVGTLFHQDARLWAPITDSSARDMAVAARESSRKLQALTSEDRNKILHDIADALEANEKTIKAENELDVAAAQEAGFEESLVARLVMTPGKISSLAASVRKLAEMEDPIGRVLKKTEVADGLLLEKTSSPLGVLLVIFESRPDALVRIASLAIRSGNGLLLKGGKEARRSNAILHKVITDAIPETVGGKLIGLVTSREEIPDLLKLDDIIDLVIPRGSNKLVSHIKNSPKIPVLGHADGICHVYVDKSGKLDMAKRIVSDAKLDYRAACNAMGTRLVHKDLEQEGVLNELIFALQTNGVTLYGGPRASAVLSIPEARSFHHEYCSKACTVEVVEDVYGAIDHIHRHGSGHTDCIVTEDPEVAELFLRQVDSAAVFHNASTRFSDGFRFGLGAEVGISTSRIHARGPVGVEKLLTTRWLMRGNGQVVDGNNGIVYTHKDLPVLQRTEAVENGI

SEQ ID NO: 21044 - DNA, 2148 bp, Glycine max
  CDS (1)..(2148)
atggagaacacagatccttgtagacattttctcaaggatgttaagcgcatcataatcaaggttgggactgctgtggtcactcgccaagatggaaggttagctgttggaaaattaggggcactctgtgagcagattaaggagctgaattctcttggttatgagattattttggtgtcatcaggtgctgttggccttggtcgccaaaggcttagatacagaaaattaattaacagcagctttgctgaccttcagaagccgcaagttgaacttgatggcaaggcttgtgctgctgttggacaaaacagccttatggctctttatgatgttttgtttagtcagctggatgtgacatctgctcagcttcttgtgacggacaatgattttagagacaaagatttcagaatgcagctcagcgaaactatgaaatcattgttagcattaaaagttattcccatattcaacgagaacgatgcagttagtactaggaaagctccatatgaggattcttctggcatattttgggataatgacagtttatcagctttattggcattggaattaaaagctgatcttcttattttgttgagtgatgtagagggtctctatagtggccctccaagtgatccacgttcaaaacttattcatacatacattaaggaaaagcatcaaagtgaaattacttttggagacaagtctagagtgggaagaggtggaatgactgctaaagtaaaggcttctattcatgcagctgaagctggcattcctgttatcattactagtggttatgcagctgaaaatatcattaaagttctccaaggacaacggattggaaccctcttccataaagatgcacataaatgggccccggtaaaagaggttgatgctcgtgagatggcagttgcagctagggactgttccagacggcttcaggccttatcttcagaagagaggaaacaaattttgctaaaaatagctgatgccctggaagcacatcaaaatgagatcaggattgaaaatgaagctgatgttgctgatgcaaaagaagcaggatatgaaaaatccttggttgctagactggttttaaagaatgagaagcttgcaagtcttgctaacaacattcgaattattgcaaacatggaagatccaattggtcgagtgttaaaacgaactgagcttgcagaggggctgattttggagaaaacatcatcttctttaggagttcttttaattgtttttgagtctcgccctgatgcactagtacagatagcttctttggcaatccgaagtgggaatgggcttctcttgaaaggaggcaaggaggctaagcgatcaaatgcaattttgcacaaagtaattactgaagccataccagatattgttggctcaaaacttattggacttgtgacatcaagagcagaaattcctgagctacttaagttggatgatgtaattgatctagtgattccaagaggcagcaacaaacttgtctctcagatcaagagttccactaaaattcctgtcctgggtcatgcagatggaatttgtcatgtctatgttgataaatctgctgatctggagatggcaaggcggattgtactagatgcaaaaatagactatccagcaggctgcaatgccatggaaactcttcttgttcacaaggacttggtagagaaaggttggctcaatagtattattattgacctacggacagaaggtgttacattgtatggaggacccaaggcaagtcctttgttaaatattccaatggctcgtatgttacatcatgagtacaattcgttggcatgcacagttgaaattgtggatgatgtttatgcagctattgatcatataaatctttatggaagtgcacatactgattccgttgttgcagaagatcatgaagtagccaatgtgtttctacgccaagtagacagtgctgctgttttccacaatgctagtacaagattcagtgatggggcacgatttggactaggtgcagaggttggaataagtacaagcaggattcatgctcggggtccagtaggagttgatggattgttaacaaccagatggattctcaaaggaagtggacaaatagtggatggtgacaaagcagttaactacactcacagagacctttctatatga

SEQ ID NO: 21045 - protein, 715 aa, Glycine max
MENTDPCRHFLKDVKRIIIKVGTAVVTRQDGRLAVGKLGALCEQIKELNSLGYEIILVSSGAVGLGRQRLRYRKLINSSFADLQKPQVELDGKACAAVGQNSLMALYDVLFSQLDVTSAQLLVTDNDFRDKDFRMQLSETMKSLLALKVIPIFNENDAVSTRKAPYEDSSGIFWDNDSLSALLALELKADLLILLSDVEGLYSGPPSDPRSKLIHTYIKEKHQSEITFGDKSRVGRGGMTAKVKASIHAAEAGIPVIITSGYAAENIIKVLQGQRIGTLFHKDAHKWAPVKEVDAREMAVAARDCSRRLQALSSEERKQILLKIADALEAHQNEIRIENEADVADAKEAGYEKSLVARLVLKNEKLASLANNIRIIANMEDPIGRVLKRTELAEGLILEKTSSSLGVLLIVFESRPDALVQIASLAIRSGNGLLLKGGKEAKRSNAILHKVITEAIPDIVGSKLIGLVTSRAEIPELLKLDDVIDLVIPRGSNKLVSQIKSSTKIPVLGHADGICHVYVDKSADLEMARRIVLDAKIDYPAGCNAMETLLVHKDLVEKGWLNSIIIDLRTEGVTLYGGPKASPLLNIPMARMLHHEYNSLACTVEIVDDVYAAIDHINLYGSAHTDSVVAEDHEVANVFLRQVDSAAVFHNASTRFSDGARFGLGAEVGISTSRIHARGPVGVDGLLTTRWILKGSGQIVDGDKAVNYTHRDLSI

SEQ ID NO: 21046 - DNA, 2520 bp, Medicago truncatula
  CDS (71)..(2218)
ggcacgagatatcgcatcagttcatctcatagctgtactatcatccctgtctctccccaccaaaccaaagatggcgaacgccgacccttgtagagatttcgtcaaagatgttaagcgcataatcatcaaggttggtactgctgttgttactcgccaagatggaagattagcagttggaaaattaggggcactctgtgagcagattaaggagcttaacattcttggttatgaagttattttagtttcatcaggtgctgttggtcttggtcgccaaaggcttagatatagaaaattgattcaaagtagttttgctgaccttcagaagccacaagttgaacttgatggcaaggcttgtgctgctgttggacaaagcagccttatggctacttacgatgatttatttagtcagctggatgtgacgtctgctcagcttcttgttactgacaatgattttagagaccaagattttagaaaccaactttctgaaactgtgaagtcgcttctagcactaaaagttattccaatattcaacgagaacgacgcagtcagtactaggaaagctccatatgaggattcttctggcatattttgggataatgacagtttatcagctttgctggccttggaattaaaagcagatcttcttattttgttgagtgatgtagatggtctttataatggccctccaagtgatccactatcaaaacttattcacacatacatcaaggaaaagcatcaaaatgaaattacttttggagacaagtctagggttggaagagggggaatgacagccaaagtaaaagcttctgttcatgcagctgatgccggaattcctgttatcattaccagtggtaatgcagctgaaaatctcactaaaattctccaaggacagcgtattggtaccctattccataaagatgcacacaagtgggtcccttcaaaagaggttgatgtacgcgagatggctgttgccgctagggactgttccagacggcttcaggccgtgtcttcggaagaaaggaaacaaattttgctaaatatagctgatgcattgcaatcacgtgagaaagagatcaggattgaaaatgaagctgacgttgttgctgcacaagaagcaggatacgaaaaatccttggttgctaggctggttttaaagagtgagaagatcgtaggccttgccaacaacatacgaattattgcaaacatggaagatccgattggtcgagttttaaaacgaactgagcttgcagaggggttaattttggagaaaacatcatctcctttgggagtccttttaattattttcgagtctcgccctgatgcattggtacagatagcttccttggcaatacgaagtgggaatgggcttctcttgaaaggaggcaaggaggctaatcgatcaaatgccattttgcacaaagtaattactgaagccatacctgatactgttggttcaaaacttattggacttgtgacgtcaagagctgaaatacctgagctacttaagctggatgatgtaattgatctggtgattccaagaggcagcaataaacttgtttctgatattaagagttcgacgaaaatccctgttctaggtcatgctgatggaatttgtcacgtctatgttgataaatctgctaatttggagatggctaagcagattgtactcgatgctaaaacagattatccatcaggatgcaatgccatggaaacacttcttgttcataaggatttggtagagaaaggctggctcaatagtattagtgtcaatttgcggtcagaaggtgttacgttatatggaggaccgaaagcaagttctctgttgaatgttccacttgctcgttcattacatcacgagtactgttcgttggcttgcaccgtggaaattgtggatgatgtttatgcagctattgatcatataaatcgttatggaagtgcacataccgattccattgtcacagaagatcatgaagtagctaatgtatttcttcgtcaagtcgatagtgctgctgtttttcacaatgctagtacaagattcagcgatggagcacgatttggattaggcgcagaggttggaataagtacaagcaggattcatgctcggggtccagtaggagttgatggattgttaacaaccagatggcttctcaaaggaaatggacaagtagtagatggtgataaaaaagttacctatacccacagagacataactacttgatttatgagttttgctactgaaaatccacatgaagggacggcaggcaaggaagttcacttggttgtaatttattttcttgggtatttttcttctgtgttgagagttaggttcaaattttacaatgttcaattgagagaaatgatgataatttgcattacttgttgctgcatttgtattcattgtgtttgtacaataaacttgtttccttcccaacttaggaaattggtgatcattgtgtaagaatttttttcaagtaattgaagtttccacagttgtgcaaataaaaaaaaaaaaaaaaaaaa

SEQ ID NO: 21047 - protein, 715 aa, Medicago truncatula
MANADPCRDFVKDVKRIIIKVGTAVVTRQDGRLAVGKLGALCEQIKELNILGYEVILVSSGAVGLGRQRLRYRKLIQSSFADLQKPQVELDGKACAAVGQSSLMATYDDLFSQLDVTSAQLLVTDNDFRDQDFRNQLSETVKSLLALKVIPIFNENDAVSTRKAPYEDSSGIFWDNDSLSALLALELKADLLILLSDVDGLYNGPPSDPLSKLIHTYIKEKHQNEITFGDKSRVGRGGMTAKVKASVHAADAGIPVIITSGNAAENLTKILQGQRIGTLFHKDAHKWVPSKEVDVREMAVAARDCSRRLQAVSSEERKQILLNIADALQSREKEIRIENEADVVAAQEAGYEKSLVARLVLKSEKIVGLANNIRIIANMEDPIGRVLKRTELAEGLILEKTSSPLGVLLIIFESRPDALVQIASLAIRSGNGLLLKGGKEANRSNAILHKVITEAIPDTVGSKLIGLVTSRAEIPELLKLDDVIDLVIPRGSNKLVSDIKSSTKIPVLGHADGICHVYVDKSANLEMAKQIVLDAKTDYPSGCNAMETLLVHKDLVEKGWLNSISVNLRSEGVTLYGGPKASSLLNVPLARSLHHEYCSLACTVEIVDDVYAAIDHINRYGSAHTDSIVTEDHEVANVFLRQVDSAAVFHNASTRFSDGARFGLGAEVGISTSRIHARGPVGVDGLLTTRWLLKGNGQVVDGDKKVTYTHRDITT

SEQ ID NO: 21048 - DNA, 2574 bp, Tigriopus californicus
  CDS (1)..(2574)
  misc_feature (1974)..(1974): m is a or c
atgcatagagccaatcgaatcatcaatcccgccgcggagcatcaattcttcgggtactcgaaacccaacagtggggtcaaatcccagtcttgtcgtgtggttcttcatgggggccttgctccccttccattgagtcggaaatctgtggattccaaggtcgagcctctgacttctcaggctcatttgcctaccacgaccctgggcaaacgatccggagactttctaagacctttcccacccaagcgcctgttcttctcgcgtgggctgatcaccgatggcggtccctctggcgtgaaaaagtatggcagcttgaccatgttctcgggtgaccacgccaccgaaggcggtcactctccggtcacgaacgcgtttctgtaccgccatcaattgtcccatgccaagcgcatcgtgatcaagatgggcagtgccgtcatcacccgagaggatggcaacggattggccttgggtcgactggcagccattgttgagcaggtgtcggagttgcaaaatgaaggtcgagagtgtattctcatcacgagtggtgctgtagcctttggcaagcagaaactggcccaagaggtcatgatgtccatgagtatgagagagaccatctcgggcaactacaacaccaaggaagacatcaagacgctcatgaagtcctcgttcaagaaacccaacgctgctgtaggtcaaagtggattgcaggcactctatgagaccatgttccggaattacgggattctggtcgggcaggtgttggtgaccaaacccgacttctacaatgataacacccggcaacagctctttaccaccatcaatgagcttctccagctgaacatcattcccattatcaacaccaacgatgccgtgagccccccaccccaaaaggacgaggatccggagggcgtcctcgggatcaaggacaacgatagcttggccgctcgagtggccgttgagacccgagctgatttagccatcttgatgtcggacgtggacggaatctatgaccgttctccttcgcatgaggatgcccgcgtcatgcacaacttcaatccggttgatttagccaaagtggaattcggtgagaaatccgatgctggcacgggaggcatggaatccaaagtaagatccgccctctgggccttggagaatggctcatccgtggtcatttgcaacgggatgaagtacaacaccattcggaaaatcatgcgaggcgacaaggtgggatctttcttcaccaaggctgaagtggacgccatgcccgtggaagtgttggccaaaaatgctcgttccggcagtcggcgacttcaagccttggctcccgaagctcgagcaaagatcatcaacaagattgcggattccttgatcagtcgccaggatgaaatcatgagcgtcaacgagttggatctccggcaagcccgtttggatggggtggtgggagccatgtattctcgactggccttttcgccgcaaaagatccaagctttggccactggcctcaagcaaatcgccgccacaagctaccaaaatgtgggcaaggtggtccgacgaaccaaagtttcggataccatggacttggtccagagaaccgttccaattggcgtgctcatggtcatttttgaatcccgacccgatgccttgcctcaggtggcctcattggccattgcatcggccaatggacttctcatgaaaggtggcaaagaagccaccaacagcaacaaccttctgatgaacatcgtcaaagaagccttgtccgagtatgggtgtgccgacgcaatttccatggtgtccaagagagaagcaattggagacctcctcaagatggatcagtacatcgacttggttattccccgaggatctggcgagttggtcaagtccatcaaggagcaaagcaagatgattcccgtcctcggtcatgccgagggtgtctgtcacgtttacgtggacaaatacgccgatttggaaaaggcccgmgccattgtcaaggactcgaagacagattacccagcggcgtgcaatgccatggagaccctcctggttcacgaggatctgctcaagacccccgtgttcgataagatttgctccaccctcaaagagagtggcgtggccatcttctctggacccaccttggccaagcatctcacttttggcccgccccaagctcactccctcaagcatgaatatggcgacatggcttgcacgattgagattgtcaaggacatgtatgatgccattgatcacattcacaagtttggcagcagccacacggatgtgattgtcactgataacgaggagaacgcccaaatattcttggagtccgtggacagcgcttgcgtgtttgctaattgtagctccagaatggccgatggatatcgcctcggcttgggcgctgaagttggaatatcgactgggcggattcatgcccgaggacccgtgggcgtggaaggacttctcaccactaaatgggttctaaacggagatggcgacattgccgccgattacgctagtggagaaaagcacttcattcatcaacagcttcccttgatcgatgtggagagcaatttttgcgaataa

SEQ ID NO: 21049 - protein, 857 aa, Tigriopus californicus
MHRANRIINPAAEHQFFGYSKPNSGVKSQSCRVVLHGGLAPLPLSRKSVDSKVEPLTSQAHLPTTTLGKRSGDFLRPFPPKRLFFSRGLITDGGPSGVKKYGSLTMFSGDHATEGGHSPVTNAFLYRHQLSHAKRIVIKMGSAVITREDGNGLALGRLAAIVEQVSELQNEGRECILITSGAVAFGKQKLAQEVMMSMSMRETISGNYNTKEDIKTLMKSSFKKPNAAVGQSGLQALYETMFRNYGILVGQVLVTKPDFYNDNTRQQLFTTINELLQLNIIPIINTNDAVSPPPQKDEDPEGVLGIKDNDSLAARVAVETRADLAILMSDVDGIYDRSPSHEDARVMHNFNPVDLAKVEFGEKSDAGTGGMESKVRSALWALENGSSVVICNGMKYNTIRKIMRGDKVGSFFTKAEVDAMPVEVLAKNARSGSRRLQALAPEARAKIINKIADSLISRQDEIMSVNELDLRQARLDGVVGAMYSRLAFSPQKIQALATGLKQIAATSYQNVGKVVRRTKVSDTMDLVQRTVPIGVLMVIFESRPDALPQVASLAIASANGLLMKGGKEATNSNNLLMNIVKEALSEYGCADAISMVSKREAIGDLLKMDQYIDLVIPRGSGELVKSIKEQSKMIPVLGHAEGVCHVYVDKYADLEKARAIVKDSKTDYPAACNAMETLLVHEDLLKTPVFDKICSTLKESGVAIFSGPTLAKHLTFGPPQAHSLKHEYGDMACTIEIVKDMYDAIDHIHKFGSSHTDVIVTDNEENAQIFLESVDSACVFANCSSRMADGYRLGLGAEVGISTGRIHARGPVGVEGLLTTKWVLNGDGDIAADYASGEKHFIHQQLPLIDVESNFCE

SEQ ID NO: 21050 - DNA, 2154 bp, Arabidopsis thaliana
  CDS (1)..(2154)
atggaggagctagatcgttcacgtacttttgccagagacgtcaaacgtatcgtcgttaaggttgggacagcagttgttactggaaaaggtggaagattggctcttggtcgtttaggagcactgtgtgaacagcttgcggaattaaactcggatggatttgaggtgatattggtgtcatctggtgcggttggtcttggcaggcaaaggcttcgttatcgacaattagtcaatagcagctttgcggatcttcagaagcctcagactgaacttgatgggaaggcttgtgctggtgttggacaaagcagtcttatggcttactatgagactatgtttgaccagcttgatgtgacggcagctcaacttctggtgaatgacagtagttttagagacaaggatttcaggaagcaacttaatgaaactgtcaagtctatgcttgatttgagggttattccaattttcaatgagaatgatgctattagcacccgaagagccccatatcaggattcttctggtattttctgggataacgatagcttagctgctctactggcgttggaactgaaagctgatcttctgattcttctgagcgatgttgaaggtctttacacaggccctccaagtgatcctaactcaaagttgatccacacttttgttaaagaaaaacatcaagatgagattacattcggcgacaaatcaagattagggagagggggtatgactgcaaaagtcaaagctgcagtcaatgcagcttatgctgggattcctgtcatcataaccagtgggtattcagctgagaacatagataaagtcctcagaggactacgtgttggaaccttgtttcatcaagatgctcgtttatgggctccgatcacagattctaatgctcgtgacatggcagttgctgcgagggaaagttccagaaagcttcaggccttatcttcggaagacaggaaaaaaattctgcttgatattgccgatgcccttgaagcaaatgttactacaatcaaagctgagaatgagttagatgtagcttctgcacaagaggctgggttggaagagtcaatggtggctcgcttagttatgacacctggaaagatctcgagccttgcagcttcagttcgtaagctagctgatatggaagatccaatcggccgtgttttaaagaaaacagaggtggcagatggtcttgtcttagagaagacctcatcaccattaggcgtacttctgattgtttttgaatcccgacctgatgcacttgtacagatagcttcacttgccatccgtagtggaaatggtcttctgctgaagggtggaaaggaggcccggcgatcaaatgctatcttacacaaggtgatcactgatgcaattccagagactgttgggggtaaactcattggacttgtgacttcaagagaagagattcctgatttgcttaagcttgatgacgttatcgatcttgtgatcccaagaggaagcaacaagcttgttactcagataaaaaatactacaaaaatccctgtgctaggtcatgctgatggaatctgtcatgtatatgtcgacaaggcttgtgatacggatatggcaaagcgcatagtttctgatgcaaagttggactatccagcagcctgtaatgcgatggaaacccttcttgtgcataaggatctagagcagaatgctgtgcttaatgagcttatttttgctctgcagagcaatggagtcactttgtatggtggaccaagggcaagtaagatactgaacataccagaagcacggtcattcaaccatgagtactgtgccaaggcttgcactgttgaagttgtagaagacgtttatggtgctatagatcacattcaccgacatgggagtgcacacacagactgcattgtgacagaggatcacgaagttgcagagctattccttcgccaagtggatagcgctgctgtgttccacaacgccagcacaagattctcagatggtttccgatttggacttggtgcagaggtgggggtaagcacgggcaggatccatgctcgtggtccagtcggggtcgaaggattacttacaacgagatggataatgagaggaaaaggacaagttgtcgacggagacaatggaattgtttacacccatcaggacattcccatccaagcttaa

SEQ ID NO: 21051 - protein, 717 aa, Arabidopsis thaliana
MEELDRSRTFARDVKRIVVKVGTAVVTGKGGRLALGRLGALCEQLAELNSDGFEVILVSSGAVGLGRQRLRYRQLVNSSFADLQKPQTELDGKACAGVGQSSLMAYYETMFDQLDVTAAQLLVNDSSFRDKDFRKQLNETVKSMLDLRVIPIFNENDAISTRRAPYQDSSGIFWDNDSLAALLALELKADLLILLSDVEGLYTGPPSDPNSKLIHTFVKEKHQDEITFGDKSRLGRGGMTAKVKAAVNAAYAGIPVIITSGYSAENIDKVLRGLRVGTLFHQDARLWAPITDSNARDMAVAARESSRKLQALSSEDRKKILLDIADALEANVTTIKAENELDVASAQEAGLEESMVARLVMTPGKISSLAASVRKLADMEDPIGRVLKKTEVADGLVLEKTSSPLGVLLIVFESRPDALVQIASLAIRSGNGLLLKGGKEARRSNAILHKVITDAIPETVGGKLIGLVTSREEIPDLLKLDDVIDLVIPRGSNKLVTQIKNTTKIPVLGHADGICHVYVDKACDTDMAKRIVSDAKLDYPAACNAMETLLVHKDLEQNAVLNELIFALQSNGVTLYGGPRASKILNIPEARSFNHEYCAKACTVEVVEDVYGAIDHIHRHGSAHTDCIVTEDHEVAELFLRQVDSAAVFHNASTRFSDGFRFGLGAEVGVSTGRIHARGPVGVEGLLTTRWIMRGKGQVVDGDNGIVYTHQDIPIQA

SEQ ID NO: 21052 - DNA, 2529 bp, Brassica napus
  CDS (120)..(2303)
ccattatcttcctcctctcacgttctcctcttcttcttcgtagtggcggtgactcagtccgatcgagttgactcgctctctctctctctctctgtcttgtttttgataagaagctagctatggaggatgagatagatcgttcccgcgctttcgccaaggacgttaagcgtatcgttgtcaaggttgggacagcagttgttacagggaaaggtggaagattggctcttggccgcttaggagctatctgcgagcagcttgctgaattgaactcggatggttttgaggtcattttggtgtcttctggtgcggttggtcttggtcgtcagaggcttagatacagacaattagtcaacagcagctttgcagaccttcagaagccacagactgaacttgatgggaaggcttgtgctggtgttggacagagcagtctcatggcttactatgagactatgtttgaccagatggatgtgacggtggctcaaatgctggtgactgatagcagtttcagagataaggatttcaggaagcaacttagtgagacagtcaaagctatgctgaaaatgagagttattccagttttcaacgagaatgatgctataagcactcgaaaagccccttacaaggattctactggtatattttgggataatgacagcttagctgctctactggcgcttgagctgaaagctgatcttttgattcttcttagtgacgttgagggtctttacactggtcctccaagcgatcctaagtcaaagttaatccacacatacgttaaagagaaacaccaggaagagattacctttggcgagaagtccagattaggacgaggtggtatgactgcaaaagttaaagctgctgttaatgcagcttatggtggcattcctgttatcataaccagtgggtatgcagctgagaatatagctaaagttcttaaaggactgcgtgttggtaccttgttccaccaagatgcacatttgtgggctagagtcgtagatactacttctcgtgacatggcagttgctgcaagggaaagttctagaaagcttcaggctttgtcttcagaagataggaaaaacattctactagatatagccaacgctctagaagcaaatgagaaaataattaaggctgagaatgatttagatgttgctgcagcacaagaagctggatatgaagagtctttggtagctcgtttagttatgaagcctggaaagatctcaagccttgcagcttctattcgccagctagctgaaatggaagacccaattggtcgtgttctaaagaaaactgaggttgcagatggtcttattttagagaaaacctcatcaccattaggtgttcttctgattgtttttgaatcccgtcctgatgcacttgttcagatagcttcacttgcaatcaggagtggaaatggtcttctgctgaagggtggaaaagaggctcgtcgatcaaatgctatcttacacaaggtgatcactgatgcaattccgaagactgttggaggtaaactcataggacttgtgacttcgagagatgagattcctgatttgctcaagcttgatgatgttattgatcttgtgatcccaagaggcagcaacaagcttgtttctcagataaaaaactcaacgaaaatcccagtgctagggcatgcggatggtatctgtcatgtgtatgttgacaagtcttgtaaagtagacatggcaaaacgtgttgtttcagatgcaaagttagactatccagcagcctgtaacgctatggaaacccttcttgtacataaggatctagagcagaatggtgtgctaaacgagcttatatatgccctgcaagccaatggtgtcactttgtatggtgggccaaaagcaagtggtaaactgaacattccggaagtaaaatcatttcatcacgagtacagttccaaggcctgcaccgttgaaattgtagaagacgtacacggtgctatagatcatattcaccaacacgggagtgcacacactgattgcatagtgacagaagatagtgaagtggcagagatcttcctccgccaagtggacagtgctgctgttatccacaatgcaagcacaagattctgtgatggttttcgatttggacttggtgctgaggtgggaataagcacaagcaggatccatgcccgtggtccagttggagtagaaggattattgacaacgagatggataatgagaggaaaaggacaagtggtggatggagacaatggagtcgcttacactcataaggaccttcctgtcttagaaaggacaaaggcagtgcagaacgggcattagttctatctatgctaatgtcatattatattttactcttttcttatgattgaagtttattttttttctcgtttactaggatatagtgttgtggatttgcaataagtggtcttttgataatagtaaagtgtgtattagccttttcgtcatgtcaaaaagaaactcgttataagccaatgtaacctttctatttctctcaatcgcaaaaaaaaaaaaaaaaaaaaaaaaa

SEQ ID NO: 21053 - protein, 727 aa, Brassica napus
MEDEIDRSRAFAKDVKRIVVKVGTAVVTGKGGRLALGRLGAICEQLAELNSDGFEVILVSSGAVGLGRQRLRYRQLVNSSFADLQKPQTELDGKACAGVGQSSLMAYYETMFDQMDVTVAQMLVTDSSFRDKDFRKQLSETVKAMLKMRVIPVFNENDAISTRKAPYKDSTGIFWDNDSLAALLALELKADLLILLSDVEGLYTGPPSDPKSKLIHTYVKEKHQEEITFGEKSRLGRGGMTAKVKAAVNAAYGGIPVIITSGYAAENIAKVLKGLRVGTLFHQDAHLWARVVDTTSRDMAVAARESSRKLQALSSEDRKNILLDIANALEANEKIIKAENDLDVAAAQEAGYEESLVARLVMKPGKISSLAASIRQLAEMEDPIGRVLKKTEVADGLILEKTSSPLGVLLIVFESRPDALVQIASLAIRSGNGLLLKGGKEARRSNAILHKVITDAIPKTVGGKLIGLVTSRDEIPDLLKLDDVIDLVIPRGSNKLVSQIKNSTKIPVLGHADGICHVYVDKSCKVDMAKRVVSDAKLDYPAACNAMETLLVHKDLEQNGVLNELIYALQANGVTLYGGPKASGKLNIPEVKSFHHEYSSKACTVEIVEDVHGAIDHIHQHGSAHTDCIVTEDSEVAEIFLRQVDSAAVIHNASTRFCDGFRFGLGAEVGISTSRIHARGPVGVEGLLTTRWIMRGKGQVVDGDNGVAYTHKDLPVLERTKAVQNGH

SEQ ID NO: 21054 - DNA, 2551 bp, Brassica napus
  CDS (94)..(2247)
cagatattatttggttctctctctaaactcggtcactgacgaaccactgagtttaactcgttcctttggaggaggttttggtaggcggggacaatggaggagctagatcgttcacgcgctttcgctaaagacgtcaagcgtatcgtcgttaaggttggaacagctgttgtaactgggaaaggtggaagattggctcttggtcgcctaggagctctgtgtgaacagcttgcggaattaaactcggatggatttgaggtgatcttggtgtcatcaggtgcggttggccttggccgccaaaggcttcgctacagacagttagtcaatagcagctttgcggatctccagaagcctcagcatgaactagatgggaaggcttgtgctggtgttggacaaagcagtctcatggcttattatgagactatgtttgaccagctggatgtgacggctgctcagctgctggtgaatgacagtagtttcagagacaaggagttcaggaagcaacttaatgagacagtgaagtccatgcttgatttgagggttattcctattttcaatgagaacgatgctattagcaccagaagagctccttatcaggattcatctggcatcttttgggataacgacagcttagctgctctattggcgctggagctgaaagctgatcttctgattcttctgagtgatgtcgaaggtctttacactggccctccaagtgaccctaactcaaagctgatccacaccttcatcaaggagaaacatcaagacgagattacatttggcgacaagtcaagactaggaagaggaggcatgactgcaaaagtgaaagctgcagtgaatgcagcttatgctggtatccctgtcatcataaccagtggctatgcagctgagaacatagataaagtccttagaggactgcgtgttggaaccttgttccatcaagatgctcgtttatgggctcctatcacggattctactgctcgtgacatggcagtagctgcgagggaaagttccaggaagcttcaggccttatcttcggaggataggaagcagatactgtatagtatcgcagatgctcttgaagcaaatgagaaaacaatcagagctgagaatgaattagatgtggctacagcacaagaagctggacttgaagagtcattggtggctcgtttggtgatgacacctgcaaagatctcgagccttgcagcttcagttcgtaagctagctgatatggaagatccaattggccgtgttctaaagaaaaccgaggtggcagatggtcttgttttggagaagacctcatccccattaggcgtactcctgattgtttttgagtctcgacctgatgcacttgtacagatagcttcacttgctatccggagtggaaatggtcttctattgaagggtggaaaggaggccaggagatcaaatgctatcttacacaaggtgataactgatgctattccagagactgttggtggtaaactcattggacttgtgacttcaagggaagagattcctgatttgctcaagcttgatgacgttattgatcttgtgatcccaagaggcagcaacaagcttgtttcccagattaaaaacactacaaaaatccctgttcttggtcatgctgatggaatctgtcatgtatatgtggacaaggcttgtaatgtggatatggctaaacgcatagtttctgatgcaaagttagactatccagcagcttgtaatgccatggaaactcttcttgtgcataaggatctggagcagaacgctgtgctcaatgagcttatatttgctctgcagagcaatggagtcactttgtatggtggaccaaaggcaagtaaaatacttaacctaccagaagcacggtcgttcaatcacgagtactgttccaaggcgtgcactgttgaagttgtagaagatgtttatggtgctgtagatcacattcaccgacatggaagtgcacacacagactgtattgtgacagaggatcccgaagttgcagagctattccttcgccaagtggacagcgctgctgtgttccacaacgcaagcacaagattctctgatggttttcgatttggacttggtgctgaggtggggataagcacagggaggatccatgcccgtggtccagtgggagtagagggactacttacaaccagatggataatgagaggaaaaggacaagttgtggatggagacaatgggattacttacacccatcaagacattcccatccaagcttagaagactttgtgtgaagtctttctgtggagactaggagaggatgggctttttgtttcctctctgctaatatcatatcctattattattattgttgttgaaaccctctcttataaagtgaagtggttttgatttagggtttagggattgcaccaaaaataagttcctttgttctgtttttaccacttggtctttgctcataagtaagattgaagaactcttgtaagctacacctttcttatttatcaatttatctttatttctttggatttgcaaaaaaaaaaaaaaaaaaaaaaaaaaaaaaaaa

SEQ ID NO: 21055 - protein, 717 aa, Brassica napus
MEELDRSRAFAKDVKRIVVKVGTAVVTGKGGRLALGRLGALCEQLAELNSDGFEVILVSSGAVGLGRQRLRYRQLVNSSFADLQKPQHELDGKACAGVGQSSLMAYYETMFDQLDVTAAQLLVNDSSFRDKEFRKQLNETVKSMLDLRVIPIFNENDAISTRRAPYQDSSGIFWDNDSLAALLALELKADLLILLSDVEGLYTGPPSDPNSKLIHTFIKEKHQDEITFGDKSRLGRGGMTAKVKAAVNAAYAGIPVIITSGYAAENIDKVLRGLRVGTLFHQDARLWAPITDSTARDMAVAARESSRKLQALSSEDRKQILYSIADALEANEKTIRAENELDVATAQEAGLEESLVARLVMTPAKISSLAASVRKLADMEDPIGRVLKKTEVADGLVLEKTSSPLGVLLIVFESRPDALVQIASLAIRSGNGLLLKGGKEARRSNAILHKVITDAIPETVGGKLIGLVTSREEIPDLLKLDDVIDLVIPRGSNKLVSQIKNTTKIPVLGHADGICHVYVDKACNVDMAKRIVSDAKLDYPAACNAMETLLVHKDLEQNAVLNELIFALQSNGVTLYGGPKASKILNLPEARSFNHEYCSKACTVEVVEDVYGAVDHIHRHGSAHTDCIVTEDPEVAELFLRQVDSAAVFHNASTRFSDGFRFGLGAEVGISTGRIHARGPVGVEGLLTTRWIMRGKGQVVDGDNGITYTHQDIPIQA

SEQ ID NO: 21056 - DNA, 2791 bp, Vigna unguiculata
  CDS (64)..(2319)
gggtaccatggcttcttcttctttcgtctcagtctctcattttttttttcactctcatcaacaatggaacttctccaaaatggaaccaaagccaaaccctctgaaatacccctcgtcaatggaaccgcgttaactcacctcaactcgctcttccaaactcagttctccggtaatatcgatccttccagagctttcgtctccaaggtcaagcgtctcattgtaaaggttggaacagctgttgttactcgaagtgatggaagattggcactaggtagaattggagctctttgtgagcagcttaaagaacttagctctcaaggatttgaagtcatactggtaacttcaggtgctgttggccttggcaggcaaagacttagatatcgcaaattggccaatagcagtttttctgatcttcaaaagccacaaggtgagcttgatggtaaagcatgtgctgctgttgggcaaagtagtctcatggctctctatgataccatgttcagccagcttgatgtgacttcttcccaacttcttgtgaatgatggattttttagggatgctggcttcagaaaacaactttcggacacagtgaacgcgttattagatttaagggttatccccattttcaatgaaaatgatgctgttagtactaggaaagcaccatacgaggattcttctggtattttctgggacaatgacagtttggctggactattagccttagaacttaaagctgatcttcttgttttattgagtgatgttgagggcctttacagtggtcctccaagtgacccaaactcaaagttgatccacacatatgtgaaggagaaacatcaaggggaaattacttttggagacaagtcaagattgggaagagggggtatgactgctaaagttaatgctgcggtttgtgctgctcatgctggtatccctgtcattataactagtggctatgctacaaacaatatcatacgggttcttcaaggggaaagaataggtactgtctttcataaagatgctcacttgtggagcaatataaaggaagagagtgcacgtgaaatggcagtttcagcacgcgagagttctagaagacttcagatcctcaaatctgaagaaaggagtaaaatattattggcaattgctgatgcattggagaaaaatgcaagtgcaataagtcttgagaatgaagctgatgttgctgatgctgtgcttgctggatatgaaaattcgttgatatcacgtttaaccctgaaacatgagaagatctctaagcttgcaaagtctgtgcgcatgttggcagctatggaagaaccaattggtcaaattttaaaaagaacagagatagcagataaactcatcctggagaaaatttcatgtcctttgggagtccttctggttatattcgagtctcgaccagatgcccttgtgcagatagctgcattggcaattcgaagtgggaatggtttactgcttaaaggtggaaaagaagcccaacgatcaaatgcaatcttacacaaggtcattacttcggtgattccaaataccgtaggtgacaaacttattggccttgtgaattcaagagatgaaattccatacctacttaagcttgatgatgtgatagatcttgtggtcccaagaggcagtaataaacttgtttctcaaatcaaggagtcaacaaaaattcctgttcttggacatgctgatggaatttgtcatgtatatgtcgacaaatcagctaagattgatatggcaaaacagattattagagatgcaaagactgattatcctgcagcctgcaatgcaatggaaactcttcttgtacacaaggatctatcaaacaatggtggacttaatgagcttgtcgttgaactccaacgtgaaggtgttaaactgtatggtggaccaagagctagtggcatactaaatattgttgaaacaagcgcttttcatcatgagtacagttcacttgcttgcacagttgaaattgtagaagatgtatttgatgccattaaccacatacatgaacatggaagtgctcatactgaatgcattgttacagaagatcgtgaagttgctgagactttcttaagtcaagttgacagtgctgcagttttccacaatgcaagtacacgattttgtgatggagcacgctttggccttggtgcagaggttggaattagcacaagtcgaattcatgcacgaggcccagtaggagtagagggtttattgacgaacagatggatattgagagggagtgggcatgtggttaatggagatcaaggaatcaattacacgtacaaggaattgccactagaagcataactttgtatttagaacttcaccctcaagcaaggattcaatcagttgcaagctaatatgctccctcaagcaagcaacatctctgttgtgtgctgttatgatatgcagaagtggctgagatgttggccatgtataatggtaactatcacttcacccttttttccagggcatttttcttacctggagcaagttcatgggagaggaaataataatatcaatgtttgtattcaattatattgctccttggtgctcttttatatcatatttcagagtttgcataacagcaatgttattacagttatattcactgtatactagtgaacttgaataattatggagaagtttttattatagaaaaaaaaaaaaaaaaaaaaaaaaattgttctcagtttactgttgatagaggtttagttgtacggaactttattggcatatacatccattgttaatcaaacgcagccatggtacccggatc

SEQ ID NO: 21057 - protein, 751 aa, Vigna unguiculata
MELLQNGTKAKPSEIPLVNGTALTHLNSLFQTQFSGNIDPSRAFVSKVKRLIVKVGTAVVTRSDGRLALGRIGALCEQLKELSSQGFEVILVTSGAVGLGRQRLRYRKLANSSFSDLQKPQGELDGKACAAVGQSSLMALYDTMFSQLDVTSSQLLVNDGFFRDAGFRKQLSDTVNALLDLRVIPIFNENDAVSTRKAPYEDSSGIFWDNDSLAGLLALELKADLLVLLSDVEGLYSGPPSDPNSKLIHTYVKEKHQGEITFGDKSRLGRGGMTAKVNAAVCAAHAGIPVIITSGYATNNIIRVLQGERIGTVFHKDAHLWSNIKEESAREMAVSARESSRRLQILKSEERSKILLAIADALEKNASAISLENEADVADAVLAGYENSLISRLTLKHEKISKLAKSVRMLAAMEEPIGQILKRTEIADKLILEKISCPLGVLLVIFESRPDALVQIAALAIRSGNGLLLKGGKEAQRSNAILHKVITSVIPNTVGDKLIGLVNSRDEIPYLLKLDDVIDLVVPRGSNKLVSQIKESTKIPVLGHADGICHVYVDKSAKIDMAKQIIRDAKTDYPAACNAMETLLVHKDLSNNGGLNELVVELQREGVKLYGGPRASGILNIVETSAFHHEYSSLACTVEIVEDVFDAINHIHEHGSAHTECIVTEDREVAETFLSQVDSAAVFHNASTRFCDGARFGLGAEVGISTSRIHARGPVGVEGLLTNRWILRGSGHVVNGDQGINYTYKELPLEA

SEQ ID NO: 21058 - DNA, 2374 bp, Vitis vinifera
  CDS (48)..(2336)
agtggcgacgtttaccggactgagtcgaacgatttggacacgctccgatgcacatggacgccatggatccaactcgagcttttgttaaggacgttaagcgtctcgtaatcaagtttgggactgctgttgtcactcggtctgatggaagattagcactcggaagactaggtgcactttgtgagcagatcaaagaattgaactctcaaggatatcaggtcattgtggtcacatcaggtgctgttggccttggtcgccaaaggcttagatacaggagtttactcaacagcagctttgctgatctccaaaaaccacaagctgagcttgatggtaaggcgtgtgcagctgttggacaaaataaccttatggctctctatgacacattatttagccagctggatgtgacatcagctcagcttcttgtgactgataatgattttagggatgaagctttccgaaatcaacttactcaaacagtggattcattgttagctttgagggttattcctatatttaatgaaaatgatgctgaagtaacaaggaaagctccatatgaggattcttcgggaatattttgggataatgacagtttagcaggcctactggctttgcagctaaaggctgacctccttgttctattgagcgatgtagatggtctttatagtggccctcctagtgatccacgttctttactaatccatacatacttggaaaaaggtcatcagggacagattacttttggagacaagtcgagggttggaagagggggtatgactgcgaaagtaaaatctgcagtttattcatctcaggctggcattcctgttgttattactagtgggtatgctactggaagtatcttaaaggtccttaatggggagcgtattggcactctttttcatcgagatgcctataaatgggtacaagttaaagaagttggcgcacgtgaaatggcagttgcagcaagggaaagttccaggcggcttcaggcaatgtcttcacaagacaggaagaagattttactggacatagccaatgcactggaaacaaatgaagaactgattaaaattgaaaatgatgctgatgttgaggcagcacaactggctggatatgaaaaatcattggtttcaaggctggttctaaagcctggaaagatttcaagccttgcaaactcaattcgtgtgcttgcaaacatggaaagaccaattggtcatgttttgaagaaaactgaagttgcagatggacttatcctagaaaagatgtcatgcccattaggtgtgctcctaattgtttttgagtctcgaccaaatgctctggtacagatagcttcattagcaatccgaagtgggaatggacttctcttgaaaggtggaaaagaggccaagcgatctaatgcaattcttgcaaaggttattactgaagccattccagacagtgttgggaagaagctaattggacttgtgacttcaagagaggagatccctaatctcctcaagcttgatgatgtgatcgaccttgtaatcccaagaggcagcaataaacttgtttctcaaataaaggattcaacaaaaattcctgttctgggccatgctgatggcatctgccacgtttatgtcgacaagtctgctaatatggatactgcaaagcacatcgtattggatgcaaaagtagattatcctgcagcctgtaatgcaatggaaacacttcttgtacacaaggatttagtgcagactggtggcctcaatcagcttatcgtagagctccgcaatgaaggggttactttatatggtggaccaaaggcaagtgccttgctgaatcttccagaggctcactcttttcatcatgagtataattcaatggcttgcactgttgagattgttgatgatgtacattctgccattgatcatattcaccgacatggaagtgcacacgattgcatcattgcagaagaccttgaagttgctgaagtgtttttgcgccaagttgatagtgctgctgtctttcacaatgctagcacaagattttgtgatggggctcgttttggacttggggccggaggttggataagtacaagtaggattcatgctcgaggtccagtcggagttgaaggattgttaacaacaagatggattctcagaggaaatggccaagtggtgaatggcgataaaggggttacttacttacacccacaaggagcttactttgcagccctaagcctatcccatagtttgcttggtggcgatttattgaataatgtaggattgggtacttttgatttcagtttttgtaacggtagaagggtcaactggaccttggaccttaaagaggtaatttatcaataaaacaatatatgtatcctataataaaaaaaaaaaaaaaa

SEQ ID NO: 21059 - protein, 762 aa, Vitis vinifera
MHMDAMDPTRAFVKDVKRLVIKFGTAVVTRSDGRLALGRLGALCEQIKELNSQGYQVIVVTSGAVGLGRQRLRYRSLLNSSFADLQKPQAELDGKACAAVGQNNLMALYDTLFSQLDVTSAQLLVTDNDFRDEAFRNQLTQTVDSLLALRVIPIFNENDAEVTRKAPYEDSSGIFWDNDSLAGLLALQLKADLLVLLSDVDGLYSGPPSDPRSLLIHTYLEKGHQGQITFGDKSRVGRGGMTAKVKSAVYSSQAGIPVVITSGYATGSILKVLNGERIGTLFHRDAYKWVQVKEVGAREMAVAARESSRRLQAMSSQDRKKILLDIANALETNEELIKIENDADVEAAQLAGYEKSLVSRLVLKPGKISSLANSIRVLANMERPIGHVLKKTEVADGLILEKMSCPLGVLLIVFESRPNALVQIASLAIRSGNGLLLKGGKEAKRSNAILAKVITEAIPDSVGKKLIGLVTSREEIPNLLKLDDVIDLVIPRGSNKLVSQIKDSTKIPVLGHADGICHVYVDKSANMDTAKHIVLDAKVDYPAACNAMETLLVHKDLVQTGGLNQLIVELRNEGVTLYGGPKASALLNLPEAHSFHHEYNSMACTVEIVDDVHSAIDHIHRHGSAHDCIIAEDLEVAEVFLRQVDSAAVFHNASTRFCDGARFGLGAGGWISTSRIHARGPVGVEGLLTTRWILRGNGQVVNGDKGVTYLHPQGAYFAALSLSHSLLGGDLLNNVGLGTFDFSFCNGRRVNWTLDLKEVIYQ

SEQ ID NO: 21060 - DNA, 2181 bp, Arabidopsis thaliana
  CDS (1)..(2181)
atgacggagatcgatcgttcacgcgcgttcgccaaagacgttaagcgtatcgtcgtcaaggttgggactgcagttgttactgggaaaggtggaagattggctcttggacgtttaggagctatctgtgaacagcttgcggagttaaactcagatggatttgaggtcattttggtgtcatctggtgccgttggtcttggtcgacaaaggcttcgatacagacaattagtcaacagcagttttgcagatttacagaagccacaaatggaacttgatgggaaggcttgtgctggtgttgggcagagcagtctcatggcttactatgagactatgtttgaccagttggatgtgacggttgctcaaatgcttgtgaccgatagcagttttagagataaggatttcaggaagcaacttagtgaaactgtcaaagcgatgctgaggatgagggttattccagttttcaatgagaatgatgctataagcactcgcagagccccctacaaggattctactggtatattttgggataatgacagcttagccgctcttctgtcgctagagctgaaagctgatcttttgattcttctaagtgatgttgagggcctttacactggccctccaagtgattctacctcaaaattaatacacacattcattaaagaaaaacaccaggacgagattacttttggcgaaaagtccaaattaggacgagggggtatgactgcaaaagttaaagctgctgttaatgcagcttatggtggcgttcctgttatcataaccagtggatatgcagctgagaatataagtaaagtccttagaggactgcgtgttggtaccctgttccatcaagatgctcatttatgggctccggtcgtagatactacttctcgtgacatggcagttgctgcaagggaaagctcaagaaagcttcaggccttatcttcagaagataggaaacaaattctacacgacattgccaatgcccttgaagtaaatgagaaaacaattaaagctgagaatgatttagatgttgctgcagcacaagaagctggatatgaagagtctttggtagctcgcttagttatgaagcctgggaagatctcaagccttgcagcttccgttcgccagctagccgaaatggaagatccaataggccgtgtattaaagaaaactcaggttgcagatgatcttattttagagaagacctcatcaccaataggtgttcttctgattgtttttgaatcccggcctgatgcacttgttcagatagcttcgcttgcaatccggagtggaaatggtcttctgctgaagggtggaaaggaggctcgtcgatcaaatgctatcttacacaaggtgatcactgatgcaattccggagactgttggaggtaaactcataggacttgtgacctcaagagaggagattcctgatttgctcaagcttgatgacgttattgatcttgtgatcccaagaggcagcaacaagcttgtttctcaaataaaaaactcgacgaaaatcccagtgctaggccatgctgatggaatctgtcatgtatatgttgataagtctggtaaactggacatggcaaagcgcattgtttccgatgcaaagttggactatccagcagcctgtaatgcgatggaaacccttcttgtacataaagatttggagcagaatggttttctcgatgatcttatttatgttctgcaaaccaaaggcgtcactttgtatggtgggccaagagcaagtgcaaaactgaatattccggaaacaaaatcatttcaccacgagtacagttccaaggcctgcaccgttgaaattgtagaagacgtatatggtgctatagatcatattcaccaacatggaagtgcacacactgattgcatagtgacggaagatagtgaagtagcagaaatattcctccgccaagtggacagtgctgctgttttccacaatgcaagcacaagattctctgatggttttaggttcggacttggtgctgaggtgggaataagcacaagcaggattcatgcccgtggtccagttggagttgaaggattattgacaacaagatggataatgagaggaaagggacaagttgtggatggagacaatggaatcgtttacacccataaggatcttcctgtcttacaaaggacagaggctgttgagaatggaatttag

SEQ ID NO: 21061 - protein, 726 aa, Arabidopsis thaliana
MTEIDRSRAFAKDVKRIVVKVGTAVVTGKGGRLALGRLGAICEQLAELNSDGFEVILVSSGAVGLGRQRLRYRQLVNSSFADLQKPQMELDGKACAGVGQSSLMAYYETMFDQLDVTVAQMLVTDSSFRDKDFRKQLSETVKAMLRMRVIPVFNENDAISTRRAPYKDSTGIFWDNDSLAALLSLELKADLLILLSDVEGLYTGPPSDSTSKLIHTFIKEKHQDEITFGEKSKLGRGGMTAKVKAAVNAAYGGVPVIITSGYAAENISKVLRGLRVGTLFHQDAHLWAPVVDTTSRDMAVAARESSRKLQALSSEDRKQILHDIANALEVNEKTIKAENDLDVAAAQEAGYEESLVARLVMKPGKISSLAASVRQLAEMEDPIGRVLKKTQVADDLILEKTSSPIGVLLIVFESRPDALVQIASLAIRSGNGLLLKGGKEARRSNAILHKVITDAIPETVGGKLIGLVTSREEIPDLLKLDDVIDLVIPRGSNKLVSQIKNSTKIPVLGHADGICHVYVDKSGKLDMAKRIVSDAKLDYPAACNAMETLLVHKDLEQNGFLDDLIYVLQTKGVTLYGGPRASAKLNIPETKSFHHEYSSKACTVEIVEDVYGAIDHIHQHGSAHTDCIVTEDSEVAEIFLRQVDSAAVFHNASTRFSDGFRFGLGAEVGISTSRIHARGPVGVEGLLTTRWIMRGKGQVVDGDNGIVYTHKDLPVLQRTEAVENGI

SEQ ID NO: 21062 - DNA, 2154 bp, Actinidia chinensis
  CDS (1)..(2154)
atggacgcagtcgattcaacgcgagcgttcgtcaaaggcgtgaagcgtgtcatcatcaaggttgggactgctgttgtcactcgagctgatggaagactggcacttggaagacttggagcactttgtgagcagattcatgaactgaattctcaaggatttgaggttattttggttacatcaggtgctgttggtgttggccgccaacggttaagataccggaaattggtcaacagcagctttgctgacctccaaaagccacaaattgaacttgatgggaaggcatgtgcagctgttgggcaaaatggtctattggctctctatgatacattgtttagtcagctggatgtgacatcagctcagctactcgttactgataatgattttagggatccagaattcaggaagcaacttactgaaactgtagaatcactattgaatttgaaggtgatcccaatatttaatgaaaatgatgctgtcagcaccaggaaagctccatatgaggacgcttctggtatattctgggataatgacagtttagcagctctattagctttggagctaaaggctgaccttcttgtccttctgagtgatgtggagggcctttatagcggcccaccaagtgatccacagtcaaagttgatccacacttacattaaggaaatgtttgagggactgattacttttggggacaaatccagggtgggaagagggggcatgactgccaaagtaaaagctgctgtttatgcagcccatgctggcatccctgttgttatcaccagtggctatgctacgaacaatatcataaaagtacttcaaggagagcgtattggtaccctctttcatcgagatgcacagaaatgggctccagtgggagatgttggtgcacgggacatggctgttgcagctagggagagttccagacgactacaggccatgtctccgcaagataggagtaaaattttgcttgacgtggctgatgccttagaagcaaatgaaaaactgatcagaatagaaaatgaagctgatctcgctgctgcacagcaggctggctatgaaaagtcattgatatctcgtctagctctaaagtctgggaagatttcaagtcttgcaaaatcaattcgcgtgcttgcgaacatggaagagcccattggtcatgttttgaagagaactgagattacagatggactggtcttagagaagacatcatctcccttgggtgttctcctgattatttttgagtctcgaccagatgcgctagttcagatagcttcattagcgatcagatctggaaatgggttggttttgaaagggggaaaagaggctaaaagatctaatgcaatcttgcacaaggttattacttctgccatccctgaaaatgttggtccaaggcttattggacttgtgacttctagagaggagattcccgatttgcttaagctcgatgatgtaattgatcttgtgattccaagaggcagcaataaacttgtctctcaaatcaaggaatcaacgaaaattcctgttctgggtcatgctgatggaatttgccatgtgtacgttgataagtctgctaatatggatatggcaaagaaagttgttttggatgcaaaaacggattatccagcagcctgtaatgcaatggaaactctccttgttcacaaagatttggtacagaatggttgccttgacgagcttattgtagaacttcaaattaaaggtgttgttatacatggtggaccaagggcaagctccttgctgcacattccagaggcacgatcacttcatcatgaatacagttcacttgcttgcaccattgagattgtggatgatgtgtatgccgccattgatcacatacatcgtcatggcagtgcacacactgatagcattataacagaggaccatgaagtcgcagaaatctttctacgtcaagttgacagttcttctgtacttcacaatgcaagcacaagatttagtgacggggctcgtttcgggctaggtgcagaggttgggataagtacaagtaggatacatgcacgtggacctgtcggtgttgaaggattgctaacaacaagatggatcgccagaggtagcgggcaagttgtggatggtgataaaggtatcgtttacacccataaagaccttacttcacatgcttga

SEQ ID NO: 21063 - protein, 717 aa, Actinidia chinensis [sequence omitted]

SEQ ID NO: 21064 - DNA, 2992 bp, Mesembryanthemum crystallinum
  CDS (195)..(2354)
ccaccaccattttcaatcgaaaaaactcgctaccgagtcgcctcgtagttttctctctctctctctctctctctctctctctctctctctctcgagaagctcccgatttcggggctgactgtgactcagcttagccttcaccgagttgaactcggaactcggttttcttgttcttcgttcagccacgagtcgacatggacgcgactagagctttcgttaaggacgttaagcgcgtcgtcgtcaaggttggaactgctgttgttacgaggagtgatgggagactggctcttggaagactaggctcactctgtgagcagctcaaggaactgaactctgatggatatgaagtaattttggtgacttcgggtgctgttagtgccggtcgtcagaggcttaggttcaggaaattggttaacagcagtttcgctgatcttcaaaaaccgcaagtcgaacttgatgggaaagcatgtgctgctgttgggcagaatggtcttatggctctttatgacaccttgtttagtcagttggatctgactgctgctcagctgcttgtgacggacaacgactttagagatccaagttttagaacacaactaactgaaacagtgtatcagttgttggatctaaaagttgtacctgtgttaaatgaaaatgatgcagtaagtaccaggaaagccccttatgaggattcatccggtatattctgggataatgatagtttagcggcactgcttgctttggaactaaaagcagatctccttattttgttgagtgatgtggatggtctttataatggcccaccaagcgatccacgatcaaagcttatctcaacatatgtcaaagagaagcatcaaggagaaatcacttttggagataaatctaggttgggcagagggggtatgactgccaaagttaaagcagctgtttatgctgcttatgctggaattcctgtaattatcgctagtggcaaggcaaccgacaatattatcaaagtaattgatggtcagtgtgttggcaccctatttcacaaagatgctcatttatgggttcaagttaaagaaactggtgtgcgtgacatggcagttgcagcaagagagagttctaggaggcttcaggcagtgtcttcagaagaaagaaaaaagattttgctagacatagctgatgctttggaggcaaatgaagaaaagatcctggctgaaaatgaagctgatgttgctgcggcacaatatgcgggatatgataggtcactggttgctcggttagccatgaaccctgacaagatttctagccttgcaaaatcaattcgtgttcttgctgatatggaggaacctattggtagaattttgaagagaactgagattgcagatggactcatcttggagaaaacatcatgccccttgggtgtactcctgattgtgtttgagtctcgtccagatgctttagttcagattgcttcattggctatacgaagtggaaatgggcttcttttgaagggtggaaaggaggcaaagagatcaaatgccatcttacacaaggttatcacttctgccataccagacaaagttggtgagaaattaattggtctagtcacctcaagagatgagattcctgatctccttaagcttgatgatgtgattgatctcgtcattccaagaggaagcaataagcttgtttctcagattaaggaatcaacaagaattcctgtcctgggtcatgctgatggaatttgtcatgtctatgttgacaaatctgctaatatggatatggcaaagcgcattgttctagatgcgaaaacggactatcctgcggcatgtaatgctatggaaacacttcttgtacacaaggacctagcagagaatggaggcttaaatgacctaattgttgatcttagaactgaaggtgttactatgtttggtggaccaagaattgatgccttgcaagagttcaatattcaagctactcagacattcaatagagagtacagttcaccagcttgtacagtggaaatagtagatgatgtgtatgctgccattgaacatattaaccaccatggaagtgcacacactgactgcattattgcagaagatcacaaagttgcagaaacgtttttgcagctagttgacagtgctgctgtacttcataatgcaagtacaagattctgtgatggattccgttttggattgggtgccgaggttggaataagtacaagtaggattcatgctcgaggtcctgttggggttgaagggttattaaccacaagatgggttctcaagggaagcggacaagttgtgcatggtgacaaaggtgtggtatatacccacaaggacctgccattggtggcgcaaaactcttgaaagtttttattacgctccttcattccttagacccccatagtagtgcagtttgtgtgggggaaaaaaggggttcgtatttttctcgtcctctctcccgctgcctttttgggtagtctgtgtatgtccccaagtctctctagctggccttctcaagataaggctctattgtcacttttcttttactaccaataaaatgtttagtagtaaatctctaaacaaaggctgtcagtttttacgttattttcacgcgtggaagagttgcagatatgttgtcaattgttcattgttttctagctagtcttgaatatcctttgctttcattgagtcagtcttgaagaatcttgaagaaccatgtacgctgcgatctgtgcaagtgatcatataacagtctatttggacttcagaatgaggagactctaggtgtgtgaattcattgtcagatctacattgggggacgagaatccgctttaagaaattccgtttttagtttgttttctcaatcggaaaaatccatatatttgtaactctggttaatactacgccagtcatcgtcatttctatgatgtattccgagcaatataaaagaatggtatacagagtagatggtgaatggaatttaaagtctgatgtttcagtgt

SEQ ID NO: 21065 - protein, 719 aa, Mesembryanthemum crystallinum [sequence omitted]

SEQ ID NO: 21066 - DNA, 2151 bp, Oryza sativa subsp
  CDS (1)..(2151)
atggcgagcgtcgacccgtcccggagcttcgtgagggacgtgaagcgcgtcatcatcaaggtgggcactgcagttgtctccagacaagatggaagattggctttgggcagggttggagctctgtgcgagcaggttaaggaactgaactctttaggatacgaagtgattttggtcacctcaggtgctgttggagtggggcgacagcgacttaggtaccggaagcttgtcaatagcagctttgctgatctgcaaaagccacagatggagttagatggaaaggcttgtgccgctgttggtcagagtggactgatggctctttacgatatgttgtttaaccaactggatgtctcgtcatctcaacttcttgtcaccgacagtgattttgagaacccaaagttccgggagcaactcactgaaactgttgagtcattattagatcttaaagttataccaatatttaatgaaaatgatgccatcagcactagaaaggctccatatgaggattcatctggtatattctgggataatgacagtttagcaggactgttggcactggaactgaaagctgatctccttattctgctcagtgatgtggatgggttgtatagtggtccaccaagtgaaccatcatcaaaaatcatacacacttatattaaagaaaagcatcagcaagaaatcacttttggagacaaatctcgtgtaggtagaggaggcatgacagcaaaagtgaaggctgctgtcttggcttcaaatagcggcacacctgtggttattacaagtgggtttgaaaatcggagcattcttaaagttcttcatggggaaaaaattggtactctctttcacaagaatgcgaatttgtgggaatcatctaaggatgttagtactcgtgagatggctgttgccgcaagagattgttcaaggcatctacagaatttgtcatcagaggaacgaaaaaagatattgctagatgttgcagatgctttggaggcaaatgaggatttaataaggtctgagaatgaagctgatgtagctgcggcccaagttgctggatatgagaagcctttggttgctagattgactataaaaccaggaaagatagcaagccttgcaaaatctattcgtacccttgcaaatatggaagaccctataaaccagatacttaaaaagacagaggttgctgatgatttagttcttgagaaaacatcttgcccattaggtgttctcttaattgtttttgagtcccgacctgatgccttggttcagattgcatctttggcaattcgaagtggtaatggtcttctcctaaaaggtggaaaagaagctatcagatcaaacacgatattgcataaggttataactgatgctattcctcgtaatgttggtgaaaaacttattggccttgttacaactagagatgagatcgcagatttgctaaagcttgatgatgtcattgatcttgtcattccaagaggaagtaataagcttgtctctcaaatcaaggcgtcaactaagattcctgttcttgggcatgctgatggtatatgccacgtatatattgacaaatcagctgacatggatatggcaaaacatattgtaatggatgcaaaaattgattacccagcagcctgcaatgcaatggagaccttactagttcataaggatcttatgaagagtccaggccttgacgacatattagtagcactaaaaacagaaggagttaatatttatggtggacctattgcgcacaaagctctgggatttccaaaagctgtttcatttcatcatgagtatagttctatggcctgcactgttgagtttgttgatgatgttcaatcagcaattgaccatattcatcgttatggaagtgctcatacagattgtatcgtcactacagatgataaggtagcagagacttttctacgcagagttgatagtgctgctgtatttcataatgcaagtacgagattctctgatggggctcgttttggattgggtgctgaggttggcataagcacagggcgtatccatgcccgtggaccagtgggtgttgaaggtctcttaactacacgatggatcttgcgagggcgtgggcaagtggtgaatggtgacaaggatgtcgtgtacacccataagagtcttcctttgcaatga

SEQ ID NO: 21067 - protein, 716 aa, Oryza sativa subsp
MASVDPSRSFVRDVKRVIIKVGTAVVSRQDGRLALGRVGALCEQVKELNSLGYEVILVTSGAVGVGRQRLRYRKLVNSSFADLQKPQMELDGKACAAVGQSGLMALYDMLFNQLDVSSSQLLVTDSDFENPKFREQLTETVESLLDLKVIPIFNENDAISTRKAPYEDSSGIFWDNDSLAGLLALELKADLLILLSDVDGLYSGPPSEPSSKIIHTYIKEKHQQEITFGDKSRVGRGGMTAKVKAAVLASNSGTPVVITSGFENRSILKVLHGEKIGTLFHKNANLWESSKDVSTREMAVAARDCSRHLQNLSSEERKKILLDVADALEANEDLIRSENEADVAAAQVAGYEKPLVARLTIKPGKIASLAKSIRTLANMEDPINQILKKTEVADDLVLEKTSCPLGVLLIVFESRPDALVQIASLAIRSGNGLLLKGGKEAIRSNTILHKVITDAIPRNVGEKLIGLVTTRDEIADLLKLDDVIDLVIPRGSNKLVSQIKASTKIPVLGHADGICHVYIDKSADMDMAKHIVMDAKIDYPAACNAMETLLVHKDLMKSPGLDDILVALKTEGVNIYGGPIAHKALGFPKAVSFHHEYSSMACTVEFVDDVQSAIDHIHRYGSAHTDCIVTTDDKVAETFLRRVDSAAVFHNASTRFSDGARFGLGAEVGISTGRIHARGPVGVEGLLTTRWILRGRGQVVNGDKDVVYTHKSLPLQ

SEQ ID NO: 21068 - DNA, 2239 bp, Solanum lycopersicum
  CDS (44)..(2197)
acgaggcacatttctgctcctacatttctcttcttccctagaaatggagacagttgattcaactcgagcatttgtgaagaacgtcaaacgactcattgtcaaggttgggactgcagttgtgactcgagctgatggaagattagcacttggaagattaggagccctctgtgagcagcttcaggagcttaattcgcaagggtatgaagttattttggtgacttctggtgctgtaggtgttggtcgtcagcggcttagatataggaagttgctcaacagcagttttcttgatcttcaaaagccacaaactgagcttgatggcaaggcttgtgctgctgtgggccagaatggcctcatggctctgtatgattctttgttcagtcagttggatgtgacatcagctcagcttctggtgactgataatgactttagagatccagattttaggagacaactcaatgacacagtaaattcgttgctttctctaaaagttatacctatattcaatgagaatgatgctatcagtacgcggagagctccttatgaggactcttctggaatattttgggataatgacagtctggcagctcttctagctttggaattaaaagctgatcttctagttctgttgagtgatgtagacggtctttacagtggtcctccccgtgatccagattcaaagttgatttacacatacattaaggaaatacatgagagagtgattacttttggagacaagtccagggtgggaagaggaggcatgactgccaaagtaaaagctgctatgtatgctgcttatgctggcattcctgttgtcataaccagtggctttgcgacagataacatcatcaaagtgctgcatggggaacgtataggcacactctttcattgtgatgccaataaatgggcctcaattggagagactgatgctcgtgagatggcagtggctgcaagggcatgttccagacgtcttcaggcactgtcttcccaagaaaggagtaaaatattgcaggatatagctgatgcactggaagcaaatgaaaaggcaatcctcgctgagaatgaagctgatgtggttgctgctcaacaggccggatatgagaagtctttgatatctcgtctggctttaaatccaggaaaaatttctagtcttgcaaactcagttcgtgtgctgtctaacatggatgagccccttggtcacactttaaaaagaacggagattgctgatggattcatcttggagaaatcatcatctccattaggcgttgtattgattatttttgagtcacgacctgatgcacttgtacagatagcttctctagcagtccgaagtgggaacggcctcatgttgaaaggaggaaaggaggccaaaagatcaaacgccatcttacacaaggtgattacctcggcaattcctgtaagtgtaggtgaaagacttattggactagtgacttctagagaagagatccctgaattacttaagcttgacgatgtgattgatcttgttatcccaagaggtagcaataaacttgtttctcaaatcaaggcatcaacaaaaattcctgttctaggccatgctgatggaatttgccatgtttatgttgacaagtctgctgacatggatatggctaagcgcattactgttgatgcaaaaatcgattatcctgcagcctgcaatgcgatggaaacacttcttgtgcataaggatttggcacaaaatggaggtcttaatgatctgattgtggaacttcaaacaaaaggggtttctttatatggtggacccaaagctagctccctgctcatgattccagaggcacgtacatttcgtcacgaatatagttcactagcttgcactgtggaagttgttgaagatgtatatgctgcgatagatcatatacatcagcatggaagtgcccacaccgatagcatcattactgaagatcaggaagttgctgaagtttttttacgtcaggttgacagtgctgctgtatttcacaacgcaagtacaagatttagtgatggattccgctttggacttggtgcagaggtgggcattagtactggtcgtattcatgctcgtggcccagttggagttgaaggattgctaacaactaaatggcttgcaaggggaagtggacaaattgttgatggtgataaatcaattgtgtatagtcacaaagaccttactcagcaagggtgattatccagttgtgtatttaggaagattttgtatggtgctcgt

SEQ ID NO: 21069 - protein, 717 aa, Solanum lycopersicum
METVDSTRAFVKNVKRLIVKVGTAVVTRADGRLALGRLGALCEQLQELNSQGYEVILVTSGAVGVGRQRLRYRKLLNSSFLDLQKPQTELDGKACAAVGQNGLMALYDSLFSQLDVTSAQLLVTDNDFRDPDFRRQLNDTVNSLLSLKVIPIFNENDAISTRRAPYEDSSGIFWDNDSLAALLALELKADLLVLLSDVDGLYSGPPRDPDSKLIYTYIKEIHERVITFGDKSRVGRGGMTAKVKAAMYAAYAGIPVVITSGFATDNIIKVLHGERIGTLFHCDANKWASIGETDAREMAVAARACSRRLQALSSQERSKILQDIADALEANEKAILAENEADVVAAQQAGYEKSLISRLALNPGKISSLANSVRVLSNMDEPLGHTLKRTEIADGFILEKSSSPLGVVLIIFESRPDALVQIASLAVRSGNGLMLKGGKEAKRSNAILHKVITSAIPVSVGERLIGLVTSREEIPELLKLDDVIDLVIPRGSNKLVSQIKASTKIPVLGHADGICHVYVDKSADMDMAKRITVDAKIDYPAACNAMETLLVHKDLAQNGGLNDLIVELQTKGVSLYGGPKASSLLMIPEARTFRHEYSSLACTVEVVEDVYAAIDHIHQHGSAHTDSIITEDQEVAEVFLRQVDSAAVFHNASTRFSDGFRFGLGAEVGISTGRIHARGPVGVEGLLTTKWLARGSGQIVDGDKSIVYSHKDLTQQG

SEQ ID NO: 21070 - DNA, 2148 bp, Glycine max
  CDS (1)..(2148)
atggagaacacagatccttgtagacattttctcaaggatgttaagcgcatcataatcaaggttgggactgctgtggtcactcgccaagatggaaggttagctgttggaaaattaggggcactctgtgagcagattaaggagctgaattctcttggttatgagattattttggtgtcatcaggtgctgttggccttggtcgccaaaggcttagatacagaaaattaattaacagcagctttgctgaccttcagaagccgcaagttgaacttgatggcaaggcttgtgctgctgttggacaaaacagccttatggctctttatgatgttttgtttagtcagctggatgtgacatctgctcagcttcttgtgacggacaatgattttagagacaaagatttcagaatgcagctcagcgaaactatgaaatcattgttagcattaaaagttattcccatattcaacgagaacgatgcagttagtactaggaaagctccatatgaggattcttctggcatattttgggataatgacagtttatcagctttattggcattggaattaaaagctgatcttcttattttgttgagtgatgtagagggtctctatagtggccctccaagtgatccacgttcaaaacttattcatacatacattaaggaaaagcatcaaagtgaaattacttttggagacaagtctagagtgggaagaggtggaatgactgctaaagtaaaggcttctattcatgcagctgaagctggcattcctgttatcattactagtggttatgcagctgaaaatatcattaaagttctccaaggacaacggattggaaccctcttccataaagatgcacataaatgggccccggtaaaagaggttgatgctcgtgagatggcagttgcagctagggactgttccagacggcttcaggccttatcttcagaagagaggaaacaaattttgctaaaaatagctgatgccctggaagcacatcaaaatgagatcaggattgaaaatgaagctgatgttgctgatgcaaaagaagcaggatatgaaaaatccttggttgctagactggttttaaagaatgagaagcttgcaagccttgctaacaacattcgaattattgcaaacatggaagatccaattggtcgagtgttaaaacgaactgagcttgcagaggggctgattttggagaaaacatcatcttctttaggagttcttttaattgtttttgagtctcgccctgatgcactagtacagatagcttctttggcaatccgaagtgggaatgggcttctcttgaaaggaggcaaggaggctaagcgatcaaatgcaattttgcacaaagtaattactgaagccataccagatattgttggctcaaaacttattggacttgtgacatcaagagcagaaattcctgagctacttaagttggatgatgtaattgatctagtgattccaagaggcagcaacaaacttgtcactcagatcaagagttccactaaaattcctgtcctgggtcatgcagatggaatttgtcatgtctatgttgataaatctgctgatctggagatggcaaggcggattgtactagatgcaaaaatagactatccagcaggctgcaatgccatggaaactcttcttgttcacaaggacttggtagagaaaggttggctcaatagtattattattgacctacggacagaaggtgttacattgtatggaggacccaaggcaagtcctttgttaaatattccaatggctcgtatgttacatcatgagtacaattcgttggcatgcacagttgaaattgtggatgatgtttatgcagctattgatcatataaatctttatggaagtgcacatactgattccgttgttgcagaagatcatgaagtagccaatgtgtttctacgccaagtagacagtgctgctgttttccacaatgctagtacaagattcagtgatggggcacgatttggactaggtgcagaggttggaataagtacaagcaggattcatgctcggggtccagtaggagttgatggattgttaacaaccagatggattctcaaaggaagtggacaaatagtggatggtgacaaagcagttaactacactcacagagacctttctatatga

SEQ ID NO: 21071 - protein, 715 aa, Glycine max
MENTDPCRHFLKDVKRIIIKVGTAVVTRQDGRLAVGKLGALCEQIKELNSLGYEIILVSSGAVGLGRQRLRYRKLINSSFADLQKPQVELDGKACAAVGQNSLMALYDVLFSQLDVTSAQLLVTDNDFRDKDFRMQLSETMKSLLALKVIPIFNENDAVSTRKAPYEDSSGIFWDNDSLSALLALELKADLLILLSDVEGLYSGPPSDPRSKLIHTYIKEKHQSEITFGDKSRVGRGGMTAKVKASIHAAEAGIPVIITSGYAAENIIKVLQGQRIGTLFHKDAHKWAPVKEVDAREMAVAARDCSRRLQALSSEERKQILLKIADALEAHQNEIRIENEADVADAKEAGYEKSLVARLVLKNEKLASLANNIRIIANMEDPIGRVLKRTELAEGLILEKTSSSLGVLLIVFESRPDALVQIASLAIRSGNGLLLKGGKEAKRSNAILHKVITEAIPDIVGSKLIGLVTSRAEIPELLKLDDVIDLVIPRGSNKLVTQIKSSTKIPVLGHADGICHVYVDKSADLEMARRIVLDAKIDYPAGCNAMETLLVHKDLVEKGWLNSIIIDLRTEGVTLYGGPKASPLLNIPMARMLHHEYNSLACTVEIVDDVYAAIDHINLYGSAHTDSVVAEDHEVANVFLRQVDSAAVFHNASTRFSDGARFGLGAEVGISTSRIHARGPVGVDGLLTTRWILKGSGQIVDGDKAVNYTHRDLSI

SEQ ID NO: 21072 - DNA, 2184 bp, Brassica napus
  CDS (1)..(2184)
atggaggatgagatagatcgttcccgcgctttcgccaaggacgttaagcgtatcgttgtcaaggttgggacagcagttgttacagggaaaggtggaagattggctcttggccgcttaggagctatctgcgagcagcttgctgaattgaactcggatggttttgaggtcattttggtgtcttctggtgcggttggtcttggtcgtcagaggcttagatacagacaattagtcaacagcagctttgcagaccttcagaagccacagactgaacttgatgggaaggcttgtgctggtgttggacagagcagtctcatggcttactatgagactatgtttgaccagatggatgtgacggtggctcaaatgctggtgactgatagcagtttcagagataaggatttcaggaagcaacttagtgagacagtcaaagctatgatgaaaatgagagttattccagttttcaacgagaatgatgctataagcactcgaaaagccccttacaaggattctactggtatattttgggataatgacagcttagctgctctactggcgcttgagctgaaagctgatcttttgattcttcttagtgacgttgagggtctttacactggtcctccaagcgatcctaagtcaaagttaatccacacatacgttaaagagaaacaccaggaagagattacctttggcgagaagtccagattaggacgaggtggtatgactgcaaaagttaaagctgctgttaatgcagcttatggtggcattcctgttatcataaccagtgggtatgcagctgagaatatagctaaagttcttaaaggactgcgtgttggtaccttgttccaccaagatgcacatttgtgggctagagtcgtagatactacttctcgtgacatggcagttgctgcaagggaaagttctagaaagcttcaggctttgtcttcagaagataggaaaaacattctactagatatagccaacgctctagaagcaaatgagaaaataattaaggctgagaatgatttagatgttgctgcagcacaagaagctggatatgaagagtctttggtagctcgtttagttatgaagcctggaaagatctcaagccttgcagcttctattcgccagctagctgaaatggaagacccaattggtcgtgttctaaagaaaactgaggttgcagatggtcttattttagagaagacatcatcaccattaggtgttcttctgattgtttttgaatcccgtcctgatgcacttgttcagatagcttcacttgcaatcaggagtggaaatggtcttctgctgaagggtggaaaagaggctcgtcgatcaaatgctatcttacacaaggtgatcactgatgcaattccgaagactgttggaggtaaactcataggacttgtgacttcgagagatgagattcctgatttgctcaagcttgatgatgttattgatcttgtgatcccaagaggcagcaacaagcttgtttctcagataaaaaactcaacgaaaatcccagtgctagggcatgcggatggtatctgtcatgtgtatgttgacaagtcttgtaaagtagacatggcaaaacgtgtagtttcagatgcaaagttagactatccagcagcctgtaacgctatggaaacccttcttgtacataaggatctagagcagaatggtgtgctaaacgagcttatatatgccctgcaagccaatggtgtcactttgtatggtgggccaaaagcaagtggtaaactgaacattccggaagcaaaatcatttcatcacgagtacagttccaaggcctgcaccgttgaaattgtagaagacgtacacggtgctatagatcatattcaccaacacgggagtgcacacactgattgcatagtgacagaagatagtgaagtggcagagatcttcctccgccaagtggacagtgctgctgttatccacaatgcaagcacaagattctgtgatggttttcgatttggacttggtgctgaggtgggaataagcacaagcaggatccatgcccgtggtccagttggagtagaaggattattgacaaccagatggataatgagaggagaaggacaagtggtggatggagacaaaggagttgcttacactcataaggacctccctgtcttggaaaggacaaaggcagtggagaacgggcattag

SEQ ID NO: 21073 - protein, 727 aa, Brassica napus
MEDEIDRSRAFAKDVKRIVVKVGTAVVTGKGGRLALGRLGAICEQLAELNSDGFEVILVSSGAVGLGRQRLRYRQLVNSSFADLQKPQTELDGKACAGVGQSSLMAYYETMFDQMDVTVAQMLVTDSSFRDKDFRKQLSETVKAMMKMRVIPVFNENDAISTRKAPYKDSTGIFWDNDSLAALLALELKADLLILLSDVEGLYTGPPSDPKSKLIHTYVKEKHQEEITFGEKSRLGRGGMTAKVKAAVNAAYGGIPVIITSGYAAENIAKVLKGLRVGTLFHQDAHLWARVVDTTSRDMAVAARESSRKLQALSSEDRKNILLDIANALEANEKIIKAENDLDVAAAQEAGYEESLVARLVMKPGKISSLAASIRQLAEMEDPIGRVLKKTEVADGLILEKTSSPLGVLLIVFESRPDALVQIASLAIRSGNGLLLKGGKEARRSNAILHKVITDAIPKTVGGKLIGLVTSRDEIPDLLKLDDVIDLVIPRGSNKLVSQIKNSTKIPVLGHADGICHVYVDKSCKVDMAKRVVSDAKLDYPAACNAMETLLVHKDLEQNGVLNELIYALQANGVTLYGGPKASGKLNIPEAKSFHHEYSSKACTVEIVEDVHGAIDHIHQHGSAHTDCIVTEDSEVAEIFLRQVDSAAVIHNASTRFCDGFRFGLGAEVGISTSRIHARGPVGVEGLLTTRWIMRGEGQVVDGDKGVAYTHKDLPVLERTKAVENGH

SEQ ID NO: 21074 - DNA, 2154 bp, Brassica napus
  CDS (1)..(2154)
atggaggagatagatcgttcacgcgctttcgctaaagacgtcaaacgtatcgtcgttaaggttggaacagctgttgtaactgggaaaggtggaagattggctcttggtcgcttaggagctctgtgtgaacagcttgcggaattaaactcggatggatttgaggtgatcttggtgtcatcaggtgcggttggccttggccgccaaaggcttcgctacagacagttagtcaatagcagctttgcggatctccagaagcctcagcatgaactagatgggaaggcttgtgctggtgttggacaaagcagtctcatggcttattatgagactatgtttgaccagctggatgtgacggctgctcagctgctggtgaatgacagtagtttcagagacaaggagttcaggaagcaacttaatgaaactgtcaagtccatgcttgatttgagggttattccaattttcaatgagaacgatgctattagcaccagaagagctccttatcaggattcatctggcatcttttgggataacgacagcttagctgctctattggcgctggagctgaaagctgatcttctgattcttctgagtgatgtcgaaggtctttacactggccctccaagtgatcctaactcaaagctgatccacacattcatcaaggagaaacatcaagatgagattacatttggcgacaagtcaagactaggaagaggaggcatgactgcaaaagtgaaagctgcagtgaatgcggcttatgctggtatccctgtcatcataaccagtggctatgcagctgagaacatagataaagtccttagaggactgcgtgttggaaccttgttccatcaagatgctcgtctatgggctcctatcacggattctactgctcgtgacatggcagtagctgcgagggaaagttccaggaagcttcaggccttatcttcggaggataggaagcagatactgtatagtatcgcagatgctcttgaagcaaatgagaaaacaatcagagctgagaatgagttagatgtggctacagcacaagaatctggacttgaagagtcattggtggctcgtttggttatgacacctacaaagatctcgagccttgcagcttcagttcgtaagctagctgatatggaagatccaattggccgtgtcctaaagaaaactgaggtggcagatggtctcgttttggagaagacctcatccccattaggcgtactcttgattgtttttgagtctcgacctgatgcgcttgtccagatagcttcacttgctatccggagtggaaatggtcttctattgaagggtggaaaggaggccaggcgatcaaatgctatcttacacaaggtgatcactgatgctattccagagactgtgggtggtaaactcattggacttgtgacttcaagggaagagattcctgatttgctcaagcttgatgacgttattgatcttgtgatcccaagaggcagcaacaagcttgtttcccagattaaaaacactacaaaaatccctgttcttggtcatgctgatggaatctgtcatgtatatgtcgacaaggcttgtaatgtggatatggctaaacgcatagtttctgatgcaaagttagactatccagcagcttgtaatgccatggaaactcttcttgtgcataaggatctggagcagaacgctgtgctcaatgagcttatatttgctctgcagagcaatggagtcactttgtatggtggaccaaaggcaagtaaaatacttaacctaccagaagcacggtcgttcaatcacgagtactgttccaaggcgtgcactgttgaagttgtagaagatgtttatggtgctatagatcacattcaccgacatggaagtgcacacacagactgtattgtgacagaggatcccgaagttgcagagctattccttcgccaagtggacagcgctgctgtgttccacaacgcaagcacaagattctctgatggttttcgatttggacttggtgctgaggtggggataagcacagggaggatccatgctcgtggtccagtgggagtggagggattacttacaaccagatggataatgagaggaaaaggacaagttgtggatggagacaatgggattacttacacccatcaagacattcccatccaagcttag

SEQ ID NO: 21075 - protein, 717 aa, Brassica napus
MEEIDRSRAFAKDVKRIVVKVGTAVVTGKGGRLALGRLGALCEQLAELNSDGFEVILVSSGAVGLGRQRLRYRQLVNSSFADLQKPQHELDGKACAGVGQSSLMAYYETMFDQLDVTAAQLLVNDSSFRDKEFRKQLNETVKSMLDLRVIPIFNENDAISTRRAPYQDSSGIFWDNDSLAALLALELKADLLILLSDVEGLYTGPPSDPNSKLIHTFIKEKHQDEITFGDKSRLGRGGMTAKVKAAVNAAYAGIPVIITSGYAAENIDKVLRGLRVGTLFHQDARLWAPITDSTARDMAVAARESSRKLQALSSEDRKQILYSIADALEANEKTIRAENELDVATAQESGLEESLVARLVMTPTKISSLAASVRKLADMEDPIGRVLKKTEVADGLVLEKTSSPLGVLLIVFESRPDALVQIASLAIRSGNGLLLKGGKEARRSNAILHKVITDAIPETVGGKLIGLVTSREEIPDLLKLDDVIDLVIPRGSNKLVSQIKNTTKIPVLGHADGICHVYVDKACNVDMAKRIVSDAKLDYPAACNAMETLLVHKDLEQNAVLNELIFALQSNGVTLYGGPKASKILNLPEARSFNHEYCSKACTVEVVEDVYGAIDHIHRHGSAHTDCIVTEDPEVAELFLRQVDSAAVFHNASTRFSDGFRFGLGAEVGISTGRIHARGPVGVEGLLTTRWIMRGKGQVVDGDNGITYTHQDIPIQA

SEQ ID NO: 21076 - DNA, 2142 bp, Glycine max
  CDS (1)..(2142)
atggcggaccgttctcggagcttcatgaaggacgtgaagcgcgtggtcatcaaggtcggcaccgccgtggtgactcgcgaagagggaaggttagcggtcggaagattaggcgctctctgcgagcagattaagcaactcaactctctcggatacgacattattcttgtctcctccggcgccgtcggcatcggccgccaacgactccgctaccgcaaattgatcaacagtagcttcgccgaccttcaaaaaccccaactcgaactcgacggcaaggcatgcgccgccgtcgggcagaacagtctcatggctctctatgatattctcttcactcagctcgatgtgacgtctgctcagcttcttgtgacggataacgattttcgagatgaggatttcaggaagcaacttactgagaccgtgaaatcgttgttatcgcttaaggttattccggtgttcaatgagaacgatgctgtcagtactaggaaggctccctatgaggattcttctggtatattttgggataatgatagtttatctgctctgttggccttggagttaaaagccgatcttcttgttttgttgagtgatgtagaaggtttttatagtggccctccaagtgacccacattcaaagcttattcatacatatattaaggagaagcatcagaatgaaattacttttggtgacaagtctagagtgggaagaggtggaatgactgccaaagtaaaagctgctgttcatgcagctgatgccggcattcctgttgttattaccagcggttttgcagctgagaatattattaatgttctccaaggacaacgtataggaactctcttccataaagatgcacatgagtgggtccaagtaaaagaggtcgatgctcgtgagatggcagttgcagccagggaatgttccagaaggctccaggccatatcttcagaagaaaggaaacaaattttacttaaaatagctgatgatctggaagctaatgaaaaaataatcaggactgaaaatgaagctgatgttgctgtggcacaacaagcaggatatgaaaattccttggtggctaggctagctttaaaacctgggaagattgcaagccctgcaaacaacgtgcgaattatcgccaacatggaagatccaattggtcaagtattaaaacgaactgagctttcagatgggctaattttagagaagacatcatctcctttgggagtgctccttattgtttttgagtcacgccctgatgctcttgtacagatagcttcgctggcaatccgaagtgggaatgggcttctcttgaaaggtggcaaagaagctaagcggtcaaatgcaattttgcacaaagtaattactgaggccataccagatactgttggtggaaaacttataggacttgtgacctcaagggaagaaatccctgagctacttaagctggatgacgtaattgatctggtgattccaagaggcagcaacaaacttgtttctcaaatcaagagttccactaaaattcctgttttaggtcacgctgatggagtttgccatgtctatgttgataagtctgctaatgtggagatggcgagggggattgtacttgatgcaaaattagattatccagcagcctgcaatgccatggaaacacttcttatccacaaggatttgatagagaaaggttggctaaatgatattgttgttgacctacgaactgaaggtgttaaattatatggaggaccaagggcaagttctctgttaaatattccacaagcacattcatttcatcatgagtacagttcgctggcttgcactgttgaaattgtggatgacgtgtatgcagctattgaacatataaatctttatggaagtgcacacactgattccatcattgcagaagataaagaagttgctaatgtgtttctacgccaagtagacagtgctgctgtttttcacaatgcaagcaccagatttagtgatggggcacgatttggactgggcgcagaggttggaattagtacgagcaggattcatgctcgaggtccagtaggagttgagggattgttaacaacaagatggatactaaaaggaagtggacaagtagtagatggtgataaagggattgtctatacccacaaagacattgcaacttaa

SEQ ID NO: 21077 - protein, 713 aa, Glycine max
MADRSRSFMKDVKRVVIKVGTAVVTREEGRLAVGRLGALCEQIKQLNSLGYDIILVSSGAVGIGRQRLRYRKLINSSFADLQKPQLELDGKACAAVGQNSLMALYDILFTQLDVTSAQLLVTDNDFRDEDFRKQLTETVKSLLSLKVIPVFNENDAVSTRKAPYEDSSGIFWDNDSLSALLALELKADLLVLLSDVEGFYSGPPSDPHSKLIHTYIKEKHQNEITFGDKSRVGRGGMTAKVKAAVHAADAGIPVVITSGFAAENIINVLQGQRIGTLFHKDAHEWVQVKEVDAREMAVAARECSRRLQAISSEERKQILLKIADDLEANEKIIRTENEADVAVAQQAGYENSLVARLALKPGKIASPANNVRIIANMEDPIGQVLKRTELSDGLILEKTSSPLGVLLIVFESRPDALVQIASLAIRSGNGLLLKGGKEAKRSNAILHKVITEAIPDTVGGKLIGLVTSREEIPELLKLDDVIDLVIPRGSNKLVSQIKSSTKIPVLGHADGVCHVYVDKSANVEMARGIVLDAKLDYPAACNAMETLLIHKDLIEKGWLNDIVVDLRTEGVKLYGGPRASSLLNIPQAHSFHHEYSSLACTVEIVDDVYAAIEHINLYGSAHTDSIIAEDKEVANVFLRQVDSAAVFHNASTRFSDGARFGLGAEVGISTSRIHARGPVGVEGLLTTRWILKGSGQVVDGDKGIVYTHKDIAT

SEQ ID NO: 21078 - DNA, 2151 bp, Zea mays
  CDS (1)..(2151)
atggccaccgcagaccagagccgtattttcatgaaggacgtcaaacgcgtcatcatcaaggtgggcactgcagttgtcacgaggcatgatgggcgagtatccacaggcaattttggtgttctttgtgaacaggtgaaagagataaatgctctaggatacgaggtgatcattgtgtcctcaggtgctgttggtgtggggaagcagaggctcaattacaggaagcttgtcaatagcagctttgctgatatgcaaaagccacagacggagctggatggaaaggcttgcgctgccgttggacagagtggcctcatggctctctatgatatgctatttactcaacttgatgtatcctcttcccaacttcttgtgacagacagtgattttgagaatccaaacttcagggagaggcttcgtgaaactgttgagtcactattagatcttaaagttgtaccaatatttaatgaaaatgatgccatcagcaccagaaaggctccgtatgaggattcatcgggtatattatgggataatgacagattagccggtcttttggctatagaacttaaagcagatcttcttgttctactcagtgacgtggatggcctctacagcggtccacctagtgaacctcaatcaaagatgatacatacatacatcaaagataaatatcataacgaaattacttttggggataagtcacgtgtaggtagaggaggaatgacagctaaagtgaaggctgctctcgtggcttcaaacagtggcacacctgttgttataacaagtggatctgcatctgggagcatcattagagttctccaaggagagaagattggtactctctttcataaggacgcgagtttgtgggaaccatccagtgatgttagtgcatgtgagatggctgttactgcaagagaatgttcaaggcgtctgcagaatttgtcgtcggatgagcgcaataaaatattgctagacgtggcggatgctttggagaaaaatgagaatctaattaggaccgagaatgaagccgatgtagctgcagcgcaagatgctggatatgagaaatttttggttgatagattgaccctaaagccaggaaagatatcagccctcgcgaaatccattcgcactcttgcacgtatggaagacccaatcaaccaaatactcaaaagaacagagattgctgaaaatttaattctcgagaaaacatcatgtcctttgggtgtcctattggttatttttgagtccaggcctgatgccttggtccagattgcatctttagcgattcgaagtggcaatggtcttctcttgaaaggtggaaaagaagccatgagatcaaacaaagtattgcataaggttataactggtgccattcctagcaacgtgggtgaaaaacttattggccttgttacaagtagagacgaaattgctgatttactaaagcttcatgatgtaattgatcttgtcattccaagaggcagcaataagctggtttcacaaatcaagacatcaactaagatccctgttcttggtcatgctgatggtatctgtcatgtatacatcgacaaatcagctaacatgaatatggcaaaacaaatagtgatggatgccaaaattgattacccagcagcctgcaatgctatggagacattgcttgttcataaagatcttataaaggctccaggtcttgatgacttactgctatcactcaaaacaaaaggagttgctatttttggggggcctgttgcacatgaagtattgtgcattccagaagcaaattcattccatcatgaatatagttctatggcctgcacaattgagtttgttgatgatgtacagtcagcgattgaccatatacattgttatggaagtgcacatacagattgcattgtcactacagatgataaagtagcagaaacttttctgcgtcaagttgatagtgctgctgtgtttcataatgcaagcacacgattctctgacggggctcgttttggattgggtgctgaggttggcataagcacagggcgtatacatgctcgtgggcccgtgggtgttgaaggtctcttaacaacgcgctggatcatgcgagggagcgggcaagtggtgaacggtgacaatgatatcgcatacacccataagaaccttccattgccatga

SEQ ID NO: 21079 - protein, 716 aa, Zea mays
MATADQSRIFMKDVKRVIIKVGTAVVTRHDGRVSTGNFGVLCEQVKEINALGYEVIIVSSGAVGVGKQRLNYRKLVNSSFADMQKPQTELDGKACAAVGQSGLMALYDMLFTQLDVSSSQLLVTDSDFENPNFRERLRETVESLLDLKVVPIFNENDAISTRKAPYEDSSGILWDNDRLAGLLAIELKADLLVLLSDVDGLYSGPPSEPQSKMIHTYIKDKYHNEITFGDKSRVGRGGMTAKVKAALVASNSGTPVVITSGSASGSIIRVLQGEKIGTLFHKDASLWEPSSDVSACEMAVTARECSRRLQNLSSDERNKILLDVADALEKNENLIRTENEADVAAAQDAGYEKFLVDRLTLKPGKISALAKSIRTLARMEDPINQILKRTEIAENLILEKTSCPLGVLLVIFESRPDALVQIASLAIRSGNGLLLKGGKEAMRSNKVLHKVITGAIPSNVGEKLIGLVTSRDEIADLLKLHDVIDLVIPRGSNKLVSQIKTSTKIPVLGHADGICHVYIDKSANMNMAKQIVMDAKIDYPAACNAMETLLVHKDLIKAPGLDDLLLSLKTKGVAIFGGPVAHEVLCIPEANSFHHEYSSMACTIEFVDDVQSAIDHIHCYGSAHTDCIVTTDDKVAETFLRQVDSAAVFHNASTRFSDGARFGLGAEVGISTGRIHARGPVGVEGLLTTRWIMRGSGQVVNGDNDIAYTHKNLPLP

SEQ ID NO: 21080 - DNA, 2154 bp, Zea mays
  CDS (1)..(2154)
atggccaccgcggaccggacccggactttcatgaaggacgtcaaacgcgtcatcatcaaggtgggcactgcagtcgtcacgaggggtgatgatgggcgactggctgtgggccggttggggtgtctttgtgagcaggtaaaagagctgaatgtcttaggatacgaggtgatccttgtgacctcaggtgctgttggtgtggggaagcagaggctcaagtacaggaagcttgtcaatagcagctttgctgatctgcaaaagccacagacggagctggatggaaaggcttgcgctgctgttggtcagagtggcctcatggctctttatgatatgctatttacccaacttgatgtgtcctcctcgcaacttcttgtgacagatagtgattttgagaatccaaactttcgggagaggctctgtgaaactgttgagtcactattagaccttaaagttgtaccaatatttaatgaaaatgatgccatcagcactagaaaggctccatatgaggattcatctggtatattctgggataatgacagtttagctggtcttttggctattgaacttaaagcagatctccttgttctactaagtgacgtagatggtctatacagcggtccaccaagcgaaccgggatcaaagatcattcatacctacatcaaagataaacattacagtggaataacttttggggataagtcacgtgtaggtagaggaggaatgacagctaaagtgaaggctgcttttgtggcttcgaacagtggcacacctgttgttattacaagtggatttgcatctcagagcattgttagagttctccaaggagagaagattggtactctcttccataaggatgcaagtctgtgggagccatccaaggatgttagtgctcgtgagatggctgttgctgcaagagaatgttcaaggcgtctgcagaatttatcatcggatgaacgcaagaaaatattgttagacattgcagatgctttggaacaaaatgaggatctaattagaactgaaaatgaagctgatgtatctgcagcacaagatgctggatatcagaaatctttggttgatagattgacattgaagccagaaaagatagcaagccttgcgaaatccatacgcactcttgcaaatatggaagacccaatcaaccagatactcaaaagaacagaggttgctgaagacttagtgctcgaaaaaacatcttgccctctgggtgtgctgttgattgtttttgagtccaggcctgatgccttagtccagattgcgtctttagcaattcgaagtggcaatggtcttctcctgaaaggtggaaaagaagccatgagatcgaacacagtattacataaggttataactggcgcaattcctaacaacgtgggtcaaaaacttattggccttggtacaagtagagacgaaatcgctgatttactaaagcttcatgatgtaattgatcttgtcattccaagaggcagcaataagctggtttcgcaaatcaaagcatcaactaagatacctgtcctcggtcatgcggatggtatttgtcatgtatacattgacaaatcagctgacatgaatatggcaaaacgaatagtgatggatgccaaaactgattacccagcagcctgcaatgctatggagacattgcttgttcataaagaccttataaaggctccaggtcttgatgatatactcctatcactcaaaacagaaggagttgctatttatggagggcctgttgcacatgaagtactgtgtattccgaaagcagattcattccatcatgaatatagctctatggcctgcacaattgagttcgttgatgatgtacagtcagcaattaaccatatacatcgttatggaagtgcacatacagattgcattatcaccacagatgataaagtagcagaaacttttctgcgtcaagttgatagtgctgctgtatttcataatgcgagtacacgattctctgatggggctcgttttggattgggtgccgaggttggcataagcacagggcgtatacatgctcgcgggcctgtgggtgttgaaggtctcttaacaacacgctggatcatgcgaggaagtgggcaagtggtgaatggtgacaagaatgttgcatacacccataagaaccttcccttacaatga

SEQ ID NO: 21081 - protein, 717 aa, Zea mays
MATADRTRTFMKDVKRVIIKVGTAVVTRGDDGRLAVGRLGCLCEQVKELNVLGYEVILVTSGAVGVGKQRLKYRKLVNSSFADLQKPQTELDGKACAAVGQSGLMALYDMLFTQLDVSSSQLLVTDSDFENPNFRERLCETVESLLDLKVVPIFNENDAISTRKAPYEDSSGIFWDNDSLAGLLAIELKADLLVLLSDVDGLYSGPPSEPGSKIIHTYIKDKHYSGITFGDKSRVGRGGMTAKVKAAFVASNSGTPVVITSGFASQSIVRVLQGEKIGTLFHKDASLWEPSKDVSAREMAVAARECSRRLQNLSSDERKKILLDIADALEQNEDLIRTENEADVSAAQDAGYQKSLVDRLTLKPEKIASLAKSIRTLANMEDPINQILKRTEVAEDLVLEKTSCPLGVLLIVFESRPDALVQIASLAIRSGNGLLLKGGKEAMRSNTVLHKVITGAIPNNVGQKLIGLGTSRDEIADLLKLHDVIDLVIPRGSNKLVSQIKASTKIPVLGHADGICHVYIDKSADMNMAKRIVMDAKTDYPAACNAMETLLVHKDLIKAPGLDDILLSLKTEGVAIYGGPVAHEVLCIPKADSFHHEYSSMACTIEFVDDVQSAINHIHRYGSAHTDCIITTDDKVAETFLRQVDSAAVFHNASTRFSDGARFGLGAEVGISTGRIHARGPVGVEGLLTTRWIMRGSGQVVNGDKNVAYTHKNLPLQ

SEQ ID NO: 21082 - DNA, 2196 bp, Zea mays
  CDS (1)..(2196)
atggggagaggagggatcggaggcgcggcggccatggccatggccatggagaccgccgatcctgcccgtgcattcgtgaaggacgtcaagcgaatcattatcaaggtgggcacggctgttgtcactggcatgaatggccgattggccatggggaggctcggttctctctgtgaacaggtgaagcaactgaattttcaagggtatgaggtgattctggtaacctcaggagctgttggtgttgggaggcagaggctccaataccgtaaacttatccatagcagcttcgcagatctgcaaaatcctcagatgaactttgatggaaaggcatgtgctgctgttggtcaaagtgtcctgatggcgatctatgacacattatttagccaacttgatgtaacgtcatctcaacttcttgtgacggatcgtgatttcaaggatccaagttttggggaccagctccgtgagactgttttttcactgttagatcttaaagtagtacccttatttaatgagaatgatgccatcagtacccggagacagccatatgaggattcatctggtatattctgggataatgacagtctagcagctctgttggcagcagaacttaatgctgatcttcttatcatgcttagtgatgtggaaggactctatagtggtccaccaagcgatcctcagtcaaagattatccacacatatgtcaatgaaaagcatgggaagctaattagttttggagagaagtctagtgttggaagaggtggcatgcaagctaaagtgtctgctgctgctaatgctgcatcaaaaggtgtacctgttgtcattgcaagtgggtttgcaacggatagcatcattacagttctcaaaggcgaaaagatcggtacacttttccacaacgaagcaaatttgtgggcatgttccaaggaagctacagcccgagagatggcagttgcggcaagagactgttcgaggcgtctacagaagttgtcatcagaggaacgcaaacagattttgctagatattgctgatgctctggaagcaaatgaggatgcaattaggtctgaaaatgatgccgatgttgaggcagcacaagttgctggttatgaaaagtcgttggttgctaggatgaccctaaagccaggaaagataacaaatcttgcaagatccattcgtaaaactgctgacatggaggaccctatttcccatacattgaaaagaacagaggttgctaaagatctggtttttgagaaagcatattgcccattgggtgttcttctcattatttttgagtctcgtcctgatgcattggtccagattgcatctctagcgatccgaagtggtaatggtctccttttgaaaggagggaaagaagttatgagatcaaatgcaatattacacaaggtcataactggagttattcccgatactgttggcaaaaagctcataggccttgtgactagcaaagaggaaattgctgatctactagcgcttgatgatgtaattgatcttgtcattccgagaggtagtaagtctctagtttcccaaatcaaagcaacaactaagattccagttttaggtcatgctgatggtatctgccatgtttacattgacaaatcagccgacatggatatggcaaaacggatagtattggatgctaagattgattatccagcagcatgtaatgcaatggaaacactacttgttcataaagatcttaacaagagtgagggacttgatgatctattagtggaacttgaaaaggaaggagtagttatttatggtggacctgttgcacatgacaagttgaaagtaccaaaggtagactcatttcgtcatgagtatagctcaatggcatgcacagtcgaatttgttgatgatgtgcagtcagctatcgatcacataaatcgttatggaagtgcacacacagactgcatcatcacaactgatagaagtgctgcagaggcctttctgcagcaagttgatagtgccgctgtgtttcataatgcaagcacaaggttttgtgatgggacgcgttttgggctaggtgctgaggttggcataagtacagagcgcatacatgcccgcggacctgttggagttgatggacttctaactactcgctgcattttgcgcggtagtggacaagtggtgaatggtgacaagggagtggtttacacccacaaggatcttcctttgcaatga

SEQ ID NO: 21083 - protein, 731 aa, Zea mays
MGRGGIGGAAAMAMAMETADPARAFVKDVKRIIIKVGTAVVTGMNGRLAMGRLGSLCEQVKQLNFQGYEVILVTSGAVGVGRQRLQYRKLIHSSFADLQNPQMNFDGKACAAVGQSVLMAIYDTLFSQLDVTSSQLLVTDRDFKDPSFGDQLRETVFSLLDLKVVPLFNENDAISTRRQPYEDSSGIFWDNDSLAALLAAELNADLLIMLSDVEGLYSGPPSDPQSKIIHTYVNEKHGKLISFGEKSSVGRGGMQAKVSAAANAASKGVPVVIASGFATDSIITVLKGEKIGTLFHNEANLWACSKEATAREMAVAARDCSRRLQKLSSEERKQILLDIADALEANEDAIRSENDADVEAAQVAGYEKSLVARMTLKPGKITNLARSIRKTADMEDPISHTLKRTEVAKDLVFEKAYCPLGVLLIIFESRPDALVQIASLAIRSGNGLLLKGGKEVMRSNAILHKVITGVIPDTVGKKLIGLVTSKEEIADLLALDDVIDLVIPRGSKSLVSQIKATTKIPVLGHADGICHVYIDKSADMDMAKRIVLDAKIDYPAACNAMETLLVHKDLNKSEGLDDLLVELEKEGVVIYGGPVAHDKLKVPKVDSFRHEYSSMACTVEFVDDVQSAIDHINRYGSAHTDCIITTDRSAAEAFLQQVDSAAVFHNASTRFCDGTRFGLGAEVGISTERIHARGPVGVDGLLTTRCILRGSGQVVNGDKGVVYTHKDLPLQ

SEQ ID NO: 21084 - DNA, 2235 bp, Zea mays
  CDS (1)..(2235)
atggccaccgcagaccagagccgtattttcatgaaggacgtcaaacgcgtcatcatcaagctggggaatcctattcctatctatggaattgaacgtgtccgggaaaaagagggaattgaacgggctgaacgggcccgggaaaaagtgggcactgcagttgtcacgaggcatgatgggcgagtatccacaggcaattttggtgttctttgtgaacaggtgaaagagataaatgctctaggatacgaggtgatcattgtgtcctcaggtgctgttggtgtggggaagcagaggctcaattacaggaagcttgtcaatagcagctttgctgatatgcaaaagccacagacggagctggatggaaaggcttgcgctgccgttggacagagtggcctcatggctctctatgatatgctatttactcaacttgatgtatcctcttcccaacttcttgtgacagacagtgattttgagaatccaaacttcagggagaggcttcgtgaaactgttgagtcactattagatcttaaagttgtaccaatatttaatgaaaatgatgccatcagcaccagaaaggctccatatgaggattcatcgggtatattctgggataatgacagtttagccggtctttcggctagagaacttaaagcagatctccttggtctactaagtgacgtagatggcctatacagcggtccaccaagcgaaccgcgatcaaagatcattcatacctacatcaaagataaacatcacagcggaataacttttggggataagtcacgtgtaggtagaggaggaatgacagctaaagtgaaggctgctctcgtggcttcgaacagtggcacacctgttgttattacaagtggatctgcatctcagagcatcgttagagttctccaaggagagaagattggtactctcttccataaggacgcaagtctgtgggagccatccaaggatgttagtgctcgtgagatggctgttgctgcaagagaatgttcaaggcgtctgcagaatttatcatcggatgaacgcaagaaaatattgctagacatggcagatgctttggaacaaaatgaggatctaattagaaccgaaaatgaagccgatgtagctgcagcacaagatgctggatatcagaaatctttggttgatagattgacactgaagccagaaaagatagcaaccctcgcgaaatccatacgcactcttgcaaatatggaagacccaatcaaccagatactcaaaagaacagaggttgctgaagacttagtgctcgaaaaaacatcttgccctctgggtgtcctgttgattgtttttgagtccaggcctgatgccttagtccagattgcgtctttagcagttcgaagtggcaatggtcttctcctgaaaggtggaaaagaagccatgagatcgaacacagtattacataaggttataactggcgcaattcctgacaacgtgggtcaaaaacttattggccttgttacaagtagagacgaaatcgctgatttactaaagcttcatgatgtcattgatcttgtcattccaagaggcagcaataagctggtttcgcaaatcaaagcatcaactaagatacctgtcctcggtcatgcggatggtatctgtcatgtatacatcgacaaatcagctgacatgaatatggcaaaacgaatagtgatggatgccaaaactgattacccagcagcctgcaatgctatggagacattgcttgttcataaagaccttataaaggctccaggtcttgatgacatactcctatcactcaaaacagaaggagtgcctatctatggacggccgcttccacatgaagtactgtgtattccgaaagcagattcattccatcatgaatatagctctatggcctgcacaattgagttcgttgatgatgtacagtcagcaattaaccatatacatcgttatggaagtgcacatacagattgcattatcaccacagatgataaagtagcagaaacttttctgcggcaagttgatagtgctgctgtatttcataatgcgagtacacgattctctgatggggctcgttttggattgggtgccgaggttggcataagcacagggcgtatacatgctcgcgggcctgtgggtgttgaaggtctcttaacaacacgctggatcatgcgaggaagtgggcaagtggtgaattgtgacaagaatgttgcatacacccataagaaccttcccttacaatga

SEQ ID NO: 21085 - protein, 744 aa, Zea mays
MATADQSRIFMKDVKRVIIKLGNPIPIYGIERVREKEGIERAERAREKVGTAVVTRHDGRVSTGNFGVLCEQVKEINALGYEVIIVSSGAVGVGKQRLNYRKLVNSSFADMQKPQTELDGKACAAVGQSGLMALYDMLFTQLDVSSSQLLVTDSDFENPNFRERLRETVESLLDLKVVPIFNENDAISTRKAPYEDSSGIFWDNDSLAGLSARELKADLLGLLSDVDGLYSGPPSEPRSKIIHTYIKDKHHSGITFGDKSRVGRGGMTAKVKAALVASNSGTPVVITSGSASQSIVRVLQGEKIGTLFHKDASLWEPSKDVSAREMAVAARECSRRLQNLSSDERKKILLDMADALEQNEDLIRTENEADVAAAQDAGYQKSLVDRLTLKPEKIATLAKSIRTLANMEDPINQILKRTEVAEDLVLEKTSCPLGVLLIVFESRPDALVQIASLAVRSGNGLLLKGGKEAMRSNTVLHKVITGAIPDNVGQKLIGLVTSRDEIADLLKLHDVIDLVIPRGSNKLVSQIKASTKIPVLGHADGICHVYIDKSADMNMAKRIVMDAKTDYPAACNAMETLLVHKDLIKAPGLDDILLSLKTEGVPIYGRPLPHEVLCIPKADSFHHEYSSMACTIEFVDDVQSAINHIHRYGSAHTDCIITTDDKVAETFLRQVDSAAVFHNASTRFSDGARFGLGAEVGISTGRIHARGPVGVEGLLTTRWIMRGSGQVVNCDKNVAYTHKNLPLQ

SEQ ID NO: 21086 - DNA, 2154 bp, Zea mays
  CDS (1)..(2154)
atggccaccgcggaccggacccggactttcatgaaggacgtcaaacgcgtcatcatcaaggtgggcactgcagtcgtcacgaggggtgatgatgggcgactggctgtgggccggttggggtgtctttgtgagcaggtaaaagagctgaatgtcttaggatacgaggtgatccttgtgacctcaggtgctgttggtgtggggaagcagaggctcaagtacaggaagcttgtcaatagcagctttgctgatctgcaaaagccacagatggagctggatggaaaggcttgcgctgctgttggtcagagtggcctcatggctctttatgatatgctatttacccaacttgatgtgtcctcctcgcaacttcttgtgacagatagtgattttgagaatccaaactttcgggagaggctctgtgaaactgttgagtcactattagaccttaaagttgtaccaatatttaatgaaaatgatgccatcagcactagaaaggctccatatgaggattcatctggtatattctgggataatgacagtttagctggtcttttggctattgaacttaaagcagatctccttgttctactaagtgatgtagatggtctatacagcggtccaccaagcgaaccgggatcaaagatcattcatacctacattaaagataaacattacagtggaataacttttggggataagtcacgtgtaggtagaggaggaatgacagctaaagtgaaggctgcttttgtggcttcgaacagtggcacacctgttgttattacaagtggatttgcatctcagagcattgttagagttctccaaggagagaagattggtactctcttccataaggatgcaagtctgtgggagccatccaaggatgttagtgctcgtgagatggctgttgctgcaagagaatgttcaaggcgtctgcagaatttatcatcggatgaacgcaagaaaatattgttagacattgcagatgctttggaacaaaatgaggatctaattagaactgaaaatgaagctgatgtatctgcagcacaagatgctggatatcagaaatctttggttgatagattgacattgaagccagaaaagatagcaagccttgcgaaatccatacgcactcttgcaaatatggaagacccaatcaaccagatactcaaaagaacagaggttgctgaagacttagtgctcgaaaaaacatcttgccctctgggtgtgctgttgattgtttttgagtccaggcctgatgccttagtccagattgcgtctttagcagttcgaagtggcaatggtcttctcctgaaaggtggaaaagaagccatgagatcgaacacagtattacataaggttataactggcgcaattcctgacaacgtgggtcaaaaacttattggccttgttacaagtagagatgaaatcgctgatttactaaagcttgatgatgtcattgatcttgtcattccaagaggcagcaataagctggtttcgcaaatcaaagcatcaactaagatacctgtcctcggtcatgcggatggtatttgtcatgtatacattgacaaatcagctgacatgaatatggcaaaacgaatagtgatggatgccaaaactgattacccagcagcctgcaatgctatggagacattgcttgttcataaagaccttataaaggctccaggtcttgatgatatactcctatcactcaaaacagaaggagttgctatttatggagggcctgttgcacatgaagtactgtgtattccgaaagcagattcattccatcatgaatatagctctatggcctgcacaattgagttcgttgatgatgtacagtcagcaattaaccatatacatcgttatggaagtgcacatacagattgcattatcaccacagatgataaagtagcagaaacttttctgcgtcaagttgatagtgctgctgtatttcataatgcgagtacacgattctctgatggggctcgttttggattgggtgccgaggttggcataagcacagggcgtatacatgctcgcgggcctgtgggtgttgaaggtctcttaacaacacgctggatcatgcgaggaagtgggcaagtggtgaatggtgacaagaatgttgcatacacccataagaaccttcccttacaatga

SEQ ID NO: 21087 - protein, 717 aa, Zea mays
MATADRTRTFMKDVKRVIIKVGTAVVTRGDDGRLAVGRLGCLCEQVKELNVLGYEVILVTSGAVGVGKQRLKYRKLVNSSFADLQKPQMELDGKACAAVGQSGLMALYDMLFTQLDVSSSQLLVTDSDFENPNFRERLCETVESLLDLKVVPIFNENDAISTRKAPYEDSSGIFWDNDSLAGLLAIELKADLLVLLSDVDGLYSGPPSEPGSKIIHTYIKDKHYSGITFGDKSRVGRGGMTAKVKAAFVASNSGTPVVITSGFASQSIVRVLQGEKIGTLFHKDASLWEPSKDVSAREMAVAARECSRRLQNLSSDERKKILLDIADALEQNEDLIRTENEADVSAAQDAGYQKSLVDRLTLKPEKIASLAKSIRTLANMEDPINQILKRTEVAEDLVLEKTSCPLGVLLIVFESRPDALVQIASLAVRSGNGLLLKGGKEAMRSNTVLHKVITGAIPDNVGQKLIGLVTSRDEIADLLKLDDVIDLVIPRGSNKLVSQIKASTKIPVLGHADGICHVYIDKSADMNMAKRIVMDAKTDYPAACNAMETLLVHKDLIKAPGLDDILLSLKTEGVAIYGGPVAHEVLCIPKADSFHHEYSSMACTIEFVDDVQSAINHIHRYGSAHTDCIITTDDKVAETFLRQVDSAAVFHNASTRFSDGARFGLGAEVGISTGRIHARGPVGVEGLLTTRWIMRGSGQVVNGDKNVAYTHKNLPLQ

SEQ ID NO: 21088 - DNA, 20 bp, Artificial sequence
  primer
atggaggagctagatcgttc

SEQ ID NO: 21089 - DNA, 21 bp, Artificial sequence
  primer
ttaagcttggatgggaatgtc

SEQ ID NO: 21090 - protein, 822 aa, Artificial sequence
  consensus sequence
  Variant (2)..(3): Xaa in position 2 to 3 is any amino acid
  Variant (5)..(5): Xaa in position 5 is any amino acid
  Variant (7)..(9): Xaa in position 7 to 9 is any amino acid
  Variant (13)..(15): Xaa in position 13 to 15 is any amino acid
  Variant (17)..(17): Xaa in position 17 is any amino acid
  Variant (19)..(20): Xaa in position 19 to 20 is any amino acid
  Variant (21)..(47): Xaa in position 21 to 47 is any or no amino acid
  Variant (51)..(51): Xaa in position 51 is any amino acid
  Variant (53)..(55): Xaa in position 53 to 55 is any amino acid
  Variant (56)..(56): Xaa in position 56 is any or no amino acid
  Variant (61)..(61): Xaa in position 61 is any amino acid
  Variant (64)..(64): Xaa in position 64 is any amino acid
  Variant (66)..(67): Xaa in position 66 to 67 is any amino acid
  Variant (71)..(72): Xaa in position 71 to 72 is any amino acid
  Variant (73)..(82): Xaa in position 73 to 82 is any or no amino acid
  Variant (86)..(87): Xaa in position 86 to 87 is any amino acid
  Variant (89)..(89): Xaa in position 89 is any amino acid
  Variant (91)..(91): Xaa in position 91 is any amino acid
  Variant (93)..(93): Xaa in position 93 is any amino acid
  Variant (95)..(95): Xaa in position 95 is any amino acid
  Variant (101)..(101): Xaa in position 101 is any amino acid
  Variant (103)..(103): Xaa in position 103 is any amino acid
  Variant (107)..(107): Xaa in position 107 is any amino acid
  Variant (110)..(110): Xaa in position 110 is any amino acid
  Variant (112)..(113): Xaa in position 112 to 113 is any amino acid
  Variant (117)..(117): Xaa in position 117 is any amino acid
  Variant (119)..(119): Xaa in position 119 is any amino acid
  Variant (121)..(121): Xaa in position 121 is any amino acid
  Variant (124)..(125): Xaa in position 124 to 125 is any amino acid
  Variant (126)..(133): Xaa in position 126 to 133 is any or no amino acid
  Variant (137)..(139): Xaa in position 137 to 139 is any amino acid
  Variant (144)..(144): Xaa in position 144 is any amino acid
  Variant (149)..(149): Xaa in position 149 is any amino acid
  Variant (153)..(153): Xaa in position 153 is any amino acid
  Variant (155)..(157): Xaa in position 155 to 157 is any amino acid
  Variant (159)..(159): Xaa in position 159 is any amino acid
  Variant (161)..(161): Xaa in position 161 is any amino acid
  Variant (164)..(166): Xaa in position 164 to 166 is any amino acid
  Variant (168)..(168): Xaa in position 168 is any amino acid
  Variant (173)..(174): Xaa in position 173 to 174 is any amino acid
  Variant (176)..(179): Xaa in position 176 to 179 is any amino acid
  Variant (182)..(183): Xaa in position 182 to 183 is any amino acid
  Variant (185)..(186): Xaa in position 185 to 186 is any amino acid
  Variant (188)..(191): Xaa in position 188 to 191 is any amino acid
  Variant (193)..(193): Xaa in position 193 is any amino acid
  Variant (195)..(195): Xaa in position 195 is any amino acid
  Variant (197)..(197): Xaa in position 197 is any amino acid
  Variant (206)..(206): Xaa in position 206 is any amino acid
  Variant (210)..(211): Xaa in position 210 to 211 is any amino acid
  Variant (214)..(214): Xaa in position 214 is any amino acid
  Variant (217)..(217): Xaa in position 217 is any amino acid
  Variant (219)..(222): Xaa in position 219 to 222 is any amino acid
  Variant (223)..(226): Xaa in position 223 to 226 is any or no amino acid
  Variant (236)..(236): Xaa in position 236 is any amino acid
  Variant (240)..(240): Xaa in position 240 is any amino acid
  Variant (248)..(248): Xaa in position 248 is any amino acid
  Variant (254)..(254): Xaa in position 254 is any amino acid
  Variant (258)..(258): Xaa in position 258 is any amino acid
  Variant (263)..(263): Xaa in position 263 is any amino acid
  Variant (265)..(265): Xaa in position 265 is any amino acid
  Variant (268)..(268): Xaa in position 268 is any amino acid
  Variant (272)..(279): Xaa in position 272 to 279 is any amino acid
  Variant (280)..(280): Xaa in position 280 is any or no amino acid
  Variant (282)..(282): Xaa in position 282 is any amino acid
  Variant (285)..(285): Xaa in position 285 is any amino acid
  Variant (289)..(289): Xaa in position 289 is any amino acid
  Variant (295)..(295): Xaa in position 295 is any amino acid
  Variant (299)..(299): Xaa in position 299 is any amino acid
  Variant (302)..(303): Xaa in position 302 to 303 is any amino acid
  Variant (305)..(307): Xaa in position 305 to 307 is any amino acid
  Variant (309)..(309): Xaa in position 309 is any amino acid
  Variant (312)..(312): Xaa in position 312 is any amino acid
  Variant (314)..(314): Xaa in position 314 is any amino acid
  Variant (317)..(321): Xaa in position 317 to 321 is any amino acid
  Variant (322)..(322): Xaa in position 322 is any or no amino acid
  Variant (324)..(326): Xaa in position 324 to 326 is any amino acid
  Variant (328)..(328): Xaa in position 328 is any amino acid
  Variant (330)..(332): Xaa in position 330 to 332 is any amino acid
  Variant (338)..(338): Xaa in position 338 is any amino acid
  Variant (339)..(339): Xaa in position 339 is any or no amino acid
  Variant (341)..(342): Xaa in position 341 to 342 is any amino acid
  Variant (344)..(347): Xaa in position 344 to 347 is any amino acid
  Variant (348)..(351): Xaa in position 348 to 351 is any or no amino acid
  Variant (353)..(353): Xaa in position 353 is any amino acid
  Variant (357)..(357): Xaa in position 357 is any amino acid
  Variant (360)..(361): Xaa in position 360 to 361 is any amino acid
  Variant (364)..(364): Xaa in position 364 is any amino acid
  Variant (365)..(401): Xaa in position 365 to 401 is any or no amino acid
  Variant (404)..(404): Xaa in position 404 is any amino acid
  Variant (408)..(409): Xaa in position 408 to 409 is any amino acid
  Variant (411)..(412): Xaa in position 411 to 412 is any amino acid
  Variant (415)..(417): Xaa in position 415 to 417 is any amino acid
  Variant (423)..(427): Xaa in position 423 to 427 is any amino acid
  Variant (429)..(430): Xaa in position 429 to 430 is any amino acid
  Variant (433)..(434): Xaa in position 433 to 434 is any amino acid
  Variant (436)..(438): Xaa in position 436 to 438 is any amino acid
  Variant (440)..(442): Xaa in position 440 to 442 is any amino acid
  Variant (444)..(447): Xaa in position 444 to 447 is any amino acid
  Variant (449)..(450): Xaa in position 449 to 450 is any amino acid
  Variant (453)..(455): Xaa in position 453 to 455 is any amino acid
  Variant (457)..(457): Xaa in position 457 is any amino acid
  Variant (460)..(461): Xaa in position 460 to 461 is any amino acid
  Variant (464)..(466): Xaa in position 464 to 466 is any amino acid
  Variant (468)..(469): Xaa in position 468 to 469 is any amino acid
  Variant (471)..(471): Xaa in position 471 is any amino acid
  Variant (474)..(474): Xaa in position 474 is any amino acid
  Variant (476)..(476): Xaa in position 476 is any amino acid
  Variant (478)..(480): Xaa in position 478 to 480 is any amino acid
  Variant (483)..(483): Xaa in position 483 is any amino acid
  Variant (486)..(486): Xaa in position 486 is any amino acid
  Variant (488)..(489): Xaa in position 488 to 489 is any amino acid
  Variant (491)..(491): Xaa in position 491 is any amino acid
  Variant (495)..(497): Xaa in position 495 to 497 is any amino acid
  Variant (504)..(505): Xaa in position 504 to 505 is any amino acid
  Variant (536)..(536): Xaa in position 536 is any amino acid
  Variant (540)..(541): Xaa in position 540 to 541 is any amino acid
  Variant (548)..(548): Xaa in position 548 is any amino acid
  Variant (552)..(553): Xaa in position 552 to 553 is any amino acid
  Variant (556)..(556): Xaa in position 556 is any amino acid
  Variant (563)..(564): Xaa in position 563 to 564 is any amino acid
  Variant (566)..(566): Xaa in position 566 is any amino acid
  Variant (569)..(570): Xaa in position 569 to 570 is any amino acid
  Variant (574)..(574): Xaa in position 574 is any amino acid
  Variant (591)..(592): Xaa in position 591 to 592 is any amino acid
  Variant (595)..(596): Xaa in position 595 to 596 is any amino acid
  Variant (599)..(599): Xaa in position 599 is any amino acid
  Variant (614)..(614): Xaa in position 614 is any amino acid
  Variant (617)..(621): Xaa in position 617 to 621 is any amino acid
  Variant (624)..(625): Xaa in position 624 to 625 is any amino acid
  Variant (628)..(628): Xaa in position 628 is any amino acid
  Variant (632)..(632): Xaa in position 632 is any amino acid
  Variant (651)..(655): Xaa in position 651 to 655 is any amino acid
  Variant (657)..(662): Xaa in position 657 to 662 is any amino acid
  Variant (664)..(666): Xaa in position 664 to 666 is any amino acid
  Variant (669)..(670): Xaa in position 669 to 670 is any amino acid
  Variant (672)..(672): Xaa in position 672 is any amino acid
  Variant (675)..(679): Xaa in position 675 to 679 is any amino acid
  Variant (680)..(681): Xaa in position 680 to 681 is any or no amino acid
  Variant (683)..(684): Xaa in position 683 to 684 is any amino acid
  Variant (686)..(686): Xaa in position 686 is any amino acid
  Variant (688)..(688): Xaa in position 688 is any amino acid
  Variant (690)..(691): Xaa in position 690 to 691 is any amino acid
  Variant (695)..(697): Xaa in position 695 to 697 is any amino acid
  Variant (701)..(701): Xaa in position 701 is any amino acid
  Variant (703)..(703): Xaa in position 703 is any amino acid
  Variant (705)..(705): Xaa in position 705 is any amino acid
  Variant (708)..(709): Xaa in position 708 to 709 is any amino acid
  Variant (712)..(712): Xaa in position 712 is any amino acid
  Variant (715)..(717): Xaa in position 715 to 717 is any amino acid
  Variant (719)..(727): Xaa in position 719 to 727 is any amino acid
  Variant (733)..(733): Xaa in position 733 is any amino acid
  Variant (735)..(735): Xaa in position 735 is any amino acid
  Variant (737)..(737): Xaa in position 737 is any amino acid
  Variant (739)..(741): Xaa in position 739 to 741 is any amino acid
  Variant (743)..(744): Xaa in position 743 to 744 is any amino acid
  Variant (748)..(748): Xaa in position 748 is any amino acid
  Variant (763)..(763): Xaa in position 763 is any amino acid
  Variant (766)..(766): Xaa in position 766 is any amino acid
  Variant (779)..(779): Xaa in position 779 is any amino acid
  Variant (790)..(790): Xaa in position 790 is any amino acid
  Variant (798)..(800): Xaa in position 798 to 800 is any amino acid
  Variant (802)..(802): Xaa in position 802 is any amino acid
  Variant (805)..(805): Xaa in position 805 is any amino acid
  Variant (807)..(807): Xaa in position 807 is any amino acid
  Variant (808)..(810): Xaa in position 808 to 810 is any or no amino acid
  Variant (813)..(815): Xaa in position 813 to 815 is any amino acid
  Variant (816)..(816): Xaa in position 816 is any or no amino acid
  Variant (818)..(818): Xaa in position 818 is any amino acid
  Variant (820)..(821): Xaa in position 820 to 821 is any amino acid
DXXRXFXXXVKRXXXKXGXXXXXXXXXXXXXXXXXXXXXXXXXXXXXTAVXTXXXXGRLAXGRXGXXCEQXXXXXXXXXXXXELNXXGXEXIXVXSGAVGXGXQRLXYRXLXXSSFXDXQXPQXXXXXXXXXXLDGXXXKACAXVGQSXLMAXYXXXFXQXDVXXXQXLVTDXXFXXXXFRXXLXXTXXXXLXLXVXPIFNENDAXSTRXXPYXDSXGXXXXXXXXIFWDNDSLAXLLAXELKADLLXLLSDVXGLYXGPPSXPXSKXIHTXXXXXXXXXIXFGXKSRXGRGGMXAKVXAAXXAXXXGXPVXIXSGXXXXXXIXXXLXGXXXGTLFHXXAXXWXXXXXXXXRXMAVXARXXSRXXXXXXXXXXXXXXXXXXXXXXXXXXXXXXXXXXXXXXLQXLSSXXRXXILXXXADALEXXXXXIXXENXXDXXXAXXXGXXXXLXXRLXXXPXKIXXLAXXXRXXAXMEXPXIXXXLKXTEXAXXLXLEKXXXPLGVLLXXFESRPDALVQIASLAIRSGNGLLLKGGKEAXRSNXXLHKVITXAIPXXVGXKLIGLVXXRXEIXXLLKXDDVIDLVIPRGSNKLVXXIKXXTKXIPVLGHADGICHVYXDKXXXXXMAXXIVXDAKXDYPAACNAMETLLVHKDLXXXXXLXXXXXXLXXXGVXXYXGPXXXXXXXLXXPXAXSXXHEYXXXACTXEXVXDVXXAIXHIXXXGXXXXXXXXXSAHTDXIXTXDXXXAXXFLRXVDSAAVFHNASTRFXDGXRFGLGAEVGISTXRIHARGPVGVXGLLTTRWXXXGXGQXVXXXXGDXXXXYXHXXL

SEQ ID NO: 21091 - protein, 60 aa, Artificial sequence
  protein pattern
  Variant (3)..(3): Xaa in position 3 is Gln, Arg or Ser
  Variant (4)..(4): Xaa in position 4 is any amino acid
  Variant (11)..(11): Xaa in position 11 is Phe, Ile or Leu
  Variant (12)..(12): Xaa in position 12 is His or Tyr
  Variant (19)..(19): Xaa in position 19 is Cys or Ser
  Variant (22)..(22): Xaa in position 22 is any amino acid
  Variant (29)..(29): Xaa in position 29 is any amino acid
  Variant (30)..(30): Xaa in position 30 is any or no amino acid
  Variant (32)..(32): Xaa in position 32 is any amino acid
  Variant (33)..(33): Xaa in position 33 is any or no amino acid
  Variant (36)..(36): Xaa in position 36 is Glu, Gly or Ser
  Variant (47)..(47): Xaa in position 47 is Asp or Glu
  Variant (48)..(48): Xaa in position 48 is any amino acid
  Variant (52)..(52): Xaa in position 52 is Asn or Thr
  Variant (53)..(53): Xaa in position 53 is Lys or Arg
  Variant (54)..(54): Xaa in position 54 is any amino acid
  Variant (55)..(55): Xaa in position 55 is Ile, Leu or Val
  Variant (56)..(56): Xaa in position 56 is any amino acid
  Variant (57)..(57): Xaa in position 57 is Lys or Arg
  Variant (59)..(59): Xaa in position 59 is any amino acid
FLXXVDSAAVXXNASTRFXDGXRFGLGAXXGXXSTXRIHARGPVGVXXLLTXXXXXXGXG

SEQ ID NO: 21092 - protein, 28 aa, Artificial sequence
  protein pattern
  Variant (2)..(6): Xaa in position 2 to 6 is any amino acid
  Variant (10)..(10): Xaa in position 10 is any amino acid
  Variant (15)..(15): Xaa in position 15 is Ala or Gly
  Variant (24)..(24): Xaa in position 24 is Ile or Val
  Variant (26)..(26): Xaa in position 26 is Glu or Lys
AXXXXXDAKXDYPAXCNAMETLLXHXDL

SEQ ID NO: 21093 - protein, 60 aa, Artificial sequence
  protein pattern
  Variant (3)..(4): Xaa in position 3 to 4 is any amino acid
  Variant (5)..(5): Xaa in position 5 is Cys or Ser
  Variant (6)..(6): Xaa in position 6 is Pro or Ser
  Variant (10)..(10): Xaa in position 10 is any or no amino acid
  Variant (12)..(12): Xaa in position 12 is Ile, Leu or Val
  Variant (14)..(14): Xaa in position 14 is any or no amino acid
  Variant (20)..(20): Xaa in position 20 is Asp or Asn
  Variant (24)..(24): Xaa in position 24 is Gln or Arg
  Variant (27)..(27): Xaa in position 27 is Ala or Ser
  Variant (30)..(30): Xaa in position 30 is Ile or Val
  Variant (37)..(37): Xaa in position 37 is Leu, Met or Val
  Variant (44)..(44): Xaa in position 44 is Ala or Val
  Variant (45)..(45): Xaa in position 45 is any amino acid
  Variant (49)..(49): Xaa in position 49 is any amino acid
  Variant (50)..(50): Xaa in position 50 is Ile or Val
  Variant (52)..(52): Xaa in position 52 is any amino acid
  Variant (57)..(57): Xaa in position 57 is Asp, Glu, Gly, Asn or Ser
  Variant (58)..(58): Xaa in position 58 is Ala or Val
EKXXXXLGVXLXIXFESRPXALVXIAXLAXRSGNGLXLKGGKEXXRSNXXLXKVITXXIP

SEQ ID NO: 21094 - protein, 45 aa, Artificial sequence
  protein pattern
  Variant (5)..(5): Xaa in position 5 is Arg or Ser
  Variant (7)..(7): Xaa in position 7 is Ala or Ser
  Variant (8)..(8): Xaa in position 8 is any amino acid
  Variant (10)..(10): Xaa in position 10 is any amino acid
  Variant (11)..(11): Xaa in position 11 is Ala or Ser
  Variant (12)..(12): Xaa in position 12 is any amino acid
  Variant (15)..(15): Xaa in position 15 is any amino acid
  Variant (20)..(20): Xaa in position 20 is any amino acid
  Variant (21)..(21): Xaa in position 21 is any or no amino acid
  Variant (23)..(23): Xaa in position 23 is any or no amino acid
  Variant (27)..(27): Xaa in position 27 is Asp or Glu
  Variant (29)..(29): Xaa in position 29 is Phe or Leu
  Variant (31)..(31): Xaa in position 31 is Asn, Ser or Thr
  Variant (35)..(35): Xaa in position 35 is Arg or Ser
  Variant (36)..(36): Xaa in position 36 is Asp or Glu
  Variant (37)..(37): Xaa in position 37 is Pro or Ser
  Variant (38)..(38): Xaa in position 38 is any amino acid
  Variant (41)..(41): Xaa in position 41 is Ile, Leu or Met
  Variant (43)..(43): Xaa in position 43 is any amino acid
  Variant (45)..(45): Xaa in position 45 is Phe or Tyr
WDNDXLXXLXXXELXADLLXXLXSDVXGXYXGPPXXXXSKXIXTX

SEQ ID NO: 21095 - protein, 39 aa, Artificial sequence
  protein pattern
  Variant (5)..(5): Xaa in position 5 is Gly, Ile or Val
  Variant (6)..(6): Xaa in position 6 is any amino acid
  Variant (7)..(7): Xaa in position 7 is Asn, Ser or Thr
  Variant (8)..(8): Xaa in position 8 is Lys or Arg
  Variant (9)..(9): Xaa in position 9 is Ala, Asp or Glu
  Variant (12)..(12): Xaa in position 12 is Ala or Pro
  Variant (13)..(13): Xaa in position 13 is any amino acid
  Variant (17)..(17): Xaa in position 17 is any amino acid
  Variant (18)..(18): Xaa in position 18 is any or no amino acid
  Variant (20)..(20): Xaa in position 20 is any amino acid
  Variant (21)..(21): Xaa in position 21 is any or no amino acid
  Variant (26)..(26): Xaa in position 26 is any amino acid
  Variant (35)..(35): Xaa in position 35 is Ala, Ser or Thr
  Variant (36)..(36): Xaa in position 36 is any amino acid
  Variant (39)..(39): Xaa in position 39 is Ala, Asp, Glu, Asn, Ser or Thr
LIGLXXXXXEIXXLLKXXDXXIDLVXPRGSNKLVXXIKX

SEQ ID NO: 21096 - protein, 35 aa, Artificial sequence
  protein pattern
  Variant (4)..(4): Xaa in position 4 is Ala or Gly
  Variant (8)..(8): Xaa in position 8 is Asn or Ser
  Variant (9)..(9): Xaa in position 9 is Gly, Asn, Ser or Val
  Variant (13)..(13): Xaa in position 13 is any amino acid
  Variant (15)..(15): Xaa in position 15 is Asp or Glu
  Variant (16)..(16): Xaa in position 16 is any amino acid
  Variant (17)..(17): Xaa in position 17 is Leu or Met
  Variant (19)..(19): Xaa in position 19 is Asp, Asn, Ser or Thr
  Variant (21)..(21): Xaa in position 21 is Leu or Met
  Variant (23)..(23): Xaa in position 23 is Leu or Val
  Variant (24)..(24): Xaa in position 24 is Ser or Thr
  Variant (25)..(25): Xaa in position 25 is Ala, Ser or Val
  Variant (26)..(26): Xaa in position 26 is Ala or Ser
  Variant (28)..(28): Xaa in position 28 is Leu or Met
  Variant (31)..(31): Xaa in position 31 is Asn or Thr
  Variant (33)..(34): Xaa in position 33 to 34 is any amino acid
ACAXVGQXXLMAXYXXXFXQXDXXXXQXLVXDXXF

SEQ ID NO: 21097 - protein, 49 aa, Artificial sequence
  protein pattern
  Variant (2)..(2): Xaa in position 2 is Ile, Leu or Val
  Variant (3)..(3): Xaa in position 3 is any amino acid
  Variant (4)..(4): Xaa in position 4 is Asp, Glu or Gln
  Variant (5)..(5): Xaa in position 5 is Ile or Leu
  Variant (6)..(6): Xaa in position 6 is Asn or Ser
  Variant (7)..(8): Xaa in position 7 to 8 is any amino acid
  Variant (10)..(10): Xaa in position 10 is Phe or Tyr
  Variant (11)..(11): Xaa in position 11 is Asp, Glu or Gln
  Variant (12)..(12): Xaa in position 12 is Ile or Val
  Variant (14)..(14): Xaa in position 14 is Ile, Leu, Met or Val
  Variant (16)..(16): Xaa in position 16 is any or no amino acid
  Variant (18)..(18): Xaa in position 18 is any or no amino acid
  Variant (23)..(23): Xaa in position 23 is Ile, Leu or Val
  Variant (25)..(25): Xaa in position 25 is Lys or Arg
  Variant (29)..(29): Xaa in position 29 is any amino acid
  Variant (32)..(32): Xaa in position 32 is any amino acid
  Variant (34)..(34): Xaa in position 34 is Ala, Ile, Leu or Val
  Variant (35)..(35): Xaa in position 35 is any amino acid
  Variant (39)..(39): Xaa in position 39 is any amino acid
  Variant (41)..(41): Xaa in position 41 is Leu or Met
  Variant (43)..(43): Xaa in position 43 is any amino acid
  Variant (46)..(46): Xaa in position 46 is any amino acid
  Variant (47)..(47): Xaa in position 47 is Asp, Glu or Asn
  Variant (48)..(48): Xaa in position 48 is Phe, Leu or Met
QXXXXXXXGXXXIXVXSXGAVGXGXQRLXYRXLXXSSFXDXQXPQXXXD

SEQ ID NO: 21098 - protein, 29 aa, Artificial sequence
  protein pattern
  Variant (2)..(2): Xaa in position 2 is any or no amino acid
  Variant (5)..(5): Xaa in position 5 is Cys, Asn or Ser
  Variant (6)..(6): Xaa in position 6 is Ala or Ser
  Variant (7)..(7): Xaa in position 7 is any amino acid
  Variant (11)..(11): Xaa in position 11 is Ile, Leu or Val
  Variant (13)..(13): Xaa in position 13 is Phe, Ile or Val
  Variant (15)..(15): Xaa in position 15 is Asp or Glu
  Variant (18)..(18): Xaa in position 18 is any amino acid
  Variant (19)..(19): Xaa in position 19 is Ala, Asp, Gly or Ser
  Variant (21)..(21): Xaa in position 21 is Ile or Val
  Variant (22)..(22): Xaa in position 22 is any amino acid
  Variant (25)..(26): Xaa in position 25 to 26 is any amino acid
  Variant (27)..(27): Xaa in position 27 is His or Tyr
  Variant (29)..(29): Xaa in position 29 is Arg or Ser
HXEYXXXACTXEXVXDVXXAXXHIXXXGX

SEQ ID NO: 21099 - protein, 42 aa, Artificial sequence
  protein pattern
  Variant (2)..(4): Xaa in position 2 to 4 is any amino acid
  Variant (6)..(6): Xaa in position 6 is any amino acid
  Variant (7)..(7): Xaa in position 7 is Asp, Glu or Gln
  Variant (9)..(9): Xaa in position 9 is Met or Val
  Variant (10)..(10): Xaa in position 10 is any amino acid
  Variant (11)..(11): Xaa in position 11 is Ala, Pro or Ser
  Variant (12)..(13): Xaa in position 12 to 13 is Leu or Met
  Variant (14)..(14): Xaa in position 14 is any amino acid
  Variant (15)..(15): Xaa in position 15 is Leu or Met
  Variant (16)..(16): Xaa in position 16 is Lys or Arg
  Variant (18)..(18): Xaa in position 18 is Ile or Val
  Variant (20)..(20): Xaa in position 20 is Ile, Leu or Val
  Variant (27)..(27): Xaa in position 27 is any amino acid
  Variant (28)..(28): Xaa in position 28 is Ser or Val
  Variant (31)..(31): Xaa in position 31 is Lys or Arg
  Variant (32)..(32): Xaa in position 32 is Ala or Gln
  Variant (35)..(35): Xaa in position 35 is any amino acid
  Variant (37)..(37): Xaa in position 37 is any or no amino acid
  Variant (39)..(39): Xaa in position 39 is any or no amino acid
  Variant (42)..(42): Xaa in position 42 is Phe or Leu
FXXXLXXTXXXXXXXXVXPXFNENDAXXTRXXPYXDXSXGIX

SEQ ID NO: 21100 - protein, 42 aa, Artificial sequence
  protein pattern
  Variant (2)..(2): Xaa in position 2 is any amino acid
  Variant (5)..(5): Xaa in position 5 is Asp or Glu
  Variant (8)..(8): Xaa in position 8 is any amino acid
  Variant (9)..(9): Xaa in position 9 is Leu or Val
  Variant (15)..(15): Xaa in position 15 is Gln or Thr
  Variant (19)..(19): Xaa in position 19 is any amino acid
  Variant (21)..(21): Xaa in position 21 is Ala or Ser
  Variant (22)..(23): Xaa in position 22 to 23 is any amino acid
  Variant (25)..(25): Xaa in position 25 is Ala or Ser
  Variant (26)..(27): Xaa in position 26 to 27 is any amino acid
  Variant (29)..(29): Xaa in position 29 is any amino acid
  Variant (32)..(32): Xaa in position 32 is Ile or Val
  Variant (34)..(34): Xaa in position 34 is Ala or Thr
  Variant (37)..(37): Xaa in position 37 is any amino acid
  Variant (38)..(38): Xaa in position 38 is Ala, Glu or Ser
  Variant (39)..(40): Xaa in position 39 to 40 is any amino acid
  Variant (41)..(41): Xaa in position 41 is Asn or Ser
  Variant (42)..(42): Xaa in position 42 is Ile or Leu
IXFGXKSXXGRGGMXAKVXAXXXAXXXGXPVXIXSGXXXXXX

SEQ ID NO: 21101 - protein, 50 aa, Artificial sequence
  protein pattern
  Variant (2)..(2): Xaa in position 2 is His, Lys or Arg
  Variant (5)..(5): Xaa in position 5 is any amino acid
  Variant (6)..(6): Xaa in position 6 is Ile, Leu, Met or Val
  Variant (7)..(7): Xaa in position 7 is any amino acid
  Variant (8)..(8): Xaa in position 8 is Pro or Ser
  Variant (9)..(9): Xaa in position 9 is Asp, Glu or Gln
  Variant (10)..(10): Xaa in position 10 is Asp or Glu
  Variant (12)..(12): Xaa in position 12 is any or no amino acid
  Variant (14)..(14): Xaa in position 14 is any or no amino acid
  Variant (17)..(18): Xaa in position 17 to 18 is any amino acid
  Variant (19)..(19): Xaa in position 19 is Ile, Met or Val
  Variant (21)..(21): Xaa in position 21 is Asp or Asn
  Variant (22)..(22): Xaa in position 22 is Ala or Asp
  Variant (24)..(24): Xaa in position 24 is Glu or Gln
  Variant (25)..(29): Xaa in position 25 to 29 is any amino acid
  Variant (31)..(32): Xaa in position 31 to 32 is any amino acid
  Variant (35)..(35): Xaa in position 35 is Asp, Glu or Gln
  Variant (36)..(36): Xaa in position 36 is Ala or Leu
  Variant (38)..(39): Xaa in position 38 to 39 is any amino acid
  Variant (40)..(40): Xaa in position 40 is any or no amino acid
  Variant (42)..(44): Xaa in position 42 to 44 is any amino acid
  Variant (46)..(46): Xaa in position 46 is any amino acid
  Variant (47)..(47): Xaa in position 47 is Asp, Glu or Gln
  Variant (48)..(49): Xaa in position 48 to 49 is any amino acid
  Variant (50)..(50): Xaa in position 50 is Leu or Met
RXLQXXXXXXRXKXILXXXAXXLXXXXXXIXXENXXDXXXAXXXGXXXXX

SEQ ID NO: 21102 - protein, 15 aa, Artificial sequence
  protein pattern
  Variant (11)..(11): Xaa in position 11 is Ile or Val
KIPVLGHADGXCHVY

SEQ ID NO: 21103 - protein, 19 aa, Artificial sequence
  protein pattern
  Variant (2)..(2): Xaa in position 2 is any amino acid
  Variant (4)..(6): Xaa in position 4 to 6 is any amino acid
  Variant (10)..(10): Xaa in position 10 is Ile, Leu or Val
  Variant (11)..(12): Xaa in position 11 to 12 is Ile or Val
  Variant (14)..(14): Xaa in position 14 is Phe, Ile, Leu or Val
  Variant (15)..(15): Xaa in position 15 is Gly or Ile
  Variant (16)..(16): Xaa in position 16 is any amino acid
  Variant (17)..(17): Xaa in position 17 is Ala, Pro or Ser
  Variant (18)..(18): Xaa in position 18 is Gly, Ile or Val
  Variant (19)..(19): Xaa in position 19 is Ala, Ile, Pro or Val
RXFXXXVKRXXXKXXXXXX

SEQ ID NO: 21104 - protein, 15 aa, Artificial sequence
  protein pattern
  Variant (2)..(3): Xaa in position 2 to 3 is any amino acid
  Variant (4)..(4): Xaa in position 4 is Ile or Val
  Variant (10)..(10): Xaa in position 10 is any amino acid
  Variant (11)..(11): Xaa in position 11 is Asp, Glu or Asn
  Variant (13)..(14): Xaa in position 13 to 14 is any amino acid
GXXXGTLFHXXAXXW

SEQ ID NO: 21105 - protein, 21 aa, Artificial sequence
  protein pattern
  Variant (2)..(3): Xaa in position 2 to 3 is any amino acid
  Variant (5)..(5): Xaa in position 5 is any amino acid
  Variant (8)..(8): Xaa in position 8 is Asp, Glu or Arg
  Variant (11)..(11): Xaa in position 11 is Gly, Asn or Ser
  Variant (12)..(13): Xaa in position 12 to 13 is any amino acid
  Variant (16)..(16): Xaa in position 16 is Lys or Arg
  Variant (18)..(18): Xaa in position 18 is Glu or Gln
  Variant (19)..(19): Xaa in position 19 is Ile, Leu or Val
  Variant (20)..(20): Xaa in position 20 is Ala, Ser or Thr
  Variant (21)..(21): Xaa in position 21 is Asp, Glu or Lys
RXXAXMEXPIXXXLKXTXXXX

SEQ ID NO: 21106 - DNA, 1701 bp, Arabidopsis thaliana
  CDS (1)..(1701)
atgtcatcagctggtgttgcgttaagtccggttcgtagcgagccattgattatgcctctggttcgtgccaattcttgtcttgattcttatcctgacgacaccatcatgatttaccttacacttcctggatcggtgataccaatgcgagtgcttgagtctgattccattgagtctgttaagcttcggattcagtcttaccgcggctttgttgtgaggaatcagaagcttgttttcggtggtcgagagctagctagaagcaattctaatatgcgtgattatggtgttagtgaaggcaacattctccacttggttcttaagctctctgatcttcaggttcttgatgttaagactacctgtgggaaacactgcaggtttcatgtcgagagagggagaaacattgggtatgtgaagaagcagatttcgaaaaagcgtggagactttgttgatcctgatgaacaggagattctttacgaaggtgagaagttggaagaccagagtcttattaatgacatttgtagaaacgatgactcggttttgcatctgcttgtgcggagatctgctaaagttcgagttaagccggtggagaagaactttgagttgtctattgttgccccacaagcaaaagataagaagggtcgtgaagctaagagcattgtgccaccaaaaaagctttctttggagccggtagttgttaactccaaggctaaagtacctctggtggttaaagatatgattcagtctgcttctgatggacttaaaagtgggaattctccggtcaggtcaagcgaaggtacgggaggagcttatttcatgcagggtccatctggcaacaaatttgtgggtgtgtttaagccaatagatgaggaaccaatggctgagaacaatcctcagggtttaccactttcgccaaacggtgaaggtttgaagaaaggaacaaaggttggagaaggtgcattaagggaagtcgctgcatacattttggatcatcccaaaagtggaaacaaatctatgtttggtgaagagataggttttgctggtgtacctcccacagctatgattgaatgtttgcatccagggtttaaccatcccaaaggaatcaaaaccaagattggatcacttcagatgtttactgagaacgatggcagctgtgaagatatgggtccactttcatttccagtagaagaagttcataagatttctgtgttggatattagactggccaacgcagacagacatggtgggaacattttgatgaccaaggacgaaagcgggaagctcgttttggttcctatagaccatggatactgcttgcctgaaagctttgaagattgcacgtttgagtggctatattggccacaagcccggaaaccgtactctgcagagacccaagagtacataagatcactggacgcagaggaagatattgatctactaaagtttcatggatggaaaatgccggcagagacggctcaaacgctcagaatctcaacgatgctactgaagaaaggagtggaaagaggactaacagcatttgagattggaaccataatgtgcagagaaacacttagcaagaagtctctggtggaggaaatggtagaggaagctcaagaagctgtgcttccagggacgagcgaagctgcattcctcgaagccctatccgatgtgatggattaccatctcgatcactctcaggaacactaa

SEQ ID NO: 21107 - protein, 566 aa, Arabidopsis thaliana
MSSAGVALSPVRSEPLIMPLVRANSCLDSYPDDTIMIYLTLPGSVIPMRVLESDSIESVKLRIQSYRGFVVRNQKLVFGGRELARSNSNMRDYGVSEGNILHLVLKLSDLQVLDVKTTCGKHCRFHVERGRNIGYVKKQISKKRGDFVDPDEQEILYEGEKLEDQSLINDICRNDDSVLHLLVRRSAKVRVKPVEKNFELSIVAPQAKDKKGREAKSIVPPKKLSLEPVVVNSKAKVPLVVKDMIQSASDGLKSGNSPVRSSEGTGGAYFMQGPSGNKFVGVFKPIDEEPMAENNPQGLPLSPNGEGLKKGTKVGEGALREVAAYILDHPKSGNKSMFGEEIGFAGVPPTAMIECLHPGFNHPKGIKTKIGSLQMFTENDGSCEDMGPLSFPVEEVHKISVLDIRLANADRHGGNILMTKDESGKLVLVPIDHGYCLPESFEDCTFEWLYWPQARKPYSAETQEYIRSLDAEEDIDLLKFHGWKMPAETAQTLRISTMLLKKGVERGLTAFEIGTIMCRETLSKKSLVEEMVEEAQEAVLPGTSEAAFLEALSDVMDYHLDHSQEH

SEQ ID NO: 21108 - DNA, 2719 bp, Unknown
  Unidentified
  CDS (760)..(2466)
gccggccgggtttggcttcttgccatttctctcttcttccttgctgtgcactacacaaaccaaccataacttctcttgttctcgttctcttccctgcgtgaaccgcggaccaagaagaagcgggcgttggggactttgggatttgaaagcctacatattattatttctctaattcaggcgtggtctgtgctgggagggaagggatctgtggggctgcagccccatccgggctgagggttgaaggatccggccctttggtgtgctcccccaatcgggttattatttctctaattcgggcgtggtttgtgccgggagggggggggccggggggggtacagccccatccgggctgagggttgaaggaaccggccctttggtgcgctccccccaatcgaggaaaagggggcaacggatgctttgttgccttcgaccgtcgcaggctcgcagcatccgttacgcgattgggattggaccatcagcaggtcgaaatgactgttctgtaacacttttcccccaatcccatcaatcctgacttgatttttatttgaacacaagatgggactgtaatctcggttgctgttctgtgcctcttaggttttcctccgtcctggatttggaagggaggaactcttggatttctgtctccatggcgcacaaattgtagtttccagaatcttactttgtagatttagtgtaaataatagtgatagcagctggtgacgaatctcgggtttccttagtagctgtcaccctgtgaatatgtcgtcggcaggtgtgatcgtcttggggccagttccagaagaccctgccttcctgcccatctgcttcaatggcagccggtcacagcactgctcatctgggtcacaactgcaggattccattcttattttccttgctgtgccgggtatgccacccatgcccatgagcgtgctgggatctgagtctattgcatctgtcaagctgcgcatccagcagttcaagggctttgtggcgacgaagcagaggcttgtgctggatgggcatgagctggcaagaaacaactccccagtcaaggattatgggctggccgagggaaatgttctgcatcttgttattcgactatcagatctacgtgtgattaacattgagactgcaactggaaggaagtttcagtttcaggtggaccagagccgcaatgttaagtttctcaagaataagcttgaagcagagggtgatgaggatattggtaatcttgaggatcacaagcttgaatatgatggtgaggagcttgaggacaaccagctgatagctgatattagcaggagggatgatgctgtgattcatttattcatccgcaaaccagcaaaggtatggacacaacaagttgatggagatactttggttacagttgtcaatccacaggggaaaggcaacctgcaaaatgaagctggctcagtgaactccgcaaactcagttggggttaggcctgcccctgttgaaccaatagttaaccgaaaagcaaagctgtcatgtgaagtgatgaagatgataaattcaaccatagctggactggagaaagggcacctgcctgtgatgtcagctgaaggttcaggaggtgtttatttcatgcgagatgcaacaggccagaagaatgttgctgtgtttaagcctattgatgaggaacccatggccaaaaacaacccaaggggcgttcctgtgtccacagacggcgaggggatgaagaggggaacaattgtaggggaaggtgcattcagggaggttgcagcttatattctcgaccatccagttagtgatagtaaatatggtcacagtgttgggttttctggtgtgcctcccaccacattggtccgaaccttacatagggggaagagcttcaagattggttcactgcagatgttcatggagaacaatggaagcactgaagatatgggtcctcgatcttttcctgtcaaggaggttcacaaaatagcagtactagatattaggttagctaatgctgatcgtcatgctgggaatattctagtgtgcaaggagggagaaggtggcaactacaagctgattccaattgatcatggttattgcttgccagagaagtttgaagatgttacatttgagtggctctactggccccaagcccgtgagccattcagtgatgaaaccattgaatacatcaaatcacttgatgctgaagaagacatcaagcttctcaagttccatgggtgggagctgcccccacgatgcgctcgtgttctgcgcatcagcaccatgcttttgaagaaaggtgcagctcgtggcttcacaccatatgacatagggcgcattctatgcagggaaactgtgaatagggagtctgagattgaggacatcattcaggaagcagaggatgctgttctcccagggtccagtgaaaacatgttcttagaaactgtatctgaaatcatggaccgtcacctcgacaaggagtgagtttagaaattcagaataactgatctagttgttccagttccagctgtatccggtttgttgtttctattgttgacaagcactgatcaacagactaataatttgatttgtttgtacctctcaaatgtttctttcggttgtaatgctcgagtactttgcttagcacactttgtgaataatatatttgttcagttagacattaaaaaaaaaaaaaggagggcggccgccgtataatcagctcgtccacccgggaatt

SEQ ID NO: 21109 - protein, 568 aa, Unknown
  Unidentified
MSSAGVIVLGPVPEDPAFLPICFNGSRSQHCSSGSQLQDSILIFLAVPGMPPMPMSVLGSESIASVKLRIQQFKGFVATKQRLVLDGHELARNNSPVKDYGLAEGNVLHLVIRLSDLRVINIETATGRKFQFQVDQSRNVKFLKNKLEAEGDEDIGNLEDHKLEYDGEELEDNQLIADISRRDDAVIHLFIRKPAKVWTQQVDGDTLVTVVNPQGKGNLQNEAGSVNSANSVGVRPAPVEPIVNRKAKLSCEVMKMINSTIAGLEKGHLPVMSAEGSGGVYFMRDATGQKNVAVFKPIDEEPMAKNNPRGVPVSTDGEGMKRGTIVGEGAFREVAAYILDHPVSDSKYGHSVGFSGVPPTTLVRTLHRGKSFKIGSLQMFMENNGSTEDMGPRSFPVKEVHKIAVLDIRLANADRHAGNILVCKEGEGGNYKLIPIDHGYCLPEKFEDVTFEWLYWPQAREPFSDETIEYIKSLDAEEDIKLLKFHGWELPPRCARVLRISTMLLKKGAARGFTPYDIGRILCRETVNRESEIEDIIQEAEDAVLPGSSENMFLETVSEIMDRHLDKE

SEQ ID NO: 21110 - DNA, 3561 bp, Zea mays
  CDS (1694)..(3373)
  misc_feature (45)..(45): n is a, g, c or t
  misc_feature (137)..(137): n is a, g, c or t
tttcatgttacatatgtagtaggagtgtctgccctacatttggtngagggtctaatatatattttggcaatgatgataccaggggaagctgctgcttgtgattggaagtagtgtttagactgcgtatctgacaaagnagtatcatgcacactaaaagcatcaacttttgcacacacaacatgttgtggttgttctttaggtcttagcaacattaccagatactctatgcttcatgcagtgatagcgtgcctgtgttgcttcgaactattagattctgttgatatgggtctttcattatctccctttgcatgtttccctagattaaacgaacaagcttttaaaaccaaggattacaaccgaaggggattatacccccaaggggttcaaatgataaggagaggattaactcaatccctctctggattaaatccccctctagaataaaaacctgtgaaccgaacaaggccttaaagatttagcactctcaattcccttgctctagaacaagtaggcgttattgtgcaatggatgatgagtaatgagtgtgtggtacatgtcatcaaacgagagttcatctttcgttcctttcagtggagctagtcctcggccacagaccaagtaaacatacgtcaccgcatccgtgcatctggcccaggtccaacccaactccagcaaaccacagtgacctgggccgaccagagccagccattgcaaccgttgtcttcttccacggcagcgcctcttctcttcctcccctcgattcgcggcgtaccagtggaatgagagaacagaatgcatgaatggctctctggacactgctgcgcccgcggctgtgtagctcagctcgctggttgttaaagaagggagaggtacagccatggcgcggcgtgggtgccatgccatgcgtccagaccaaaccaggacaggagagacagctggccctaattttggctgccccccagaccggccgttactagctagcgatcgacaagggggtcagggacaggctggtggtggtgtgtgctaagcttcgcggaagttcgcgctgccgtgcgtggccggctggccgcgccgatccatccatataagaggctccggcgcctccctctcttcctccctcccgcccgcccacgcgtccgacccatcgtccgctcgcgtgtcctttgcgctcgcgaactccgtcgccggacacgagccagggacaccgagtgtggtgaggttgccccttcccttcccccacccccatcgtcgtcttggaccagctctgtacgtaccgtccgtcgatcgtcctttcccgtcccctctagcatcgatcgcagcctcctctgctactgccacgtctctgtgcctgccgagacaagcaagggggtcgtcggtcggggctaggttgttcccttaattcattctaggggcagatcagatcgaaagaaatcaaactaacgtagccatggaagaagctccacgtcattccatgtagttacttcttcagagcgcgcggtggcggccggctagaagctttgttcgttgcatttgaattcaccaccaaaggagaaggcgcctgttggcgttccaccaattccatcccatcgccacaaggtcgtcgatcacgcggatcgtcgcgactgaccggccggcctcctcagccgtccttgttgtgctacaagatcgaggcgacaggatccagccagccacgatgtcggcggccggcgccaccgccgtctgcacgagggacggcggcctcctcccgctgcgtccgcactgcgcgaggtcgtcctcctccttcgccgccgccgccgccgccatcgtgatctacctgacggcgccgggcctggccgtgttgccgatgcgggtgatggcgtccgactccatcgcctcggtgaagctccgcgtgcagacgtcccggggcgtgagggcgcgcaagcagaagctcgtcttcggcgggcgcgagctggcgcgcgacgacgggcgcatccgggactacggcgtggcggacggcaacgtggtgcacctggtcatccgcgtcccggacgtgcgcctcatcaccgtggagaccgtgcagggcggcaagttcaggttccgcgtggagcccgggcgcaccgtcgggtacgtgaagcagcagatcgccaaggaccaccccgcggcggcgcgccccggcgagcagcggctcgtgctcgagggcgaggacctcgacgaccgccacctcatccacgacgtgtgcagggccgacggcgccgtgatacacctgctggtgcggcgctccgtcgtcgcgcgcgacgccgggtccgggcggccgtcgccaccgccacggcgtgacgacgtcaggatcgagcccgtaggcggcgaccataaggcggcggtgcgtggcatggtcgacgcggcgctcgccgggatggagagcgggaacgcgcccatcatgtcgtcggagggcacggggggagcctacttcatgcgggacgcgacggggcagcggcacgtggccgtgttcaagccggcggacgaggagcccatggccgccaacaacccgcgcggcctccccgtgtcgtccaccggcgaaggcctgaagaaagggacgcgcgtcggggagggggcgctgagggaggtcgcggcctacatcctcgaccacccacccaggagcgggaccgcggatgatgggttcgccggtgtgccgccgaccgcgctcgtccggtgcacgcacggagccttcaggcagggcggagccggagccggagcgagggcgccggtgcccaagctggggtccatgcaggccttcgttagtaactgcggcagctgcgaggacatgggacccagcgcgttcccggtgcaggaggtccacaagatctgcgtgctggacatacggctcgccaacgccgatcgccacgccggaaacatactcgtccgcaagcacgacggcggcggaggcggaggcatgtcgctggttcccatcgaccatggatactgtctgccggagagcttcgaggactgcactttcgagtggctctactggcctcagtgccgggagcccttcagcgacgagacggtggagtacgtgcggtccctggacgcggaggaggacgtgactatgctgaggctccacgggtgggaggtgtcgcgcgagtgcgcgcgcacgctgcgcgtcgccaccatgctgctgaagaagggtgtggagaggggcctcaccgccttccacatcgggagcatcatgtgcagagagaccctgaccaaggagtccgccatcgaagagatcgtccgtgaggcggcggaacggggaggaggatgcgagactgtcttcttgcaggctgtctcggagatcatggaccgccgtctcgacgacatatcaaaggacatgttagcctctagatatgcacatggctgacaaaataacgatgtaatcaactcaatggctaatgcaaagaatggtgtactatttcctcccaaaaaaaaaaaaaaaaaaaaaaaaaaaaaaaaaaaaaaaaaaagaaagaaaaacaaaaagataaaaaaaaaaaataaaaaaaaaaaaaaaaaaaaaaaaaaaaaaaaagggggggcccccctaaaggt

SEQ ID NO: 21111 - protein, 559 aa, Zea mays
MSAAGATAVCTRDGGLLPLRPHCARSSSSFAAAAAAIVIYLTAPGLAVLPMRVMASDSIASVKLRVQTSRGVRARKQKLVFGGRELARDDGRIRDYGVADGNVVHLVIRVPDVRLITVETVQGGKFRFRVEPGRTVGYVKQQIAKDHPAAARPGEQRLVLEGEDLDDRHLIHDVCRADGAVIHLLVRRSVVARDAGSGRPSPPPRRDDVRIEPVGGDHKAAVRGMVDAALAGMESGNAPIMSSEGTGGAYFMRDATGQRHVAVFKPADEEPMAANNPRGLPVSSTGEGLKKGTRVGEGALREVAAYILDHPPRSGTADDGFAGVPPTALVRCTHGAFRQGGAGAGARAPVPKLGSMQAFVSNCGSCEDMGPSAFPVQEVHKICVLDIRLANADRHAGNILVRKHDGGGGGGMSLVPIDHGYCLPESFEDCTFEWLYWPQCREPFSDETVEYVRSLDAEEDVTMLRLHGWEVSRECARTLRVATMLLKKGVERGLTAFHIGSIMCRETLTKESAIEEIVREAAERGGGCETVFLQAVSEIMDRRLDDISKDMLASRYAHG

SEQ ID NO: 21112 - DNA, 2303 bp, Oryza sativa
  CDS (314)..(2074)
ggacaaaccgccagaggcacctaattttggcactggtcgtccccagcagagcagatgaacaagagaggtgcctcgcaattcccaaacgaaacgaaacgaaaggaaacaaagcgatccttcttgcgctccggcgccgccgtctccccctcgcgcggttgcctgagccaagaacaggatcggaggccaggccccatgcatgcatgttaattagtctgtcactgatcacttcatcccattagccattagctgtttctcatccagacggacgcgccatccaacacacatcgatcgatcggaggttgattggccggccatgacgacgacagccgccggcggagccaccctgtgcgcggcgagggaggagcaggagctcctggccacccgcctgaatgtgatcggcatccggccgccgcattgcgccgcggaatctatcctcatctacctcaccgcgccggggctctccatgatgcccatgcgggtgatggcctccgactccatcgcctccgtcaagctccgcgtccagacctccaagggcttcgtcgtccgcaagcagaagctcgtcttcgatggccgggagctcgcccggaacgacagccgcatcatggactacggcgtctcccacggcaacgtcctccacctcgtcatccgcatctccgacctccgcctcatcaccgtccagaccgtccacggcaacaagttcaggttccgcgtcgagcccggccgcaccgtcggctacgtcaagcagcagatcgccaagaactccacccacgacgacgaccaccacagcctcgtcctccagggcgaggtgctcgacgacgcccacctcatccacgacgtctgcaggaccgacggcgccgtcatccacctgctcgtccaccgctccgccaagctcgccgccaggcccgtcgaccgggacttcgaggtctccatcgtcgcgcgcaaccgcaacgccgccgccgacgctgctcaaccgacgttgcacctgcagagggacttcgccatcgagccggtcatcgtcaaccccaaggccgcgcttccgccagtgatcgagaacctggtgggcgccgtgctggccgggatggagaaggggaacgccccgatcatgtcgtcggagggcaccgggggggcgtatttcatgcaggacgcgtcggggcaggagcacgtcgccgtgttcaagccggtggacgaggagcccatggcggccaacaacccacgcggcctcccaccctcgcccaccggcgaggggctcaagaaggggacacgcgtcggcgagggcgccatcagagaggtcgccgcctacatcctcgaccaccctcccggtggccgccgttcgttcgcaggacatcatggctccgccaccgtgggcttcgccggtgtcgcgccaaccgcgctggtccgttgcatgcacaggagcttcaagcaacctgcagcttccgaacaaggtcctccattgttcaaggtggggtcattgcaagcgttcgtgaagaacagcggcagctgcgaggacatgggacctcgtgcgttcccggtgcacgaagttcacaagatctgcgtgctggacatcaggctggccaacgccgacaggcacgccggcaacatcctcacctgcagagacgaacaaggccatggcctcaccctggttccgatcgaccatggatactgtcttcctgagagttttgaggattgcacattcgagtggctctactggccgcagtgtcgggagccattcagcgaggagacggtggagtacataaggtcactggacgcggaggaggacatcgccattctgaggttccatgggtgggagatgccagccaagtgcgagcgcgtcctgcgcgtcaccaccatgctgctcaagaagggcgtcgactcgggcctcgccgcgttcgacatggggagcatcttgtgcagggagacgctcaccaaggagtctgtcatcgaggagatcatccgtgaggttgaagacgatgttggtgatgaagctgccttcctgcagtctgtctctcaatccatggatcgccgtctgggtgaattatccaagaaaaaaaaaagtaatgtaagtatacaagattaactggttgcctccctctactcatatcatagataaataacgtcaataaaaagggccaagctaaactaattaaaagggacagaggaaaaggttgtactagtgtacttgagttataaactttttgtgcagctgacaattgagtgtacatgtaatcagcagtggatttaaaggccttgagggcgtgtacccttttttttctttcatgtggtttaattatgtggaaaatttgacc

SEQ ID NO: 21113 - protein, 586 aa, Oryza sativa
MTTTAAGGATLCAAREEQELLATRLNVIGIRPPHCAAESILIYLTAPGLSMMPMRVMASDSIASVKLRVQTSKGFVVRKQKLVFDGRELARNDSRIMDYGVSHGNVLHLVIRISDLRLITVQTVHGNKFRFRVEPGRTVGYVKQQIAKNSTHDDDHHSLVLQGEVLDDAHLIHDVCRTDGAVIHLLVHRSAKLAARPVDRDFEVSIVARNRNAAADAAQPTLHLQRDFAIEPVIVNPKAALPPVIENLVGAVLAGMEKGNAPIMSSEGTGGAYFMQDASGQEHVAVFKPVDEEPMAANNPRGLPPSPTGEGLKKGTRVGEGAIREVAAYILDHPPGGRRSFAGHHGSATVGFAGVAPTALVRCMHRSFKQPAASEQGPPLFKVGSLQAFVKNSGSCEDMGPRAFPVHEVHKICVLDIRLANADRHAGNILTCRDEQGHGLTLVPIDHGYCLPESFEDCTFEWLYWPQCREPFSEETVEYIRSLDAEEDIAILRFHGWEMPAKCERVLRVTTMLLKKGVDSGLAAFDMGSILCRETLTKESVIEEIIREVEDDVGDEAAFLQSVSQSMDRRLGELSKKKKSNVSIQD

SEQ ID NO: 21114 - DNA, 2490 bp, Oryza sativa
  CDS (547)..(2253)
gatttcccctccctctctctctgaatttctttctccccaaaccaaaaccaaaccgaagcttccccatctcgcgtgaacttcggagcaaggaagaacaaggcgccgcgccggatttagccccgcccccctctccggggtatcccccctcctctcctctgggtttgattggagtgaggtgaatcggtgaggttgtggctcggttggcgtccggatcggagggggttcgggcccttcctgattaatccctcttctgattccgtgtgggggattcaatcactggtgggcaaaggcgagatatttcgtcacttctccccctcatctaaccatgtctggtttgatgtgcctggagatcaagatgggattgtaaccacgctggttatctcgcgatcgcagagggtttcctccatcctctaaggaaggaaaggaacccttgccctttcttctccatggcttctaattcgtagtgtgaaggatctgatttttaggttagtgtaaatagtagcagtagttgaggaagcttcggcatcctaaggacctcctgtgaagatgtcgtctgctgccattgccattagcccgatggtggaagagtttgctctcctgcccatctgcttcgacggcagccggtcgccccactgtttgtccgggtcacagctgcaggattcgattatcatctttcttgctgtgcctggtgccccaccgatgccgatgagtgtgctcggctcggagtccatcgcctcggtcaagctgcgcattcagcggttcaaggggttcgtggttaacaagcagaggcttgtgcttgatgggcacgagctggcaaggaacaactgccatgtgaaggattatgggcttgccgatggaaatgttctgcaccttgttatccgcttggctgatcttcgcttgattaacatcgagactaccagtggaaagaagtttcagttccaggtggaccagagccgcaatgtcaagtatctcaagagtaagctggcagtggagggagatgaggaccttggtgaggatcacaagcttgaatgtgatggcaaggagcttgaggaccaccagctgattgctgatattagcaagaaggatgatgctgtgatccatttgttcatccgcaagccagcaaagttacggacacagcaagttgataaagacacggtggttacagttgtcactccgcaggagaaagagaaccttcaaaatgaagctcatgctgtgaaccctgctaaaccagctggtgctaggcctgctcttgttgaaccaattatcgttaaccacaaggtgaagctatcacttgaagtgatgagaatgattagctcagccatagctggtcttgagaatggatacttgccagtgatgacagctgaaggttcagggggtgtttacttcatgcaagatgcatcaggagagaagaatattgcagtgtttaagcccagagatgaggaacctatggctaaaaacaacccaagagggcttccagtgtcgactgatggagaaggcatgaagagggggacgcttgtaggggaaggtgcatttagggaagttgctgcttatattcttgaccatccaattggtgatcatgaatctgaagaacgtatcgggttctctggtgtgcctcccacagcattggtccggagcttacacagggggaagagcttcaagattggatcactgcagatgttcattcagaacaatggaagttgtgaggatatgggtccccgagcatttccagtgaaggaggtccacaaaatagcagtgttagatcttaggttagcaaacgctgatcgtcatgcagggaacattttagtgtgcaaggatgaagaaggtggcaattacaagttggttccaattgatcatggttactgcttgccagggaagtttgaagattgtacctttgagtggctgtactggccccaggctcgtgaaccattcagtgatgaaaccattgcatacatcaaatcactagacgctgaagaggacatcaagcttctcaagttccatgggtgggagctgtctgcaagatgtgctcgtgtcctgtgcatcagcaccatgcttttaaagaaaggtgcagcacgaggcctcacaccgtatgacatcgggcgtatactgtgcagggaaactgtgaatagagactctgagattgaggacatcgtccaggaagccgagggccatgttctcccagggtcaagtgaagtaatcttcttagaaaccgtatctgaaatcatagaccgtcacctcgacaagaagttcgcttagaaacccagaataactgatctagttgttcagctgtatccagtcagtttggtgtaagtatgttgacaagccactcttcaatggactaaatgatttcatttgtttgtagcatctcaaaccttcaagtgcattacctacatacattttgtgaatatgtaagcatgtgttgtgtgttggtcgtgcgcatcatcagcatggtactgtctgagagacgaaataaaatgttgatttagtgctgtt

SEQ ID NO: 21115 - protein, 568 aa, Oryza sativa
MSSAAIAISPMVEEFALLPICFDGSRSPHCLSGSQLQDSIIIFLAVPGAPPMPMSVLGSESIASVKLRIQRFKGFVVNKQRLVLDGHELARNNCHVKDYGLADGNVLHLVIRLADLRLINIETTSGKKFQFQVDQSRNVKYLKSKLAVEGDEDLGEDHKLECDGKELEDHQLIADISKKDDAVIHLFIRKPAKLRTQQVDKDTVVTVVTPQEKENLQNEAHAVNPAKPAGARPALVEPIIVNHKVKLSLEVMRMISSAIAGLENGYLPVMTAEGSGGVYFMQDASGEKNIAVFKPRDEEPMAKNNPRGLPVSTDGEGMKRGTLVGEGAFREVAAYILDHPIGDHESEERIGFSGVPPTALVRSLHRGKSFKIGSLQMFIQNNGSCEDMGPRAFPVKEVHKIAVLDLRLANADRHAGNILVCKDEEGGNYKLVPIDHGYCLPGKFEDCTFEWLYWPQAREPFSDETIAYIKSLDAEEDIKLLKFHGWELSARCARVLCISTMLLKKGAARGLTPYDIGRILCRETVNRDSEIEDIVQEAEGHVLPGSSEVIFLETVSEIIDRHLDKKFA

SEQ ID NO: 21116 - DNA, 2673 bp, Zea mays
  CDS (709)..(2415)
cgtttggaacctcgagaccggccgggctcttcttgtcattctctcttcttccttgctgtgcactacacaaaccaaccataacttctcttgttctcgttctcttccctgcgtgaaccgcggaccaagaagaagcgggcgttggggactttgggatttgaaagcctacatattattatttctctaattcaggcgtggtctgtgctgggagggaagggatctgtggggctgcagccccatccgggctgagggttgaaggatccggccctttggtgtgctcccccaatcgggttattatttctctaattcgggcgtggtttgtgccgggagggaaggaatccgtggggctacagccccatccgggctgagggttgaaggaaccggccctttggtgcgctccccccaatcgaggaaaagggggcagcggatgctttgttgccttcgaccgtcgcaggctcgcagcatccgttacgcgattgggaatggaccatcagcaggtcgaaatgactgttctgtgacactttccccccaatcccatcaatcccggttttcctccgtcctggatttggaagggaggaactcttggatttctgtctccatggcgcacgaattgtagtttccagaatcttactttgtagatttagtgtaaataatagtgatagcagctggtgacgaatctcgggtttccttagtagctgtcaccctgtgaatatgtcgtcggcaggtgtgatcgtcttggggccagttccagaagaccctgccttcctgcccatctgcttcaatggcagccggtcacagcactgctcatctgggtcacaactgcaggattccattcttattttccttgctgtgccgggtatgccacccatgcccatgagcgtgctgggatctgagtccattgcatctgtcaagctgcgcatccagcagttcaagggctttgtggcgacgaagcagaggcttgtgctggatgggcatgagctggcaagaaacaactccccagtcaaggattatgggctggccgagggaaatgttctgcatcttgttattcgactgtcagatctccgtgtgattaacattgagactgcaactggaaggaagtttcagtttcaggtggaccagagccgcaatgttaagtttctcaagaataagcttgaagcagagggtgatgaggatattggtaatcttgaggatcacaagcttgaatatgatggtgaggagcttgaggaccaccagctgatagctgatattagcaggagggatgatgctgtgattcatttattcatccgcaaaccagcaaaggtatggacacaacaagttgatggagatactttggttacagttgtcaatccacaggggaaaggcaacctgcaaaatgaagctggctcaatgaactccgcaaactcagttggggttaggcctgcccctgttgaaccaatagttaaccgaaaagcaaagctgtcacgtgaagtgatgaagatgataaattcaaccatagctggactggagaaagggcacctgcctgtgatgtcagctgaaggttcaggaggtgtttatttcatgcgagatgcaacaggccagaagaatgttgctgtgtttaagcctattgatgaggaacccatggccaaaaacaacccaaggggtgttcctttgtccacagacggcgaggggatgaagaggggaacaattgtagggggaggtgcattcagggaggttgcagcttatattctcgaccatccagttagtgatagtaaatctggtcacagttttgggttttctggtgtgcctcccaccacattggtccgaacctcacatagggggaagaacttcaagattggttcactgcagatgttcatggacaacaatggaagcactgaagatatgggtcctcgaccttttcctgtcaaggaggttcataaaatagcagtactagatattaggttagctaatgctgatcgtcatgctgggaatattctagtgtgcaaggagggagaaggtggcaactacaagctgattccaattgatcatggttattgcttgccagagaagtttgaagatgttacatttgagtggctctactggccccaagcccgtgagccattcagtgatgaaaccattgaatacatcaaatcacttgatgctgaagaagacatcaagcttctcaagttccatgggtgggagctgcccccacgatgcgctcgtgttctgcgcatcagcaccatgcttttgaagaaaggtgcagctcgtggcttcacaccatatgacatagggcgcatactatgcagggaaactgtgaatagggagtctgagattgaggacatcattcaggaagcagaggatgctgttctcccagggtccagtgaaaacatgttcttagaaactgtatctgaaatcatggaccgtcacctcgacaaggagtgagtttagaaattcagaataactgatctagttgttccagctgtatccggtttgttgtttctattgttgacaagcactgatcaacagactaataatttgatttgtttgtacctctcaaatgtttctttcggttgtaatgctcgagtactttgcttatgcacattttgtgaataatatatttgttcagttagacataaaaaaaaaaaaaaaaaagggcggccaaagactagtgagctcgtcgaccgggaataatcaggacgg

SEQ ID NO: 21117 - protein, 568 aa, Zea mays
MSSAGVIVLGPVPEDPAFLPICFNGSRSQHCSSGSQLQDSILIFLAVPGMPPMPMSVLGSESIASVKLRIQQFKGFVATKQRLVLDGHELARNNSPVKDYGLAEGNVLHLVIRLSDLRVINIETATGRKFQFQVDQSRNVKFLKNKLEAEGDEDIGNLEDHKLEYDGEELEDHQLIADISRRDDAVIHLFIRKPAKVWTQQVDGDTLVTVVNPQGKGNLQNEAGSMNSANSVGVRPAPVEPIVNRKAKLSREVMKMINSTIAGLEKGHLPVMSAEGSGGVYFMRDATGQKNVAVFKPIDEEPMAKNNPRGVPLSTDGEGMKRGTIVGGGAFREVAAYILDHPVSDSKSGHSFGFSGVPPTTLVRTSHRGKNFKIGSLQMFMDNNGSTEDMGPRPFPVKEVHKIAVLDIRLANADRHAGNILVCKEGEGGNYKLIPIDHGYCLPEKFEDVTFEWLYWPQAREPFSDETIEYIKSLDAEEDIKLLKFHGWELPPRCARVLRISTMLLKKGAARGFTPYDIGRILCRETVNRESEIEDIIQEAEDAVLPGSSENMFLETVSEIMDRHLDKE

SEQ ID NO: 21118 - DNA, 2452 bp, Zea mays
  CDS (579)..(2258)
cccacgcgtccgcccacgcgtccgacccatcgtccgctcgcgtgtcctttgcgctcgcgaactccgtcgccggacacgagccagggacaccgagtgtggtgaggttgccccttcccttcccccacccccatcgtcgtcttggaccagctctgtacgtaccgtccgtcgatcgtcctttcccgtcccctctagcatcgatcgcagcctcctctgctactgccacgtctctgtgcctgccgagacaagcaagggggtcgtcggtcggggctaggttgttcccttaattcattctaggggcagatcagatcgaaagaaatcaaactaacgtagccatggaagaagctccacgtcattccatgtagttacttcttcagagcgcgcggtggcggccggctagaagctttgttcgttgcatttgaattcaccaccaaaggagaaggcgcctgttggcgttccaccaattccatcccatcgccacaaggtcgtcgatcacgcggatcgtcgcgactgaccggccggcctcctcagccgtccttgttgtgctacaagatcgaggcgacaggatccagccagccacgatgtcggcggccggcgccaccgccgtctgcacgagggacggcggcctcctcccgctgcgtccgcactgcgcgaggtcgtcctcctccttcgccgccgccgccgccgccatcgtgatctacctgacggcgccgggcctggccgtgttgccgatgcgggtgatggcgtccgactccatcgcctcggtgaagctccgcgtgcagacgtcccggggcgtgagggcgcgcaagcagaagctcgtcttcggcgggcgcgagctggcgcgcgacgacgggcgcatcctggactacggcgtggcggacggcaacgtggtgcacctggtcatccgcgtcccggacgtgcgcctcatcaccgtggagaccgtgcagggcggcaagttcaggttccgcgtggagcccgggcgcaccgtcgggtacgtgaagcagcagatcgccaaggaccaccccgcggcggcgcgccccggcgagcagcggctcgtgctcgagggcgaggacctcgacgaccgccacctcatccacgacgtgtgcagggccgacggcgccgtgatccacctgctggtgcggcgctccgtcgtcgcgcgcgacgccgggtccgggcggccgtcgccaccgccacggcgtgacgacgtcaggatcgagcccgtaggcggcgaccataaggcggcggtgcgtggcatggtcgacgcggcgctcgccgggatggagagcgggaacgcgcccatcatgtcgtcggagggcacggggggagcctacttcatgcgggacgcgacggggcagcggcacgtggccgtgttcaagccggcggacgaggagcccatggccgccaacaacccgcgcggcctccccgtgtcgtccaccggcgaaggcctgaagaaagggacgcgcgtcggggagggggcgctgagggaggtcgcggcctacatcctcgaccacccacccaggagcgggaccgcggatgatgggttcgccggtgtgccgccgaccgcgctcgtccggtgcacgcacggagccttcaggcagggcggagccggagccggagcgagggcgccggtgcccaagctggggtccatgcaggccttcgttagtaactgcggcagctgcgaggacatgggacccagcgcgttcccggtgcaggaggtccacaagatctgcgtgctggacatacggctcgccaacgccgatcgccacgccggaaacatactcgtccgcaagcacgacggcggcggaggcggaggcatgtcgctggttcccatcgaccatggatactgtctgccggagagcttcgaggactgcactttcgagtggctctactggcctcagtgccgggagcccttcagcgacgagacggtggagtacgtgcggtccctggacgcggaggaggacgtgactatgctgaggctccacgggtgggaggtgtcgcgcgagtgcgcgcgcacgctgcgcgtcgccaccatgctgctgaagaagggtgtggagaggggcctcaccgccttccacatcgggagcatcatgtgcagagagaccctgaccaaggagtccgccatcgaagagatcgtccgtgaggcggcggaacggggaggaggatgcgagactgtcttcttgcaggctgtctcggagatcatggaccgccgtctcgacgacatatcaaaggacatgttagcctctagatatgcacatggctgacaaaataacgatgtaatcaactcaatggctaatgcaaagaatggtgtactatttcctcccaaaaaaagtccaaaaaaaaaagaaaaaaaatttgggagccggtcagcgtcggagaaaagcacgtcactgtggtgcatccagactacagtagtctagacatctaaccggggcgcgcccttttatgggttccaaat

SEQ ID NO: 21119 - protein, 559 aa, Zea mays
MSAAGATAVCTRDGGLLPLRPHCARSSSSFAAAAAAIVIYLTAPGLAVLPMRVMASDSIASVKLRVQTSRGVRARKQKLVFGGRELARDDGRILDYGVADGNVVHLVIRVPDVRLITVETVQGGKFRFRVEPGRTVGYVKQQIAKDHPAAARPGEQRLVLEGEDLDDRHLIHDVCRADGAVIHLLVRRSVVARDAGSGRPSPPPRRDDVRIEPVGGDHKAAVRGMVDAALAGMESGNAPIMSSEGTGGAYFMRDATGQRHVAVFKPADEEPMAANNPRGLPVSSTGEGLKKGTRVGEGALREVAAYILDHPPRSGTADDGFAGVPPTALVRCTHGAFRQGGAGAGARAPVPKLGSMQAFVSNCGSCEDMGPSAFPVQEVHKICVLDIRLANADRHAGNILVRKHDGGGGGGMSLVPIDHGYCLPESFEDCTFEWLYWPQCREPFSDETVEYVRSLDAEEDVTMLRLHGWEVSRECARTLRVATMLLKKGVERGLTAFHIGSIMCRETLTKESAIEEIVREAAERGGGCETVFLQAVSEIMDRRLDDISKDMLASRYAHG

SEQ ID NO: 21120 - DNA, 2478 bp, Zea mays subsp. mays
  CDS (584)..(2290)
aaaacttgccctcttctctgcttgaaccgcggagcaagaccgctcttgttctcttctctgcttgaactgcggagaaagaccgaatccgaagggacgttgggactttctggctgggaagactacataccatttctctaattcgggcgtggtttgtgctgggagggaaggaatccatggggctgcagctcgatccgcgctgagagttgaaggaaccggccttgttgtgtgctccacccaatcgaggaaaaggggcaaggattgctgctttgttgtctttggatccgttacgccattggggattcaaccatcagcagggcgaagtgacggttctgcaccacttttccccttatcctaattcgattttatttgaacactggatgtgattataatctcggttgctgttctgtgcggctctatctgagggtttcctccgtcctggatcgggaaggaaggcgcccttggatttccgtctccatggcgcccgccttgtaacccacggagtctaacttttaaatttagtgtaaatattagtggtagcagctgttaaggaagccccggtctccttagtagccaccgtgtgaatatgtcgtcagctggtgtgatcgtcttggggccagtcccaaaagaccctgctttcctgcctatctgcttcaacggcagccggtcgccacactgctcgtctgggtcacagctgcaggattccattcttattttccttgctgtgcctggtatgtcacccatgcccatgagcgtgctggaatctgagtccattgcctccgtgaagctgcgcatccagcggttcaaaggctttgtggcgacgaagcagcggcttgtgctggatgggcatgaactggcaagaaataactgcccagtcaaggattatgggctggctgagggaaatgttcttcatcttgttattcgactgtctgatctccgtgtgatcaatattgagactgcaactggaaagaagtttcagtttcaggtggatcagagccgcaatgttaagtttcttaagaacaagcttgcagcagagggtgatgaggatattggtaatcttcaggatcacaagcttgaatatgatggcgaggagcttgaggaccaccagctgatagctgatattagcaagagggatgatgctgtaattcatttgttcatcctcaaaccagcaaaagtactgacacagcaagttgatagagatactttggttacagttctcaatccacaggagaaaggcaacctgcaaaatgaacctcgctcaatgaactccacaaaatcagttgaggttaggcctgctcctgttgaaccaatagttagccaaaatgtgaagctgtcacctgaattgattaagatgataaatttaaccacagttggactggagaaagggcacctgcctgtgatgtcagctgaaggttcaggaggtgtatatttcatgcgagatgcaacaggtcagaagaatattgctgtgtttaagcctattgatgaggaacccatggccaaaaacaacccaaggggtcttcctttgtccactgatggcgaggggatgaagaggggaacaattgtagggggaggtgcattcagggaggttgcagcttatattctcgaccatccagttagtgatagtaaatctggtcacagttttgggttttctggtgtgcctcccaccacattggtccgaacctcgcatagggggaagaacttcaagattggttcactgcagatgttcatggacaacaatggaagcactgaagatatgggtcctcgaccttttcctgtcaaggaggttcataaaatagcagtactagatattaggttagctaatgctgatcgtcatgctgggaatattctagtgtgcaaggagagagaaggtggcaactacaagctgattccaattgatcatggttactgcttgccagagaagtttgaagattgtacatttgagtggctctactggccccaagcccgtgagccattcaatgatgaaaccattgaatacatcaaatcactcgatgctgaagaagacatcaagcttctcaagatccatgggtgggagctgcctccacggtgtgctcgtgtcctgcgcatcagcacaatgcttttgaagaaaggtgcatctcgtggcttcacgccctatgacatagggcgcatactatgcagggaaactgtgaatagggactctgagattgaggtcatcattcaggaagcagaggatgctgttctcccatggtccagtgaaaacatgttcttagaaactttatctgaaatcatggaccgtcacctccacaaggaatgagtttagaaattcagaataacttatctagttgctccagctgtatccggtttgttgtaagtattgtagacaaggggtgtcaagggactaatgatttcatttgtttgtatcctctcaaatgatttcacttggttgtaattgctcgagtactttgcttatgcacattttgtgaataatatatttgtttggct

SEQ ID NO: 21121 - protein, 568 aa, Zea mays subsp. mays
MSSAGVIVLGPVPKDPAFLPICFNGSRSPHCSSGSQLQDSILIFLAVPGMSPMPMSVLESESIASVKLRIQRFKGFVATKQRLVLDGHELARNNCPVKDYGLAEGNVLHLVIRLSDLRVINIETATGKKFQFQVDQSRNVKFLKNKLAAEGDEDIGNLQDHKLEYDGEELEDHQLIADISKRDDAVIHLFILKPAKVLTQQVDRDTLVTVLNPQEKGNLQNEPRSMNSTKSVEVRPAPVEPIVSQNVKLSPELIKMINLTTVGLEKGHLPVMSAEGSGGVYFMRDATGQKNIAVFKPIDEEPMAKNNPRGLPLSTDGEGMKRGTIVGGGAFREVAAYILDHPVSDSKSGHSFGFSGVPPTTLVRTSHRGKNFKIGSLQMFMDNNGSTEDMGPRPFPVKEVHKIAVLDIRLANADRHAGNILVCKEREGGNYKLIPIDHGYCLPEKFEDCTFEWLYWPQAREPFNDETIEYIKSLDAEEDIKLLKIHGWELPPRCARVLRISTMLLKKGASRGFTPYDIGRILCRETVNRDSEIEVIIQEAEDAVLPWSSENMFLETLSEIMDRHLHKE

SEQ ID NO: 21122 - DNA, 1698 bp, Oryza sativa (japonica cultivar-group)
  CDS (1)..(1698)
atgtcgtcagccggtatagccacactgagccccctgctggaccagttttgttttgcgccccatggcgagccccggttgcagcagctggattctattgtcatttttcttgccatgccaggggtggcacccatgccaatgcgtgtcctgcactcagactctgttgcctcggtcaagctccgcatccagcagttcaagggctttgtcactaccaagcagcggctggtgttcagtgggcatgagctgtcactaaacaactcccatgtcagggattatggacttaccgatggaaatgtgcttcatcttgtcgtgcggttggctgacctccgtgcgataagcattgagactgccaatgggaagaaatttcagttccaggtggagagttgctgcaatgttgggtatctcaaggacaagctctcagctgagagtggacagcaacttgggagtctcaaggaccaaaggcttgtgtttgacggtgaagagcttgaggataaccaattgattgcagatattagcaagaagggtgctgcagttatccacttgttcatccgcaggccagcaaaggttcagacacagcagggtgataaggaaactgttgttacagttgttactcccaaagacaatgataacctccaaacagatgctttgaaccttgcgaaaccagctaagggtaaacctgctccagttgagccaatcattgctaatggaaaggtgaaattgtctcctgctgtgatggaaatgatctactcaacaatttctggtatagaaaacgggtaccttcccgtgatgtcaacagagggttcagggggagtctatttcatgaaggactcttcaggtgaaagcaatgttgcagtattcaagcctattgatgaggaaccaatggcaaagaataatcccaggggccttcctttgtcaactgatggtgaggggttgaaaaggggaacgcgagtaggggaaggtgcattaagggaggttgcagcatatattcttgaccatccagtttatggatgtaaatcgtgtgatgttcctggattttctggtgtaccacccacagcgttggtccgttgtttccatatggggaagggatctaataaggttggatcattgcagctgtttgtagataacaatggcagttgtgaggatatgggccctcgagctttcccagttaaagaggttcagaagattgccatactggatattaggttggcaaatgctgatcgtcatgctgggaacatattagtgtgccaagatggagaagatcacttgaagttgattccaattgatcatgggtactgcctgccagagaagtttgaagattgtacctttgagtggctctactggccccaagcccgcgaacccttcggtccagaaaccgcagcatacattggatcactagatgctgacaaagacattgcgcttctcaagttccacgggtgggcgctatctccccagtgtgcccgagttctgcgcatcagcacaatgcttttgaagaagggggcagagagaggcctaacgccttatgacatcggcagcatcttatgcaggcaaacagtcaaaaaagaatctgaaatcgaggccatcatagaggaagcagaggatgccatccttccaggaactagtgaggagacattcttggagaccatctcggagatcatggactttcaccttgataagcttgctgtgaagttaaagaagttctga

SEQ ID NO: 21123 - protein, 565 aa, Oryza sativa (japonica cultivar-group)
MSSAGIATLSPLLDQFCFAPHGEPRLQQLDSIVIFLAMPGVAPMPMRVLHSDSVASVKLRIQQFKGFVTTKQRLVFSGHELSLNNSHVRDYGLTDGNVLHLVVRLADLRAISIETANGKKFQFQVESCCNVGYLKDKLSAESGQQLGSLKDQRLVFDGEELEDNQLIADISKKGAAVIHLFIRRPAKVQTQQGDKETVVTVVTPKDNDNLQTDALNLAKPAKGKPAPVEPIIANGKVKLSPAVMEMIYSTISGIENGYLPVMSTEGSGGVYFMKDSSGESNVAVFKPIDEEPMAKNNPRGLPLSTDGEGLKRGTRVGEGALREVAAYILDHPVYGCKSCDVPGFSGVPPTALVRCFHMGKGSNKVGSLQLFVDNNGSCEDMGPRAFPVKEVQKIAILDIRLANADRHAGNILVCQDGEDHLKLIPIDHGYCLPEKFEDCTFEWLYWPQAREPFGPETAAYIGSLDADKDIALLKFHGWALSPQCARVLRISTMLLKKGAERGLTPYDIGSILCRQTVKKESEIEAIIEEAEDAILPGTSEETFLETISEIMDFHLDKLAVKLKKF

SEQ ID NO: 21124 - DNA, 1761 bp, Oryza sativa (japonica cultivar-group)
  CDS (1)..(1761)
atgacgacgacggccgccggcggagccaccctgtgcgcggcgagggaggagcaggagctcctggccacccgcctgaatgtgaacggcatccggccgccgcattgcgccgcggaatctatcctcatctacctcaccgcgccggggctctccatgatgcccatgcgggtgatggcctccgactccatcgcctccgtcaagctccgcgtccagacctccaagggcttcgtcgtccgcaagcagaagctcgtcttcgatggccgggagctcgcccggaacgacagccgcatcatggactacggcgtctcccacggcaacgtcctccacctcgtcatccgcatctccgacctccgcctcatcaccgtccagaccgtccacggcaacaagttcaggttccgcgtcgagcccggccgcaccgtcggctacgtcaagcagcagatcgccaagaactccacccacgacgacgaccaccacagcctcgtcctccagggcgaggtgctcgacgacgcccacctcatccacgacgtctgcaggaccgacggcgccgtcatccacctgctcgtccaccgctccgccaagctcgccgccaggcccgtcgaccgggacttcgaggtctccatcgtcgcgcgcaaccgcaacgccgccgccgacgctgctcaaccgacgttgcacctgcagagggacttcgccatcgagccggtcatcgtcaaccccaaggccgcgcttccgccagtgatcgagaacctggtgggcgccgtgctggccgggatggagaaggggaacgccccgatcatgtcgtcggagggcaccgggggggcgtatttcatgcaggacgcgtcggggcaggagcacgtcgccgtgttcaagccggtggacgaggagcccatggcggccaacaacccacgcggcctcccaccctcgcccaccggcgaggggctcaagaaggggacacgcgtcggcgagggcgccatcagagaggtcgccgcctacatcctcgaccaccctcccggtggccgccgttcgttcgcaggacatcatggctccgccaccgtgggcttcgccggtgtcgcgccaaccgcgctggtccgttgcatgcacaggagcttcaagcaacctgcagcttccgaacaaggtcctccattgttcaaggtggggtcattgcaagcgttcgtgaagaacagcggcagctgcgaggacatgggacctcgtgcgttcccggtgcacgaagttcacaagatctgcgtgctggacatcaggctggccaacgccgacaggcacgccggcaacatcctcacctgcagagacgaacaaggccatggcctcaccctggttccgatcgaccatggatactgtcttcctgagagttttgaggattgcacattcgagtggctctactggccgcagtgtcgggagccattcagcgaggagacggtggagtacataaggtcactggacgcggaggaggacatcgccattctgaggttccatgggtgggagatgccagccaagtgcgagcgcgtcctgcgcgtcaccaccatgctgctcaagaagggcgtcgactcgggcctcgccgcgttcgacatggggagcatcttgtgcagggagacgctcaccaaggagtctgtcatcgaggagatcatccgtgaggttgaagacgatgttggtgatgaagctgccttcctgcagtctgtctctcaatccatggatcgccgtctgggtgaattatccaagaaaaaaaaaagtaatgtaagtatacaagattaa

SEQ ID NO: 21125 - protein, 586 aa, Oryza sativa (japonica cultivar-group)
MTTTAAGGATLCAAREEQELLATRLNVNGIRPPHCAAESILIYLTAPGLSMMPMRVMASDSIASVKLRVQTSKGFVVRKQKLVFDGRELARNDSRIMDYGVSHGNVLHLVIRISDLRLITVQTVHGNKFRFRVEPGRTVGYVKQQIAKNSTHDDDHHSLVLQGEVLDDAHLIHDVCRTDGAVIHLLVHRSAKLAARPVDRDFEVSIVARNRNAAADAAQPTLHLQRDFAIEPVIVNPKAALPPVIENLVGAVLAGMEKGNAPIMSSEGTGGAYFMQDASGQEHVAVFKPVDEEPMAANNPRGLPPSPTGEGLKKGTRVGEGAIREVAAYILDHPPGGRRSFAGHHGSATVGFAGVAPTALVRCMHRSFKQPAASEQGPPLFKVGSLQAFVKNSGSCEDMGPRAFPVHEVHKICVLDIRLANADRHAGNILTCRDEQGHGLTLVPIDHGYCLPESFEDCTFEWLYWPQCREPFSEETVEYIRSLDAEEDIAILRFHGWEMPAKCERVLRVTTMLLKKGVDSGLAAFDMGSILCRETLTKESVIEEIIREVEDDVGDEAAFLQSVSQSMDRRLGELSKKKKSNVSIQD

SEQ ID NO: 21126 - DNA, 1725 bp, Arabidopsis thaliana
  CDS (1)..(1725)
atgtcagttgctagtgtagcgttgagtccagccctggaggaacttgtcaactttccaggtattattggacggtttggtttcaacttagacgacccaatcctggtttttctgactattgctggatctgtgatccctaagcgggtcatggagtcagattcaatagcatctgtgaagctaaggattcagagtatcaagggtttttttgtgaagaagcagaaacttctgtatgatggtagagaggtatctcgaaatgattcccaaattcgagattatggccttgctgatgggaaactgttgcatttggttattagactttcagatcttcaagccatttctgtaagaactgttgatgggaaagagtttgagctcgttgttgagaggagtagaaatgttggttacgtgaagcagcaaattgcttcaaaggaaaaagagctcggaatccccagggatcatgaactcacattagatggtgaagagctggatgaccagagactcatcactgatctctgtcaaaatggagacaatgtgattcacttgctaattagcaaatccgctaaagtcagagctaaaccagtggggaaggattttgaagtgtttatcgaagatgtaaatcacaagcacaatgtggatggtagaagaggaaaaaacatatcatcagaagcgaagcctaaagagttcttcgtggagccttttattgttaatcctgaaattaaacttccgatattgctgaaagagcttatcagctccactttagaaggcttggagaagggaaatggcccaattcgatcatctgatggatcaggaggagcttattttatgcaagatccatctggacacaagtatgtctctgtcttcaagcccattgacgaggaaccaatggctgtgaacaatccgcatggacagcctgtttcagtagatggcgagggactaaagaaaggcacacaggttggtgaaggagctatcagagaagtagcagcctacattttggactatcctatgactggaccacgaacttttcctcatgaccaaaccggttttgctggtgttccgccaacaacaatggtcaaatgcttgcacaaagatttcaaccatcccaatggttacagtttctctcctgagaacacaaagataggctcactgcagatgtttgtgagtaatgttggaagttgcgaagatatgggataccgagtattccctgtcgatcaggttcacaagatatcagtactagacataagactggctaatgctgatcgtcatgctggcaacattttggttagccgagatggaaaagatggtcagatggtgcttactccaatagaccatggctattgctttcccaataagtttgaagattgcacattcgaatggctatactggcctcaagcaaaagagccatactcttcagagacattggaatacatcaaatccttggaccccgagaaagacatcgaacttctgagattccatggttgggagattccaccttcatgcacccgtgtcctccgtatttcaaccatgcttctaaagaaaggttctgcaaagggtctcacaccttttaccatcggaagcataatgtgcagagaaacactcaaggaagaatctgtgatcgagcaaatcatacatgatgcagaagccatagtgcccacagagacaaccgaagatgagtttataagcaccgtctctgccattatggacaaccggctcgaccagtatgcttggaactga

SEQ ID NO: 21127 - protein, 574 aa, Arabidopsis thaliana
MSVASVALSPALEELVNFPGIIGRFGFNLDDPILVFLTIAGSVIPKRVMESDSIASVKLRIQSIKGFFVKKQKLLYDGREVSRNDSQIRDYGLADGKLLHLVIRLSDLQAISVRTVDGKEFELVVERSRNVGYVKQQIASKEKELGIPRDHELTLDGEELDDQRLITDLCQNGDNVIHLLISKSAKVRAKPVGKDFEVFIEDVNHKHNVDGRRGKNISSEAKPKEFFVEPFIVNPEIKLPILLKELISSTLEGLEKGNGPIRSSDGSGGAYFMQDPSGHKYVSVFKPIDEEPMAVNNPHGQPVSVDGEGLKKGTQVGEGAIREVAAYILDYPMTGPRTFPHDQTGFAGVPPTTMVKCLHKDFNHPNGYSFSPENTKIGSLQMFVSNVGSCEDMGYRVFPVDQVHKISVLDIRLANADRHAGNILVSRDGKDGQMVLTPIDHGYCFPNKFEDCTFEWLYWPQAKEPYSSETLEYIKSLDPEKDIELLRFHGWEIPPSCTRVLRISTMLLKKGSAKGLTPFTIGSIMCRETLKEESVIEQIIHDAEAIVPTETTEDEFISTVSAIMDNRLDQYAWN

SEQ ID NO: 21128 - DNA, 1704 bp, Oryza sativa subsp
  CDS (1)..(1704)
atggcatcaacaggcattgcagtgagcccaagcaacaacgatgctttggacctagctgatgcacaattagatggtgatcaatcttcatatcatcatacaccagaggtcttcttactctaccttgcagttcctggtgttcctctagccaaaatgcaagtgcttgagtctgattcggttgccacagtgaagcttcggatccaaaacagcaaaggatttgtggcgagaaaccaaaggttggtttttgaaggcagagagctctctcgcaatgatagccatatccgtgactatggggtgaggtatggaagtgtgcttcatctcgtgatccgactatcagatccacggcgaaccgctgtgaggactgtttatggaaggaagtttaaattccaagtggaccaatgtcgaaatgctagatatatgaagcaagagatttcaagaaattttgaaagtcccaatggtattggagagagcgtgactttggtcaatggtgaaaagcttgatgaaagcacattaatctccaccatttgtgagaccaacacttctgataccgattttcttgcaaacaagtcagaaaattttaatggaaatgaaatagaagaatcttttgagcaattatccatttcttctgacattggaaataatttacaatttgatgatgccaaggagaaatatcccttgattgaaccagttcttgtcaacccaagtgttacccttactccaaaaattacgggtatgatcgaagctacacttgctgggctagaaatggagcacacacctgtgatgtcctcagagggcactgggggagtctacttcatgctagattcatcaggccaagagtatgttgctgttttcaagccaataaatgaagagccaatggcaaaggacaatcctaatggctaccctttgtccagtgatggggaaggattaaagagaggaacaagagtcggtgaaggtgcattcagggaggttgcagcatacattcttgaccatcctattagtggttatcgcgtgagcgatgaactagggtttgctggtgttcctccgacagttcttgttcgatgtttgaatggttatgttgatcagactaagtatgactgcgcggagaaagaaccgaaaattgggtccttgcaaatgtttgtgaagaattctgggagttgtgaggagtttggtcctagggctttccctgtgcaagaggtgcacaagattgctgttttggatatgaggctagctaacgcggatcgccatggcggcaacatactgattcgtaaggatgagaatgggcagattgagttgataccaattgatcatgggtattgtctgcctgaaagctttgaagactgcacatttgattggctttactggccccaagcatgccagcctttcaatgttgaaaccctggactacataaagtcacttgacgaggaagaggatatcaagttgctcaaactcaatggttgtgaaccatcatctaagtgtgttcgtgtttttcgtctaagcaccatgatgttgaagaagggtgctgtgagaggtctaactccatatgagatcggtaacatgttgtgtagggagaacattacaaccaaatcaaagattgaagagattgttgaagaggcagaggatgttgttcttcctgggataggtgaaaaggcattcatggaagccatctcaggtatcatggatcgccatctcaatgaactcttcaaatga

SEQ ID NO: 21129 - protein, 567 aa, Oryza sativa subsp
MASTGIAVSPSNNDALDLADAQLDGDQSSYHHTPEVFLLYLAVPGVPLAKMQVLESDSVATVKLRIQNSKGFVARNQRLVFEGRELSRNDSHIRDYGVRYGSVLHLVIRLSDPRRTAVRTVYGRKFKFQVDQCRNARYMKQEISRNFESPNGIGESVTLVNGEKLDESTLISTICETNTSDTDFLANKSENFNGNEIEESFEQLSISSDIGNNLQFDDAKEKYPLIEPVLVNPSVTLTPKITGMIEATLAGLEMEHTPVMSSEGTGGVYFMLDSSGQEYVAVFKPINEEPMAKDNPNGYPLSSDGEGLKRGTRVGEGAFREVAAYILDHPISGYRVSDELGFAGVPPTVLVRCLNGYVDQTKYDCAEKEPKIGSLQMFVKNSGSCEEFGPRAFPVQEVHKIAVLDMRLANADRHGGNILIRKDENGQIELIPIDHGYCLPESFEDCTFDWLYWPQACQPFNVETLDYIKSLDEEEDIKLLKLNGCEPSSKCVRVFRLSTMMLKKGAVRGLTPYEIGNMLCRENITTKSKIEEIVEEAEDVVLPGIGEKAFMEAISGIMDRHLNELFK

SEQ ID NO: 21130 - DNA, 1746 bp, Oryza sativa subsp
  CDS (1)..(1746)
atgacgacgacggccgccggccgagccaccctgtgcgcggcgagggaggagcaggagctcctggccacccgcctgaatgtgaacggcatccggccgccgcattgcgccgcggaatccatcctcatctacctcaccgcgccggggctctccatgatgcccatgcgggtgatggcctccgactccatcgcctccgtcaagctccgcgtccagacctccaagggcttcgtcgtccgcaagcagaagctcgtcttcgatggccgggagctcgcccggaacgacagccgcatcatggactacggcgtctcccacggcaacgtcctccacctcgtcatccgcatctccgacctccgcctcatcaccgtccagaccgtccacggcaacaagttcaggttccgcgtcgagcccggccgcaccgtcggctacgtcaagcagcagatcgccaagaactccacccacgacgacgaccaccacagcctcgtcctcctgggcgaggtgctcgacgacgcccacctcatccacgacgtctgcaggaccgacggcgccgtcatccacctgctcgtccaccgctccgccaagctcgccgccaggcccgtcgaccgggacttcgaggtctccatcgtcgcgcgcaaccgcaacgccgccgccgacgctgctcaaccgacgttgcacctgcagagggacttcgccatcgagccggtcatcgtcaaccccaaggccgcgcttccgccagtgatcgagaacctggtgggcgccgtgctggccgggatggagaaggggaacgccccgatcatgtcgtcggagggcaccgggggggcgtatttcatgcaggacgcgtcggggcaggagcacgtcgccgtgttcaagccggtggacgaggagcccatggcggccaacaacccacgcggcctcccaccctcgcccaccggcgaggggctcaagaaggggacacgcgtcggcgagggcgccatcagagaggtcgccgcctacatcctcgaccaccctcccggtggccgccgttcgttcgcaggacatcatggctccgccaccgtgggcttcgccggtgtcgcgccaaccgcgctggtccgttgcatgcacaggagcttcaagcaacctgcagcttccgaacaaggtcctccattgttcaaggtggggtcattgcaggcgttcgtgaagaacagcggcagctgcgaggacatgggacctcgtgcgttcccggtgcacgaagttcacaagatctgcgtgctggacatcaggctggccaacgccgacaggcacgccggcaacatcctcacctgcagagacgaacaaggccatggcctcaccctggttccgatcgaccatggatactgtcttcctgagagttttgaggattgcacattcgagtggctctactggccgcagtgtcgggagccattcagcgaggagacggtggagtacataaggtcactggacgcggaggaggacatcgccattctgaggttccatgggtgggagatgccagccaagtgcgagcgcgtcctgcgcgtcaccaccatgctgctcaagaagggcgtcgactcgggcctcgccgcgttcgacatggggagcatcttgtgcagggagacgctcaccaaggagtctgtcatcgaggagatcatccgtgaggttgaagacgatgttggtgatgaagctgccttcctgcagtctgtctctcaatccatggatcgccgtctgggtgaattatccaagaaaaaaaaagtaatgtaa

SEQ ID NO: 21131 - protein, 581 aa, Oryza sativa subsp
MTTTAAGRATLCAAREEQELLATRLNVNGIRPPHCAAESILIYLTAPGLSMMPMRVMASDSIASVKLRVQTSKGFVVRKQKLVFDGRELARNDSRIMDYGVSHGNVLHLVIRISDLRLITVQTVHGNKFRFRVEPGRTVGYVKQQIAKNSTHDDDHHSLVLLGEVLDDAHLIHDVCRTDGAVIHLLVHRSAKLAARPVDRDFEVSIVARNRNAAADAAQPTLHLQRDFAIEPVIVNPKAALPPVIENLVGAVLAGMEKGNAPIMSSEGTGGAYFMQDASGQEHVAVFKPVDEEPMAANNPRGLPPSPTGEGLKKGTRVGEGAIREVAAYILDHPPGGRRSFAGHHGSATVGFAGVAPTALVRCMHRSFKQPAASEQGPPLFKVGSLQAFVKNSGSCEDMGPRAFPVHEVHKICVLDIRLANADRHAGNILTCRDEQGHGLTLVPIDHGYCLPESFEDCTFEWLYWPQCREPFSEETVEYIRSLDAEEDIAILRFHGWEMPAKCERVLRVTTMLLKKGVDSGLAAFDMGSILCRETLTKESVIEEIIREVEDDVGDEAAFLQSVSQSMDRRLGELSKKKKVM

SEQ ID NO: 21132 - DNA, 1707 bp, Oryza sativa subsp
  CDS (1)..(1707)
atgtcgtctgctgccattgccattagcccgatggtggaagagtttgctctcctgcccatctgcttcgacggcagccggtcgccccactgtttgtccgggtcacagctgcaggattcgattatcatctttcttgctgtgcctggtgccccaccgatgccgatgagtgtgctcggctcggagtccatcgcctcggtcaagctgcgcattcagcggttcaaggggttcgtggttaacaagcagaggcttgtgcttgatgggcacgagctggcaaggaacaactgccatgtgaaggattatgggcttgccgatggaaatgttctgcaccttgttatccgcttggctgatcttcgcttgattaacatcgagactaccagtggaaagaagtttcaattccaagtggaccagagccgcaatgtcaagtatctcaagagtaagctggcagtggagggagatgaggaccttggtgaggatcacaagcttgaatgtgatggcaaggagcttgaggaccaccagctgattgctgatattagcaagaaggatgatgctgtgatccatttgttcatccgcaagccagcaaagttacggacacagcaagttgataaagacacggtggttacagttgtcactccgcaggagaaagagaaccttcaaaatgaagctcatgctgtgaaccctgctaaaccagctggtgctaggcctgctcttgttgaaccgattatcgttaaccacaaggtgaagctatcacttgaagtgatgagaatgattagctcagccatagctggtcttgagaatggatacttgccagtgatgtcagctgaaggttcagggggtgtttacttcatgcaagatgcatcaggagagaagaatattgcagtgtttaagcccagagatgaggaacctatggctaaaaacaacccaagagggcttccagtgtcgactgatggagaaggcatgaagagggggacacttgtaggggaaggtgcatttagggaagttgctgcttatattcttgaccatccaattggtgatcatgaatctgaagaacgtatcgggttctctggtgtgcctcccacagcattggtccggagcttacacagggggaagagcttcaagattggatcactgcagatgttcattcagaacaatggaagttgtgaggatatgggtcccagagcatttccagtgaaggaggtccacaaaatagcagtgttagatcttaggttagcaaacgctgatcgtcatgcagggaacattttagtgtgcaaggatgaagaaggtgacaattacatgttggttccaattgatcatggttactgcttgccagagaagtttgaagattgtacctttgagtggctgtactggccccaggctcgtgaaccattcagtgatgaaaccattgcatacatcaaatcactagacgctgaagaggacatcaagcttctcaagttccatgggtgggagctgtctgcaagatgtgctcgtgtcctgcgcatcagcaccatgcttttaaagaaaggtgcagcacgaggcctcacaccgtatgacatcgggcgtatactgtgcagggaaactgtgaatagagactctgagattgaggacatcgtccaggaagccgagggccatgttctcccagggtcaagtgaagtaatcttcttagaaaccgtatctgaaatcatagaccgtcacctcgacaagaagttcgcttag

SEQ ID NO: 21133 - protein, 568 aa, Oryza sativa subsp
MSSAAIAISPMVEEFALLPICFDGSRSPHCLSGSQLQDSIIIFLAVPGAPPMPMSVLGSESIASVKLRIQRFKGFVVNKQRLVLDGHELARNNCHVKDYGLADGNVLHLVIRLADLRLINIETTSGKKFQFQVDQSRNVKYLKSKLAVEGDEDLGEDHKLECDGKELEDHQLIADISKKDDAVIHLFIRKPAKLRTQQVDKDTVVTVVTPQEKENLQNEAHAVNPAKPAGARPALVEPIIVNHKVKLSLEVMRMISSAIAGLENGYLPVMSAEGSGGVYFMQDASGEKNIAVFKPRDEEPMAKNNPRGLPVSTDGEGMKRGTLVGEGAFREVAAYILDHPIGDHESEERIGFSGVPPTALVRSLHRGKSFKIGSLQMFIQNNGSCEDMGPRAFPVKEVHKIAVLDLRLANADRHAGNILVCKDEEGDNYMLVPIDHGYCLPEKFEDCTFEWLYWPQAREPFSDETIAYIKSLDAEEDIKLLKFHGWELSARCARVLRISTMLLKKGAARGLTPYDIGRILCRETVNRDSEIEDIVQEAEGHVLPGSSEVIFLETVSEIIDRHLDKKFA

SEQ ID NO: 21134 - DNA, 1749 bp, Medicago truncatula
  CDS (1)..(1749)
atgtcggttgctgatgttgcattgagaccgattttaaaagaatcggaaaaaaattcacattgtcatcaccgtcgtagttcaagtgaatccattctgatatacgtcaccgtagacggagcagtaacaccgatgcgtgtgttagaatctgattcaattgcatcagtgaaaatgaggattcaaacacgcaaaaatgtttcatggaaaaagcaaaatctagtttccaatggaagagaattatctcgtaacaacgcagagatgaaagagtatggtgtaactactggtaatgttgttcatttggttcttcgtctttctgacatgattttcattgttgtgaggacaatgtgtgggaaggaatttgaatttcagattgatcggcataggaacgttgcacatcttaggaattgtattaaaagaaaggggaaaggttttgttgatcttgttgaggaggaacaagagtttttttgcagcggtgaaaagcttgacgataagaggatttttgatgatatttgtaagaatgatgatgatgttattcatcttattgttaaaaaatcggcgaaagttaatgctacttttgttcataataaggatttagaggtttctgttgttgcagataatttgaattcgaattcgaatcagaatttgaataatcagaatcaggatgaggttgttaaggttatagaacaaccctatggttttgattttttgttagaaccgatttttgtgaaccctaggatcaattattttcctttcctatgggatatgatagatgcaactttcaatggtttgaaaaaaggaaataaacccgttagatcttctgagggaacaggtgggacttacttcatgcaagatttgaaaggtgtggagtatgtttccgttttcaagccaattgatgaggaaccaatggcggttaataatccgcgtggattgccggtttctgtgaacggtgagggattgaagagagggacaaaggttggagaaggagctgtgagagaagttgcggcttatatattggatcatccaaaggctggaccacgtttggtgtctggtgaagcgattggttttgctggtgttccacctacagttatggtgcggtgtttacatgaagcgtttaattaccctgatgggggggatcgtggctcttcgaggatggatcataaggtgggatctttgcagaagtttatgagtaatgatggtaattgtgaggatattggacctggtgcttttcctgtgcaagaggtgcataagatcagtgtgcttgatataagaatggcgaatgcagataggcatgcagggaatatattgtttagaaaagagctaaatggtgaaaccatgctcattcccattgatcatggctattgtcttcctgagaaatttgaagattgcacatttgattggctttactggcctcaagcacgtcagccatactctcccgatacagttgattacatatactctctggatgctgaaaaggacatagagcttctgaaatattatggttgggatgttccagttgagagtgctagaacactccacatctccacaatgttattgaagaaaggggttgagagaggtctcactccctatgccattggaagcatcatgtgtagggaaaatctaaacaaagaatcagtaattgaggagattgtctctgaagcccagaaatcattgctaccaggcacggaggaatctgtttttctcgaatttgtatcgcagatcatggattcccgccttggtgagctgtcgaaatag

SEQ ID NO: 21135 - protein, 582 aa, Medicago truncatula
MSVADVALRPILKESEKNSHCHHRRSSSESILIYVTVDGAVTPMRVLESDSIASVKMRIQTRKNVSWKKQNLVSNGRELSRNNAEMKEYGVTTGNVVHLVLRLSDMIFIVVRTMCGKEFEFQIDRHRNVAHLRNCIKRKGKGFVDLVEEEQEFFCSGEKLDDKRIFDDICKNDDDVIHLIVKKSAKVNATFVHNKDLEVSVVADNLNSNSNQNLNNQNQDEVVKVIEQPYGFDFLLEPIFVNPRINYFPFLWDMIDATFNGLKKGNKPVRSSEGTGGTYFMQDLKGVEYVSVFKPIDEEPMAVNNPRGLPVSVNGEGLKRGTKVGEGAVREVAAYILDHPKAGPRLVSGEAIGFAGVPPTVMVRCLHEAFNYPDGGDRGSSRMDHKVGSLQKFMSNDGNCEDIGPGAFPVQEVHKISVLDIRMANADRHAGNILFRKELNGETMLIPIDHGYCLPEKFEDCTFDWLYWPQARQPYSPDTVDYIYSLDAEKDIELLKYYGWDVPVESARTLHISTMLLKKGVERGLTPYAIGSIMCRENLNKESVIEEIVSEAQKSLLPGTEESVFLEFVSQIMDSRLGELSK

SEQ ID NO: 21136 - DNA, 1740 bp, Medicago truncatula
  CDS (1)..(1740)
atggcttgtttggtacttcatccaatgcatgaaaatggcgaatttaccagtagttttagtcctcatatgagggagtcaattttgatttacctaactgttggtggatctgtgattcccatgcatattttggagacggattccattgcttcggtgaagctgagaattcaaaccttagaaggattttttgtaaagaaactgaaactggttttcgaagggaaggaattggctcataacaaatcttgtgtcggtgattatggtgttgctgatggaaatgtgttgcacttagtactacggctttctgatcttaaagctattactgttaggactttaagtggaaaggagtttgggttttatgttgagaagactaggaatgtgggttatgtgaagcagcagattgcaaagaaagggcgaggggtcttcaatcttgcagatcaagaattagtatgggagggtgaggcacttgaagatcagagacttattgaggacatctgcaaggacaacgacgctgtgattcatttgttggtcaggatatcagattccaaggtaagaactaaaccagttgagaaggatttggagttatcaattgaggcattgtttgcacacgatacagtgccaaattcagctgtggaccagttagggccagtgtctataacaaataaggtcctgaagaggaaccaattgactagagaatttcttttggaaccaatttttaataattccaatatcaaaattccaccagtggtccatgaactaattaaggttacattagaggggttagagaaaggccgtaaaccaattcgatcttcagagggatcagggggagcttatctcatgcaagattcatctggcttaaaatatgtttcaatcttcaagcctaccgatgaggagccaatggcatttaataatccccgaggattacctatctctgtggatggtgaagggttaaagaaaggcacacaagtagggcaaggtgcattgagagaagttgcagcttacattttagatcatccgaggaaaggacctcgctcatatcataacaatgaggagaagggttttgctggagttccgccaactgttatggtcagatgcatgcatgaagggttccaccatcctgaaggttataagaatgtttcaagtaatgtaaaaataggatcacttcagatgtttatgaggaacattggaagctgtgaagacatgggccctagaacatttcctgtggaagaggtacataagatctctgtgctggatatgaggttggtaaatgcagatagacacgctgggaacattttggttgccaagaatggagaagatggtccaattgtcctgattccaattgatcatggttattgcctgcccaagagttttgaagactgcacttttgactggttatactggccacaagctcaagagccttactccctagacaccactgagtacataaaatctctggatgcagaggaagatattaagcttttgaagtctcatggatgggaacttccgctggaatgcgcccggattcttcgtatatcaaccatgcttcttcagaaaggtgcagaaaaaggactcactcctttcaccattggaagcatcatgtgtcgagaaacactgaagaaaaagtctgtcattgagcagattattcacaaagcagaggaagctgcacttcctggaacaagtgaagctaaattccttgatcttgtttcagtgatcatggataatcatttagaagggctattcccatga

SEQ ID NO: 21137 - protein, 579 aa, Medicago truncatula
MACLVLHPMHENGEFTSSFSPHMRESILIYLTVGGSVIPMHILETDSIASVKLRIQTLEGFFVKKLKLVFEGKELAHNKSCVGDYGVADGNVLHLVLRLSDLKAITVRTLSGKEFGFYVEKTRNVGYVKQQIAKKGRGVFNLADQELVWEGEALEDQRLIEDICKDNDAVIHLLVRISDSKVRTKPVEKDLELSIEALFAHDTVPNSAVDQLGPVSITNKVLKRNQLTREFLLEPIFNNSNIKIPPVVHELIKVTLEGLEKGRKPIRSSEGSGGAYLMQDSSGLKYVSIFKPTDEEPMAFNNPRGLPISVDGEGLKKGTQVGQGALREVAAYILDHPRKGPRSYHNNEEKGFAGVPPTVMVRCMHEGFHHPEGYKNVSSNVKIGSLQMFMRNIGSCEDMGPRTFPVEEVHKISVLDMRLVNADRHAGNILVAKNGEDGPIVLIPIDHGYCLPKSFEDCTFDWLYWPQAQEPYSLDTTEYIKSLDAEEDIKLLKSHGWELPLECARILRISTMLLQKGAEKGLTPFTIGSIMCRETLKKKSVIEQIIHKAEEAALPGTSEAKFLDLVSVIMDNHLEGLFP

SEQ ID NO: 21138 - DNA, 1704 bp, Oryza sativa subsp
  CDS (1)..(1704)
atggcatcaacaggcattgcagtgagcccaagcaacaacgatgctttggacctagctgttgcacaattagatggtgatcaatcttcatatcatcatacaccagaggtcttcttactctaccttgcagttcccggtgttcctctagccaaaatgcaagtacttgagtctgattcggttgccgcagtgaagcttcggatccaaaacagcaaaggatttgtggcgagaaaccaaaggttggttttcgaaggcagagagctctctcgcaatgatagccatatccgtgactatggggtgaggtatggaagtgtgcttcatctcgtgatccgactatcagatccacgacgaaccgctgtgaggactgtttatggaaggaagtttaaattccaagtggaccaacgtcgaaatgctagatatatgaagcaagagatttcaagaaatgttgaaagtcccaatggtattggagagagcatgactttggtcaatggtgaaaagcttgatgaaagcacattaatctccaccatttgtgagaccaacacttctgataccgattttcttgcaaacaagtcagaaaattttaatggaaatgaaatagaagaatcttttgagcaattatccatttcttctgacattggaaacaatttacaatttgatgatgccaaggagaaatatcccctgattgaaccagttcttgtcaacccaagtgttacccttactccaaaaattacgggtatgatcgaagctacacttgctgggctagaaatggagcacacacctgtgatgtcctcagagggcactgggggagtctacttcatgctagattcatcaggccaagagtatgttgctgttttcaagccaataaatgaagagccaatggcaaaggacaatcctaatggctaccctttgtccagtgatggggaaggattaaagagaggaacaagagtcggtgaaggtgcattcagggaggttgcagcatacattcttgaccatcctattagtggttatcgcgtgagcgatgaactagggtttgctggtgttcctccgacagttcttgttcgatgtttgaatggttatgttgatcagactaagtatgattgcgcggagaaagaaccgaaaattgggtccttgcaaatgtttgtgaagaattctgggagttgtgaggagtttggtcctagggctttccctgtgcaagaggtgcacaagattgctgttttggatatgaggctagctaacacggatcgccatggcggcaacatactgattcgtaaggatgagaatgggcagattgagctgataccaattgatcatgggtattgtctgcctgaaagctttgaagactgcacatttgattggctttactggccccaagcacgccagcctttcaatgttgaaaccctggactacataaagtcacttgacgaggaagaggatatcaagttgctcaagctcaatggttgtgaaccatcatctaagtgtgttcgtgtttttcgtctaagcaccatgatgttgaagaagggtgctgtgagaggtctaactccatatgagatcggtaacatgttgtgtagggagaacattacaaccaaatcaaagattgaagagattgttgaagaggcagagcatgttgttcttcctgggataggtgaaaaggcattcatggaagccatctcaggtatcatggatcgctatctcaatgaactcttcaaatga

SEQ ID NO: 21139 - protein, 567 aa, Oryza sativa subsp
MASTGIAVSPSNNDALDLAVAQLDGDQSSYHHTPEVFLLYLAVPGVPLAKMQVLESDSVAAVKLRIQNSKGFVARNQRLVFEGRELSRNDSHIRDYGVRYGSVLHLVIRLSDPRRTAVRTVYGRKFKFQVDQRRNARYMKQEISRNVESPNGIGESMTLVNGEKLDESTLISTICETNTSDTDFLANKSENFNGNEIEESFEQLSISSDIGNNLQFDDAKEKYPLIEPVLVNPSVTLTPKITGMIEATLAGLEMEHTPVMSSEGTGGVYFMLDSSGQEYVAVFKPINEEPMAKDNPNGYPLSSDGEGLKRGTRVGEGAFREVAAYILDHPISGYRVSDELGFAGVPPTVLVRCLNGYVDQTKYDCAEKEPKIGSLQMFVKNSGSCEEFGPRAFPVQEVHKIAVLDMRLANTDRHGGNILIRKDENGQIELIPIDHGYCLPESFEDCTFDWLYWPQARQPFNVETLDYIKSLDEEEDIKLLKLNGCEPSSKCVRVFRLSTMMLKKGAVRGLTPYEIGNMLCRENITTKSKIEEIVEEAEHVVLPGIGEKAFMEAISGIMDRYLNELFK

SEQ ID NO: 21140 - DNA, 1707 bp, Oryza sativa subsp
  CDS (1)..(1707)
atgtcgtctgctgccattgccattagcccgatggtggaagagtttgctctcctgcccatctgcttcgacggcagccggtcgccccactgtttgtccgggtcacagctgcaggattcgattatcatctttcttgctgtgcctggtgccccaccgatgccgatgagtgtgctcggctcggagtccatcgcctcggtcaagctgcgcattcagcggttcaaggggttcgtggttaacaagcagaggcttgtgcttgatgggcacgagctggcaaggaacaactgccatgtgaaggattatgggcttgccgatggaaatgttctgcaccttgttatccgcttggctgatcttcgcttgattaacatcgagactaccagtggaaagaagtttcagttccaggtggaccagagccgcaatgtcaagtatctcaagagtaagctggcagtggagggagatgaggaccttggtgaggatcacaagcttgaatgtgatggcaaggagcttgaggaccaccagctgattgctgatattagcaagaaggatgatgctgtgatccatttgttcatccgcaagccagcaaagttacggacacagcaagttgataaagacacggtggttacagttgtcactccgcaggagaaagagaaccttcaaaatgaagctcatgctgtgaaccctgctaaaccagctggtgctaggcctgctcttgttgaaccaattatcgttaaccacaaggtgaagctatcacttgaagtgatgagaatgattagctcagccatagctggtcttgagaatggatacttgccagtgatgtcagctgaaggttcagggggtgtttacttcatgcaagatgcatcaggagagaagaatattgcagtgtttaagcccagagatgaggaacctatggctaaaaacaacccaagagggcttccagtgtcgactgatggagaaggcatgaagagggggacacttgtaggggaaggtgcatttagggaagttgctgcttatattcttgaccatccaattggtgatcatgaatctgaagaacgtatcgggttctctggtgtgcctcccacagcattggtccggagcttacacagggggaagagcttcaagattggatcactgcagatgttcattcagaacaatggaagttgtgaggatatgggtccccgagcatttccagtgaaggaggtccacaaaatagcagtgttagatcttaggttagcaaacgctgatcgtcatgcagggaacattttagtgtgcaaggatgaagaaggtggcaattacaagttggttccaattgatcatggttactgcttgccagagaagtttgaagattgtacctttgagtggctgtactggccccaggctcgtgaaccattcagtgatgaaaccattgcatacatcaaatcactagacgctgaagaggacatcaagcttctcaagttccatgggtgggagctgtctgcaagatgtgctcgtgtcctgtgcatcagcaccatgcttttaaagaaaggtgcagcacgaggcctcacaccgtatgacatcgggcgtatactgtgcagggaaactgtgaatagagactctgagattgaggacatcgtccaggaagccgagggccatgttctcccagggtcaagtgaagtaatcttcttagaaaccgtatctgaaatcatagaccgtcacctcgacaagaagttcgcttag

SEQ ID NO: 21141 - protein, 568 aa, Oryza sativa subsp
MSSAAIAISPMVEEFALLPICFDGSRSPHCLSGSQLQDSIIIFLAVPGAPPMPMSVLGSESIASVKLRIQRFKGFVVNKQRLVLDGHELARNNCHVKDYGLADGNVLHLVIRLADLRLINIETTSGKKFQFQVDQSRNVKYLKSKLAVEGDEDLGEDHKLECDGKELEDHQLIADISKKDDAVIHLFIRKPAKLRTQQVDKDTVVTVVTPQEKENLQNEAHAVNPAKPAGARPALVEPIIVNHKVKLSLEVMRMISSAIAGLENGYLPVMSAEGSGGVYFMQDASGEKNIAVFKPRDEEPMAKNNPRGLPVSTDGEGMKRGTLVGEGAFREVAAYILDHPIGDHESEERIGFSGVPPTALVRSLHRGKSFKIGSLQMFIQNNGSCEDMGPRAFPVKEVHKIAVLDLRLANADRHAGNILVCKDEEGGNYKLVPIDHGYCLPEKFEDCTFEWLYWPQAREPFSDETIAYIKSLDAEEDIKLLKFHGWELSARCARVLCISTMLLKKGAARGLTPYDIGRILCRETVNRDSEIEDIVQEAEGHVLPGSSEVIFLETVSEIIDRHLDKKFA

SEQ ID NO: 21142 - DNA, 1839 bp, Oryza sativa subsp
  CDS (1)..(1839)
atgacgacgacggccgccggcggagccaccctgtgcgcggcgagggaggagcaggagctcctggccacccgcctgaatgtgaacggcatccggccgccgcattgcgccgcggaatctatcctcatctacctcaccgcgccggggctctccatgatgcccatgcgggtgatggcctccgactccatcgcctccgtcaagctccgcgtccagacctccaagggcttcgtcgtccgcaagcagaagctcgtcttcgatggccgggagctcgcccggaacgacagccgcatcatggactacggcgtctcccacggcaacgtcctccacctcgtcatccgcatctccgacctccgcctcatcaccgtccagaccgtccacggcaacaagttcaggttccgcgtcgagcccggccgcaccgtcggctacgtcaagcagcagatcgccaagaactccacccacgacgacgaccaccacagcctcgtcctccagggcgaggtgctcgacgacgcccacctcatccacgacgtctgcaggaccgacggcgccgtcatccacctgctcgtccaccgctccgccaagctcgccgccaggcccgtcgaccgggacttcgaggtctccatcgtcgcgcgcaaccgcaacgccgccgccgacgctgctcaaccgacgttgcacctgcagagggacttcgccatcgagccggtcatcgtcaaccccaaggccgcgcttccgccagtgatcgagaacctggtgggcgccgtgctggccgggatggagaaggggaacgccccgatcatgtcgtcggagggcaccgggggggcgtatttcatgcaggacgcgtcggggcaggagcacgtcgccgtgttcaagccggtggacgaggagcccatggcggccaacaacccacgcggcctcccaccctcgcccaccggcgaggggctcaagaaggggacacgcgtcggcgagggcgccatcagagaggtcgccgcctacatcctcgaccaccctcccggtggccgccgttcgttcgcaggacatcatggctccgccaccgtgggcttcgccggtgtcgcgccaaccgcgctggtccgttgcatgcacaggagcttcaagcaacctgcagcttccgaacaaggtcctccattgttcaaggtggggtcattgcaagcgttcgtgaagaacagcggcagctgcgaggacatgggacctcgtgcgttcccggtgcacgaagttcacaagatctgcgtgctggacatcaggctggccaacgccgacaggcacgccggcaacatcctcacctgcagagacgaacaaggccatggcctcaccctggttccgatcgaccatggatactgtcttcctgagagttgtcgggagccattcagcgaggagacggtggagtacataaggtcactggacgcggaggaggacatcgccattctgaggttccatgggtgggagatgccagccaagtgcgagcgcgtcctgcgcgtcaccaccatgctgctcaagaagggcgtcgactcgggcctcgccgcgttcgacatggggagcatcttgtgcagggagacgctcaccaaggagtctgtcatcgaggagatcatccgtgaggttgaagacgatgttggtgatgaagctgccttcctgcagtctgtctctcaatccatggatcgccgtctgggtgaattatccaagaaaaaaaaaagtaatatagaatatgatctcggtgtttgtgctgtcataattagggttaaacttttcggtttagctaatttgattggtcctcaccgaaatgccgaaatttctgaaatttcggatattaccaaaattcacaaaaaaatttaa

SEQ ID NO: 21143 - protein, 612 aa, Oryza sativa subsp
MTTTAAGGATLCAAREEQELLATRLNVNGIRPPHCAAESILIYLTAPGLSMMPMRVMASDSIASVKLRVQTSKGFVVRKQKLVFDGRELARNDSRIMDYGVSHGNVLHLVIRISDLRLITVQTVHGNKFRFRVEPGRTVGYVKQQIAKNSTHDDDHHSLVLQGEVLDDAHLIHDVCRTDGAVIHLLVHRSAKLAARPVDRDFEVSIVARNRNAAADAAQPTLHLQRDFAIEPVIVNPKAALPPVIENLVGAVLAGMEKGNAPIMSSEGTGGAYFMQDASGQEHVAVFKPVDEEPMAANNPRGLPPSPTGEGLKKGTRVGEGAIREVAAYILDHPPGGRRSFAGHHGSATVGFAGVAPTALVRCMHRSFKQPAASEQGPPLFKVGSLQAFVKNSGSCEDMGPRAFPVHEVHKICVLDIRLANADRHAGNILTCRDEQGHGLTLVPIDHGYCLPESCREPFSEETVEYIRSLDAEEDIAILRFHGWEMPAKCERVLRVTTMLLKKGVDSGLAAFDMGSILCRETLTKESVIEEIIREVEDDVGDEAAFLQSVSQSMDRRLGELSKKKKSNIEYDLGVCAVIIRVKLFGLANLIGPHRNAEISEISDITKIHKKI

SEQ ID NO: 21144 - DNA, 1518 bp, Arabidopsis thaliana
  CDS (1)..(1518)
atgtctgttgctgatgttgctttaagcccgattcatagaggatcggcgtttgctgttggtggtttcggacaatcgacgacgacgcattactctgttaaatcggttttggtgttccttagtgtttctggttctacgatgcctatgctcatcttggagtctgattctattgctgaggttaaacttaggatccagacttgtaatggttttagggttagaagacagaaacttgttttcagtggtcgagagcttgccaggaatgcctcacgtgtgaaggactatggtgtgactggtggtagtgtgttgcatttggtgcttaagctctatgatcctttgcttgttactgtgattactacttgcggcaaggtctttcagtttcatgtggatcgtcgtagaaatgttgggtatttgaagaaacggatctctaaagagggtaaagggtttcctgaggttgatgatcaagagatcttgtttaaaggagagaagcttgatgacaacagaatcattgatgggatttgtaaagatggaaactctgtaatccatttgctggttaagaaatcggtggaagacacggtgaaaagagaagaagacactgctactggagggacatatctgatgcaagattcttcaggtctcaactatgtatctgtgttcaagcctatggatgaagaaccaatggctgtgaacaatcctcagcagcttcctgtgtcatcagacggtcagggattgaagagaggaactagagtaggagaaggggcaacaagagaagttgcagcttacttgttagatcatccaaagagcggactaagatctgtgtctaaagaagttatgggttttgccggtgtgccaccaactgctatggtcagaagctcacacaaagtgtataactacccaaatgggttcagcagctgtgctacaaaagatgccaaagttggttctttgcaaatgttcatgaagaacaatggaagctgcgaagacatcggccctggagcgtttcctgttgaggaagtgcacaaaatctgtgtctttgacataagaatggcaaatgcagatcgacatgctggaaacatattgaccgggaaaagcgaagaaggaaaaactcttcttattcccatcgatcatggttattgtttgcccgagaattttgaagattgcacatttgagtggctctactggccgcaagcgaaactcccgttttctgcagacaccattgactacataaactctctagactccgaacaagacattgcgcttctgcaactccatggctggaatgttcctgaagctgtctcacgcactctacgtatctccacgatgctgctgaagaaaggcgttgagagaaacctgacgccatatcaaataggaagcgtaatgtgcagagaaacggtgaacaaagactcagcgattgaagagatagtgagagaagctcataactcggtgttgcctgcgtcaagcgaggctacgtttcttgaagcagtatctgtggccatggatcgtcgtctggacgagctaactaagtaa

SEQ ID NO: 21145 - protein, 505 aa, Arabidopsis thaliana
MSVADVALSPIHRGSAFAVGGFGQSTTTHYSVKSVLVFLSVSGSTMPMLILESDSIAEVKLRIQTCNGFRVRRQKLVFSGRELARNASRVKDYGVTGGSVLHLVLKLYDPLLVTVITTCGKVFQFHVDRRRNVGYLKKRISKEGKGFPEVDDQEILFKGEKLDDNRIIDGICKDGNSVIHLLVKKSVEDTVKREEDTATGGTYLMQDSSGLNYVSVFKPMDEEPMAVNNPQQLPVSSDGQGLKRGTRVGEGATREVAAYLLDHPKSGLRSVSKEVMGFAGVPPTAMVRSSHKVYNYPNGFSSCATKDAKVGSLQMFMKNNGSCEDIGPGAFPVEEVHKICVFDIRMANADRHAGNILTGKSEEGKTLLIPIDHGYCLPENFEDCTFEWLYWPQAKLPFSADTIDYINSLDSEQDIALLQLHGWNVPEAVSRTLRISTMLLKKGVERNLTPYQIGSVMCRETVNKDSAIEEIVREAHNSVLPASSEATFLEAVSVAMDRRLDELTK

SEQ ID NO: 21146 - DNA, 1707 bp, Zea mays
  CDS (1)..(1707)
atgtcgtcggcaggtgtgatcgtcttggggccagttccagaagaccctgccttcctgcccatctgcttcaatggcagccggtcacagcactgctcatctgggtcacaactgcaggattccattcttattttccttgctgtgccgggtatgccacccatgcccatgagcgtgctgggatctgagtccattgcatctgtcaagctgcgcatccagcagttcaagggctttgtggcgacgaagcagaggcttgtgctggatgggcatgagctggcaagaaacaactccccagtcaaggattatgggctggccgagggaaatgttctgcatcttgttattcgactgtcagatctccgtgtgattaacattgagactgcaactggaaggaagtttcagtttcaggtggaccagagccgcaatgttaagtttctcaagaataagcttgaagcagagggtgatgaggatattggtaatcttgaggatcacaagcttgaatatgatggtgaggagcttgaggaccaccagctgatagctgatattagcaggagggatgatgctgtgattcatttattcatccgcaaaccagcaaaggtatggacacaacaagttgatggagatactttggttacagttgtcaatccacaggggaaaggcaacctgcaaaatgaagctggctcaatgaactccgcaaactcagttggggttaggcctgcccctgttgaaccaatagttaaccgaaaagcaaagctgtcacgtgaagtgatgaagatgataaattcaaccatagctggactggagaaagggcacctgcctgtgatgtcagctgaaggttcaggaggtgtttatttcatgcgagatgcaacaggccagaagaatgttgctgtgtttaagcctattgatgaggaacccatggccaaaaacaacccaaggggcgttcctgtgtccacagacggcgaggggatgaagaggggaacaattgtagggggaggtgcattcagggaggttgcagcttatattctcgaccatccagttagtgatagtaaatctggtcacagttttgggttttctggtgtgcctcccaccacattggtccgaacctcacatagggggaagaacttcaagattggttcactgcagatgttcatggacaacaatggaagcactgaagatatgggtcctcgaccttttcctgtcaaggaggttcataaaatagcagtactagatattaggttagctaatgctgatcgtcatgctgggaatattctagtgtgcaaggagggagaaggtggcaactacaagctgattccaattgatcatggttattgcttgccagagaagtttgaagatgttacatttgagtggctctactggccccaagcccgtgagccattcagtgatgaaaccattgaatacatcaaatcacttgatgctgaagaagacatcaagcttctcaagttccatgggtgggagctgcccccacgatgcgctcgtgttctgcgcatcagcaccatgcttttgaagaaaggtgcagctcgtggcttcacaccatatgacatagggcgcatactatgcagggaaactgtgaatagggagtctgagattgaggacatcattcaggaagcagaggatgctgttctcccagggtccagtgaaaacatgttcttagaaactgtatctgaaatcatggaccgtcacctcgacaaggagtga

SEQ ID NO: 21147 - protein, 568 aa, Zea mays
MSSAGVIVLGPVPEDPAFLPICFNGSRSQHCSSGSQLQDSILIFLAVPGMPPMPMSVLGSESIASVKLRIQQFKGFVATKQRLVLDGHELARNNSPVKDYGLAEGNVLHLVIRLSDLRVINIETATGRKFQFQVDQSRNVKFLKNKLEAEGDEDIGNLEDHKLEYDGEELEDHQLIADISRRDDAVIHLFIRKPAKVWTQQVDGDTLVTVVNPQGKGNLQNEAGSMNSANSVGVRPAPVEPIVNRKAKLSREVMKMINSTIAGLEKGHLPVMSAEGSGGVYFMRDATGQKNVAVFKPIDEEPMAKNNPRGVPVSTDGEGMKRGTIVGGGAFREVAAYILDHPVSDSKSGHSFGFSGVPPTTLVRTSHRGKNFKIGSLQMFMDNNGSTEDMGPRPFPVKEVHKIAVLDIRLANADRHAGNILVCKEGEGGNYKLIPIDHGYCLPEKFEDVTFEWLYWPQAREPFSDETIEYIKSLDAEEDIKLLKFHGWELPPRCARVLRISTMLLKKGAARGFTPYDIGRILCRETVNRESEIEDIIQEAEDAVLPGSSENMFLETVSEIMDRHLDKE

SEQ ID NO: 21148 - DNA, 1707 bp, Zea mays
  CDS (1)..(1707)
atgtcgacagcaggggtgatcgtcttggggccagtcccaaaagaccctgccttcctgcccatctgcttcaacggcagccggtcacaacactgctcatctgggtcacaactgcaggattccattcttattttccttgcggtgccgggtatgccacccatgcccatgagcgtgctggaatctgagtccattgcatccgtcaagctgcgcatccagcagctcaagggctttgtggcgacgaagcagaggcttgtgctggatgggcatgaactggcaagaaacaactccccagtcaaggattatgggctggccgagggaaatgttctgcatcttgttattcgactatcagatctacgtgtgattaacattgagactgcaactggaaggaagtttcagtttcaggtggaccagagccgcaatgttaagtttctcaagaataagcttgaagcagagggtgatgaggatattggtaatcttgaggatcacaagcttgaatatgatggtgaggagcttgaggacaaccagctgatagctgatattagcaggagggatgatgctgtgattcatttattcatccgcaaaccagcaaaggtatggacacaacaagttgatggagatactttggttacagttgtcaatccacaggggaaaggcaacctgcaaaatgaagctggctcaatgaactccgcaaactcagttggggttaggcctgcccctgttgaaccaatagttaaccgaaaagcaaagctgtcacgtgaagtgatgaagatgataaattcaaccatagctggactggagaaagggcacctgcctgtgatgtcagctgaaggttcaggaggtgtttatttcatgcgagatgcaacaggccagaagaatgttgctgtgtttaagcctattgatgaggaacccatggccaaaaacaacccaaggggcgttcctgtgtccacagacggcgaggggatgaagaggggaacaattgtaggggaaggtgcattcagggaggttgcagcttatattctcgaccatccagttagtgatagtaaatatggtcacagtgttgggttttctggtgtgcctcccaccacattggtccgaacctcacatagggggaagaacttcaagattggttcactgcagatgttcatggacaacaatggaagcactgaagatatgggtcctcgaccttttcctgtcaaggaggttcacaaaatagcagtactagatattaggttagctaatgctgatcgtcatgctgggaatattctagtgtgcaaggagggagaaggtggcaactacaagctgattccaattgatcatggttattgcttgccagagaagtttgaagatgttacatttgagtggctctactggccccaagcccgtgagccattcagtgatgaaaccattgaatacatcaaatcacttgatgctgaagaagacatcaagcttctcaagttccatgggtgggagctgcccccacgatgcgctcgtgttctgcgcatcagcaccatgcttttgaagaaaggtgcagctcgtggcttcacaccatatgacatagggcgcatactatgcagggaaactgtgaatagggagtctgagattgaggacatcattcaggaagcagaggatgctgttctcccagggtccagtgaaaacatgttcttagaaactgtatctgaaatcatggaccgtcacctcgacaaggagtga

SEQ ID NO: 21149 - protein, 568 aa, Zea mays
MSTAGVIVLGPVPKDPAFLPICFNGSRSQHCSSGSQLQDSILIFLAVPGMPPMPMSVLESESIASVKLRIQQLKGFVATKQRLVLDGHELARNNSPVKDYGLAEGNVLHLVIRLSDLRVINIETATGRKFQFQVDQSRNVKFLKNKLEAEGDEDIGNLEDHKLEYDGEELEDNQLIADISRRDDAVIHLFIRKPAKVWTQQVDGDTLVTVVNPQGKGNLQNEAGSMNSANSVGVRPAPVEPIVNRKAKLSREVMKMINSTIAGLEKGHLPVMSAEGSGGVYFMRDATGQKNVAVFKPIDEEPMAKNNPRGVPVSTDGEGMKRGTIVGEGAFREVAAYILDHPVSDSKYGHSVGFSGVPPTTLVRTSHRGKNFKIGSLQMFMDNNGSTEDMGPRPFPVKEVHKIAVLDIRLANADRHAGNILVCKEGEGGNYKLIPIDHGYCLPEKFEDVTFEWLYWPQAREPFSDETIEYIKSLDAEEDIKLLKFHGWELPPRCARVLRISTMLLKKGAARGFTPYDIGRILCRETVNRESEIEDIIQEAEDAVLPGSSENMFLETVSEIMDRHLDKE

SEQ ID NO: 21150 - DNA, 20 bp, Artificial sequence
  primer
atgtcatcagctggtgttgc

SEQ ID NO: 21151 - DNA, 21 bp, Artificial sequence
  primer
ttagtgttcctgagagtgatc

SEQ ID NO: 21152 - protein, 558 aa, Artificial sequence
  consensus sequence
  Variant (2)..(2): Xaa in position 2 is any amino acid
  Variant (4)..(4): Xaa in position 4 is any amino acid
  Variant (6)..(7): Xaa in position 6 to 7 is any amino acid
  Variant (10)..(12): Xaa in position 10 to 12 is any amino acid
  Variant (13)..(13): Xaa in position 13 is any or no amino acid
  Variant (16)..(16): Xaa in position 16 is any amino acid
  Variant (18)..(19): Xaa in position 18 to 19 is any amino acid
  Variant (21)..(21): Xaa in position 21 is any amino acid
  Variant (30)..(30): Xaa in position 30 is any amino acid
  Variant (32)..(34): Xaa in position 32 to 34 is any amino acid
  Variant (37)..(39): Xaa in position 37 to 39 is any amino acid
  Variant (42)..(42): Xaa in position 42 is any amino acid
  Variant (45)..(46): Xaa in position 45 to 46 is any amino acid
  Variant (48)..(48): Xaa in position 48 is any amino acid
  Variant (51)..(51): Xaa in position 51 is any amino acid
  Variant (54)..(58): Xaa in position 54 to 58 is any amino acid
  Variant (62)..(64): Xaa in position 62 to 64 is any amino acid
  Variant (72)..(72): Xaa in position 72 is any amino acid
  Variant (74)..(75): Xaa in position 74 to 75 is any amino acid
  Variant (77)..(79): Xaa in position 77 to 79 is any amino acid
  Variant (81)..(83): Xaa in position 81 to 83 is any amino acid
  Variant (85)..(86): Xaa in position 85 to 86 is any amino acid
  Variant (88)..(89): Xaa in position 88 to 89 is any amino acid
  Variant (91)..(91): Xaa in position 91 is any amino acid
  Variant (93)..(93): Xaa in position 93 is any amino acid
  Variant (95)..(97): Xaa in position 95 to 97 is any amino acid
  Variant (99)..(99): Xaa in position 99 is any amino acid
  Variant (101)..(103): Xaa in position 101 to 103 is any amino acid
  Variant (105)..(123): Xaa in position 105 to 123 is any amino acid
  Variant (124)..(127): Xaa in position 124 to 127 is any or no amino acid
  Variant (130)..(130): Xaa in position 130 is any amino acid
  Variant (132)..(132): Xaa in position 132 is any amino acid
  Variant (134)..(135): Xaa in position 134 to 135 is any amino acid
  Variant (138)..(138): Xaa in position 138 is any amino acid
  Variant (140)..(146): Xaa in position 140 to 146 is any amino acid
  Variant (151)..(165): Xaa in position 151 to 165 is any amino acid
  Variant (166)..(210): Xaa in position 166 to 210 is any or no amino acid
  Variant (213)..(214): Xaa in position 213 to 214 is any amino acid
  Variant (215)..(215): Xaa in position 215 is any or no amino acid
  Variant (217)..(230): Xaa in position 217 to 230 is any amino acid
  Variant (231)..(234): Xaa in position 231 to 234 is any or no amino acid
  Variant (236)..(236): Xaa in position 236 is any amino acid
  Variant (238)..(238): Xaa in position 238 is any amino acid
  Variant (240)..(241): Xaa in position 240 to 241 is any amino acid
  Variant (243)..(244): Xaa in position 243 to 244 is any amino acid
  Variant (246)..(246): Xaa in position 246 is any amino acid
  Variant (249)..(249): Xaa in position 249 is any amino acid
  Variant (252)..(252): Xaa in position 252 is any amino acid
  Variant (256)..(256): Xaa in position 256 is any amino acid
  Variant (258)..(259): Xaa in position 258 to 259 is any amino acid
  Variant (261)..(263): Xaa in position 261 to 263 is any amino acid
  Variant (265)..(265): Xaa in position 265 is any amino acid
  Variant (270)..(270): Xaa in position 270 is any amino acid
  Variant (277)..(277): Xaa in position 277 is any amino acid
  Variant (281)..(281): Xaa in position 281 is any amino acid
  Variant (283)..(283): Xaa in position 283 is any amino acid
  Variant (285)..(285): Xaa in position 285 is any amino acid
  Variant (287)..(288): Xaa in position 287 to 288 is any amino acid
  Variant (292)..(292): Xaa in position 292 is any amino acid
  Variant (294)..(294): Xaa in position 294 is any amino acid
  Variant (297)..(297): Xaa in position 297 is any amino acid
  Variant (303)..(303): Xaa in position 303 is any amino acid
  Variant (315)..(322): Xaa in position 315 to 322 is any amino acid
  Variant (323)..(330): Xaa in position 323 to 330 is any or no amino acid
  Variant (333)..(333): Xaa in position 333 is any amino acid
  Variant (339)..(340): Xaa in position 339 to 340 is any amino acid
  Variant (343)..(344): Xaa in position 343 to 344 is any amino acid
  Variant (346)..(350): Xaa in position 346 to 350 is any amino acid
  Variant (351)..(363): Xaa in position 351 to 363 is any or no amino acid
  Variant (365)..(365): Xaa in position 365 is any amino acid
  Variant (370)..(370): Xaa in position 370 is any amino acid
  Variant (372)..(373): Xaa in position 372 to 373 is any amino acid
  Variant (375)..(375): Xaa in position 375 is any amino acid
  Variant (378)..(378): Xaa in position 378 is any amino acid
  Variant (384)..(385): Xaa in position 384 to 385 is any amino acid
  Variant (389)..(389): Xaa in position 389 is any amino acid
  Variant (395)..(395): Xaa in position 395 is any amino acid
  Variant (399)..(399): Xaa in position 399 is any amino acid
  Variant (413)..(422): Xaa in position 413 to 422 is any amino acid
  Variant (423)..(425): Xaa in position 423 to 425 is any or no amino acid
  Variant (427)..(427): Xaa in position 427 is any amino acid
  Variant (438)..(438): Xaa in position 438 is any amino acid
  Variant (442)..(442): Xaa in position 442 is any amino acid
  Variant (445)..(445): Xaa in position 445 is any amino acid
  Variant (452)..(452): Xaa in position 452 is any amino acid
  Variant (454)..(454): Xaa in position 454 is any amino acid
  Variant (458)..(458): Xaa in position 458 is any amino acid
  Variant (461)..(462): Xaa in position 461 to 462 is any amino acid
  Variant (465)..(465): Xaa in position 465 is any amino acid
  Variant (474)..(475): Xaa in position 474 to 475 is any amino acid
  Variant (477)..(478): Xaa in position 477 to 478 is any amino acid
  Variant (483)..(486): Xaa in position 483 to 486 is any amino acid
  Variant (488)..(488): Xaa in position 488 is any amino acid
  Variant (490)..(490): Xaa in position 490 is any amino acid
  Variant (493)..(494): Xaa in position 493 to 494 is any amino acid
  Variant (502)..(504): Xaa in position 502 to 504 is any amino acid
  Variant (506)..(506): Xaa in position 506 is any amino acid
  Variant (508)..(510): Xaa in position 508 to 510 is any amino acid
  Variant (513)..(513): Xaa in position 513 is any amino acid
  Variant (515)..(515): Xaa in position 515 is any amino acid
  Variant (520)..(523): Xaa in position 520 to 523 is any amino acid
  Variant (525)..(525): Xaa in position 525 is any amino acid
  Variant (528)..(528): Xaa in position 528 is any amino acid
  Variant (530)..(531): Xaa in position 530 to 531 is any amino acid
  Variant (534)..(539): Xaa in position 534 to 539 is any amino acid
  Variant (540)..(542): Xaa in position 540 to 542 is any or no amino acid
  Variant (544)..(545): Xaa in position 544 to 545 is any amino acid
  Variant (548)..(550): Xaa in position 548 to 550 is any amino acid
  Variant (552)..(553): Xaa in position 552 to 553 is any amino acid
  Variant (556)..(557): Xaa in position 556 to 557 is any amino acid
IXIXLXXPGXXXXPMXVXXSXSIASVKLRXQXXXGFXXXKQXLVXXGXELXRNXXXXXDYGXXXGNVLHLVXRXXDXXXIXXXTXXGXXFXFXVXXXRXVXXXKXXXXXXXXXXXXXXXXXXXXXXXGEXLXDXXLIXDXXXXXXXVIHLXXXXXXXXXXXXXXXXXXXXXXXXXXXXXXXXXXXXXXXXXXXXXXXXXXXXXXXXXXXXEPXXXNXXXXXXXXXXXXXXXXXXGXEXGXXPXXSXEGXGGXYFMXDXXGXXXVXVFKPXDEEPMAXNNPXGXPXSXXGEGXKXGTXVGEGAXREVAAYILDHPXXXXXXXXXXXXXXXXGFXGVPPTXXVRXXHXXXXXXXXXXXXXXXXXXKXGSLQXFXXNXGSXEDMGPXXFPVXEVHKIXVLDXRLANADRHAGNILXXXXXXXXXXXXXLXPIDHGYCLPEXFEDXTFXWLYWPQXRXPFSXETXXYIXSLDAEEDIXXLXXHGWEXXXXCXRXLRXXTMLLKKGXXXGXTXXXIGXIXCRETXXXXSXIEXIXXEAXXXXXXXXXEXXFLXXXSXXMDXXL

SEQ ID NO: 21153 - protein, 34 aa, Artificial sequence
  protein pattern
  Variant (2)..(2): Xaa in position 2 is Phe or Tyr
  Variant (3)..(3): Xaa in position 3 is Gly, Asn or Ser
  Variant (4)..(4): Xaa in position 4 is any amino acid
  Variant (5)..(5): Xaa in position 5 is Asp or Glu
  Variant (7)..(7): Xaa in position 7 is any amino acid
  Variant (8)..(8): Xaa in position 8 is Ala, Asp or Glu
  Variant (10)..(10): Xaa in position 10 is Ile or Val
  Variant (11)..(11): Xaa in position 11 is any amino acid
  Variant (16)..(16): Xaa in position 16 is Asp or Glu
  Variant (17)..(17): Xaa in position 17 is Glu or Lys
  Variant (19)..(20): Xaa in position 19 to 20 is any amino acid
  Variant (21)..(21): Xaa in position 21 is any or no amino acid
  Variant (23)..(25): Xaa in position 23 to 25 is any amino acid
  Variant (26)..(26): Xaa in position 26 is any or no amino acid
  Variant (29)..(29): Xaa in position 29 is any amino acid
  Variant (30)..(30): Xaa in position 30 is Leu, Met or Val
  Variant (31)..(31): Xaa in position 31 is Pro or Ser
  Variant (32)..(33): Xaa in position 32 to 33 is any amino acid
  Variant (34)..(34): Xaa in position 34 is Cys, Ser or Thr
PXXXXTXXYXXSLDAXXDXXXLXXXXGWXXXXXX

SEQ ID NO: 21154 - protein, 54 aa, Artificial sequence
  protein pattern
  Variant (2)..(3): Xaa in position 2 to 3 is any amino acid
  Variant (5)..(5): Xaa in position 5 is any amino acid
  Variant (7)..(8): Xaa in position 7 to 8 is any amino acid
  Variant (10)..(10): Xaa in position 10 is any amino acid
  Variant (13)..(13): Xaa in position 13 is Cys or Thr
  Variant (18)..(20): Xaa in position 18 to 20 is any amino acid
  Variant (24)..(24): Xaa in position 24 is any amino acid
  Variant (25)..(25): Xaa in position 25 is Glu or Gln
  Variant (27)..(27): Xaa in position 27 is any amino acid
  Variant (30)..(30): Xaa in position 30 is Ala, Cys or Ser
  Variant (31)..(31): Xaa in position 31 is Ile or Val
  Variant (34)..(34): Xaa in position 34 is Ile, Leu or Met
  Variant (37)..(37): Xaa in position 37 is Ala or Val
  Variant (43)..(43): Xaa in position 43 is Ala or Gly
  Variant (48)..(53): Xaa in position 48 to 53 is any amino acid
  Variant (54)..(54): Xaa in position 54 is Asp or Gly
GXXQXFXXNXGSXEDMGXXXFPVXXVXKIXXLDXRLXNADRHXGNILXXXXXXX

SEQ ID NO: 21155 - protein, 21 aa, Artificial sequence
  protein pattern
  Variant (8)..(8): Xaa in position 8 is any amino acid
  Variant (12)..(12): Xaa in position 12 is Cys or Val
  Variant (15)..(15): Xaa in position 15 is Asp or Glu
HGYCLPEXFEDXTFXWLYWPQ

SEQ ID NO: 21156 - protein, 24 aa, Artificial sequence
  protein pattern
  Variant (2)..(2): Xaa in position 2 is any or no amino acid
  Variant (4)..(4): Xaa in position 4 is any or no amino acid
  Variant (6)..(6): Xaa in position 6 is Asp or Glu
  Variant (8)..(9): Xaa in position 8 to 9 is any amino acid
  Variant (12)..(12): Xaa in position 12 is any amino acid
  Variant (14)..(14): Xaa in position 14 is Ile, Leu or Val
  Variant (15)..(15): Xaa in position 15 is Cys or Ser
  Variant (16)..(17): Xaa in position 16 to 17 is any amino acid
  Variant (18)..(18): Xaa in position 18 is Asp, Gly or Asn
  Variant (19)..(19): Xaa in position 19 is Ala, Asp or Gly
  Variant (20)..(20): Xaa in position 20 is Ala, Asn or Ser
  Variant (22)..(22): Xaa in position 22 is Ile or Leu
GXEXLXDXXLIXDXXXXXXXVXHL

SEQ ID NO: 21157 - protein, 18 aa, Artificial sequence
  protein pattern
  Variant (2)..(2): Xaa in position 2 is Ile, Leu or Met
  Variant (3)..(3): Xaa in position 3 is Glu or Lys
  Variant (4)..(4): Xaa in position 4 is any amino acid
  Variant (6)..(7): Xaa in position 6 to 7 is any amino acid
  Variant (9)..(9): Xaa in position 9 is Ile or Val
  Variant (10)..(10): Xaa in position 10 is any amino acid
  Variant (12)..(12): Xaa in position 12 is Ala, Ser or Thr
  Variant (13)..(13): Xaa in position 13 is Asp or Glu
  Variant (15)..(15): Xaa in position 15 is Ser or Thr
  Variant (18)..(18): Xaa in position 18 is Ala, Thr or Val
GXXXGXXPXXSXXGXGGX

SEQ ID NO: 21158 - protein, 21 aa, Artificial sequence
  protein pattern
  Variant (2)..(2): Xaa in position 2 is any amino acid
  Variant (3)..(3): Xaa in position 3 is any or no amino acid
  Variant (5)..(6): Xaa in position 5 to 6 is any amino acid
  Variant (8)..(8): Xaa in position 8 is Leu or Met
  Variant (9)..(9): Xaa in position 9 is Glu or Gln
  Variant (10)..(10): Xaa in position 10 is any amino acid
  Variant (11)..(11): Xaa in position 11 is Ile, Leu or Val
  Variant (13)..(13): Xaa in position 13 is Asp, Glu, Gly or Gln
  Variant (14)..(14): Xaa in position 14 is any amino acid
  Variant (15)..(15): Xaa in position 15 is Ile or Met
  Variant (17)..(18): Xaa in position 17 to 18 is any amino acid
  Variant (20)..(20): Xaa in position 20 is Asp, Gly or Asn
  Variant (21)..(21): Xaa in position 21 is Asp, Glu, His or Lys
GXXEXXFXXXXSXXXDXXLXX

SEQ ID NO: 21159 - DNA, 309 bp, Arabidopsis thaliana; identical to SEQ ID NO: 2711
  CDS (1)..(309)

SEQ ID NO: 21160 - protein, 102 aa, Arabidopsis thaliana; identical to SEQ ID NO: 2712

SEQ ID NO: 21161 - DNA, 309 bp, Glycine max; identical to SEQ ID NO: 3656
  CDS (1)..(309)

SEQ ID NO: 21162 - protein, 102 aa, Glycine max; identical to SEQ ID NO: 2906

SEQ ID NO: 21163 - DNA, 306 bp, Glycine max; identical to SEQ ID NO: 2811
  CDS (1)..(306)

SEQ ID NO: 21164 - protein, 101 aa, Glycine max; identical to SEQ ID NO: 2812

SEQ ID NO: 21165 - DNA, 511 bp, Glycine max; identical to SEQ ID NO: 2575
  CDS (108)..(416)

SEQ ID NO: 21166 - protein, 102 aa, Glycine max; identical to SEQ ID NO: 2576

SEQ ID NO: 21167 - DNA, 309 bp, Glycine max; identical to SEQ ID NO: 2577
  CDS (1)..(309)

SEQ ID NO: 21168 - protein, 102 aa, Glycine max; identical to SEQ ID NO: 2578

SEQ ID NO: 21169 - DNA, 309 bp, Glycine max; identical to SEQ ID NO: 2579
  CDS (1)..(309)

SEQ ID NO: 21170 - protein, 102 aa, Glycine max; identical to SEQ ID NO: 2580

SEQ ID NO: 21171 - DNA, 312 bp, Sorghum bicolor; identical to SEQ ID NO: 2581
  CDS (1)..(312)

SEQ ID NO: 21172 - protein, 103 aa, Sorghum bicolor; identical to SEQ ID NO: 2582

SEQ ID NO: 21173 - DNA, 315 bp, Zea mays; identical to SEQ ID NO: 2583
  CDS (1)..(315)

SEQ ID NO: 21174 - protein, 104 aa, Zea mays; identical to SEQ ID NO: 2584

SEQ ID NO: 21175 - DNA, 312 bp, Zea mays; identical to SEQ ID NO: 2585
  CDS (1)..(312)

SEQ ID NO: 21176 - protein, 103 aa, Zea mays; identical to SEQ ID NO: 2586

SEQ ID NO: 21177 - DNA, 315 bp, Zea mays; identical to SEQ ID NO: 2587
  CDS (1)..(315)

SEQ ID NO: 21178 - protein, 104 aa, Zea mays; identical to SEQ ID NO: 2588

SEQ ID NO: 21179 - DNA, 339 bp, Aedes aegypti; identical to SEQ ID NO: 3283
  CDS (1)..(339)

SEQ ID NO: 21180 - protein, 112 aa, Aedes aegypti; identical to SEQ ID NO: 3284

SEQ ID NO: 21181 - DNA, 303 bp, Aedes aegypti; identical to SEQ ID NO: 3285
  CDS (1)..(303)

SEQ ID NO: 21182 - protein, 100 aa, Aedes aegypti; identical to SEQ ID NO: 3286

SEQ ID NO: 21183 - DNA, 351 bp, Bombyx mori; identical to SEQ ID NO: 2591
  CDS (1)..(351)

SEQ ID NO: 21184 - protein, 116 aa, Bombyx mori; identical to SEQ ID NO: 2592

SEQ ID NO: 21185 - DNA, 405 bp, Oryza sativa (japonica cultivar-group); identical to SEQ ID NO: 2593
  CDS (1)..(405)

SEQ ID NO: 21186 - protein, 134 aa, Oryza sativa (japonica cultivar-group); identical to SEQ ID NO: 2594

SEQ ID NO: 21187 - DNA, 477 bp, Oryza sativa (japonica cultivar-group); identical to SEQ ID NO: 2595
  CDS (1)..(477)

SEQ ID NO: 21188 - protein, 158 aa, Oryza sativa (japonica cultivar-group); identical to SEQ ID NO: 2596

SEQ ID NO: 21189 - DNA, 309 bp, Arabidopsis thaliana; identical to SEQ ID NO: 2597
  CDS (1)..(309)

SEQ ID NO: 21190 - protein, 102 aa, Arabidopsis thaliana; identical to SEQ ID NO: 2598

SEQ ID NO: 21191 - DNA, 351 bp, Drosophila melanogaster; identical to SEQ ID NO: 2599
  CDS (1)..(351)

SEQ ID NO: 21192 - protein, 116 aa, Drosophila melanogaster; identical to SEQ ID NO: 2600

SEQ ID NO: 21193 - DNA, 345 bp, Drosophila melanogaster; identical to SEQ ID NO: 2967
  CDS (1)..(345)

SEQ ID NO: 21194 - protein, 114 aa, Drosophila melanogaster; identical to SEQ ID NO: 2968

SEQ ID NO: 21195 - DNA, 261 bp, Bordetella pertussis Tohama I; identical to SEQ ID NO: 20370
  CDS (1)..(261): transl_table=11

SEQ ID NO: 21196 - protein, 86 aa, Bordetella pertussis Tohama I; identical to SEQ ID NO: 20371

SEQ ID NO: 21197 - DNA, 294 bp, Bordetella bronchiseptica RB50; identical to SEQ ID NO: 20372
  CDS (1)..(294): transl_table=11

SEQ ID NO: 21198 - protein, 97 aa, Bordetella bronchiseptica RB50; identical to SEQ ID NO: 20373

SEQ ID NO: 21199 - DNA, 297 bp, Apis mellifera; identical to SEQ ID NO: 2601
  CDS (1)..(297)

SEQ ID NO: 21200 - protein, 98 aa, Apis mellifera; identical to SEQ ID NO: 2602

SEQ ID NO: 21201 - DNA, 312 bp, Strongylocentrotus purpuratus; identical to SEQ ID NO: 2603
  CDS (1)..(312)

SEQ ID NO: 21202 - protein, 103 aa, Strongylocentrotus purpuratus; identical to SEQ ID NO: 2604

SEQ ID NO: 21203 - DNA, 321 bp, Strongylocentrotus purpuratus; identical to SEQ ID NO: 2607
  CDS (1)..(321)

SEQ ID NO: 21204 - protein, 106 aa, Strongylocentrotus purpuratus; identical to SEQ ID NO: 2608

SEQ ID NO: 21205 - DNA, 297 bp, Nasonia vitripennis; identical to SEQ ID NO: 2609
  CDS (1)..(297)

SEQ ID NO: 21206 - protein, 98 aa, Nasonia vitripennis; identical to SEQ ID NO: 2610

SEQ ID NO: 21207 - DNA, 339 bp, Anopheles gambiae str. PEST; identical to SEQ ID NO: 2611
  CDS (1)..(339)

SEQ ID NO: 21208 - protein, 112 aa, Anopheles gambiae str. PEST; identical to SEQ ID NO: 2612

SEQ ID NO: 21209 - DNA, 309 bp, Magnaporthe grisea 70-15; identical to SEQ ID NO: 2613
  CDS (1)..(309)

SEQ ID NO: 21210 - protein, 102 aa, Magnaporthe grisea 70-15; identical to SEQ ID NO: 2614

SEQ ID NO: 21211 - DNA, 321 bp, Gibberella zeae PH-1; identical to SEQ ID NO: 2617
  CDS (1)..(321)

SEQ ID NO: 21212 - protein, 106 aa, Gibberella zeae PH-1; identical to SEQ ID NO: 2618

SEQ ID NO: 21213 - DNA, 315 bp, Debaryomyces hansenii CBS767; identical to SEQ ID NO: 2623
  CDS (1)..(315)

SEQ ID NO: 21214 - protein, 104 aa, Debaryomyces hansenii CBS767; identical to SEQ ID NO: 2624

SEQ ID NO: 21215 - DNA, 318 bp, Yarrowia lipolytica CLIB122; identical to SEQ ID NO: 2625
  CDS (1)..(318)

SEQ ID NO: 21216 - protein, 105 aa, Yarrowia lipolytica CLIB122; identical to SEQ ID NO: 2626

SEQ ID NO: 21217 - DNA, 396 bp, Yarrowia lipolytica CLIB122
  CDS (1)..(396)
atgactcaccacaaaaacaacaacaaggacaaccacgacgacgagctctacattgaggtctaccagaagtacctggagaaggcccagcgcctaattgacgagcacaaggtgctggtagtggcgctgtcttggtcggatgcgtgtgaggaaattaagacttgcctccagaccatcaagggcgagttggagcccttctacctggagttggacaaggaggaagccatggaccgtgtggagctgcagaaggcttttgtcgagatcacctccagtaacgccatcccatcagtcttcgtcaagggcaagcacattggatctggagaggaggtcatggaacttttccacgacaagaagctctctgaggttctggctaaggctggcgttgagcttcccaaataa

SEQ ID NO: 21218 - protein, 131 aa, Yarrowia lipolytica CLIB122
MTHHKNNNKDNHDDELYIEVYQKYLEKAQRLIDEHKVLVVALSWSDACEEIKTCLQTIKGELEPFYLELDKEEAMDRVELQKAFVEITSSNAIPSVFVKGKHIGSGEEVMELFHDKKLSEVLAKAGVELPK

SEQ ID NO: 21219 - DNA, 360 bp, Candida albicans SC5314; identical to SEQ ID NO: 2633
  CDS (1)..(360): transl_table=12

SEQ ID NO: 21220 - protein, 119 aa, Candida albicans SC5314; identical to SEQ ID NO: 2634

SEQ ID NO: 21221 - DNA, 471 bp, Candida albicans SC5314; identical to SEQ ID NO: 2639
  CDS (1)..(471): transl_table=12

SEQ ID NO: 21222 - protein, 156 aa, Candida albicans SC5314; identical to SEQ ID NO: 2640

SEQ ID NO: 21223 - DNA, 309 bp, Tribolium castaneum; identical to SEQ ID NO: 2641
  CDS (1)..(309)

SEQ ID NO: 21224 - protein, 102 aa, Tribolium castaneum; identical to SEQ ID NO: 2642

SEQ ID NO: 21225 - DNA, 258 bp, Magnetospirillum magnetotacticum MS-1; identical to SEQ ID NO: 5014
  CDS (1)..(258): transl_table=11

SEQ ID NO: 21226 - protein, 85 aa, Magnetospirillum magnetotacticum MS-1; identical to SEQ ID NO: 5015

SEQ ID NO: 21227 - DNA, 258 bp, Rickettsiella grylli
  CDS (1)..(258): transl_table=11
atgcaaaaagtagtaatctatacgaagccggactgtccatattgcgcggatgccaaggaattgtttactaaaaaaggcgttcaatttgaggaaatccaagtcgataaaaatcctgaaaaattgcaagaaatggtaaaattaagcaatcggcgatccgttccgcaaatatttattaacaataagtctatcggagggtttgaagagttatcaaaattagcgacctccggagagttagataccttattaaaaaccgagtaa

SEQ ID NO: 21228 - protein, 85 aa, Rickettsiella grylli
MQKVVIYTKPDCPYCADAKELFTKKGVQFEEIQVDKNPEKLQEMVKLSNRRSVPQIFINNKSIGGFEELSKLATSGELDTLLKTE

SEQ ID NO: 21229 - DNA, 384 bp, Medicago truncatula; identical to SEQ ID NO: 2643
  CDS (1)..(384)

SEQ ID NO: 21230 - protein, 127 aa, Medicago truncatula; identical to SEQ ID NO: 2644

SEQ ID NO: 21231 - DNA, 384 bp, Oryza sativa subsp; identical to SEQ ID NO: 3343
  CDS (1)..(384)

SEQ ID NO: 21232 - protein, 127 aa, Oryza sativa subsp; identical to SEQ ID NO: 3344

SEQ ID NO: 21233 - DNA, 306 bp, Vitis vinifera; identical to SEQ ID NO: 2645
  CDS (1)..(306)
  misc_feature (225)..(225): r is g or a
  misc_feature (273)..(273): y is t or c

SEQ ID NO: 21234 - protein, 101 aa, Vitis vinifera; identical to SEQ ID NO: 2646

SEQ ID NO: 21235 - DNA, 324 bp, Vitis vinifera; identical to SEQ ID NO: 2647
  CDS (1)..(324)

SEQ ID NO: 21236 - protein, 107 aa, Vitis vinifera; identical to SEQ ID NO: 2648

SEQ ID NO: 21237 - DNA, 321 bp, Vitis vinifera; identical to SEQ ID NO: 2649
  CDS (1)..(321)

SEQ ID NO: 21238 - protein, 106 aa, Vitis vinifera; identical to SEQ ID NO: 2650

SEQ ID NO: 21239 - DNA, 345 bp, Vitis vinifera; identical to SEQ ID NO: 2651
  CDS (1)..(345)

SEQ ID NO: 21240 - protein, 114 aa, Vitis vinifera; identical to SEQ ID NO: 2652

SEQ ID NO: 21241 - DNA, 414 bp, Vitis vinifera; identical to SEQ ID NO: 2653
  CDS (1)..(414)
  misc_feature (18)..(18): y is t or c
  misc_feature (63)..(63): m is a or c

SEQ ID NO: 21242 - protein, 137 aa, Vitis vinifera; identical to SEQ ID NO: 2654

SEQ ID NO: 21243 - DNA, 342 bp, Pichia guilliermondii; identical to SEQ ID NO: 3359
  CDS (1)..(342)

SEQ ID NO: 21244 - protein, 113 aa, Pichia guilliermondii; identical to SEQ ID NO: 3360

SEQ ID NO: 21245 - DNA, 315 bp, Fritillaria agrestis; identical to SEQ ID NO: 2655
  CDS (1)..(315)

SEQ ID NO: 21246 - protein, 104 aa, Fritillaria agrestis; identical to SEQ ID NO: 2656

SEQ ID NO: 21247 - DNA, 405 bp, Mesembryanthemum crystallinum; identical to SEQ ID NO: 3017
  CDS (1)..(405)

SEQ ID NO: 21248 - protein, 134 aa, Mesembryanthemum crystallinum; identical to SEQ ID NO: 3018

SEQ ID NO: 21249 - DNA, 402 bp, Thellungiella halophila; identical to SEQ ID NO: 2657
  CDS (1)..(402)

SEQ ID NO: 21250 - protein, 133 aa, Thellungiella halophila; identical to SEQ ID NO: 2658

SEQ ID NO: 21251 - DNA, 309 bp, Plantago major; identical to SEQ ID NO: 2659
  CDS (1)..(309)

SEQ ID NO: 21252 - protein, 102 aa, Plantago major; identical to SEQ ID NO: 2660

SEQ ID NO: 21253 - DNA, 312 bp, Musa acuminata; identical to SEQ ID NO: 3023
  CDS (1)..(312)

SEQ ID NO: 21254 - protein, 103 aa, Musa acuminata; identical to SEQ ID NO: 3024

SEQ ID NO: 21255 - DNA, 312 bp, Musa acuminata; identical to SEQ ID NO: 2661
  CDS (1)..(312)

SEQ ID NO: 21256 - protein, 103 aa, Musa acuminata; identical to SEQ ID NO: 2662

SEQ ID NO: 21257 - DNA, 450 bp, Medicago truncatula; identical to SEQ ID NO: 2663
  CDS (1)..(450)

SEQ ID NO: 21258 - protein, 149 aa, Medicago truncatula; identical to SEQ ID NO: 2664

SEQ ID NO: 21259 - DNA, 357 bp, Medicago truncatula; identical to SEQ ID NO: 2665
  CDS (1)..(357)

SEQ ID NO: 21260 - protein, 118 aa, Medicago truncatula; identical to SEQ ID NO: 2666

SEQ ID NO: 21261 - DNA, 384 bp, Medicago truncatula; identical to SEQ ID NO: 2667
  CDS (1)..(384)

SEQ ID NO: 21262 - protein, 127 aa, Medicago truncatula; identical to SEQ ID NO: 2668

SEQ ID NO: 21263 - DNA, 366 bp, Medicago truncatula; identical to SEQ ID NO: 2669
  CDS (1)..(366)

SEQ ID NO: 21264 - protein, 121 aa, Medicago truncatula; identical to SEQ ID NO: 2670

SEQ ID NO: 21265 - DNA, 399 bp, Beta vulgaris; identical to SEQ ID NO: 2671
  CDS (1)..(399)

SEQ ID NO: 21266 - protein, 132 aa, Beta vulgaris; identical to SEQ ID NO: 2672

SEQ ID NO: 21267 - DNA, 321 bp, Beta vulgaris; identical to SEQ ID NO: 2673
  CDS (1)..(321)

SEQ ID NO: 21268 - protein, 106 aa, Beta vulgaris; identical to SEQ ID NO: 2674

SEQ ID NO: 21269 - DNA, 309 bp, Beta vulgaris; identical to SEQ ID NO: 2675
  CDS (1)..(309)

SEQ ID NO: 21270 - protein, 102 aa, Beta vulgaris; identical to SEQ ID NO: 2676

SEQ ID NO: 21271 - DNA, 309 bp, Beta vulgaris; identical to SEQ ID NO: 2677
  CDS (1)..(309)

SEQ ID NO: 21272 - protein, 102 aa, Beta vulgaris; identical to SEQ ID NO: 2678

SEQ ID NO: 21273 - DNA, 309 bp, Beta vulgaris; identical to SEQ ID NO: 2679
  CDS (1)..(309)

SEQ ID NO: 21274 - protein, 102 aa, Beta vulgaris; identical to SEQ ID NO: 2680

SEQ ID NO: 21275 - DNA, 381 bp, Populus tremula x Populus tremuloides; identical to SEQ ID NO: 2685
  CDS (1)..(381)

SEQ ID NO: 21276 - protein, 126 aa, Populus tremula x Populus tremuloides; identical to SEQ ID NO: 2686

SEQ ID NO: 21277 - DNA, 318 bp, Plantago major; identical to SEQ ID NO: 2687
  CDS (1)..(318)

SEQ ID NO: 21278 - protein, 105 aa, Plantago major; identical to SEQ ID NO: 2688

SEQ ID NO: 21279 - DNA, 342 bp, Triticum aestivum; identical to SEQ ID NO: 2689
  CDS (1)..(342)

SEQ ID NO: 21280 - protein, 113 aa, Triticum aestivum; identical to SEQ ID NO: 2690

SEQ ID NO: 21281 - DNA, 420 bp, Populus tremula x Populus tremuloides; identical to SEQ ID NO: 2691
  CDS (1)..(420)

SEQ ID NO: 21282 - protein, 139 aa, Populus tremula x Populus tremuloides; identical to SEQ ID NO: 2692

SEQ ID NO: 21283 - DNA, 348 bp, Tilia platyphyllos; identical to SEQ ID NO: 2693
  CDS (1)..(348)

SEQ ID NO: 21284 - protein, 115 aa, Tilia platyphyllos; identical to SEQ ID NO: 2694

SEQ ID NO: 21285 - DNA, 342 bp, Deschampsia antarctica; identical to SEQ ID NO: 2695
  CDS (1)..(342)

SEQ ID NO: 21286 - protein, 113 aa, Deschampsia antarctica; identical to SEQ ID NO: 2696

SEQ ID NO: 21287 - DNA, 432 bp, Saccharomyces cerevisiae
  CDS (1)..(432)
atggagaccaatttttccttcgactcgaatttaattgttattatcattatcacgttgtttgccacaagaattattgctaaaagatttttatctactccaaaaatggtatcccaggaaacagttgctcacgtaaaggatctgattggccaaaaggaagtgtttgttgcagcaaagacatactgcccttactgtaaagctactttgtctaccctcttccaagaattgaacgttcccaaatccaaggcccttgtgttggaattagatgaaatgagcaatggctcagagattcaagacgctttagaagaaatctcgggccaaaaaactgtacctaacgtatacatcaatggcaagcacattggtggtaacagcgatttggaaactttgaagaaaaatggcaagttagctgaaatattgaagccggtatttcaatag

SEQ ID NO: 21288 - protein, 143 aa, Saccharomyces cerevisiae
METNFSFDSNLIVIIIITLFATRIIAKRFLSTPKMVSQETVAHVKDLIGQKEVFVAAKTYCPYCKATLSTLFQELNVPKSKALVLELDEMSNGSEIQDALEEISGQKTVPNVYINGKHIGGNSDLETLKKNGKLAEILKPVFQ

SEQ ID NO: 21289 - DNA, 327 bp, Solanum lycopersicum; identical to SEQ ID NO: 2701
  CDS (1)..(327)

SEQ ID NO: 21290 - protein, 108 aa, Solanum lycopersicum; identical to SEQ ID NO: 2702

SEQ ID NO: 21291 - DNA, 315 bp, Vernicia fordii; identical to SEQ ID NO: 2703
  CDS (1)..(315)

SEQ ID NO: 21292 - protein, 104 aa, Vernicia fordii; identical to SEQ ID NO: 2704

SEQ ID NO: 21293 - DNA, 447 bp, Arabidopsis thaliana; identical to SEQ ID NO: 2705
  CDS (1)..(447)

SEQ ID NO: 21294 - protein, 148 aa, Arabidopsis thaliana; identical to SEQ ID NO: 2706

SEQ ID NO: 21295 - DNA, 312 bp, Arabidopsis thaliana; identical to SEQ ID NO: 2707
  CDS (1)..(312)

SEQ ID NO: 21296 - protein, 103 aa, Arabidopsis thaliana; identical to SEQ ID NO: 2708

SEQ ID NO: 21297 - DNA, 312 bp, Arabidopsis thaliana; identical to SEQ ID NO: 2709
  CDS (1)..(312)

SEQ ID NO: 21298 - protein, 103 aa, Arabidopsis thaliana; identical to SEQ ID NO: 2710

SEQ ID NO: 21299 - DNA, 309 bp, Arabidopsis thaliana; identical to SEQ ID NO: 2713
  CDS (1)..(309)

SEQ ID NO: 21300 - protein, 102 aa, Arabidopsis thaliana; identical to SEQ ID NO: 2714

SEQ ID NO: 21301 - DNA, 300 bp, Arabidopsis thaliana; identical to SEQ ID NO: 2715
  CDS (1)..(300)

SEQ ID NO: 21302 - protein, 99 aa, Arabidopsis thaliana; identical to SEQ ID NO: 2716

SEQ ID NO: 21303 - DNA, 378 bp, Arabidopsis thaliana; identical to SEQ ID NO: 2721
  CDS (1)..(378)

SEQ ID NO: 21304 - protein, 125 aa, Arabidopsis thaliana; identical to SEQ ID NO: 2722

SEQ ID NO: 21305 - DNA, 336 bp, Arabidopsis thaliana; identical to SEQ ID NO: 2723
  CDS (1)..(336)

SEQ ID NO: 21306 - protein, 111 aa, Arabidopsis thaliana; identical to SEQ ID NO: 2724

SEQ ID NO: 21307 - DNA, 393 bp, Arabidopsis thaliana; identical to SEQ ID NO: 2725
  CDS (1)..(393)

SEQ ID NO: 21308 - protein, 130 aa, Arabidopsis thaliana; identical to SEQ ID NO: 2726

SEQ ID NO: 21309 - DNA, 408 bp, Arabidopsis thaliana; identical to SEQ ID NO: 2727
  CDS (1)..(408)

SEQ ID NO: 21310 - protein, 135 aa, Arabidopsis thaliana; identical to SEQ ID NO: 2728

SEQ ID NO: 21311 - DNA, 525 bp, Arabidopsis thaliana; identical to SEQ ID NO: 2729
  CDS (1)..(525)

SEQ ID NO: 21312 - protein, 174 aa, Arabidopsis thaliana; identical to SEQ ID NO: 2730

SEQ ID NO: 21313 - DNA, 435 bp, Arabidopsis thaliana; identical to SEQ ID NO: 2731
  CDS (1)..(435)

SEQ ID NO: 21314 - protein, 144 aa, Arabidopsis thaliana; identical to SEQ ID NO: 2732

SEQ ID NO: 21315 - DNA, 411 bp, Arabidopsis thaliana; identical to SEQ ID NO: 2733
  CDS (1)..(411)

SEQ ID NO: 21316 - protein, 136 aa, Arabidopsis thaliana; identical to SEQ ID NO: 2734

SEQ ID NO: 21317 - DNA, 423 bp, Arabidopsis thaliana; identical to SEQ ID NO: 2735
  CDS (1)..(423)

SEQ ID NO: 21318 - protein, 140 aa, Arabidopsis thaliana; identical to SEQ ID NO: 2736

SEQ ID NO: 21319 - DNA, 414 bp, Arabidopsis thaliana; identical to SEQ ID NO: 2737
  CDS (1)..(414)

SEQ ID NO: 21320 - protein, 137 aa, Arabidopsis thaliana; identical to SEQ ID NO: 2738

SEQ ID NO: 21321 - DNA, 309 bp, Arabidopsis thaliana; identical to SEQ ID NO: 2739
  CDS (1)..(309)

SEQ ID NO: 21322 - protein, 102 aa, Arabidopsis thaliana; identical to SEQ ID NO: 2740

SEQ ID NO: 21323 - DNA, 309 bp, Arabidopsis thaliana; identical to SEQ ID NO: 2741
  CDS (1)..(309)

SEQ ID NO: 21324 - protein, 102 aa, Arabidopsis thaliana; identical to SEQ ID NO: 2742

SEQ ID NO: 21325 - DNA, 309 bp, Arabidopsis thaliana; identical to SEQ ID NO: 2743
  CDS (1)..(309)

SEQ ID NO: 21326 - protein, 102 aa, Arabidopsis thaliana; identical to SEQ ID NO: 2744

SEQ ID NO: 21327 - DNA, 309 bp, Arabidopsis thaliana; identical to SEQ ID NO: 2745
  CDS (1)..(309)

SEQ ID NO: 21328 - protein, 102 aa, Arabidopsis thaliana; identical to SEQ ID NO: 2746

SEQ ID NO: 21329 - DNA, 309 bp, Arabidopsis thaliana; identical to SEQ ID NO: 2573
  CDS (1)..(309)

SEQ ID NO: 21330 - protein, 102 aa, Arabidopsis thaliana; identical to SEQ ID NO: 2574

SEQ ID NO: 21331 - DNA, 309 bp, Arabidopsis thaliana; identical to SEQ ID NO: 2747
  CDS (1)..(309)

SEQ ID NO: 21332 - protein, 102 aa, Arabidopsis thaliana; identical to SEQ ID NO: 2748

SEQ ID NO: 21333 - DNA, 309 bp, Arabidopsis thaliana; identical to SEQ ID NO: 2749
  CDS (1)..(309)

SEQ ID NO: 21334 - protein, 102 aa, Arabidopsis thaliana; identical to SEQ ID NO: 2750

SEQ ID NO: 21335 - DNA, 309 bp, Arabidopsis thaliana; identical to SEQ ID NO: 2751
  CDS (1)..(309)

SEQ ID NO: 21336 - protein, 102 aa, Arabidopsis thaliana; identical to SEQ ID NO: 2752

SEQ ID NO: 21337 - DNA, 378 bp, Oryza sativa; identical to SEQ ID NO: 2753
  CDS (1)..(378)

SEQ ID NO: 21338 - protein, 125 aa, Oryza sativa; identical to SEQ ID NO: 2754

SEQ ID NO: 21339 - DNA, 411 bp, Oryza sativa; identical to SEQ ID NO: 3119
  CDS (1)..(411)

SEQ ID NO: 21340 - protein, 136 aa, Oryza sativa; identical to SEQ ID NO: 3120

SEQ ID NO: 21341 - DNA, 312 bp, Oryza sativa; identical to SEQ ID NO: 2755
  CDS (1)..(312)

SEQ ID NO: 21342 - protein, 103 aa, Oryza sativa; identical to SEQ ID NO: 2756

SEQ ID NO: 21343 - DNA, 444 bp, Oryza sativa; identical to SEQ ID NO: 2757
  CDS (1)..(444)

SEQ ID NO: 21344 - protein, 147 aa, Oryza sativa; identical to SEQ ID NO: 2758

SEQ ID NO: 21345 - DNA, 378 bp, Oryza sativa; identical to SEQ ID NO: 2759
  CDS (1)..(378)

SEQ ID NO: 21346 - protein, 125 aa, Oryza sativa; identical to SEQ ID NO: 2760

SEQ ID NO: 21347 - DNA, 408 bp, Oryza sativa; identical to SEQ ID NO: 2761
  CDS (1)..(408)

SEQ ID NO: 21348 - protein, 135 aa, Oryza sativa; identical to SEQ ID NO: 2762

SEQ ID NO: 21349 - DNA, 402 bp, Oryza sativa; identical to SEQ ID NO: 2763
  CDS (1)..(402)

SEQ ID NO: 21350 - protein, 133 aa, Oryza sativa; identical to SEQ ID NO: 2764

SEQ ID NO: 21351 - DNA, 396 bp, Oryza sativa; identical to SEQ ID NO: 3111
  CDS (1)..(396)

SEQ ID NO: 21352 - protein, 131 aa, Oryza sativa; identical to SEQ ID NO: 3112

SEQ ID NO: 21353 - DNA, 408 bp, Oryza sativa; identical to SEQ ID NO: 2765
  CDS (1)..(408)

SEQ ID NO: 21354 - protein, 135 aa, Oryza sativa; identical to SEQ ID NO: 2766

SEQ ID NO: 21355 - DNA, 384 bp, Oryza sativa; identical to SEQ ID NO: 2767
  CDS (1)..(384)

SEQ ID NO: 21356 - protein, 127 aa, Oryza sativa; identical to SEQ ID NO: 2768

SEQ ID NO: 21357 - DNA, 345 bp, Oryza sativa; identical to SEQ ID NO: 2769
  CDS (1)..(345)

SEQ ID NO: 21358 - protein, 114 aa, Oryza sativa; identical to SEQ ID NO: 2770

SEQ ID NO: 21359 - DNA, 417 bp, Oryza sativa; identical to SEQ ID NO: 2771
  CDS (1)..(417)

SEQ ID NO: 21360 - protein, 138 aa, Oryza sativa; identical to SEQ ID NO: 2772

SEQ ID NO: 21361 - DNA, 399 bp, Oryza sativa; identical to SEQ ID NO: 2773
  CDS (1)..(399)

SEQ ID NO: 21362 - protein, 132 aa, Oryza sativa; identical to SEQ ID NO: 2774

SEQ ID NO: 21363 - DNA, 411 bp, Oryza sativa; identical to SEQ ID NO: 2775
  CDS (1)..(411)

SEQ ID NO: 21364 - protein, 136 aa, Oryza sativa; identical to SEQ ID NO: 2776

SEQ ID NO: 21365 - DNA, 579 bp, Oryza sativa; identical to SEQ ID NO: 2777
  CDS (1)..(579)

SEQ ID NO: 21366 - protein, 192 aa, Oryza sativa; identical to SEQ ID NO: 2778

SEQ ID NO: 21367 - DNA, 495 bp, Oryza sativa; identical to SEQ ID NO: 2779
  CDS (1)..(495)

SEQ ID NO: 21368 - protein, 164 aa, Oryza sativa; identical to SEQ ID NO: 2780

SEQ ID NO: 21369 - DNA, 327 bp, Oryza sativa; identical to SEQ ID NO: 2781
  CDS (1)..(327)

SEQ ID NO: 21370 - protein, 108 aa, Oryza sativa; identical to SEQ ID NO: 2782

SEQ ID NO: 21371 - DNA, 330 bp, Oryza sativa; identical to SEQ ID NO: 2783
  CDS (1)..(330)

SEQ ID NO: 21372 - protein, 109 aa, Oryza sativa; identical to SEQ ID NO: 2784

SEQ ID NO: 21373 - DNA, 330 bp, Oryza sativa; identical to SEQ ID NO: 2785
  CDS (1)..(330)

SEQ ID NO: 21374 - protein, 109 aa, Oryza sativa; identical to SEQ ID NO: 2786

SEQ ID NO: 21375 - DNA, 330 bp, Oryza sativa; identical to SEQ ID NO: 2787
  CDS (1)..(330)

SEQ ID NO: 21376 - protein, 109 aa, Oryza sativa; identical to SEQ ID NO: 2788

SEQ ID NO: 21377 - DNA, 312 bp, Oryza sativa; identical to SEQ ID NO: 2789
  CDS (1)..(312)

SEQ ID NO: 21378 - protein, 103 aa, Oryza sativa; identical to SEQ ID NO: 2790

SEQ ID NO: 21379 - DNA, 315 bp, Oryza sativa; identical to SEQ ID NO: 2791
  CDS (1)..(315)

SEQ ID NO: 21380 - protein, 104 aa, Oryza sativa; identical to SEQ ID NO: 2792

SEQ ID NO: 21381 - DNA, 309 bp, Brassica napus; identical to SEQ ID NO: 2793
  CDS (1)..(309)

SEQ ID NO: 21382 - protein, 102 aa, Brassica napus; identical to SEQ ID NO: 2794

SEQ ID NO: 21383 - DNA, 309 bp, Brassica napus; identical to SEQ ID NO: 2795
  CDS (1)..(309)

SEQ ID NO: 21384 - protein, 102 aa, Brassica napus; identical to SEQ ID NO: 2796

SEQ ID NO: 21385 - DNA, 309 bp, Brassica napus; identical to SEQ ID NO: 2797
  CDS (1)..(309)

SEQ ID NO: 21386 - protein, 102 aa, Brassica napus; identical to SEQ ID NO: 2798

SEQ ID NO: 21387 - DNA, 309 bp, Brassica napus; identical to SEQ ID NO: 2799
  CDS (1)..(309)

SEQ ID NO: 21388 - protein, 102 aa, Brassica napus; identical to SEQ ID NO: 2800

SEQ ID NO: 21389 - DNA, 309 bp, Brassica napus; identical to SEQ ID NO: 2801
  CDS (1)..(309)

SEQ ID NO: 21390 - protein, 102 aa, Brassica napus; identical to SEQ ID NO: 2802

SEQ ID NO: 21391 - DNA, 318 bp, Brassica napus; identical to SEQ ID NO: 2803
  CDS (1)..(318)

SEQ ID NO: 21392 - protein, 105 aa, Brassica napus; identical to SEQ ID NO: 2804

SEQ ID NO: 21393 - DNA, 300 bp, Brassica napus; identical to SEQ ID NO: 2805
  CDS (1)..(300)

SEQ ID NO: 21394 - protein, 99 aa, Brassica napus; identical to SEQ ID NO: 2806

SEQ ID NO: 21395 - DNA, 309 bp, Brassica napus; identical to SEQ ID NO: 2807
  CDS (1)..(309)

SEQ ID NO: 21396 - protein, 102 aa, Brassica napus; identical to SEQ ID NO: 2808

SEQ ID NO: 21397 - DNA, 315 bp, Triticum aestivum; identical to SEQ ID NO: 2813
  CDS (1)..(315)

SEQ ID NO: 21398 - protein, 104 aa, Triticum aestivum; identical to SEQ ID NO: 2814

SEQ ID NO: 21399 - DNA, 306 bp, Glycine max; identical to SEQ ID NO: 2815
  CDS (1)..(306)

SEQ ID NO: 21400 - protein, 101 aa, Glycine max; identical to SEQ ID NO: 2816

SEQ ID NO: 21401 - DNA, 309 bp, Brassica napus; identical to SEQ ID NO: 2817
  CDS (1)..(309)

SEQ ID NO: 21402 - protein, 102 aa, Brassica napus; identical to SEQ ID NO: 2818

SEQ ID NO: 21403 - DNA, 309 bp, Brassica napus; identical to SEQ ID NO: 2819
  CDS (1)..(309)

SEQ ID NO: 21404 - protein, 102 aa, Brassica napus; identical to SEQ ID NO: 2820

SEQ ID NO: 21405 - DNA, 399 bp, Glycine max; identical to SEQ ID NO: 2821
  CDS (1)..(399)

SEQ ID NO: 21406 - protein, 132 aa, Glycine max; identical to SEQ ID NO: 2822

SEQ ID NO: 21407 - DNA, 312 bp, Triticum aestivum; identical to SEQ ID NO: 2823
  CDS (1)..(312)

SEQ ID NO: 21408 - protein, 103 aa, Triticum aestivum; identical to SEQ ID NO: 2824

SEQ ID NO: 21409 - DNA, 414 bp, Triticum aestivum; identical to SEQ ID NO: 2825
  CDS (1)..(414)

SEQ ID NO: 21410 - protein, 137 aa, Triticum aestivum; identical to SEQ ID NO: 2826

SEQ ID NO: 21411 - DNA, 414 bp, Zea mays; identical to SEQ ID NO: 2827
  CDS (1)..(414)

SEQ ID NO: 21412 - protein, 137 aa, Zea mays; identical to SEQ ID NO: 2828

SEQ ID NO: 21413 - DNA, 468 bp, Zea mays; identical to SEQ ID NO: 2829
  CDS (1)..(468)

SEQ ID NO: 21414 - protein, 155 aa, Zea mays; identical to SEQ ID NO: 2830

SEQ ID NO: 21415 - DNA, 312 bp, Hordeum vulgare; identical to SEQ ID NO: 2833
  CDS (1)..(312)

SEQ ID NO: 21416 - protein, 103 aa, Hordeum vulgare; identical to SEQ ID NO: 2834

SEQ ID NO: 21417 - DNA, 309 bp, Brassica napus; identical to SEQ ID NO: 2843
  CDS (1)..(309)

SEQ ID NO: 21418 - protein, 102 aa, Brassica napus; identical to SEQ ID NO: 2844

SEQ ID NO: 21419 - DNA, 309 bp, Brassica napus; identical to SEQ ID NO: 2845
  CDS (1)..(309)

SEQ ID NO: 21420 - protein, 102 aa, Brassica napus; identical to SEQ ID NO: 2846

SEQ ID NO: 21421 - DNA, 435 bp, Brassica napus; identical to SEQ ID NO: 2849
  CDS (1)..(435)

SEQ ID NO: 21422 - protein, 144 aa, Brassica napus; identical to SEQ ID NO: 2850

SEQ ID NO: 21423 - DNA, 435 bp, Brassica napus; identical to SEQ ID NO: 2851
  CDS (1)..(435)

SEQ ID NO: 21424 - protein, 144 aa, Brassica napus; identical to SEQ ID NO: 2852

SEQ ID NO: 21425 - DNA, 309 bp, Brassica napus; identical to SEQ ID NO: 2853
  CDS (1)..(309)

SEQ ID NO: 21426 - protein, 102 aa, Brassica napus; identical to SEQ ID NO: 2854

SEQ ID NO: 21427 - DNA, 300 bp, Brassica napus; identical to SEQ ID NO: 2855
  CDS (1)..(300)

SEQ ID NO: 21428 - protein, 99 aa, Brassica napus; identical to SEQ ID NO: 2856

SEQ ID NO: 21429 - DNA, 336 bp, Brassica napus; identical to SEQ ID NO: 2859
  CDS (1)..(336)

SEQ ID NO: 21430 - protein, 111 aa, Brassica napus; identical to SEQ ID NO: 2860

SEQ ID NO: 21431 - DNA, 309 bp, Brassica napus; identical to SEQ ID NO: 2861
  CDS (1)..(309)

SEQ ID NO: 21432 - protein, 102 aa, Brassica napus; identical to SEQ ID NO: 2862

SEQ ID NO: 21433 - DNA, 309 bp, Brassica napus; identical to SEQ ID NO: 2865
  CDS (1)..(309)

SEQ ID NO: 21434 - protein, 102 aa, Brassica napus; identical to SEQ ID NO: 2866

SEQ ID NO: 21435 - DNA, 300 bp, Brassica napus; identical to SEQ ID NO: 2867
  CDS (1)..(300)

SEQ ID NO: 21436 - protein, 99 aa, Brassica napus; identical to SEQ ID NO: 2868

SEQ ID NO: 21437 - DNA, 309 bp, Brassica napus; identical to SEQ ID NO: 2869
  CDS (1)..(309)

SEQ ID NO: 21438 - protein, 102 aa, Brassica napus; identical to SEQ ID NO: 2870

SEQ ID NO: 21439 - DNA, 309 bp, Brassica napus; identical to SEQ ID NO: 2871
  CDS (1)..(309)

SEQ ID NO: 21440 - protein, 102 aa, Brassica napus; identical to SEQ ID NO: 2872

SEQ ID NO: 21441 - DNA, 309 bp, Brassica napus; identical to SEQ ID NO: 2873
  CDS (1)..(309)

SEQ ID NO: 21442 - protein, 102 aa, Brassica napus; identical to SEQ ID NO: 2874

SEQ ID NO: 21443 - DNA, 312 bp, Brassica napus; identical to SEQ ID NO: 2875
  CDS (1)..(312)

SEQ ID NO: 21444 - protein, 103 aa, Brassica napus; identical to SEQ ID NO: 2876

SEQ ID NO: 21445 - DNA, 426 bp, Brassica napus; identical to SEQ ID NO: 2877
  CDS (1)..(426)

SEQ ID NO: 21446 - protein, 141 aa, Brassica napus; identical to SEQ ID NO: 2878

SEQ ID NO: 21447 - DNA, 309 bp, Brassica napus; identical to SEQ ID NO: 2879
  CDS (1)..(309)

SEQ ID NO: 21448 - protein, 102 aa, Brassica napus; identical to SEQ ID NO: 2880

SEQ ID NO: 21449 - DNA, 333 bp, Glycine max; identical to SEQ ID NO: 2881
  CDS (1)..(333)

SEQ ID NO: 21450 - protein, 110 aa, Glycine max; identical to SEQ ID NO: 2882

SEQ ID NO: 21451 - DNA, 324 bp, Glycine max; identical to SEQ ID NO: 2883
  CDS (1)..(324)

SEQ ID NO: 21452 - protein, 107 aa, Glycine max; identical to SEQ ID NO: 2884

SEQ ID NO: 21453 - DNA, 501 bp, Glycine max; identical to SEQ ID NO: 2885
  CDS (1)..(501)

SEQ ID NO: 21454 - protein, 166 aa, Glycine max; identical to SEQ ID NO: 2886

SEQ ID NO: 21455 - DNA, 399 bp, Glycine max; identical to SEQ ID NO: 2887
  CDS (1)..(399)

SEQ ID NO: 21456 - protein, 132 aa, Glycine max; identical to SEQ ID NO: 2888

SEQ ID NO: 21457 - DNA, 309 bp, Glycine max; identical to SEQ ID NO: 2889
  CDS (1)..(309)

SEQ ID NO: 21458 - protein, 102 aa, Glycine max; identical to SEQ ID NO: 2890

SEQ ID NO: 21459 - DNA, 525 bp, Glycine max; identical to SEQ ID NO: 2891
  CDS (1)..(525)

SEQ ID NO: 21460 - protein, 174 aa, Glycine max; identical to SEQ ID NO: 2892

SEQ ID NO: 21461 - DNA, 483 bp, Glycine max; identical to SEQ ID NO: 2893
  CDS (1)..(483)

SEQ ID NO: 21462 - protein, 160 aa, Glycine max; identical to SEQ ID NO: 2894

SEQ ID NO: 21463 - DNA, 522 bp, Glycine max; identical to SEQ ID NO: 2895
  CDS (1)..(522)

SEQ ID NO: 21464 - protein, 173 aa, Glycine max; identical to SEQ ID NO: 2896

SEQ ID NO: 21465 - DNA, 411 bp, Glycine max; identical to SEQ ID NO: 2897
  CDS (1)..(411)

SEQ ID NO: 21466 - protein, 136 aa, Glycine max; identical to SEQ ID NO: 2898

SEQ ID NO: 21467 - DNA, 309 bp, Glycine max; identical to SEQ ID NO: 2899
  CDS (1)..(309)

SEQ ID NO: 21468 - protein, 102 aa, Glycine max; identical to SEQ ID NO: 2900

SEQ ID NO: 21469 - DNA, 423 bp, Glycine max; identical to SEQ ID NO: 2901
  CDS (1)..(423)

SEQ ID NO: 21470 - protein, 140 aa, Glycine max; identical to SEQ ID NO: 2902

SEQ ID NO: 21471 - DNA, 306 bp, Glycine max; identical to SEQ ID NO: 2903
  CDS (1)..(306)

SEQ ID NO: 21472 - protein, 101 aa, Glycine max; identical to SEQ ID NO: 2904

SEQ ID NO: 21473 - DNA, 318 bp, Glycine max; identical to SEQ ID NO: 2907
  CDS (1)..(318)

SEQ ID NO: 21474 - protein, 105 aa, Glycine max; identical to SEQ ID NO: 2908

SEQ ID NO: 21475 - DNA, 402 bp, Glycine max; identical to SEQ ID NO: 2909
  CDS (1)..(402)

SEQ ID NO: 21476 - protein, 133 aa, Glycine max; identical to SEQ ID NO: 2910

SEQ ID NO: 21477 - DNA, 309 bp, Glycine max; identical to SEQ ID NO: 2911
  CDS (1)..(309)

SEQ ID NO: 21478 - protein, 102 aa, Glycine max; identical to SEQ ID NO: 2912

SEQ ID NO: 21479 - DNA, 402 bp, Glycine max; identical to SEQ ID NO: 2913
  CDS (1)..(402)

SEQ ID NO: 21480 - protein, 133 aa, Glycine max; identical to SEQ ID NO: 2914

SEQ ID NO: 21481 - DNA, 480 bp, Zea mays; identical to SEQ ID NO: 2915
  CDS (1)..(480)

SEQ ID NO: 21482 - protein, 159 aa, Zea mays; identical to SEQ ID NO: 2916

SEQ ID NO: 21483 - DNA, 393 bp, Zea mays; identical to SEQ ID NO: 2917
  CDS (1)..(393)

SEQ ID NO: 21484 - protein, 130 aa, Zea mays; identical to SEQ ID NO: 2918

SEQ ID NO: 21485 - DNA, 345 bp, Zea mays; identical to SEQ ID NO: 2919
  CDS (1)..(345)

SEQ ID NO: 21486 - protein, 114 aa, Zea mays; identical to SEQ ID NO: 2920

SEQ ID NO: 21487 - DNA, 312 bp, Zea mays; identical to SEQ ID NO: 2921
  CDS (1)..(312)

SEQ ID NO: 21488 - protein, 103 aa, Zea mays; identical to SEQ ID NO: 2922

SEQ ID NO: 21489 - DNA, 537 bp, Zea mays; identical to SEQ ID NO: 2925
  CDS (1)..(537)

SEQ ID NO: 21490 - protein, 178 aa, Zea mays; identical to SEQ ID NO: 2926

SEQ ID NO: 21491 - DNA, 315 bp, Zea mays; identical to SEQ ID NO: 2929
  CDS (1)..(315)

SEQ ID NO: 21492 - protein, 104 aa, Zea mays; identical to SEQ ID NO: 2930

SEQ ID NO: 21493 - DNA, 21 bp, Artificial sequence
  primer
atggacaaagtgatgagaatg

SEQ ID NO: 21494 - DNA, 22 bp, Artificial sequence
  primer
ctagtaaaggatggactgatag

SEQ ID NO: 21495 - protein, 105 aa, Artificial sequence
  consensus sequence
  Variant (2)..(8): Xaa in position 2 to 8 is any amino acid
  Variant (9)..(9): Xaa in position 9 is any or no amino acid
  Variant (11)..(18): Xaa in position 11 to 18 is any amino acid
  Variant (20)..(27): Xaa in position 20 to 27 is any amino acid
  Variant (28)..(34): Xaa in position 28 to 34 is any or no amino acid
  Variant (36)..(36): Xaa in position 36 is any amino acid
  Variant (38)..(44): Xaa in position 38 to 44 is any amino acid
  Variant (45)..(50): Xaa in position 45 to 50 is any or no amino acid
  Variant (52)..(54): Xaa in position 52 to 54 is any amino acid
  Variant (55)..(75): Xaa in position 55 to 75 is any or no amino acid
  Variant (78)..(78): Xaa in position 78 is any amino acid
  Variant (81)..(82): Xaa in position 81 to 82 is any amino acid
  Variant (84)..(86): Xaa in position 84 to 86 is any amino acid
  Variant (88)..(98): Xaa in position 88 to 98 is any amino acid
  Variant (100)..(100): Xaa in position 100 is any amino acid
  Variant (102)..(104): Xaa in position 102 to 104 is any amino acid
VXXXXXXXXCXXXXXXXXLXXXXXXXXXXXXXXXEXDXXXXXXXXXXXXXLXXXXXXXXXXXXXXXXXXXXXXXXVPXVFXXGXXXGXXXXXXXXXXXGXLXXXL

SEQ ID NO: 21496 - protein, 32 aa, Artificial sequence
  protein pattern
  Variant (2)..(2): Xaa in position 2 is any or no amino acid
  Variant (4)..(6): Xaa in position 4 to 6 is any or no amino acid
  Variant (8)..(8): Xaa in position 8 is Ile or Val
  Variant (9)..(9): Xaa in position 9 is Asp, Gly, Asn or Ser
  Variant (10)..(12): Xaa in position 10 to 12 is any amino acid
  Variant (13)..(13): Xaa in position 13 is Phe, Ile, Leu or Val
  Variant (15)..(15): Xaa in position 15 is Ala, Gly, Ser or Thr
  Variant (16)..(27): Xaa in position 16 to 27 is any amino acid
  Variant (29)..(31): Xaa in position 29 to 31 is any amino acid
  Variant (32)..(32): Xaa in position 32 is Phe, Ile, Leu or Val
PXVXXXFXXXXXXGXXXXXXXXXXXXXLXXXX

SEQ ID NO: 21497 - DNA, 1533 bp, Arabidopsis thaliana; identical to SEQ ID NO: 8391
  CDS (1)..(1533)

SEQ ID NO: 21498 - protein, 510 aa, Arabidopsis thaliana; identical to SEQ ID NO: 8392

SEQ ID NO: 21499 - DNA, 1712 bp, Glycine max; identical to SEQ ID NO: 15536
  CDS (25)..(1533)

SEQ ID NO: 21500 - protein, 502 aa, Glycine max; identical to SEQ ID NO: 15537

SEQ ID NO: 21501 - DNA, 1984 bp, Sorghum bicolor; identical to SEQ ID NO: 15538
  CDS (202)..(1710)

SEQ ID NO: 21502 - protein, 502 aa, Sorghum bicolor; identical to SEQ ID NO: 15539

SEQ ID NO: 21503 - DNA, 1953 bp, Triticum aestivum; identical to SEQ ID NO: 15548
  CDS (152)..(1693)

SEQ ID NO: 21504 - protein, 513 aa, Triticum aestivum; identical to SEQ ID NO: 15549

SEQ ID NO: 21505 - DNA, 1524 bp, Oryza sativa; identical to SEQ ID NO: 15558
  CDS (1)..(1524)

SEQ ID NO: 21506 - protein, 507 aa, Oryza sativa; identical to SEQ ID NO: 15559

SEQ ID NO: 21507 - DNA, 1883 bp, Brassica napus; identical to SEQ ID NO: 15560
  CDS (119)..(1651)

SEQ ID NO: 21508 - protein, 510 aa, Brassica napus; identical to SEQ ID NO: 8816

SEQ ID NO: 21509 - DNA, 1903 bp, Brassica napus; identical to SEQ ID NO: 16301
  CDS (122)..(1618)

SEQ ID NO: 21510 - protein, 498 aa, Brassica napus; identical to SEQ ID NO: 8854

SEQ ID NO: 21511 - DNA, 2063 bp, Glycine max; identical to SEQ ID NO: 15566
  CDS (192)..(1700)

SEQ ID NO: 21512 - protein, 502 aa, Glycine max; identical to SEQ ID NO: 8880

SEQ ID NO: 21513 - DNA, 2067 bp, Triticum aestivum; identical to SEQ ID NO: 15570
  CDS (115)..(1659)

SEQ ID NO: 21514 - protein, 514 aa, Triticum aestivum; identical to SEQ ID NO: 8828

SEQ ID NO: 21515 - DNA, 1825 bp, Helianthus annuus; identical to SEQ ID NO: 15574
  CDS (128)..(1624)

SEQ ID NO: 21516 - protein, 498 aa, Helianthus annuus; identical to SEQ ID NO: 8834

SEQ ID NO: 21517 - DNA, 2075 bp, Zea mays; identical to SEQ ID NO: 15576
  CDS (198)..(1739)

SEQ ID NO: 21518 - protein, 513 aa, Zea mays; identical to SEQ ID NO: 8894

SEQ ID NO: 21519 - DNA, 1590 bp, Aedes aegypti; identical to SEQ ID NO: 15578
  CDS (1)..(1590)

SEQ ID NO: 21520 - protein, 529 aa, Aedes aegypti; identical to SEQ ID NO: 15579

SEQ ID NO: 21521 - DNA, 1560 bp, Aedes aegypti; identical to SEQ ID NO: 15580
  CDS (1)..(1560)

SEQ ID NO: 21522 - protein, 519 aa, Aedes aegypti; identical to SEQ ID NO: 15581

SEQ ID NO: 21523 - DNA, 1542 bp, Aedes aegypti; identical to SEQ ID NO: 15582
  CDS (1)..(1542)

SEQ ID NO: 21524 - protein, 513 aa, Aedes aegypti; identical to SEQ ID NO: 15583

SEQ ID NO: 21525 - DNA, 1413 bp, Klebsiella pneumoniae subsp. pneumoniae MGH 78578; identical to SEQ ID NO: 15584
  CDS (1)..(1413): transl_table=11

SEQ ID NO: 21526 - protein, 470 aa, Klebsiella pneumoniae subsp. pneumoniae MGH 78578; identical to SEQ ID NO: 15585

SEQ ID NO: 21527 - DNA, 1494 bp, Arabidopsis thaliana; identical to SEQ ID NO: 8393
  CDS (1)..(1494)

SEQ ID NO: 21528 - protein, 497 aa, Arabidopsis thaliana; identical to SEQ ID NO: 8394

SEQ ID NO: 21529 - DNA, 1533 bp, Arabidopsis thaliana; identical to SEQ ID NO: 8395
  CDS (1)..(1533)

SEQ ID NO: 21530 - protein, 510 aa, Arabidopsis thaliana; identical to SEQ ID NO: 8396

SEQ ID NO: 21531 - DNA, 1479 bp, Arabidopsis thaliana; identical to SEQ ID NO: 8397
  CDS (1)..(1479)

SEQ ID NO: 21532 - protein, 492 aa, Arabidopsis thaliana; identical to SEQ ID NO: 8398

SEQ ID NO: 21533 - DNA, 1533 bp, Arabidopsis thaliana; identical to SEQ ID NO: 8399
  CDS (1)..(1533)

SEQ ID NO: 21534 - protein, 510 aa, Arabidopsis thaliana; identical to SEQ ID NO: 8400

SEQ ID NO: 21535 - DNA, 1740 bp, Arabidopsis thaliana; identical to SEQ ID NO: 8401
  CDS (1)..(1740)

SEQ ID NO: 21536 - protein, 579 aa, Arabidopsis thaliana; identical to SEQ ID NO: 8402

SEQ ID NO: 21537 - DNA, 1497 bp, Arabidopsis thaliana; identical to SEQ ID NO: 8403
  CDS (1)..(1497)

SEQ ID NO: 21538 - protein, 498 aa, Arabidopsis thaliana; identical to SEQ ID NO: 8404

SEQ ID NO: 21539 - DNA, 1533 bp, Arabidopsis thaliana; identical to SEQ ID NO: 8405
  CDS (1)..(1533)

SEQ ID NO: 21540 - protein, 510 aa, Arabidopsis thaliana; identical to SEQ ID NO: 8406

SEQ ID NO: 21541 - DNA, 1413 bp, Vibrio cholerae O1 biovar eltor str. N16961; identical to SEQ ID NO: 15602
  CDS (1)..(1413): transl_table=11

SEQ ID NO: 21542 - protein, 470 aa, Vibrio cholerae O1 biovar eltor str. N16961; identical to SEQ ID NO: 15603

SEQ ID NO: 21543 - DNA, 1755 bp, Bacillus halodurans C-125; identical to SEQ ID NO: 15604
  CDS (1)..(1755): transl_table=11

SEQ ID NO: 21544 - protein, 584 aa, Bacillus halodurans C-125; identical to SEQ ID NO: 15605

SEQ ID NO: 21545 - DNA, 1443 bp, Escherichia coli O157:H7 EDL933; identical to SEQ ID NO: 15614
  CDS (1)..(1443): transl_table=11
  misc_feature (850)..(850): r is g or a

SEQ ID NO: 21546 - protein, 480 aa, Escherichia coli O157:H7 EDL933; identical to SEQ ID NO: 15615
  misc_feature (284)..(284): The Xaa at location 284 stands for Ala, or Thr.

SEQ ID NO: 21547 - DNA, 1440 bp, Agrobacterium tumefaciens str. C58; identical to SEQ ID NO: 8419
  CDS (1)..(1440): transl_table=11

SEQ ID NO: 21548 - protein, 479 aa, Agrobacterium tumefaciens str. C58; identical to SEQ ID NO: 8420

SEQ ID NO: 21549 - DNA, 1716 bp, Arabidopsis thaliana; identical to SEQ ID NO: 8433
  CDS (1)..(1716)

SEQ ID NO: 21550 - protein, 571 aa, Arabidopsis thaliana; identical to SEQ ID NO: 8434

SEQ ID NO: 21551 - DNA, 1584 bp, Arabidopsis thaliana; identical to SEQ ID NO: 8435
  CDS (1)..(1584)

SEQ ID NO: 21552 - protein, 527 aa, Arabidopsis thaliana; identical to SEQ ID NO: 8436

SEQ ID NO: 21553 - DNA, 1791 bp, Arabidopsis thaliana; identical to SEQ ID NO: 8437
  CDS (1)..(1791)

SEQ ID NO: 21554 - protein, 596 aa, Arabidopsis thaliana; identical to SEQ ID NO: 8438

SEQ ID NO: 21555 - DNA, 1584 bp, Arabidopsis thaliana; identical to SEQ ID NO: 8439
  CDS (1)..(1584)

SEQ ID NO: 21556 - protein, 527 aa, Arabidopsis thaliana; identical to SEQ ID NO: 8440

SEQ ID NO: 21557 - DNA, 1428 bp, Fusobacterium nucleatum subsp. nucleatum ATCC 25586; identical to SEQ ID NO: 8443
  CDS (1)..(1428): transl_table=11

SEQ ID NO: 21558 - protein, 475 aa, Fusobacterium nucleatum subsp. nucleatum ATCC 25586; identical to SEQ ID NO: 8444

SEQ ID NO: 21559 - DNA, 1665 bp, Drosophila melanogaster; identical to SEQ ID NO: 15642
  CDS (1)..(1665)

SEQ ID NO: 21560 - protein, 554 aa, Drosophila melanogaster; identical to SEQ ID NO: 15643

SEQ ID NO: 21561 - DNA, 1752 bp, Thermoanaerobacter tengcongensis MB4; identical to SEQ ID NO: 8445
  CDS (1)..(1752): transl_table=11

SEQ ID NO: 21562 - protein, 583 aa, Thermoanaerobacter tengcongensis MB4; identical to SEQ ID NO: 8446

SEQ ID NO: 21563 - DNA, 1437 bp, Streptomyces coelicolor A3(2); identical to SEQ ID NO: 8447
  CDS (1)..(1437): transl_table=11

SEQ ID NO: 21564 - protein, 478 aa, Streptomyces coelicolor A3(2); identical to SEQ ID NO: 8448

SEQ ID NO: 21565 - DNA, 1431 bp, Streptomyces coelicolor A3(2); identical to SEQ ID NO: 8449
  CDS (1)..(1431): transl_table=11

SEQ ID NO: 21566 - protein, 476 aa, Streptomyces coelicolor A3(2); identical to SEQ ID NO: 8450

SEQ ID NO: 21567 - DNA, 1761 bp, Oceanobacillus iheyensis HTE831; identical to SEQ ID NO: 8457
  CDS (1)..(1761): transl_table=11

SEQ ID NO: 21568 - protein, 586 aa, Oceanobacillus iheyensis HTE831; identical to SEQ ID NO: 8458

SEQ ID NO: 21569 - DNA, 1413 bp, Shigella flexneri 2a str. 301; identical to SEQ ID NO: 15660
  CDS (1)..(1413): transl_table=11

SEQ ID NO: 21570 - protein, 470 aa, Shigella flexneri 2a str. 301; identical to SEQ ID NO: 15661

SEQ ID NO: 21571 - DNA, 1539 bp, Drosophila melanogaster; identical to SEQ ID NO: 15666
  CDS (1)..(1539)

SEQ ID NO: 21572 - protein, 512 aa, Drosophila melanogaster; identical to SEQ ID NO: 15667

SEQ ID NO: 21573 - DNA, 1455 bp, Pseudomonas putida KT2440; identical to SEQ ID NO: 15668
  CDS (1)..(1455): transl_table=11

SEQ ID NO: 21574 - protein, 484 aa, Pseudomonas putida KT2440; identical to SEQ ID NO: 15669

SEQ ID NO: 21575 - DNA, 1416 bp, Pseudomonas putida KT2440; identical to SEQ ID NO: 15670
  CDS (1)..(1416): transl_table=11

SEQ ID NO: 21576 - protein, 471 aa, Pseudomonas putida KT2440; identical to SEQ ID NO: 15671

SEQ ID NO: 21577 - DNA, 1629 bp, Escherichia coli CFT073; identical to SEQ ID NO: 15672
  CDS (1)..(1629): transl_table=11

SEQ ID NO: 21578 - protein, 542 aa, Escherichia coli CFT073; identical to SEQ ID NO: 15673

SEQ ID NO: 21579 - DNA, 1413 bp, Vibrio vulnificus CMCP6; identical to SEQ ID NO: 15674
  CDS (1)..(1413): transl_table=11

SEQ ID NO: 21580 - protein, 470 aa, Vibrio vulnificus CMCP6; identical to SEQ ID NO: 15675

SEQ ID NO: 21581 - DNA, 1755 bp, Clostridium tetani E88; identical to SEQ ID NO: 15676
  CDS (1)..(1755): transl_table=11

SEQ ID NO: 21582 - protein, 584 aa, Clostridium tetani E88; identical to SEQ ID NO: 15677

SEQ ID NO: 21583 - DNA, 1413 bp, Vibrio parahaemolyticus RIMD 2210633; identical to SEQ ID NO: 15682
  CDS (1)..(1413): transl_table=11

SEQ ID NO: 21584 - protein, 470 aa, Vibrio parahaemolyticus RIMD 2210633; identical to SEQ ID NO: 15683

SEQ ID NO: 21585 - DNA, 1758 bp, Enterococcus faecalis V583; identical to SEQ ID NO: 8473
  CDS (1)..(1758): transl_table=11

SEQ ID NO: 21586 - protein, 585 aa, Enterococcus faecalis V583; identical to SEQ ID NO: 8474

SEQ ID NO: 21587 - DNA, 1410 bp, Photorhabdus luminescens subsp. laumondii TTO1; identical to SEQ ID NO: 15702
  CDS (1)..(1410): transl_table=11

SEQ ID NO: 21588 - protein, 469 aa, Photorhabdus luminescens subsp. laumondii TTO1; identical to SEQ ID NO: 15703

SEQ ID NO: 21589 - DNA, 1488 bp, Vibrio vulnificus YJ016; identical to SEQ ID NO: 15704
  CDS (1)..(1488): transl_table=11

SEQ ID NO: 21590 - protein, 495 aa, Vibrio vulnificus YJ016; identical to SEQ ID NO: 15705

SEQ ID NO: 21591 - DNA, 1758 bp, Bacillus cereus ATCC 10987; identical to SEQ ID NO: 15714
  CDS (1)..(1758): transl_table=11

SEQ ID NO: 21592 - protein, 585 aa, Bacillus cereus ATCC 10987; identical to SEQ ID NO: 15715

SEQ ID NO: 21593 - DNA, 1656 bp, Nasonia vitripennis; identical to SEQ ID NO: 15718
  CDS (1)..(1656)

SEQ ID NO: 21594 - protein, 551 aa, Nasonia vitripennis; identical to SEQ ID NO: 15719

SEQ ID NO: 21595 - DNA, 1587 bp, Magnaporthe grisea 70-15; identical to SEQ ID NO: 8497
  CDS (1)..(1587)

SEQ ID NO: 21596 - protein, 528 aa, Magnaporthe grisea 70-15; identical to SEQ ID NO: 8498

SEQ ID NO: 21597 - DNA, 1623 bp, Gibberella zeae PH-1; identical to SEQ ID NO: 8499
  CDS (1)..(1623)

SEQ ID NO: 21598 - protein, 540 aa, Gibberella zeae PH-1; identical to SEQ ID NO: 8500

SEQ ID NO: 21599 - DNA, 1554 bp, Apis mellifera; identical to SEQ ID NO: 15722
  CDS (1)..(1554)

SEQ ID NO: 21600 - protein, 517 aa, Apis mellifera; identical to SEQ ID NO: 15723

SEQ ID NO: 21601 - DNA, 1515 bp, Candida albicans SC5314; identical to SEQ ID NO: 8501
  CDS (1)..(1515): transl_table=12

SEQ ID NO: 21602 - protein, 504 aa, Candida albicans SC5314; identical to SEQ ID NO: 8502

SEQ ID NO: 21603 - DNA, 1587 bp, Ustilago maydis 521; identical to SEQ ID NO: 8503
  CDS (1)..(1587)

SEQ ID NO: 21604 - protein, 528 aa, Ustilago maydis 521; identical to SEQ ID NO: 8504

SEQ ID NO: 21605 - DNA, 1590 bp, Cryptococcus neoformans var. neoformans B-3501A; identical to SEQ ID NO: 15728
  CDS (1)..(1590)

SEQ ID NO: 21606 - protein, 529 aa, Cryptococcus neoformans var. neoformans B-3501A; identical to SEQ ID NO: 15729

SEQ ID NO: 21607 - DNA, 1719 bp, Cryptococcus neoformans var. neoformans B-3501A; identical to SEQ ID NO: 15730
  CDS (1)..(1719)

SEQ ID NO: 21608 - protein, 572 aa, Cryptococcus neoformans var. neoformans B-3501A; identical to SEQ ID NO: 15731

SEQ ID NO: 21609 - DNA, 1560 bp, Encephalitozoon cuniculi GB-M1; identical to SEQ ID NO: 15732
  CDS (1)..(1560)

SEQ ID NO: 21610 - protein, 519 aa, Encephalitozoon cuniculi GB-M1; identical to SEQ ID NO: 15733

SEQ ID NO: 21611 - DNA, 1539 bp, Tribolium castaneum; identical to SEQ ID NO: 15734
  CDS (1)..(1539)

SEQ ID NO: 21612 - protein, 512 aa, Tribolium castaneum; identical to SEQ ID NO: 15735

SEQ ID NO: 21613 - DNA, 1611 bp, Tribolium castaneum; identical to SEQ ID NO: 15736
  CDS (1)..(1611)

SEQ ID NO: 21614 - protein, 536 aa, Tribolium castaneum; identical to SEQ ID NO: 15737

SEQ ID NO: 21615 - DNA, 1674 bp, Tribolium castaneum; identical to SEQ ID NO: 15738
  CDS (1)..(1674)

SEQ ID NO: 21616 - protein, 557 aa, Tribolium castaneum; identical to SEQ ID NO: 15739

SEQ ID NO: 21617 - DNA, 1593 bp, Tribolium castaneum; identical to SEQ ID NO: 15740
  CDS (1)..(1593)

SEQ ID NO: 21618 - protein, 530 aa, Tribolium castaneum; identical to SEQ ID NO: 15741

SEQ ID NO: 21619 - DNA, 1761 bp, Clostridium difficile 630; identical to SEQ ID NO: 8505
  CDS (1)..(1761): transl_table=11

SEQ ID NO: 21620 - protein, 586 aa, Clostridium difficile 630; identical to SEQ ID NO: 8506

SEQ ID NO: 21621 - DNA, 1758 bp, Bacillus thuringiensis serovar konkukian str. 97-27; identical to SEQ ID NO: 15754
  CDS (1)..(1758): transl_table=11

SEQ ID NO: 21622 - protein, 585 aa, Bacillus thuringiensis serovar konkukian str. 97-27; identical to SEQ ID NO: 15755

SEQ ID NO: 21623 - DNA, 1413 bp, Erwinia carotovora subsp. atroseptica SCRI1043; identical to SEQ ID NO: 15756
  CDS (1)..(1413): transl_table=11

SEQ ID NO: 21624 - protein, 470 aa, Erwinia carotovora subsp. atroseptica SCRI1043; identical to SEQ ID NO: 15757

SEQ ID NO: 21625 - DNA, 1755 bp, Symbiobacterium thermophilum IAM 14863; identical to SEQ ID NO: 8529
  CDS (1)..(1755): transl_table=11

SEQ ID NO: 21626 - protein, 584 aa, Symbiobacterium thermophilum IAM 14863; identical to SEQ ID NO: 8530

SEQ ID NO: 21627 - DNA, 1758 bp, Bacillus licheniformis ATCC 14580; identical to SEQ ID NO: 15768
  CDS (1)..(1758): transl_table=11

SEQ ID NO: 21628 - protein, 585 aa, Bacillus licheniformis ATCC 14580; identical to SEQ ID NO: 15769

SEQ ID NO: 21629 - DNA, 1755 bp, Bacillus clausii KSM-K16; identical to SEQ ID NO: 8537
  CDS (1)..(1755): transl_table=11

SEQ ID NO: 21630 - protein, 584 aa, Bacillus clausii KSM-K16; identical to SEQ ID NO: 8538

SEQ ID NO: 21631 - DNA, 1434 bp, Corynebacterium glutamicum ATCC 13032; identical to SEQ ID NO: 8543
  CDS (1)..(1434): transl_table=11

SEQ ID NO: 21632 - protein, 477 aa, Corynebacterium glutamicum ATCC 13032; identical to SEQ ID NO: 8544

SEQ ID NO: 21633 - DNA, 1752 bp, Carboxydothermus hydrogenoformans Z-2901; identical to SEQ ID NO: 8561
  CDS (1)..(1752): transl_table=11

SEQ ID NO: 21634 - protein, 583 aa, Carboxydothermus hydrogenoformans Z-2901; identical to SEQ ID NO: 8562

SEQ ID NO: 21635 - DNA, 1422 bp, Leuconostoc mesenteroides subsp. mesenteroides ATCC 8293; identical to SEQ ID NO: 15836
  CDS (1)..(1422): transl_table=11

SEQ ID NO: 21636 - protein, 473 aa, Leuconostoc mesenteroides subsp. mesenteroides ATCC 8293; identical to SEQ ID NO: 15837

SEQ ID NO: 21637 - DNA, 1428 bp, Fusobacterium nucleatum subsp. vincentii ATCC 49256; identical to SEQ ID NO: 15846
  CDS (1)..(1428): transl_table=11

SEQ ID NO: 21638 - protein, 475 aa, Fusobacterium nucleatum subsp. vincentii ATCC 49256; identical to SEQ ID NO: 15847

SEQ ID NO: 21639 - DNA, 1413 bp, Photobacterium sp. SKA34; identical to SEQ ID NO: 15858
  CDS (1)..(1413): transl_table=11

SEQ ID NO: 21640 - protein, 470 aa, Photobacterium sp. SKA34; identical to SEQ ID NO: 15859

SEQ ID NO: 21641 - DNA, 1416 bp, Pseudomonas putida GB-1; identical to SEQ ID NO: 8667
  CDS (1)..(1416): transl_table=11

SEQ ID NO: 21642 - protein, 471 aa, Pseudomonas putida GB-1; identical to SEQ ID NO: 8668

SEQ ID NO: 21643 - DNA, 1455 bp, Pseudomonas putida GB-1; identical to SEQ ID NO: 8669
  CDS (1)..(1455): transl_table=11

SEQ ID NO: 21644 - protein, 484 aa, Pseudomonas putida GB-1; identical to SEQ ID NO: 8670

SEQ ID NO: 21645 - DNA, 1761 bp, Bacillus sp. SG-1; identical to SEQ ID NO: 15880
  CDS (1)..(1761): transl_table=11

SEQ ID NO: 21646 - protein, 586 aa, Bacillus sp. SG-1; identical to SEQ ID NO: 15881

SEQ ID NO: 21647 - DNA, 1413 bp, Moritella sp. PE36; identical to SEQ ID NO: 15884
  CDS (1)..(1413): transl_table=11

SEQ ID NO: 21648 - protein, 470 aa, Moritella sp. PE36; identical to SEQ ID NO: 15885

SEQ ID NO: 21649 - DNA, 1503 bp, Vitis vinifera; identical to SEQ ID NO: 15892
  CDS (1)..(1503)

SEQ ID NO: 21650 - protein, 500 aa, Vitis vinifera; identical to SEQ ID NO: 15893

SEQ ID NO: 21651 - DNA, 1866 bp, Vitis vinifera; identical to SEQ ID NO: 15896
  CDS (1)..(1866)

SEQ ID NO: 21652 - protein, 621 aa, Vitis vinifera; identical to SEQ ID NO: 15897

SEQ ID NO: 21653 - DNA, 1515 bp, Pichia guilliermondii; identical to SEQ ID NO: 15898
  CDS (1)..(1515)

SEQ ID NO: 21654 - protein, 504 aa, Pichia guilliermondii; identical to SEQ ID NO: 15899

SEQ ID NO: 21655 - DNA, 1755 bp, Bacillus subtilis; identical to SEQ ID NO: 8681
  CDS (1)..(1755): transl_table=11

SEQ ID NO: 21656 - protein, 584 aa, Bacillus subtilis; identical to SEQ ID NO: 8682

SEQ ID NO: 21657 - DNA, 2100 bp, Ostreococcus tauri; identical to SEQ ID NO: 8685
  CDS (1)..(2100)

SEQ ID NO: 21658 - protein, 699 aa, Ostreococcus tauri; identical to SEQ ID NO: 8686

SEQ ID NO: 21659 - DNA, 1692 bp, Crassostrea gigas; identical to SEQ ID NO: 15908
  CDS (1)..(1692)

SEQ ID NO: 21660 - protein, 563 aa, Crassostrea gigas; identical to SEQ ID NO: 15909

SEQ ID NO: 21661 - DNA, 1584 bp, Phaeosphaeria nodorum; identical to SEQ ID NO: 8687
  CDS (1)..(1584)

SEQ ID NO: 21662 - protein, 527 aa, Phaeosphaeria nodorum; identical to SEQ ID NO: 8688

SEQ ID NO: 21663 - DNA, 1533 bp, Arabidopsis thaliana; identical to SEQ ID NO: 8689
  CDS (1)..(1533)

SEQ ID NO: 21664 - protein, 510 aa, Arabidopsis thaliana; identical to SEQ ID NO: 8690

SEQ ID NO: 21665 - DNA, 1536 bp, Capsicum annuum; identical to SEQ ID NO: 8691
  CDS (1)..(1536)

SEQ ID NO: 21666 - protein, 511 aa, Capsicum annuum; identical to SEQ ID NO: 8692

SEQ ID NO: 21667 - DNA, 1731 bp, Medicago truncatula; identical to SEQ ID NO: 15914
  CDS (1)..(1731)

SEQ ID NO: 21668 - protein, 576 aa, Medicago truncatula; identical to SEQ ID NO: 15915

SEQ ID NO: 21669 - DNA, 1590 bp, Medicago truncatula; identical to SEQ ID NO: 15916
  CDS (1)..(1590)

SEQ ID NO: 21670 - protein, 529 aa, Medicago truncatula; identical to SEQ ID NO: 15917

SEQ ID NO: 21671 - DNA, 1620 bp, Phaeodactylum tricornutum; identical to SEQ ID NO: 8699
  CDS (1)..(1620)

SEQ ID NO: 21672 - protein, 539 aa, Phaeodactylum tricornutum; identical to SEQ ID NO: 8700

SEQ ID NO: 21673 - DNA, 1632 bp, Phaeodactylum tricornutum; identical to SEQ ID NO: 8701
  CDS (1)..(1632)

SEQ ID NO: 21674 - protein, 543 aa, Phaeodactylum tricornutum; identical to SEQ ID NO: 8702

SEQ ID NO: 21675 - DNA, 1542 bp, Phaeodactylum tricornutum; identical to SEQ ID NO: 8703
  CDS (1)..(1542)

SEQ ID NO: 21676 - protein, 513 aa, Phaeodactylum tricornutum; identical to SEQ ID NO: 8704

SEQ ID NO: 21677 - DNA, 1998 bp, Phaeodactylum tricornutum; identical to SEQ ID NO: 8705
  CDS (1)..(1998)

SEQ ID NO: 21678 - protein, 665 aa, Phaeodactylum tricornutum; identical to SEQ ID NO: 8706

SEQ ID NO: 21679 - DNA, 1533 bp, Solanum tuberosum; identical to SEQ ID NO: 8707
  CDS (1)..(1533)

SEQ ID NO: 21680 - protein, 510 aa, Solanum tuberosum; identical to SEQ ID NO: 8708

SEQ ID NO: 21681 - DNA, 1533 bp, Citrus sinensis; identical to SEQ ID NO: 8709
  CDS (1)..(1533)

SEQ ID NO: 21682 - protein, 510 aa, Citrus sinensis; identical to SEQ ID NO: 8710

SEQ ID NO: 21683 - DNA, 1740 bp, Arabidopsis thaliana; identical to SEQ ID NO: 8711
  CDS (1)..(1740)

SEQ ID NO: 21684 - protein, 579 aa, Arabidopsis thaliana; identical to SEQ ID NO: 8712

SEQ ID NO: 21685 - DNA, 1509 bp, Glycine max; identical to SEQ ID NO: 8713
  CDS (1)..(1509)

SEQ ID NO: 21686 - protein, 502 aa, Glycine max; identical to SEQ ID NO: 8714

SEQ ID NO: 21687 - DNA, 1530 bp, Zea mays; identical to SEQ ID NO: 8715
  CDS (1)..(1530)

SEQ ID NO: 21688 - protein, 509 aa, Zea mays; identical to SEQ ID NO: 8716

SEQ ID NO: 21689 - DNA, 1521 bp, Saccharomyces bayanus; identical to SEQ ID NO: 8719
  CDS (1)..(1521)

SEQ ID NO: 21690 - protein, 506 aa, Saccharomyces bayanus; identical to SEQ ID NO: 8720

SEQ ID NO: 21691 - DNA, 1584 bp, Arabidopsis thaliana; identical to SEQ ID NO: 8721
  CDS (1)..(1584)

SEQ ID NO: 21692 - protein, 527 aa, Arabidopsis thaliana; identical to SEQ ID NO: 8722

SEQ ID NO: 21693 - DNA, 1533 bp, Glycine max; identical to SEQ ID NO: 8723
  CDS (1)..(1533)

SEQ ID NO: 21694 - protein, 510 aa, Glycine max; identical to SEQ ID NO: 8724

SEQ ID NO: 21695 - DNA, 1536 bp, Glycine max; identical to SEQ ID NO: 8725
  CDS (1)..(1536)

SEQ ID NO: 21696 - protein, 511 aa, Glycine max; identical to SEQ ID NO: 8726

SEQ ID NO: 21697 - DNA, 1791 bp, Arabidopsis thaliana; identical to SEQ ID NO: 8727
  CDS (1)..(1791)

SEQ ID NO: 21698 - protein, 596 aa, Arabidopsis thaliana; identical to SEQ ID NO: 8728

SEQ ID NO: 21699 - DNA, 1584 bp, Arabidopsis thaliana; identical to SEQ ID NO: 8729
  CDS (1)..(1584)

SEQ ID NO: 21700 - protein, 527 aa, Arabidopsis thaliana; identical to SEQ ID NO: 8730

SEQ ID NO: 21701 - DNA, 1665 bp, Drosophila melanogaster; identical to SEQ ID NO: 15948
  CDS (1)..(1665)

SEQ ID NO: 21702 - protein, 554 aa, Drosophila melanogaster; identical to SEQ ID NO: 15949

SEQ ID NO: 21703 - DNA, 1740 bp, Arabidopsis thaliana; identical to SEQ ID NO: 8731
  CDS (1)..(1740)

SEQ ID NO: 21704 - protein, 579 aa, Arabidopsis thaliana; identical to SEQ ID NO: 8732

SEQ ID NO: 21705 - DNA, 1581 bp, Aspergillus oryzae; identical to SEQ ID NO: 8733
  CDS (1)..(1581)

SEQ ID NO: 21706 - protein, 526 aa, Aspergillus oryzae; identical to SEQ ID NO: 8734

SEQ ID NO: 21707 - DNA, 1545 bp, Arabidopsis thaliana; identical to SEQ ID NO: 8739
  CDS (1)..(1545)

SEQ ID NO: 21708 - protein, 514 aa, Arabidopsis thaliana; identical to SEQ ID NO: 8740

SEQ ID NO: 21709 - DNA, 1704 bp, Arabidopsis thaliana; identical to SEQ ID NO: 8741
  CDS (1)..(1704)

SEQ ID NO: 21710 - protein, 567 aa, Arabidopsis thaliana; identical to SEQ ID NO: 8742

SEQ ID NO: 21711 - DNA, 1533 bp, Lilium longiflorum; identical to SEQ ID NO: 8743
  CDS (1)..(1533)

SEQ ID NO: 21712 - protein, 510 aa, Lilium longiflorum; identical to SEQ ID NO: 8744

SEQ ID NO: 21713 - DNA, 1413 bp, Vibrio marinus; identical to SEQ ID NO: 8745
  CDS (1)..(1413): transl_table=11

SEQ ID NO: 21714 - protein, 470 aa, Vibrio marinus; identical to SEQ ID NO: 8746

SEQ ID NO: 21715 - DNA, 1752 bp, Ricinus communis; identical to SEQ ID NO: 8747
  CDS (1)..(1752)

SEQ ID NO: 21716 - protein, 583 aa, Ricinus communis; identical to SEQ ID NO: 8748

SEQ ID NO: 21717 - DNA, 1782 bp, Nicotiana tabacum; identical to SEQ ID NO: 8749
  CDS (1)..(1782)

SEQ ID NO: 21718 - protein, 593 aa, Nicotiana tabacum; identical to SEQ ID NO: 8750

SEQ ID NO: 21719 - DNA, 1494 bp, Arabidopsis thaliana; identical to SEQ ID NO: 8751
  CDS (1)..(1494)

SEQ ID NO: 21720 - protein, 497 aa, Arabidopsis thaliana; identical to SEQ ID NO: 8752

SEQ ID NO: 21721 - DNA, 1533 bp, Solanum tuberosum; identical to SEQ ID NO: 8753
  CDS (1)..(1533)

SEQ ID NO: 21722 - protein, 510 aa, Solanum tuberosum; identical to SEQ ID NO: 8754

SEQ ID NO: 21723 - DNA, 1536 bp, Glycine max; identical to SEQ ID NO: 8755
  CDS (1)..(1536)

SEQ ID NO: 21724 - protein, 511 aa, Glycine max; identical to SEQ ID NO: 8756

SEQ ID NO: 21725 - DNA, 1527 bp, Nicotiana tabacum; identical to SEQ ID NO: 15976
  CDS (1)..(1527)

SEQ ID NO: 21726 - protein, 508 aa, Nicotiana tabacum; identical to SEQ ID NO: 8758

SEQ ID NO: 21727 - DNA, 1689 bp, Nicotiana tabacum; identical to SEQ ID NO: 8759
  CDS (1)..(1689)

SEQ ID NO: 21728 - protein, 562 aa, Nicotiana tabacum; identical to SEQ ID NO: 8760

SEQ ID NO: 21729 - DNA, 1506 bp, Candida glabrata; identical to SEQ ID NO: 8763
  CDS (1)..(1506)

SEQ ID NO: 21730 - protein, 501 aa, Candida glabrata; identical to SEQ ID NO: 8764

SEQ ID NO: 21731 - DNA, 1413 bp, Escherichia coli O157; identical to SEQ ID NO: 8765
  CDS (1)..(1413): transl_table=11

SEQ ID NO: 21732 - protein, 470 aa, Escherichia coli O157; identical to SEQ ID NO: 8766

SEQ ID NO: 21733 - DNA, 1413 bp, Salmonella typhi; identical to SEQ ID NO: 15984
  CDS (1)..(1413): transl_table=11

SEQ ID NO: 21734 - protein, 470 aa, Salmonella typhi; identical to SEQ ID NO: 15985

SEQ ID NO: 21735 - DNA, 1413 bp, Salmonella typhimurium; identical to SEQ ID NO: 8767
  CDS (1)..(1413): transl_table=11

SEQ ID NO: 21736 - protein, 470 aa, Salmonella typhimurium; identical to SEQ ID NO: 8768

SEQ ID NO: 21737 - DNA, 1503 bp, Saccharomyces cerevisiae; identical to SEQ ID NO: 8769
  CDS (1)..(1503)

SEQ ID NO: 21738 - protein, 500 aa, Saccharomyces cerevisiae; identical to SEQ ID NO: 8770

SEQ ID NO: 21739 - DNA, 1527 bp, Candida glabrata; identical to SEQ ID NO: 8771
  CDS (1)..(1527)

SEQ ID NO: 21740 - protein, 508 aa, Candida glabrata; identical to SEQ ID NO: 8772

SEQ ID NO: 21741 - DNA, 1443 bp, Escherichia coli; identical to SEQ ID NO: 8363
  CDS (1)..(1443): transl_table=11

SEQ ID NO: 21742 - protein, 480 aa, Escherichia coli; identical to SEQ ID NO: 8364

SEQ ID NO: 21743 - DNA, 1443 bp, Salmonella typhimurium; identical to SEQ ID NO: 8773
  CDS (1)..(1443): transl_table=11

SEQ ID NO: 21744 - protein, 480 aa, Salmonella typhimurium; identical to SEQ ID NO: 8774

SEQ ID NO: 21745 - DNA, 1521 bp, Saccharomyces cerevisiae; identical to SEQ ID NO: 8775
  CDS (1)..(1521)

SEQ ID NO: 21746 - protein, 506 aa, Saccharomyces cerevisiae; identical to SEQ ID NO: 8776

SEQ ID NO: 21747 - DNA, 1599 bp, Agaricus bisporus; identical to SEQ ID NO: 16002
  CDS (1)..(1599)

SEQ ID NO: 21748 - protein, 532 aa, Agaricus bisporus; identical to SEQ ID NO: 16003

SEQ ID NO: 21749 - DNA, 1506 bp, Ashbya gossypii; identical to SEQ ID NO: 8777
  CDS (1)..(1506)

SEQ ID NO: 21750 - protein, 501 aa, Ashbya gossypii; identical to SEQ ID NO: 8778

SEQ ID NO: 21751 - DNA, 1581 bp, Aspergillus niger; identical to SEQ ID NO: 8779
  CDS (1)..(1581)

SEQ ID NO: 21752 - protein, 526 aa, Aspergillus niger; identical to SEQ ID NO: 8780

SEQ ID NO: 21753 - DNA, 1758 bp, Bacillus licheniformis; identical to SEQ ID NO: 8781
  CDS (1)..(1758): transl_table=11

SEQ ID NO: 21754 - protein, 585 aa, Bacillus licheniformis; identical to SEQ ID NO: 8782

SEQ ID NO: 21755 - DNA, 1761 bp, Bacillus psychrophilus; identical to SEQ ID NO: 16010
  CDS (1)..(1761): transl_table=11

SEQ ID NO: 21756 - protein, 586 aa, Bacillus psychrophilus; identical to SEQ ID NO: 8784

SEQ ID NO: 21757 - DNA, 1764 bp, Bacillus stearothermophilus; identical to SEQ ID NO: 8785
  CDS (1)..(1764): transl_table=11

SEQ ID NO: 21758 - protein, 587 aa, Bacillus stearothermophilus; identical to SEQ ID NO: 8786

SEQ ID NO: 21759 - DNA, 1758 bp, Bacillus subtilis; identical to SEQ ID NO: 8787
  CDS (1)..(1758): transl_table=11

SEQ ID NO: 21760 - protein, 585 aa, Bacillus subtilis; identical to SEQ ID NO: 8788

SEQ ID NO: 21761 - DNA, 1428 bp, Corynebacterium glutamicum; identical to SEQ ID NO: 16020
  CDS (1)..(1428): transl_table=11

SEQ ID NO: 21762 - protein, 475 aa, Corynebacterium glutamicum; identical to SEQ ID NO: 16021

SEQ ID NO: 21763 - DNA, 1515 bp, Debaryomyces hansenii; identical to SEQ ID NO: 8793
  CDS (1)..(1515)

SEQ ID NO: 21764 - protein, 504 aa, Debaryomyces hansenii; identical to SEQ ID NO: 8794

SEQ ID NO: 21765 - DNA, 1602 bp, Drosophila melanogaster; identical to SEQ ID NO: 16024
  CDS (1)..(1602)

SEQ ID NO: 21766 - protein, 533 aa, Drosophila melanogaster; identical to SEQ ID NO: 16025

SEQ ID NO: 21767 - DNA, 1581 bp, Emericella nidulans; identical to SEQ ID NO: 8795
  CDS (1)..(1581)

SEQ ID NO: 21768 - protein, 526 aa, Emericella nidulans; identical to SEQ ID NO: 8796

SEQ ID NO: 21769 - DNA, 1506 bp, Kluyveromyces lactis; identical to SEQ ID NO: 8797
  CDS (1)..(1506)

SEQ ID NO: 21770 - protein, 501 aa, Kluyveromyces lactis; identical to SEQ ID NO: 8798

SEQ ID NO: 21771 - DNA, 1506 bp, Saccharomyces castellii; identical to SEQ ID NO: 8801
  CDS (1)..(1506)

SEQ ID NO: 21772 - protein, 501 aa, Saccharomyces castellii; identical to SEQ ID NO: 8802

SEQ ID NO: 21773 - DNA, 1506 bp, Saccharomyces kluyveri; identical to SEQ ID NO: 8803
  CDS (1)..(1506)

SEQ ID NO: 21774 - protein, 501 aa, Saccharomyces kluyveri; identical to SEQ ID NO: 8804

SEQ ID NO: 21775 - DNA, 1530 bp, Schizosaccharomyces pombe; identical to SEQ ID NO: 8805
  CDS (1)..(1530)

SEQ ID NO: 21776 - protein, 509 aa, Schizosaccharomyces pombe; identical to SEQ ID NO: 8806

SEQ ID NO: 21777 - DNA, 1758 bp, Staphylococcus aureus; identical to SEQ ID NO: 8517
  CDS (1)..(1758): transl_table=11

SEQ ID NO: 21778 - protein, 585 aa, Staphylococcus aureus; identical to SEQ ID NO: 8518

SEQ ID NO: 21779 - DNA, 1758 bp, Staphylococcus epidermidis; identical to SEQ ID NO: 16042
  CDS (1)..(1758): transl_table=11

SEQ ID NO: 21780 - protein, 585 aa, Staphylococcus epidermidis; identical to SEQ ID NO: 16043

SEQ ID NO: 21781 - DNA, 1617 bp, Trichoderma reesei; identical to SEQ ID NO: 8807
  CDS (1)..(1617)

SEQ ID NO: 21782 - protein, 538 aa, Trichoderma reesei; identical to SEQ ID NO: 8808

SEQ ID NO: 21783 - DNA, 1533 bp, Oryza sativa; identical to SEQ ID NO: 8809
  CDS (1)..(1533)

SEQ ID NO: 21784 - protein, 510 aa, Oryza sativa; identical to SEQ ID NO: 8810

SEQ ID NO: 21785 - DNA, 1752 bp, Oryza sativa; identical to SEQ ID NO: 8811
  CDS (1)..(1752)

SEQ ID NO: 21786 - protein, 583 aa, Oryza sativa; identical to SEQ ID NO: 8812

SEQ ID NO: 21787 - DNA, 1647 bp, Oryza sativa; identical to SEQ ID NO: 8379
  CDS (1)..(1647)

SEQ ID NO: 21788 - protein, 548 aa, Oryza sativa; identical to SEQ ID NO: 8380

SEQ ID NO: 21789 - DNA, 1536 bp, Oryza sativa; identical to SEQ ID NO: 8381
  CDS (1)..(1536)

SEQ ID NO: 21790 - protein, 511 aa, Oryza sativa; identical to SEQ ID NO: 8382

SEQ ID NO: 21791 - DNA, 1737 bp, Oryza sativa; identical to SEQ ID NO: 16058
  CDS (1)..(1737)

SEQ ID NO: 21792 - protein, 578 aa, Oryza sativa; identical to SEQ ID NO: 16059

SEQ ID NO: 21793 - DNA, 1713 bp, Oryza sativa; identical to SEQ ID NO: 8383
  CDS (1)..(1713)

SEQ ID NO: 21794 - protein, 570 aa, Oryza sativa; identical to SEQ ID NO: 8384

SEQ ID NO: 21795 - DNA, 1584 bp, Oryza sativa; identical to SEQ ID NO: 8385
  CDS (1)..(1584)

SEQ ID NO: 21796 - protein, 527 aa, Oryza sativa; identical to SEQ ID NO: 8386

SEQ ID NO: 21797 - DNA, 1584 bp, Oryza sativa; identical to SEQ ID NO: 8813
  CDS (1)..(1584)

SEQ ID NO: 21798 - protein, 527 aa, Oryza sativa; identical to SEQ ID NO: 8814

SEQ ID NO: 21799 - DNA, 1584 bp, Oryza sativa; identical to SEQ ID NO: 8387
  CDS (1)..(1584)

SEQ ID NO: 21800 - protein, 527 aa, Oryza sativa; identical to SEQ ID NO: 8388

SEQ ID NO: 21801 - DNA, 1584 bp, Oryza sativa; identical to SEQ ID NO: 16068
  CDS (1)..(1584)

SEQ ID NO: 21802 - protein, 527 aa, Oryza sativa; identical to SEQ ID NO: 16069

SEQ ID NO: 21803 - DNA, 1716 bp, Brassica napus; identical to SEQ ID NO: 8817
  CDS (1)..(1716)

SEQ ID NO: 21804 - protein, 571 aa, Brassica napus; identical to SEQ ID NO: 8818

SEQ ID NO: 21805 - DNA, 1584 bp, Brassica napus; identical to SEQ ID NO: 8819
  CDS (1)..(1584)

SEQ ID NO: 21806 - protein, 527 aa, Brassica napus; identical to SEQ ID NO: 8820

SEQ ID NO: 21807 - DNA, 1584 bp, Brassica napus; identical to SEQ ID NO: 8823
  CDS (1)..(1584)

SEQ ID NO: 21808 - protein, 527 aa, Brassica napus; identical to SEQ ID NO: 8824

SEQ ID NO: 21809 - DNA, 1581 bp, Glycine max; identical to SEQ ID NO: 16795
  CDS (1)..(1581)

SEQ ID NO: 21810 - protein, 526 aa, Glycine max; identical to SEQ ID NO: 15541

SEQ ID NO: 21811 - DNA, 1581 bp, Glycine max; identical to SEQ ID NO: 8825
  CDS (1)..(1581)

SEQ ID NO: 21812 - protein, 526 aa, Glycine max; identical to SEQ ID NO: 8826

SEQ ID NO: 21813 - DNA, 1584 bp, Triticum aestivum; identical to SEQ ID NO: 8829
  CDS (1)..(1584)

SEQ ID NO: 21814 - protein, 527 aa, Triticum aestivum; identical to SEQ ID NO: 8830

SEQ ID NO: 21815 - DNA, 1584 bp, Brassica napus; identical to SEQ ID NO: 8835
  CDS (1)..(1584)

SEQ ID NO: 21816 - protein, 527 aa, Brassica napus; identical to SEQ ID NO: 8836

SEQ ID NO: 21817 - DNA, 1743 bp, Brassica napus; identical to SEQ ID NO: 8837
  CDS (1)..(1743)

SEQ ID NO: 21818 - protein, 580 aa, Brassica napus; identical to SEQ ID NO: 8838

SEQ ID NO: 21819 - DNA, 1743 bp, Brassica napus; identical to SEQ ID NO: 8839
  CDS (1)..(1743)

SEQ ID NO: 21820 - protein, 580 aa, Brassica napus; identical to SEQ ID NO: 8840

SEQ ID NO: 21821 - DNA, 1764 bp, Brassica napus; identical to SEQ ID NO: 8841
  CDS (1)..(1764)

SEQ ID NO: 21822 - protein, 587 aa, Brassica napus; identical to SEQ ID NO: 8842

SEQ ID NO: 21823 - DNA, 1533 bp, Brassica napus; identical to SEQ ID NO: 8843
  CDS (1)..(1533)

SEQ ID NO: 21824 - protein, 510 aa, Brassica napus; identical to SEQ ID NO: 8844

SEQ ID NO: 21825 - DNA, 1497 bp, Brassica napus; identical to SEQ ID NO: 8845
  CDS (1)..(1497)

SEQ ID NO: 21826 - protein, 498 aa, Brassica napus; identical to SEQ ID NO: 8846

SEQ ID NO: 21827 - DNA, 1584 bp, Brassica napus; identical to SEQ ID NO: 8847
  CDS (1)..(1584)

SEQ ID NO: 21828 - protein, 527 aa, Brassica napus; identical to SEQ ID NO: 8848

SEQ ID NO: 21829 - DNA, 1533 bp, Brassica napus; identical to SEQ ID NO: 8849
  CDS (1)..(1533)

SEQ ID NO: 21830 - protein, 510 aa, Brassica napus; identical to SEQ ID NO: 8850

SEQ ID NO: 21831 - DNA, 1584 bp, Brassica napus
  CDS (1)..(1584)
atgcattcgagtcatctccttctcgaggaaccgatcaggatggcatcaatcctcgagccatccaaatctagtttcttcccagcattgactaagatcgtcgggactctcggtcccaaatcccgatccgtcgagactctctccggttgcctcaaatccgggatgtccgtggctcgatttgatttctcttggggagatgctgagtatcaccaggagacgctggataatctgaaaattgctgtgaagagcactaagaagctttgtgctgttatgcttgatactgtgggacctgagctgcaagttatcaacaagtctgggaaagctattactcttaaagccgatggacttgttactttgacacccagtcaagatcgagaagcgtcttctgaagtccttccgattaactttaatgggcttgccaaggcagtgaagaaaggagacactatctttgttgggcaatacctattcactggtagtgaaacaacttcagtttggctcgaggttgatgaagttaaaggagatgatgtcatttgcctgtcaaggaatgctgctactcttgctggttctctcttcactctgcacgcctctcaagttcacatcgatctgccaactcttacggagaaagataaggaggttataagcacatggggagttcagaataaaatcgattttctctctttgtcttattgtcgtcatgcggaggatgttcgccagacccgcgaaatgcttaagaagttgggtgacctctctcaaacacaaatatttgccaagattgagaatgtagagggacttaaccactttgatgagattctacaagaagctgatggaattattctttctcgtgggaatttgggtattgatctacccccggaaaaggtgtttttgtttcaaaaggcggctctttacaagtgcaacatggctgggaaaccagccgttcttacccgtgtcgttgatagtatgactgacaacttgcgaccaactcgtgcagaggcaacagatgttgctaatgctgttctagatggaagtgatgcaattcttcttggtgctgagacccttcgcggtttataccctgttgagacaatatccactgtcggtaggatctgtgctgaggcagaaaaggttttcaatcaggacttgtacttcaagaagactgtcaagtatgtaggagaaccgatgtctcacttggaatccattgcttcttcagctgtacgggcagcaatcaaggttaaggcatctgtcattatatgcttcacctcttctggaagagcagcaaggttaattgccaaatacaggcccacaatgcccgttatttctgttgtcattccccgggttaagacaaatcagctgaaatggagctttagtggagcctttgaggcgaggcagtcacttattgtcagaggccttttccccatgctcgctgatcctcgtcacccagcggaatcaacaagtgcgacgaacgagtcagtcctcaaggttgcactagaccatggaaagcaagcaggagtgatcaaatcgcatgacagagtagtggtgtgtcagaaagttggtgatgcatctgtggtgaagatcatcgagctagaggattaa

SEQ ID NO: 21832 - protein, 527 aa, Brassica napus; identical to SEQ ID NO: 8822

SEQ ID NO: 21833 - DNA, 1584 bp, Brassica napus; identical to SEQ ID NO: 8851
  CDS (1)..(1584)

SEQ ID NO: 21834 - protein, 527 aa, Brassica napus; identical to SEQ ID NO: 8852

SEQ ID NO: 21835 - DNA, 1497 bp, Brassica napus; identical to SEQ ID NO: 8855
  CDS (1)..(1497)

SEQ ID NO: 21836 - protein, 498 aa, Brassica napus; identical to SEQ ID NO: 8856

SEQ ID NO: 21837 - DNA, 1584 bp, Zea mays; identical to SEQ ID NO: 8857
  CDS (1)..(1584)

SEQ ID NO: 21838 - protein, 527 aa, Zea mays; identical to SEQ ID NO: 8858

SEQ ID NO: 21839 - DNA, 1728 bp, Glycine max; identical to SEQ ID NO: 8859
  CDS (1)..(1728)

SEQ ID NO: 21840 - protein, 575 aa, Glycine max; identical to SEQ ID NO: 8860

SEQ ID NO: 21841 - DNA, 1584 bp, Glycine max; identical to SEQ ID NO: 8861
  CDS (1)..(1584)

SEQ ID NO: 21842 - protein, 527 aa, Glycine max; identical to SEQ ID NO: 8862

SEQ ID NO: 21843 - DNA, 1584 bp, Glycine max; identical to SEQ ID NO: 8863
  CDS (1)..(1584)

SEQ ID NO: 21844 - protein, 527 aa, Glycine max; identical to SEQ ID NO: 8864

SEQ ID NO: 21845 - DNA, 1638 bp, Glycine max; identical to SEQ ID NO: 8865
  CDS (1)..(1638)

SEQ ID NO: 21846 - protein, 545 aa, Glycine max; identical to SEQ ID NO: 8866

SEQ ID NO: 21847 - DNA, 1638 bp, Glycine max; identical to SEQ ID NO: 8867
  CDS (1)..(1638)

SEQ ID NO: 21848 - protein, 545 aa, Glycine max; identical to SEQ ID NO: 8868

SEQ ID NO: 21849 - DNA, 1728 bp, Glycine max; identical to SEQ ID NO: 8869
  CDS (1)..(1728)

SEQ ID NO: 21850 - protein, 575 aa, Glycine max; identical to SEQ ID NO: 8870

SEQ ID NO: 21851 - DNA, 1749 bp, Glycine max; identical to SEQ ID NO: 8871
  CDS (1)..(1749)

SEQ ID NO: 21852 - protein, 582 aa, Glycine max; identical to SEQ ID NO: 8872

SEQ ID NO: 21853 - DNA, 1584 bp, Glycine max; identical to SEQ ID NO: 8873
  CDS (1)..(1584)

SEQ ID NO: 21854 - protein, 527 aa, Glycine max; identical to SEQ ID NO: 8874

SEQ ID NO: 21855 - DNA, 1749 bp, Glycine max; identical to SEQ ID NO: 8875
  CDS (1)..(1749)

SEQ ID NO: 21856 - protein, 582 aa, Glycine max; identical to SEQ ID NO: 8876

SEQ ID NO: 21857 - DNA, 1728 bp, Glycine max; identical to SEQ ID NO: 8877
  CDS (1)..(1728)

SEQ ID NO: 21858 - protein, 575 aa, Glycine max; identical to SEQ ID NO: 8878

SEQ ID NO: 21859 - DNA, 1749 bp, Glycine max; identical to SEQ ID NO: 8881
  CDS (1)..(1749)

SEQ ID NO: 21860 - protein, 582 aa, Glycine max; identical to SEQ ID NO: 8882

SEQ ID NO: 21861 - DNA, 1542 bp, Hordeum vulgare; identical to SEQ ID NO: 8883
  CDS (1)..(1542)

SEQ ID NO: 21862 - protein, 513 aa, Hordeum vulgare; identical to SEQ ID NO: 8884

SEQ ID NO: 21863 - DNA, 1584 bp, Oryza sativa; identical to SEQ ID NO: 8885
  CDS (1)..(1584)

SEQ ID NO: 21864 - protein, 527 aa, Oryza sativa; identical to SEQ ID NO: 8886

SEQ ID NO: 21865 - DNA, 1803 bp, Zea mays; identical to SEQ ID NO: 8887
  CDS (1)..(1803)

SEQ ID NO: 21866 - protein, 600 aa, Zea mays; identical to SEQ ID NO: 8888

SEQ ID NO: 21867 - DNA, 1698 bp, Triticum aestivum; identical to SEQ ID NO: 8889
  CDS (1)..(1698)

SEQ ID NO: 21868 - protein, 565 aa, Triticum aestivum; identical to SEQ ID NO: 8890

SEQ ID NO: 21869 - DNA, 1584 bp, Zea mays; identical to SEQ ID NO: 8891
  CDS (1)..(1584)

SEQ ID NO: 21870 - protein, 527 aa, Zea mays; identical to SEQ ID NO: 8892

SEQ ID NO: 21871 - DNA, 1728 bp, Zea mays; identical to SEQ ID NO: 8895
  CDS (1)..(1728)

SEQ ID NO: 21872 - protein, 575 aa, Zea mays; identical to SEQ ID NO: 8896

SEQ ID NO: 21873 - DNA, 1707 bp, Zea mays; identical to SEQ ID NO: 8897
  CDS (1)..(1707)

SEQ ID NO: 21874 - protein, 568 aa, Zea mays; identical to SEQ ID NO: 8898

SEQ ID NO: 21875 - DNA, 1629 bp, Zea mays; identical to SEQ ID NO: 8899
  CDS (1)..(1629)

SEQ ID NO: 21876 - protein, 542 aa, Zea mays; identical to SEQ ID NO: 8900

SEQ ID NO: 21877 - DNA, 1548 bp, Zea mays; identical to SEQ ID NO: 8901
  CDS (1)..(1548)

SEQ ID NO: 21878 - protein, 515 aa, Zea mays; identical to SEQ ID NO: 8902

SEQ ID NO: 21879 - DNA, 1542 bp, Zea mays; identical to SEQ ID NO: 8905
  CDS (1)..(1542)

SEQ ID NO: 21880 - protein, 513 aa, Zea mays; identical to SEQ ID NO: 8906

SEQ ID NO: 21881 - DNA, 1530 bp, Zea mays; identical to SEQ ID NO: 8903
  CDS (1)..(1530)

SEQ ID NO: 21882 - protein, 509 aa, Zea mays; identical to SEQ ID NO: 8904

SEQ ID NO: 21883 - DNA, 1707 bp, Zea mays; identical to SEQ ID NO: 8831
  CDS (1)..(1707)

SEQ ID NO: 21884 - protein, 568 aa, Zea mays; identical to SEQ ID NO: 8832

SEQ ID NO: 21885 - DNA, 1584 bp, Zea mays; identical to SEQ ID NO: 8907
  CDS (1)..(1584)

SEQ ID NO: 21886 - protein, 527 aa, Zea mays; identical to SEQ ID NO: 8908

SEQ ID NO: 21887 - DNA, 1554 bp, Zea mays; identical to SEQ ID NO: 8909
  CDS (1)..(1554)

SEQ ID NO: 21888 - protein, 517 aa, Zea mays; identical to SEQ ID NO: 8910

SEQ ID NO: 21889 - DNA, 1707 bp, Zea mays; identical to SEQ ID NO: 8911
  CDS (1)..(1707)

SEQ ID NO: 21890 - protein, 568 aa, Zea mays; identical to SEQ ID NO: 8912

SEQ ID NO: 21891 - DNA, 1728 bp, Zea mays; identical to SEQ ID NO: 8913
  CDS (1)..(1728)

SEQ ID NO: 21892 - protein, 575 aa, Zea mays; identical to SEQ ID NO: 8914

SEQ ID NO: 21893 - DNA, 20 bp, Artificial sequence
  primer
atggagaagttacttgctgg

SEQ ID NO: 21894 - DNA, 22 bp, Artificial sequence
  primer
ctactccacgttcaaaatcttg

SEQ ID NO: 21895 - protein, 433 aa, Artificial sequence
  consensus sequence
  Variant (2)..(2): Xaa in position 2 is any amino acid
  Variant (4)..(5): Xaa in position 4 to 5 is any amino acid
  Variant (7)..(7): Xaa in position 7 is any amino acid
  Variant (10)..(21): Xaa in position 10 to 21 is any amino acid
  Variant (22)..(23): Xaa in position 22 to 23 is any or no amino acid
  Variant (26)..(26): Xaa in position 26 is any amino acid
  Variant (28)..(28): Xaa in position 28 is any amino acid
  Variant (30)..(30): Xaa in position 30 is any amino acid
  Variant (32)..(32): Xaa in position 32 is any amino acid
  Variant (36)..(39): Xaa in position 36 to 39 is any amino acid
  Variant (41)..(57): Xaa in position 41 to 57 is any amino acid
  Variant (58)..(64): Xaa in position 58 to 64 is any or no amino acid
  Variant (66)..(67): Xaa in position 66 to 67 is any amino acid
  Variant (71)..(71): Xaa in position 71 is any amino acid
  Variant (75)..(88): Xaa in position 75 to 88 is any amino acid
  Variant (89)..(92): Xaa in position 89 to 92 is any or no amino acid
  Variant (94)..(109): Xaa in position 94 to 109 is any amino acid
  Variant (110)..(116): Xaa in position 110 to 116 is any or no amino acid
  Variant (118)..(126): Xaa in position 118 to 126 is any amino acid
  Variant (128)..(134): Xaa in position 128 to 134 is any amino acid
  Variant (135)..(139): Xaa in position 135 to 139 is any or no amino acid
  Variant (141)..(145): Xaa in position 141 to 145 is any amino acid
  Variant (147)..(169): Xaa in position 147 to 169 is any amino acid
  Variant (170)..(185): Xaa in position 170 to 185 is any or no amino acid
  Variant (188)..(191): Xaa in position 188 to 191 is any amino acid
  Variant (194)..(195): Xaa in position 194 to 195 is any amino acid
  Variant (197)..(205): Xaa in position 197 to 205 is any amino acid
  Variant (206)..(206): Xaa in position 206 is any or no amino acid
  Variant (208)..(211): Xaa in position 208 to 211 is any amino acid
  Variant (214)..(226): Xaa in position 214 to 226 is any amino acid
  Variant (228)..(234): Xaa in position 228 to 234 is any amino acid
  Variant (235)..(242): Xaa in position 235 to 242 is any or no amino acid
  Variant (244)..(244): Xaa in position 244 is any amino acid
  Variant (246)..(255): Xaa in position 246 to 255 is any amino acid
  Variant (256)..(258): Xaa in position 256 to 258 is any or no amino acid
  Variant (260)..(263): Xaa in position 260 to 263 is any amino acid
  Variant (265)..(266): Xaa in position 265 to 266 is any amino acid
  Variant (268)..(268): Xaa in position 268 is any amino acid
  Variant (275)..(275): Xaa in position 275 is any amino acid
  Variant (277)..(277): Xaa in position 277 is any amino acid
  Variant (279)..(279): Xaa in position 279 is any amino acid
  Variant (281)..(285): Xaa in position 281 to 285 is any amino acid
  Variant (288)..(292): Xaa in position 288 to 292 is any amino acid
  Variant (294)..(297): Xaa in position 294 to 297 is any amino acid
  Variant (301)..(301): Xaa in position 301 is any amino acid
  Variant (302)..(302): Xaa in position 302 is any or no amino acid
  Variant (305)..(306): Xaa in position 305 to 306 is any amino acid
  Variant (308)..(308): Xaa in position 308 is any amino acid
  Variant (311)..(313): Xaa in position 311 to 313 is any amino acid
  Variant (315)..(315): Xaa in position 315 is any amino acid
  Variant (321)..(322): Xaa in position 321 to 322 is any amino acid
  Variant (328)..(329): Xaa in position 328 to 329 is any amino acid
  Variant (332)..(332): Xaa in position 332 is any amino acid
  Variant (334)..(335): Xaa in position 334 to 335 is any amino acid
  Variant (339)..(339): Xaa in position 339 is any amino acid
  Variant (341)..(341): Xaa in position 341 is any amino acid
  Variant (343)..(343): Xaa in position 343 is any amino acid
  Variant (345)..(345): Xaa in position 345 is any amino acid
  Variant (348)..(348): Xaa in position 348 is any amino acid
  Variant (349)..(361): Xaa in position 349 to 361 is any or no amino acid
  Variant (363)..(371): Xaa in position 363 to 371 is any amino acid
  Variant (372)..(398): Xaa in position 372 to 398 is any or no amino acid
  Variant (400)..(409): Xaa in position 400 to 409 is any amino acid
  Variant (410)..(410): Xaa in position 410 is any or no amino acid
  Variant (412)..(414): Xaa in position 412 to 414 is any amino acid
  Variant (416)..(417): Xaa in position 416 to 417 is any amino acid
  Variant (419)..(420): Xaa in position 419 to 420 is any amino acid
  Variant (422)..(426): Xaa in position 422 to 426 is any amino acid
  Variant (430)..(432): Xaa in position 430 to 432 is any amino acid
TXIXXTXGPXXXXXXXXXXXXXXGMXVXRXNXSHGXXXXHXXXXXXXXXXXXXXXXXXXXXXXXAXXLDTXGPEXXXXXXXXXXXXXXXXXXGXXXXXXXXXXXXXXXXXXXXXXXYXXXXXXXXXGXXXXXXXXXXXXGXXXXXVXXXXXXXXXXXXXXXXXXXXXXXXXXXXXXXXXXXXXXXLPXXXXKDXXDXXXXXXXXXXDXXXXSFXXXXXXXXXXXXXLXXXXXXXXXXXXXXXKXEXXXXXXXXXXXXXIXXXXDXXMXARGDLGXEXPXEXXXXXQKXXXXXCXXXXKPVXXATXXLXSMXXXPXPTRAEXXDVANAXXDGXDXXMLSXEXAXGXYPXXXXXXXXXXXXXXEXXXXXXXXXXXXXXXXXXXXXXXXXXXXXXXXXXXXAXXXXXXXXXXXIXXXTXXGXXAXXXXXYRPXXXI

SEQ ID NO: 21896 - protein, 47 aa, Artificial sequence
  protein pattern
  Variant (2)..(12): Xaa in position 2 to 12 is any amino acid
  Variant (18)..(18): Xaa in position 18 is Ala, Ile or Val
  Variant (19)..(19): Xaa in position 19 is Gly, Asn, Ser or Thr
  Variant (21)..(21): Xaa in position 21 is Ile or Val
  Variant (22)..(22): Xaa in position 22 is Ala, Gly or Ser
  Variant (23)..(23): Xaa in position 23 is any amino acid
  Variant (25)..(25): Xaa in position 25 is Ile or Val
  Variant (26)..(26): Xaa in position 26 is any amino acid
  Variant (27)..(27): Xaa in position 27 is Asp, Glu or Gln
  Variant (29)..(29): Xaa in position 29 is Ala, Ser or Thr
  Variant (31)..(32): Xaa in position 31 to 32 is any amino acid
  Variant (33)..(33): Xaa in position 33 is Leu, Met or Val
  Variant (35)..(35): Xaa in position 35 is Gly or Ser
  Variant (36)..(36): Xaa in position 36 is Ala or Gly
  Variant (38)..(38): Xaa in position 38 is Ser or Thr
  Variant (39)..(40): Xaa in position 39 to 40 is any amino acid
  Variant (42)..(43): Xaa in position 42 to 43 is any amino acid
  Variant (45)..(46): Xaa in position 45 to 46 is any amino acid
  Variant (47)..(47): Xaa in position 47 is Ala, Cys, Ser, Thr or Val
TXXXXXXXXXXXPTRAEXXDXXXAXXXGXDXXXLXXEXXXGXXPXXX

SEQ ID NO: 21897 - protein, 55 aa, Artificial sequence
  protein pattern
  Variant (2)..(11): Xaa in position 2 to 11 is any amino acid
  Variant (13)..(13): Xaa in position 13 is Ala, Ile, Leu or Val
  Variant (14)..(16): Xaa in position 14 to 16 is any amino acid
  Variant (18)..(18): Xaa in position 18 is Ala, Gly, Ser or Val
  Variant (19)..(19): Xaa in position 19 is any amino acid
  Variant (21)..(21): Xaa in position 21 is any amino acid
  Variant (26)..(26): Xaa in position 26 is Leu or Met
  Variant (28)..(28): Xaa in position 28 is any amino acid
  Variant (29)..(29): Xaa in position 29 is Glu or Gln
  Variant (30)..(30): Xaa in position 30 is Ile, Leu, Met or Val
  Variant (31)..(34): Xaa in position 31 to 34 is any amino acid
  Variant (35)..(35): Xaa in position 35 is Ile, Leu, Met or Val
  Variant (36)..(38): Xaa in position 36 to 38 is any amino acid
  Variant (40)..(45): Xaa in position 40 to 45 is any amino acid
  Variant (46)..(46): Xaa in position 46 is Ala, Cys, Ser or Val
  Variant (47)..(50): Xaa in position 47 to 50 is any amino acid
  Variant (51)..(51): Xaa in position 51 is Lys or Arg
  Variant (52)..(52): Xaa in position 52 is any amino acid
  Variant (53)..(53): Xaa in position 53 is Ile or Val
  Variant (54)..(54): Xaa in position 54 is Ala, Ile or Val
  Variant (55)..(55): Xaa in position 55 is Cys, Thr or Val
EXXXXXXXXXXIXXXXDXXMXARGDXGXXXXXXXXXXXQXXXXXXXXXXXXXXXX

SEQ ID NO: 21898 - protein, 17 aa, Artificial sequence
  protein pattern
  Variant (2)..(2): Xaa in position 2 is any amino acid
  Variant (3)..(3): Xaa in position 3 is Cys, Asp, Asn or Ser
  Variant (4)..(4): Xaa in position 4 is Ala, Ile or Val
  Variant (5)..(5): Xaa in position 5 is any amino acid
  Variant (7)..(7): Xaa in position 7 is any amino acid
  Variant (9)..(9): Xaa in position 9 is Phe or Met
  Variant (10)..(10): Xaa in position 10 is Ala, Cys or Ser
  Variant (13)..(13): Xaa in position 13 is Asp, Glu, Asn, Ser or Thr
  Variant (14)..(16): Xaa in position 14 to 16 is any amino acid
GXXXXRXNXXHGXXXXH

SEQ ID NO: 21899 - protein, 10 aa, Artificial sequence
  protein pattern
  Variant (2)..(2): Xaa in position 2 is any or no amino acid
  Variant (5)..(5): Xaa in position 5 is any amino acid
  Variant (9)..(9): Xaa in position 9 is Ile, Leu or Val
  Variant (10)..(10): Xaa in position 10 is Gln or Arg
LXDTXGPEXX

SEQ ID NO: 21900 - protein, 11 aa, Artificial sequence
  protein pattern
  Variant (2)..(2): Xaa in position 2 is any amino acid
  Variant (3)..(3): Xaa in position 3 is Ile or Leu
  Variant (4)..(4): Xaa in position 4 is Ile or Val
  Variant (5)..(5): Xaa in position 5 is Ala, Cys or Gly
  Variant (7)..(7): Xaa in position 7 is Ile, Leu or Val
  Variant (10)..(10): Xaa in position 10 is any amino acid
  Variant (11)..(11): Xaa in position 11 is Cys, Ser or Thr
TXXXXTXGPXX

SEQ ID NO: 21901 - protein, 12 aa, Artificial sequence
  protein pattern
  Variant (3)..(3): Xaa in position 3 is Ala, Gly, Ser or Thr
  Variant (4)..(4): Xaa in position 4 is Ile, Leu, Met or Val
  Variant (5)..(5): Xaa in position 5 is Ala, Ser or Thr
  Variant (6)..(6): Xaa in position 6 is any amino acid
  Variant (9)..(10): Xaa in position 9 to 10 is any amino acid
  Variant (11)..(11): Xaa in position 11 is Asp or Val
  Variant (12)..(12): Xaa in position 12 is Ile or Leu
LPXXXXKDXXXX

SEQ ID NO: 21902 - DNA, 1371 bp, Arabidopsis thaliana
  CDS (1)..(1371)
atggctcctgatgcttctactgctcttgcagcgagggagaaagttcagcaaatcctgaatgcagcttgtaccggaaatctcgaattccttaagaatgttgctaagcagcttgatgaaggaaaagacttgacgaaaactgtggagagtattaaagacgcaaacaaacgtggagcgcttcacttcgctgcgagagaaggacaaactgaaatatgcagatatcttttggaagaactgaaactcaatgctgatgcaaaagatgaaactggtgatactccgcttgttcatgctgcgaggcaaggacagattgaaacggttaagtatcttttagagcaaggagctgatcccaatatagctagtgaactaggagccacagctttgcatcatgcggctgggacaggagaaatcgagttgctaaaggaattgctctctagaggtgttcctgttgattctgaaagtgaatctggcacgccattaatctgggctgctggccacgaccaaaaaaatgctgtggaagtcttgttagaacacaatgccaatcctaatgctgagactgaagataatatcacaccgttattatctgcagtggcagcgggttctctgtcatgcttagagttgttggtcaaggcaggtgccaaagctaacgtttttgctggtggtgcaactccattgcacattgcggctgatattggaaaccttgagttaattaactgtttacttaaagccggggctgatccgaatcagaaagatgaggagggtaataggccattagaagttgcagctgctagagacaacagaaaggttgttgagatcctcttcccattgacaacaaaaccagaaactgtttcggactggacagtagatggaattctcgctcacatggaatcaaacaaagaacaagaggaaaactcaaacaaggcgaaatcccaagagactgggatcaagaaagatcttcctgtggtctccccagaagcaaaggcaaaagccgcagaagcaaaagccagaggacaagacgcctttcacagaaaggattttcagatggctattgatgcttatacacaagcaattgattttgacccaacggatcataccttattctcaaaccgaagcctctgctggttgcgactaggacaagctgagcatgccttatctgatgctaaagcctgcagagaactaaacccagattggcctaaaggttgcttcagagaaggcgctgctctgcgtttgctacagcggtttgacgaggcagccaatgctttctacgagggagtattgcttagccctgaaagcaaagagctcattgatgctttcagagaagctgtagatgccggaaggaagtttcacggcaagggtgaggttaaggccaaatcataa

SEQ ID NO: 21903 - protein, 456 aa, Arabidopsis thaliana
MAPDASTALAAREKVQQILNAACTGNLEFLKNVAKQLDEGKDLTKTVESIKDANKRGALHFAAREGQTEICRYLLEELKLNADAKDETGDTPLVHAARQGQIETVKYLLEQGADPNIASELGATALHHAAGTGEIELLKELLSRGVPVDSESESGTPLIWAAGHDQKNAVEVLLEHNANPNAETEDNITPLLSAVAAGSLSCLELLVKAGAKANVFAGGATPLHIAADIGNLELINCLLKAGADPNQKDEEGNRPLEVAAARDNRKVVEILFPLTTKPETVSDWTVDGILAHMESNKEQEENSNKAKSQETGIKKDLPVVSPEAKAKAAEAKARGQDAFHRKDFQMAIDAYTQAIDFDPTDHTLFSNRSLCWLRLGQAEHALSDAKACRELNPDWPKGCFREGAALRLLQRFDEAANAFYEGVLLSPESKELIDAFREAVDAGRKFHGKGEVKAKS

SEQ ID NO: 21904 - DNA, 1558 bp, Zea mays subsp. mays
  CDS (18)..(1388)
aagcttccgcttctctcatggccgacgccaccgccgccctctcagctcggagcaaggtgcaggctttcctggaggctgcgcgcgccggcgacctccaatccctcaagaacctcgtcgcggcgctcgacgaggacggcacgggcgccgcctccgtcgccgccgccgtgcgtgacgccaacaagcgcaccgccctccacttcgcggcgatcggatgtcgcaccgacgtctgtgaattcctcatcggcgagctcggcctccctgtcgacccaaaggacgatgatggcgaaactccgctcatccatgcgacacgccagggccatctggacactgtcaagtatcttctcgaccatggagctgatccttcgctggccaccagcctaggagccacagcgctacaccatgctgcaggcatagggaacacggaactcatgaagcttctcctctccaagggagttgacgtcgagtcagaaagtgatgctggcactccccttgtgtgggctgctggtcatggcaaccaggatgctgtcaaacttctgcttcaacacaatgctaagccaaatactgaaaacgatgatggtgtcacagcattgttatctgctgttgctgcaggttccctcccatgcttggaggtcctaattgaggctggtgcaaacccaaatgtcaaggctggtggagcaaccccattgcatattgctgcagatagtggaaatatagaagtcatcaaatgtttgcttaaagctggagctgacccaaatacctgtgatgatgatgaattgaagccagttcaggttgctgcttggagaaataaccatgaagctgttgaacttcttttaccgttaacatccccaattccaggtgtttcaaactggaacgtagatgggattatagaacacatgctccctaaagagtatgaggaaaagtctcaactgaaggaagcgacatctctgaaatcaggcctaacacaaactattgaggtgtcatctgaagcaaaaaagaggtccttggaagccaaatcaagaggtgatgatgccttcagaagaaaggactaccttgtagcggtggatgcttatacgcaggctacagagttggacccaactgatgcaacagtgctctcaaacagaagcctgtgctggctgcgggcagggcaagctgagcgtgctctggaggacgccaaagcatgccgtgcattgagaccagattgggcgaaagcctgctacagggaaggtgcggcgcatcgtctgttacagaggtttgaggaagccgcaaacgccttctatgagggggtgcaacttgagccagagaacacggagctcgtcaacgcattcagggaggccatcgaagccgggaggaagttccatggcgtcgacacgccaagctcaacacaatgagactttgctgtttggttggataggtagatgatgaggcggatggacatgaacgttgtcttagttggaatttggtgagatgatgaatgagatgatcatgaaatttgaaagagcgaatttgccagatttattttgtgttttgtgattgttttcttaaacttgttttcttgcgc

SEQ ID NO: 21905 - protein, 456 aa, Zea mays subsp. mays
MADATAALSARSKVQAFLEAARAGDLQSLKNLVAALDEDGTGAASVAAAVRDANKRTALHFAAIGCRTDVCEFLIGELGLPVDPKDDDGETPLIHATRQGHLDTVKYLLDHGADPSLATSLGATALHHAAGIGNTELMKLLLSKGVDVESESDAGTPLVWAAGHGNQDAVKLLLQHNAKPNTENDDGVTALLSAVAAGSLPCLEVLIEAGANPNVKAGGATPLHIAADSGNIEVIKCLLKAGADPNTCDDDELKPVQVAAWRNNHEAVELLLPLTSPIPGVSNWNVDGIIEHMLPKEYEEKSQLKEATSLKSGLTQTIEVSSEAKKRSLEAKSRGDDAFRRKDYLVAVDAYTQATELDPTDATVLSNRSLCWLRAGQAERALEDAKACRALRPDWAKACYREGAAHRLLQRFEEAANAFYEGVQLEPENTELVNAFREAIEAGRKFHGVDTPSSTQ

SEQ ID NO: 21906 - DNA, 1752 bp, Glycine max
  CDS (108)..(1490)
cttaaactcagactgtgagcgagactcggtagtaatagtatagtctacaaggtttcgtattctactacttgaaacctaactcttccttcttcttctacactactcctatggctcccgatgcttccgacgcacttgcagtaaggcagaaagttcaattatttctgaacgcggctcgtactggttcaattgatctcttaaagaaattggcgttgcagctggacgagggcaaggatttggcgaaatcggtggaagcaataaaggacgccaacaagagaggagcactgcattttgccgcgcgagaaggccaaacctctgtttgcgagtacctcttaaccgatttgaagctctctgtcgattctcaagatgatgatggcgagactgcactcattcatgctgctcgtcagggacataccgccaccgctaaatatctgattgaccacggtgctgatcctactgtggctagcaatttaggggccacggcattacaccattctgcggggataggagatgctgagctgctcaagtacttgctgtccaggggagttaatcctgatctagaaagtgatgcgggaacacctttggtttgggctgctggtcatgcccaaccagctgctgtcagtgtactgttggaacatggtgcaaatccgcatgccgaaactgatgatggtattaccccactcctttcagctgtggcagccggttctctagcatgcttagagctgttaattcaggcaggtgctaaatcaaatataagtgctggtggagcaactcctttgcacatcgcagctgataatggaagtcttgaactattaaattgtttattgaaagtgggagctgatcctgatgtctctgacgaggatggtgtcaagccaatacaagttgctgctgcaaggggctatccaaaagctgttgagatattgttcccattgacgtccaaagtagatactattcctacttggactgttgatgggatacttgagtatatgcaatctgaaactagaaagcaacaggatgaatcgataaatgcaaaagaaactaatcagcccaaggaagctgattttccggagcaaaatgtccctgaggtggcacctgaagccaaaaagagagcagcagaagcaaagtcaagaggggatggggcttttaaaaggaatgaccatcatatggctatagatttttatacccaagcaattgatctgaaccccattgatgctactttgctatccaatagaagtctctgttggattaagttgggccaagctgagcatgctttagctgatgcaaaggcctgtagagctttaagaccagattggccaaaagcttgttatagggaaggagcggctctgcgtttgttgcagaaatttgatgaagctgcaaatgctttttatgagggagtaacgcttgatcctgaaaataaggagcttgtaaatgcgttcagggaagctgtcgaggcggggaggaaattttatggaacggctgaaaataaatcatagtttagccttttgttaataccatgtttcagagagaagagatcaaaatattgcgggtggtgcagccttattcacttgatccttttttccccaatgtgtgtatgcgtgttttctttaactagttactgtcgtataggaagagtcagctagtaatctgtttcattaaattgttttagtaattataaaggttatgcttatttgacatgttccaaaattgttgcagaattagtacacattatgaaaatggcaatgcaggttcatgggc

SEQ ID NO: 21907 - protein, 460 aa, Glycine max
MAPDASDALAVRQKVQLFLNAARTGSIDLLKKLALQLDEGKDLAKSVEAIKDANKRGALHFAAREGQTSVCEYLLTDLKLSVDSQDDDGETALIHAARQGHTATAKYLIDHGADPTVASNLGATALHHSAGIGDAELLKYLLSRGVNPDLESDAGTPLVWAAGHAQPAAVSVLLEHGANPHAETDDGITPLLSAVAAGSLACLELLIQAGAKSNISAGGATPLHIAADNGSLELLNCLLKVGADPDVSDEDGVKPIQVAAARGYPKAVEILFPLTSKVDTIPTWTVDGILEYMQSETRKQQDESINAKETNQPKEADFPEQNVPEVAPEAKKRAAEAKSRGDGAFKRNDHHMAIDFYTQAIDLNPIDATLLSNRSLCWIKLGQAEHALADAKACRALRPDWPKACYREGAALRLLQKFDEAANAFYEGVTLDPENKELVNAFREAVEAGRKFYGTAENKS

SEQ ID NO: 21908 - DNA, 1368 bp, Arabidopsis thaliana
  CDS (1)..(1368)
atggctcctgatgcttctactgctcttgcagcgagggagaaagttcagcaaatcctgaatgcagcttgtaccggaaatctcgaattccttaagaatgttgctaagcagcttgatgaaggaaaagacttgacgaaaactgtggagagtattaaagacgcaaacaaacgtggagcgcttcacttcgctgcgagagaaggacaaactgaaatatgcagatatcttttggaagaactgaaactcaatgctgatgcaaaagatgaaactggtgatactccgcttgttcatgctgcgaggcaaggacagattgaaacggttaagtatcttttagagcaaggagctgatcccaatatagctagtgaactaggagccacagctttgcatcatgcggctgggacaggagaaatcgagttgctaaaggaattgctctctagaggtgttcctgttgattctgaaagtgaatctggcacgccattaatctgggctgctggccacgaccaaaaaaatgctgtggaagtcttgttagaacacaatgccaatcctaatgctgagactgaagataatatcacaccgttattatctgcagtggcagcgggttctctgtcatgcttagagttgttggtcaaggcaggtgccaaagctaacgtttttgctggtggtgcaactccattgcacattgcggctgatattggaaaccttgagttaattaactgtttacttaaagccggggctgatccgaatcagaaagatgagggtaataggccattagaagttgcagctgctagagacaacagaaaggttgttgagatcctcttcccattgacaacaaaaccagaaactgtttcggactggacagtagatggaattctcgctcacatggaatcaaacaaagaacaagaggaaaactcaaacaaggcgaaatcccaagagactgggatcaagaaagatcttcctgtggtctccccagaagcaaaggcaaaagccgcagaagcaaaagccagaggacaagacgcctttcacagaaaggattttcagatggctattgatgcttatacacaagcaattgattttgacccaacggatcataccttattctcaaaccgaagcctctgctggttgcgactaggacaagctgagcatgccttatctgatgctaaagcctgcagagaactaaacccagattggcctaaaggttgcttcagagaaggcgctgctctgcgtttgctacagcggtttgacgaggcagccaatgctttctacgagggagtattgcttagccctgaaagcaaagagctcattgatgctttcagagaagctgtagatgccggaaggaagtttcacggcaagggtgaggttaaggccaaatcataa

SEQ ID NO: 21909 - protein, 455 aa, Arabidopsis thaliana
MAPDASTALAAREKVQQILNAACTGNLEFLKNVAKQLDEGKDLTKTVESIKDANKRGALHFAAREGQTEICRYLLEELKLNADAKDETGDTPLVHAARQGQIETVKYLLEQGADPNIASELGATALHHAAGTGEIELLKELLSRGVPVDSESESGTPLIWAAGHDQKNAVEVLLEHNANPNAETEDNITPLLSAVAAGSLSCLELLVKAGAKANVFAGGATPLHIAADIGNLELINCLLKAGADPNQKDEGNRPLEVAAARDNRKVVEILFPLTTKPETVSDWTVDGILAHMESNKEQEENSNKAKSQETGIKKDLPVVSPEAKAKAAEAKARGQDAFHRKDFQMAIDAYTQAIDFDPTDHTLFSNRSLCWLRLGQAEHALSDAKACRELNPDWPKGCFREGAALRLLQRFDEAANAFYEGVLLSPESKELIDAFREAVDAGRKFHGKGEVKAKS

SEQ ID NO: 21910 - DNA, 1596 bp, Oryza sativa (japonica cultivar-group)
  CDS (1)..(1596)
atggcgccgccgctcgtctacctcagccccaccgaagacggcaccggtgcgagcactctcatgaaggcggccttctgcgggaacctgggaagcctcaaaggtgctatgcctataaagagacttgagattgagaaagtaaaggcccaggatgcagtcttagcttttaaaaatgatggaatcgggttgctgcacgctgcggcttgccagggccaactgaatgtttgcaagttcttggtggaggaattggggggtgacgtgaatattgctggagcacaaggtttaacaccgtttatggcagctgctgagtctgatgatgttcctactgtaaaatattttcttgatcatggtggtgatgtaacaaaagcagatgttagaggatgcacagttctccaccatgctgctggcacaggatgctgtaaggtaacagagttcttgctttcaaaaggaatacctgttgacatagactgtggccttggaacaccactcttgcatgctgctaacgatgacaaggataagacactgaagattttgttggatcacaaggcagatcctaacgtaattgtcaacaatggagcatgtagtctcctgatgagttcccttgtgtgccgttcattgaagtgcatgaagctactcataaaggctggtgctgatgttaatggcaagggagcacttgtgtctcccttgatgtttgctgcatcacaaggatgctatactaacttcattaagtttctcctgaaggctggagcaaaccctaatatacctgatgatttgggttggttgcctgtggagcatgctgcattacgtgattgcagggaagatgttgaaaggctatttccattgacttccccaattccaaatgtcccggagtggagtgtcaatggaataatctctcatgcgaaagtcaaagatataaggccaatgacaatagatcatgggccaaccacagttctgtacacaaacaggagcatttgtagattgctcatgggtgatggtgaagatgctcaatctgatggtaacagatcccgaatgatgcggcctaactgggaaaaagcttgttatcgttggagtgcaggtcacatgctactcaaggagtacaaacaactgtgggatgctctcatggatgcacaaaaattggatcctgggagcgttgaaattgagaaggaacaaagggaatatgatatccaagaaagtaaagatgttgtggagtcgaaggttggcctttatgataaacccactgcatcttatggggtcaaacctccaaatgtttcatctgttatgggaaaaacacaagtttttgtcaaacatccccatggaacgttatccctgcagattgatacatgcaaagatgtggtcttcttaaaagaagaggtagagaaaaggatgaggctggatgtttctggatccttcttcgtgtaccagatgagcacgttagaagcaggaataccattatcatcgtatggtatagaaaaggattcaaatatatatatgtgtggtaggcttctcggtggacagaggtttcatggaagcagaagagttcatggtagaagaaagttccacggtcgaagaaaatttaaaacactatcacaatttttctaa

SEQ ID NO: 21911 - protein, 531 aa, Oryza sativa (japonica cultivar-group)
MAPPLVYLSPTEDGTGASTLMKAAFCGNLGSLKGAMPIKRLEIEKVKAQDAVLAFKNDGIGLLHAAACQGQLNVCKFLVEELGGDVNIAGAQGLTPFMAAAESDDVPTVKYFLDHGGDVTKADVRGCTVLHHAAGTGCCKVTEFLLSKGIPVDIDCGLGTPLLHAANDDKDKTLKILLDHKADPNVIVNNGACSLLMSSLVCRSLKCMKLLIKAGADVNGKGALVSPLMFAASQGCYTNFIKFLLKAGANPNIPDDLGWLPVEHAALRDCREDVERLFPLTSPIPNVPEWSVNGIISHAKVKDIRPMTIDHGPTTVLYTNRSICRLLMGDGEDAQSDGNRSRMMRPNWEKACYRWSAGHMLLKEYKQLWDALMDAQKLDPGSVEIEKEQREYDIQESKDVVESKVGLYDKPTASYGVKPPNVSSVMGKTQVFVKHPHGTLSLQIDTCKDVVFLKEEVEKRMRLDVSGSFFVYQMSTLEAGIPLSSYGIEKDSNIYMCGRLLGGQRFHGSRRVHGRRKFHGRRKFKTLSQFF

SEQ ID NO: 21912 - DNA, 1344 bp, Oryza sativa (japonica cultivar-group)
  CDS (1)..(1344)
atggcgtcgctctctcgcgtgcctcctcccgcccgcggaagccgccgccggccgcccccgtccagccccgtccccctctccccgcggcaggagatgctcctcgaggcggcatccgacggcgacctcggcttcctcaagcgggtggtgaggtcgctggacggagggaggggccgccccgcggaggcggtggaggccgtgcgggagtgcggcgcgggcgcgctgcacctcgccgccggcgcggggaagctggcggtgtgcaggtacctggtcgaggagcttcgggtggatgccaacgccatctacgaccaaggtgaaacacctctggcttatgcagtcaatggtgcaaatgtagctaccgtgaggtaccttcttgaccatggtgcccatccagaaaaagctgataataaaggattcacccctctccattttgctgctgaagaaggatattgcaatgtagtggagctcttgcttgctaaaggggctcaagttgattcgatgtctgttcgtggtacaccactacatctggctgctactaatggacaacatcgtgtagtgaagattttattggaccacaatgctgattgcaataagattgtatctgctgtctacactcctctcctcgtcgccatttatggttcatcactgaaatgtgtaaagctgctgattaaggctggtgctgatgtaaatggtgttggtaatataacccccttaatagcttctgttggctcaactgagatcatgaagtgcttattggaggccggtgctgatcctaatgtccctgatgaattcggcaggatgccaatagaatttgctgtgcgatgtggtacattgaaagatgtcaatatcctatttcctttgacatctcctatgccgactgtacctgattggagtgtcagaggaataatccgtcatgtgaacacactgccagggcaaaaggactatgagagtggccttgaaaaagaagtggctggtttgaaattacaaggagttgaggcactgaagaggcaggattatcttgctgcatcagacctatacactaaggcgctttgcctcgacttcaatgatgcaaccctgtattcaaacaggagcctctgctttcttcacatgggtgatggagacaaagcttatggggatgcctatacttgtaggatgatgcggcctgattggccaaaggcctgctatcgccaaggagcagctctaatgctgctgaaggaataccaaaaggcgtgtgatgctctcctcgatggtttcaaaatggacccagggaactctgagattgagaacgctctaagggaggcgatggagtccttgaagatatctgatggtgctaagctgacaacctga

SEQ ID NO: 21913 - protein, 447 aa, Oryza sativa (japonica cultivar-group)
MASLSRVPPPARGSRRRPPPSSPVPLSPRQEMLLEAASDGDLGFLKRVVRSLDGGRGRPAEAVEAVRECGAGALHLAAGAGKLAVCRYLVEELRVDANAIYDQGETPLAYAVNGANVATVRYLLDHGAHPEKADNKGFTPLHFAAEEGYCNVVELLLAKGAQVDSMSVRGTPLHLAATNGQHRVVKILLDHNADCNKIVSAVYTPLLVAIYGSSLKCVKLLIKAGADVNGVGNITPLIASVGSTEIMKCLLEAGADPNVPDEFGRMPIEFAVRCGTLKDVNILFPLTSPMPTVPDWSVRGIIRHVNTLPGQKDYESGLEKEVAGLKLQGVEALKRQDYLAASDLYTKALCLDFNDATLYSNRSLCFLHMGDGDKAYGDAYTCRMMRPDWPKACYRQGAALMLLKEYQKACDALLDGFKMDPGNSEIENALREAMESLKISDGAKLTT

SEQ ID NO: 21914 - DNA, 1332 bp, Oryza sativa (japonica cultivar-group)
  CDS (1)..(1332)
atggcggaggagctccccttccccgctaacatcgaagtgatgcgccacacgccgcggttcaagctcatgcaggcggcattccacggcgacctccgcggcttgaagcggcaggcgaagattctggatatggggaggggccgcctgaggaaggccgtagaggatgtgagggtggaaggcgtgccgggcgaggaaggtacaggggtgctgcatatggctgcctcccatggccacatggagatgtgcaagtacctggtcgaaacgcttcaggtggatgtggatgatgcggatgacaaagaaaattttaaaatagactctcttgtcagctgtttttttaacaaaaggttttggccaaatgcccaaacccataagggtggtttggcaaggcaatccacaccaggtagaacatctctacttaaggcggtacattctgggcatcggggaattgccaagtatcttcttaatcatgacgccaatccagacctagccatgtgctgtgggcttacccctctacattctgccgctggattaggtgattgtgagtccgtaaaactattgcttgcaaaaggagcttatgttgacccaatgtctacttttgggacaccacttcatcttgctgctaaagaagggcaggatggcaccatgaagatattgttggacaacaatgcagattgcaacaagatggtaaacggtataacacctctcctccttgctatgaaagctgcatcagcaaaatgtatggagctgctggttgaggctggagctgatgctacttactctgatgtcatctggaattatatgtcaactacttttatggatgatgaagatagtggttcatctgtgttctcggattctgaaccagaagagattgatgccaatcaccatattcccgtcaatgacaaacctgtgaatcgaaggaaaattgcagagtttaagtcgttagggcttgaggcagttgagaagaaggattatctttctgcagcaggattctacagtgaggccatggaccttgaccctgatgatgcaaccctgctgtccaataggagcctttgctggctttatctgggtgaaggaggcaaggctttggtggatgctcataaatgcagaaaaatgcggcctgactggccaaaggcctgctaccgtcagggtgcagctttaatgttactgaagatggttttcaatgttagcttgatttttttttggcaggactatgtgagcgcgtgtgaagcactttttgatggattcaagttggatcctgaggacgttgagattgaaaatgcattacgggaagctctagagttcttgaaggtgtctcaaagcacttcggctaactga

SEQ ID NO: 21915 - protein, 443 aa, Oryza sativa (japonica cultivar-group)
MAEELPFPANIEVMRHTPRFKLMQAAFHGDLRGLKRQAKILDMGRGRLRKAVEDVRVEGVPGEEGTGVLHMAASHGHMEMCKYLVETLQVDVDDADDKENFKIDSLVSCFFNKRFWPNAQTHKGGLARQSTPGRTSLLKAVHSGHRGIAKYLLNHDANPDLAMCCGLTPLHSAAGLGDCESVKLLLAKGAYVDPMSTFGTPLHLAAKEGQDGTMKILLDNNADCNKMVNGITPLLLAMKAASAKCMELLVEAGADATYSDVIWNYMSTTFMDDEDSGSSVFSDSEPEEIDANHHIPVNDKPVNRRKIAEFKSLGLEAVEKKDYLSAAGFYSEAMDLDPDDATLLSNRSLCWLYLGEGGKALVDAHKCRKMRPDWPKACYRQGAALMLLKMVFNVSLIFFWQDYVSACEALFDGFKLDPEDVEIENALREALEFLKVSQSTSAN

SEQ ID NO: 21916 - DNA, 1389 bp, Oryza sativa (japonica cultivar-group)
  CDS (1)..(1389)
atggagaagaaggataagggaaggcaccgcggccgcgacggcggaggcggaggcggcggcggcggtggtggtggtggtggtggtgtggatcccgccggtggagggagcggaggaggagggccgggaatggggcggcgcgggagcgatgcgcgtggccagcaggcggaggcggcggccgcggcaatcagcggcatcgccacccgccttggcttcgggtgcaccatcaatgtcggcggcgggatgccaccgcagatggagttcctgatggcgtgtacggacggcgacgtcgcgcgcctcaaggaggtggttgatagcatggatgaggatgatcggcaatcgctcacctctgtgaggatggaggggtatgagccactgtttgaggcagcaagctcgggaaaaattgatctctgcaagtacttggtggaggagcttgggttcgatgtcaatgccgaagctaatcatgattccggtatgacacctttgttttgcgctgtgttggatggacaagagattactgtgaagtattttcttgacaaaggtgctgatccgaataagaaagatgcagcaggctttgctcctcttcatgaagctgcaaaaaaagggcacgttggaatagcacgactgttgttatctaaaggagctagtgttgatgtatcttcttctgaagggacacctcttcatgttgctgcctctaatggaaaatctagcactgtgcagattttattagagcaccgcgcaaatccaaacgtgatattaccagattgttatacaccattgaccgcagttctttctgccactcctgaaatagtgaatgaatctgagtgtttgaagtgcatgaaactccttgtgaaggctggtgctatttataatcttgcaactcctgatactccattgaagatagcaactagaaatggcttaactgagtgtgttgcatacttgctggagatcaccacagttaaactaagtgaacatgacaaaggaagtgatggagacagaaaatctaagctgaaattacatggtggaaaagcatttgaggagggggactatgctggtgcaatcatattttacaccgaggcaatgaaacttgatcctgcagatgccacactgtattcaaacaggagcctttgccatctgagaagtggtgcagcgcaggaggctttgctggatgctaatgattgcataaaactcaagccagagtggactaaaggtcactatcgcaaaggatgtgcccacatggcactcaaggaatacgaagaagcttgtactgcattcatggctggaacaaagctcaatcctttaaacgatgaaatgcaggatgcattttgggaggcagctaaaggaatgatgtatgaacatatggctggaaagcgcgtcagctcggttgattag

SEQ ID NO: 21917 - protein, 462 aa, Oryza sativa (japonica cultivar-group)
MEKKDKGRHRGRDGGGGGGGGGGGGGGGVDPAGGGSGGGGPGMGRRGSDARGQQAEAAAAAISGIATRLGFGCTINVGGGMPPQMEFLMACTDGDVARLKEVVDSMDEDDRQSLTSVRMEGYEPLFEAASSGKIDLCKYLVEELGFDVNAEANHDSGMTPLFCAVLDGQEITVKYFLDKGADPNKKDAAGFAPLHEAAKKGHVGIARLLLSKGASVDVSSSEGTPLHVAASNGKSSTVQILLEHRANPNVILPDCYTPLTAVLSATPEIVNESECLKCMKLLVKAGAIYNLATPDTPLKIATRNGLTECVAYLLEITTVKLSEHDKGSDGDRKSKLKLHGGKAFEEGDYAGAIIFYTEAMKLDPADATLYSNRSLCHLRSGAAQEALLDANDCIKLKPEWTKGHYRKGCAHMALKEYEEACTAFMAGTKLNPLNDEMQDAFWEAAKGMMYEHMAGKRVSSVD

SEQ ID NO: 21918 - DNA, 1419 bp, Oryza sativa (japonica cultivar-group)
  CDS (1)..(1419)
atgccgagggggcgcgtgcccggcggctcgaccgccaacttcagcacccacctcatcgcggcccagctcgggatgcagtgccgcatgggtcccgcggcggcggagcagatgaggcgcgtcatcgcgtcgtcggactgcgacaccggccgcgtcatgaggatgtttggtgccatggaaggtggcgacagtgattctgattctgatgactctgcggagacggagaaagttgggccacttcatgaggcagcaagcgcagggaaaatggatacttgcaaacatttggtggagcagcttgggtttgacatcaatgctgaagcaagtgatgatttgggtatgacacctttggcttgtgcggtgtccaagggaaaagcaattgctgtgaggtattttcttgacaaaggtgctgatccaaataagcaagacaacatcggttttactcctctgcactatgctacaaaagaagggtatgatggactggcacgactactgctgtctaaaggggctagtgttgatgttatttcttctaaaggcacagccctgcatcttgctgcctccagttggaagtctggcatcatgaagattctattggagcacaatgcagatccaaacaaggtctccgcagattcagagacaccattagctgcaacacttattgcttctgatggactgaatgaacctgctgtgctgaagtgcataaagcttcttgttaaggctggtgctaatttgaaccgcgctattcctgatacaccactggtgatagcaactaacaaagactttgttgaatgtgttgagtacttgttggaggctggtgcaaacgccaatattccaactaataacggtggtaagacaccaatagaaatagccgcgaagtctggaagaaggaagcttgtggagattctatttccttgcacgttgccaattaaaggtgtgtcaaactggactgttgaaggaatcatcacccatgtgaaatcaaaaaaatcaaagaagaaagcatgcgctcaggataaggaaagtggtacagacaaaaaggctcagttgaaatcattgggtgcaagtgcagttcaggggaaggactatgttggtgcatccaaattctacagtgaggccatccagctggatcctaccgatgcaacattgcattcaaataggagcttttgctacctaaaaagtggtgaagcacgggaagctttggttgatgctaagacttgcataggactgaaaccagattggccaaaaggttactatcggaaaggagctgccctgatgtcgctcaaggaatacaaagaagcatgtgatgcattcatggatggagtgaaactggatcctgcaagtggggagatgcatgaagcattttgggaggcagccgcggcattgaagaagaaacatttggctgggaagactgtcagctcatttgattag

SEQ ID NO: 21919 - protein, 472 aa, Oryza sativa (japonica cultivar-group)
MPRGRVPGGSTANFSTHLIAAQLGMQCRMGPAAAEQMRRVIASSDCDTGRVMRMFGAMEGGDSDSDSDDSAETEKVGPLHEAASAGKMDTCKHLVEQLGFDINAEASDDLGMTPLACAVSKGKAIAVRYFLDKGADPNKQDNIGFTPLHYATKEGYDGLARLLLSKGASVDVISSKGTALHLAASSWKSGIMKILLEHNADPNKVSADSETPLAATLIASDGLNEPAVLKCIKLLVKAGANLNRAIPDTPLVIATNKDFVECVEYLLEAGANANIPTNNGGKTPIEIAAKSGRRKLVEILFPCTLPIKGVSNWTVEGIITHVKSKKSKKKACAQDKESGTDKKAQLKSLGASAVQGKDYVGASKFYSEAIQLDPTDATLHSNRSFCYLKSGEAREALVDAKTCIGLKPDWPKGYYRKGAALMSLKEYKEACDAFMDGVKLDPASGEMHEAFWEAAAALKKKHLAGKTVSSFD

SEQ ID NO: 21920 - DNA, 1383 bp, Oryza sativa (japonica cultivar-group)
  CDS (1)..(1383)
atggccgacgccaccgccgccctctcagctcggagcaaggtgcaagctttcctcgaagcggctcgtgccggtgatctcgactccctcaagaagctcgctgcggcgctcgacgaggagggcaagggcgtcgccgccgtcgctgctgccgtcaaggacgccaacaagcgcaccgccctgcacttcgccgcccgcgagggccgcacccacgtctgtcacttcctcatctccgacctcgccctccccgtcgaccccaaggacgacgatggtgaaactccactcatccatgctacgcgccaagcccatctccaaactgtaacctatctgcttcaccatggagcagatccttccgttgcttcttccctcggagccacgccattgcaccatgctgccggcatagggaacctggaccttatgaaactatttctctccaagggggttgatgttgaatcagaaagcgatgccggcacacccctcatatgggctgctggtcatggacagcaagaggcagtcaaacttttgcttcaacacgatgctaagccaaatactgaaaacgatgatggtattacgcctttgttgtctgctgttgcagcgggttccctcccatgcttggatattctaattcaggcaggtgcacatccgaatatcagagctggtggagcaaccccattacatattgctgcagatggtggaaacatggaaataataaattgtttacttaaagctggaagtgaccccaatgcatgtgatgatgatggactaaagccaatacaggttgctgctttgaggaataaccgtgaagttgtggaacttcttttacctttgacatcaccaattccaggtgtttcgagttggagtattgatggaattatagaatacactaaatcagtcgaggaaaaggcacaggtaaaggaagctacaactcagaaagcagacagattacaagtaccacaacttgttgaggtgtcatctgaggcaaaagagagatcattggaggcaaaatcgagaggtgatgatgccttcagaaataaagactacctagtagcagtagatgcctacacacaggctattgagttaaatccaaacgacgccacgttgcattcaaacagaagcctttgctggctacgggcagggcaagctgaacgtgctctggaggatgcaagagcatgtcgagcgctgaggccagactgggcgaaagcttgctacagggaaggcgcggcactgcgcctgctgcagaggttcgaagaagccgcgaatgccttctatgagggggtgcagcttgagccagagaacggcgagcttgtgagcgcgttcagggaggcggttgaagccgggaggaaattccatgggacggacaagaagcaaaaggcagatgcatcaacgtga

SEQ ID NO: 21921 - protein, 460 aa, Oryza sativa (japonica cultivar-group)
MADATAALSARSKVQAFLEAARAGDLDSLKKLAAALDEEGKGVAAVAAAVKDANKRTALHFAAREGRTHVCHFLISDLALPVDPKDDDGETPLIHATRQAHLQTVTYLLHHGADPSVASSLGATPLHHAAGIGNLDLMKLFLSKGVDVESESDAGTPLIWAAGHGQQEAVKLLLQHDAKPNTENDDGITPLLSAVAAGSLPCLDILIQAGAHPNIRAGGATPLHIAADGGNMEIINCLLKAGSDPNACDDDGLKPIQVAALRNNREVVELLLPLTSPIPGVSSWSIDGIIEYTKSVEEKAQVKEATTQKADRLQVPQLVEVSSEAKERSLEAKSRGDDAFRNKDYLVAVDAYTQAIELNPNDATLHSNRSLCWLRAGQAERALEDARACRALRPDWAKACYREGAALRLLQRFEEAANAFYEGVQLEPENGELVSAFREAVEAGRKFHGTDKKQKADAST

SEQ ID NO: 21922 - DNA, 1287 bp, Oryza sativa (japonica cultivar-group)
  CDS (1)..(1287)
atggggaagcaggagcaggagaagatgctcctccaggccgcctacgatgacaacctccgcctcctcaggaagatggcgcgagggctggacaccgggcagggcgaggctgccgtcgtggcggcggtggcgggcagggccgacgggaaccgcgctctccacctggcggccgcccgaggaagcatggatgtcctcaggtacctcgtggaggacctccacctcagcgtcaaccagttcaatgccaaaggtgaaacaccactgtgcctttcttcaattcatgggagagctgctgctacaagatatcttctcgatcacggttctgatcctacgattgataaatcagtgttaccttttcatgctgctgcaacgaaaggacactgcgaaatagtagagttgtttctttcaagaggagttgatgtggatttagattctatcactgggaccccattgctgacagctgcgatgaatggccaatatagcacgatgaagattttattggagcatcacgctgatcctaacagggttgtcaatcataatggtaccccattgattatgtccatagtttctggatcattggaatgcgtgaagctattaatcaaagttggtgctgatgtgaattttagagatcccaatggtgttacttgtgtgatggtcgcagcaaatcatggctctcctgtcatcatgaagtgcttactagatgctggtgctaattcaaatattccagatgaatttaataggactccaattgaagttgccgctaatcgaggcagaagggacattgttaaaatgttgtttcctttaacttcaccaatttcaacactgcctgattggagtatcgatggagttatttctcatgtgcaaacttttggtttgaagccaagggataatgatctgtctaaaaggaaaagtgctgaactgaaattacaagctagagaggctttcgagagagaggaatatatgcttgcaggacaacactacactaatgcaatagaacttaccactaatgctcatgataaggcaaccctgctagcaaacaggagcctgtgctggttgcgtttgtcaaccggcaatggggctcttgctgatgctaacatgtgcagaatgttgcggcccagttggcccaaagcatgctatcgacaaggggcagctttcatgtttctaaaggactatggaaaagcttgtgaagcttttgcagatggcttgaagttggaccctgcaaatgaagatatagcgaaagctttaagggatgcccaggaggccatgaaggaccaaatggagcacagaggttga

SEQ ID NO: 21923 - protein, 428 aa, Oryza sativa (japonica cultivar-group)
MGKQEQEKMLLQAAYDDNLRLLRKMARGLDTGQGEAAVVAAVAGRADGNRALHLAAARGSMDVLRYLVEDLHLSVNQFNAKGETPLCLSSIHGRAAATRYLLDHGSDPTIDKSVLPFHAAATKGHCEIVELFLSRGVDVDLDSITGTPLLTAAMNGQYSTMKILLEHHADPNRVVNHNGTPLIMSIVSGSLECVKLLIKVGADVNFRDPNGVTCVMVAANHGSPVIMKCLLDAGANSNIPDEFNRTPIEVAANRGRRDIVKMLFPLTSPISTLPDWSIDGVISHVQTFGLKPRDNDLSKRKSAELKLQAREAFEREEYMLAGQHYTNAIELTTNAHDKATLLANRSLCWLRLSTGNGALADANMCRMLRPSWPKACYRQGAAFMFLKDYGKACEAFADGLKLDPANEDIAKALRDAQEAMKDQMEHRG

SEQ ID NO: 21924 - DNA, 1320 bp, Oryza sativa (japonica cultivar-group)
  CDS (1)..(1320)
atggaggagaaggggatggggaagcagcggtgggagaagatgctcctccaggccgccttcgacggcaaccttcgcctcctcaggaagatggcgcgcgggctggtcacgacggggcgcggccgcggcgaggcggacgtcctggcggccgtggcggacggcggcagcgggagccgcgcgctgcacctggcggccaccgaggggaggatggacgtcctcacgtacctcgtcgaggacctccgcctcgacgtcaaccaaaccaacgacagaggtgaaactccactattcctttctgcgttttttgggagaactgcatctacaagatatctgcttgatcatggtgctgatccaatgattgttggtaaatcaggatcacctcttcatgcggctgccgggaaaggacactgtgaaatagtagaattgctgctgtcaagaggaattggtattgtttttgattctctctatgggaccccgttgcatacggctgctgctcatggtcaatgtagcaccatgaagatattattggaccatcatgcagatcctgataaggttttcaatcttgatgataccccattgaatatggctatatcttctaaatcattggaatgcgtcaaactgctcatccaagctggggctgatgtgaactttagagactccaatggtgctacttatgttatgatggcagcaaattatggtttttctggcatcatgaaatgcctattagatgctggtgctaatcctaatattccggaccaatttggtgtttttccaattgaagttgctgctctccaagtccatagggaaattgttgagatgttatttcctttgacttcaccaatttcaacggtgccagattggagtattgatggaatctttgcccatgcaaaaaactttggttcgaagccattgcctgaagatctttgtgtaaagaaaatagctcaaatgaaagtagaaggtaaagaggctttcaagagaaaggattatttacttgcggcacaactctatacaagtgcactgggacttggacctagtcctgatgattctgcaactctgctggcaaataggagtctctgctggttgcgcttggaaaatggaaaacaagctcttgctgatgctaatatgtgcagaatgttccggcctcattggataaaagcctgctatcggcaaggagcagctttcatgcttcttaaggaatatggtaatgcttgtgatgccttttcagatggcttgaagctggacccagcaaatgttgatattgagaatgctctaagggcagcgcttcaggccgtgaagaatgaccggtgcgttaagaataatcagtga

SEQ ID NO: 21925 - protein, 439 aa, Oryza sativa (japonica cultivar-group)
MEEKGMGKQRWEKMLLQAAFDGNLRLLRKMARGLVTTGRGRGEADVLAAVADGGSGSRALHLAATEGRMDVLTYLVEDLRLDVNQTNDRGETPLFLSAFFGRTASTRYLLDHGADPMIVGKSGSPLHAAAGKGHCEIVELLLSRGIGIVFDSLYGTPLHTAAAHGQCSTMKILLDHHADPDKVFNLDDTPLNMAISSKSLECVKLLIQAGADVNFRDSNGATYVMMAANYGFSGIMKCLLDAGANPNIPDQFGVFPIEVAALQVHREIVEMLFPLTSPISTVPDWSIDGIFAHAKNFGSKPLPEDLCVKKIAQMKVEGKEAFKRKDYLLAAQLYTSALGLGPSPDDSATLLANRSLCWLRLENGKQALADANMCRMFRPHWIKACYRQGAAFMLLKEYGNACDAFSDGLKLDPANVDIENALRAALQAVKNDRCVKNNQ

SEQ ID NO: 21926 - DNA, 1272 bp, Oryza sativa (japonica cultivar-group)
  CDS (1)..(1272)
atggcctcctccccctccgccgtcgtcctgcaggccgccctcgacggcgacctccacctcctgtgtgaaatggccaagaagttggacctgcggggattcaaggacatgaatgggcgaaatgcgcttcacttggctgcaagctatgggcatctggagatctgcaagttcctggtggaggaatcgggccttgatgtcaactcaggctctcacagaggtgagacaccaatacttctcgccgcatgtgacggggacattaatgttttaatataccttcttgatcatggtggtgacccagccatacctaacgcggggggcttcatgccgctgcactacgcagcagagtacgggcatgttgatgttgtgagactattgctgtccaaaggagttcatgtggatcctctgaattatagtggggccccgctgcacttggctaccgcaaatgaccatgatcaggttgcgaaggttctgcttgagcatggtgctgatcccaacagagttgtcaaccatgtcctttcaccactcgttgttgcttgctgcagccactccttgaaatgcatgaagttactgatcaaggctggtgctgatgtgaatgatagaagttctactggaccaagaacgacccctttagtgcttgcagttgatgatggatcagccgatattgtcaaaatcttgctagaggctggagctgaccctaacattcgtaacgaggatgggaggattcctatcatgatggcagcagctcgtggtcaacgagagcttgttgaaattctgtttcctaggacaaaaccaattccatgtctgccagattggagtgttgatgggataattagaactatgagattcacacgtaccgaacctgaggatgcagttcctgtggaaatactagtatctgattcgaagttaaatgccaaggaagcatttgcagagggtgaatacattacagcaatctacttctacaccaaggcactggaaaaagccccacttgatgccaccttgttcgccaaccgcagcctctgctggctgcggctgcgagaaggagacgtcgctctattggatgcgcgacgctgcaaagccctgcgccctggttggtccaaggcatggtaccgtgagggcgcggccctcagtctcctgaagaactacagagaagcggcggcggctttcacggaagcgctgaaacttgaccctgagaactacgagatcaagatcgcgttaagagaggcgttggagtgtcggaagagagctgcacgctctgaagaagataagaacccttga

SEQ ID NO: 21927 - protein, 423 aa, Oryza sativa (japonica cultivar-group)
MASSPSAVVLQAALDGDLHLLCEMAKKLDLRGFKDMNGRNALHLAASYGHLEICKFLVEESGLDVNSGSHRGETPILLAACDGDINVLIYLLDHGGDPAIPNAGGFMPLHYAAEYGHVDVVRLLLSKGVHVDPLNYSGAPLHLATANDHDQVAKVLLEHGADPNRVVNHVLSPLVVACCSHSLKCMKLLIKAGADVNDRSSTGPRTTPLVLAVDDGSADIVKILLEAGADPNIRNEDGRIPIMMAAARGQRELVEILFPRTKPIPCLPDWSVDGIIRTMRFTRTEPEDAVPVEILVSDSKLNAKEAFAEGEYITAIYFYTKALEKAPLDATLFANRSLCWLRLREGDVALLDARRCKALRPGWSKAWYREGAALSLLKNYREAAAAFTEALKLDPENYEIKIALREALECRKRAARSEEDKNP

SEQ ID NO: 21928 - DNA, 1164 bp, Oryza sativa (japonica cultivar-group)
  CDS (1)..(1164)
atggccccctccccttccgacgtcgccctgcaggccgcccaggacggcaacctccgcctcctcaggaagatggcgaagaagttggatttgcgaggagtcaaggacaagaatggcctaagcgcgcttcacttcgctgcaagccatgggcacctggattgctgcaagttccttgtggaggaatcgggccttgatgtcaactcggttggtcacaaaggtgaaacgccagtgttctatgccgcgatcgatgggaacgttcaggttttggggtaccttcttgatcatggtggtgacccggtgaaacccgaggagaggggctgcacgccgctgcacaatgcggcagagaatgggcatgatgaggctgtaagactattgctgtccaaaggagttcatgtggatcctctgaattatcgtggggccccactgcacttggctgcctcaaaggaccgggttcaagccatgaaggttctgcttgaacatggtgctgatcccaacagagttgtcaatcatatcttttcaccactcatgatggcatgctgcgggcactccttgaaatgcgtgaagctacttgttgaggctggcgctgatgtgaacggggctggagctgaccctaacattcctgacgaggaagggaggattcctatcatggtggcagcagctcgtggtcaacgagagcttgttgaaattctatttcctcggacaaaacctattccatgtctgccagattggaatgttgacgggataattagaactatgagaaccacacgtattgaacctcagtctgctattcctgtggaagaacaagtgtctgatgcaaagtcgaaaggaaaggaagcatttgcaaagggtgactaccttacagccatctacttctacaccctggcaatggataaatccccacttgatgccaccttgtttgccaaccggagcctttgctggctgcggcagcgagaaggggacagagctttactggatgcacagcagtgcaggatgctgcgccctggttggtccaaggcatggtaccgtgagggcgcagctctcagtttcatgaaggactacaaaggagcagtggacgcattcggggaggcactgaaacttgaccccatgagcgacgaggtcaagaacgcgttaagggaggcgatcgagtgtctgaagagagctgcttga

SEQ ID NO: 21929 - protein, 387 aa, Oryza sativa (japonica cultivar-group)
MAPSPSDVALQAAQDGNLRLLRKMAKKLDLRGVKDKNGLSALHFAASHGHLDCCKFLVEESGLDVNSVGHKGETPVFYAAIDGNVQVLGYLLDHGGDPVKPEERGCTPLHNAAENGHDEAVRLLLSKGVHVDPLNYRGAPLHLAASKDRVQAMKVLLEHGADPNRVVNHIFSPLMMACCGHSLKCVKLLVEAGADVNGAGADPNIPDEEGRIPIMVAAARGQRELVEILFPRTKPIPCLPDWNVDGIIRTMRTTRIEPQSAIPVEEQVSDAKSKGKEAFAKGDYLTAIYFYTLAMDKSPLDATLFANRSLCWLRQREGDRALLDAQQCRMLRPGWSKAWYREGAALSFMKDYKGAVDAFGEALKLDPMSDEVKNALREAIECLKRAA

SEQ ID NO: 21930 - DNA, 1290 bp, Oryza sativa (japonica cultivar-group)
  CDS (1)..(1290)
atgtcgctgcccgacctcttcgagaagcttctcggcgacgatcaggacagctggcccgcggaggccaacttgctcctcgccgcccacgacggcaacctccgccgcatcaaggagatcgccgcgacgctggacgacgacggggaggggatcgcggccaccgtggcgcgcacggccttccacggcatgaacgcgctgcacgccgccagaagcctgcacgtctaccgctacttgctcgaggtggccaacatggacgtcaacaagccggacaccactccaggtaggaagactcccctcgagcgagccattgccggtggggacctgccctctgtcaggtatctcattgatcatggtgctgatatccatcatgaacgtgaaggaaacatcacttttcttcattcagctgcaaagaaagggaggactgaaatagtaaaattgctgctttctagaggagctcatgttgatggcaaatcagatcatgggacacctctgcattttgctgctattaaaggatatgaaagtactgtgaagattttgttggagcaccaagcagatcccaacaaggttatgccttcttctcaagcaacacctttatctgcggcgttattcactacttccttaccttgtgtgaagctattgatccaggctggagctgatgtaaatgctacaaacaaccccctggcgagagctgcagggagtggattaactgaagctataaagttgttgttgaaggctggagcaaacccaaattgtcctgacacgcatggtagaatgccaatagagctggctgctgtgtatggtacaagggaagatgttgagattctatttcctttgaccaacccaattccaactgttgctgactggagcgttgatggggtaattacttatgccaatctggaacgcaagaagctagaggatgatgattacgttaacacgaaaatgtctgacctgaaacaaaaagggaatgaagcatttgatgagcaggattatgaaaaagcatcagtgtggtacacacaggcactggaagttgatccttgtgatgccacaactcttctaaagaggtgtctttgctggcttcgcatgggtgagggaaaaaaggctgtgaaagatgcaaccacatgcgcaaaacatcacccgaagttgtcggaggcctaccatcggctaggagaagctctaatgcttgagaaggattatgagaaagcttgcgtggcgttgacccatggtatagagttggatcctgaaagtgatgagatggacaaactgttctgggaggcgatggacctgaagaactga

SEQ ID NO: 21931 - protein, 429 aa, Oryza sativa (japonica cultivar-group)
MSLPDLFEKLLGDDQDSWPAEANLLLAAHDGNLRRIKEIAATLDDDGEGIAATVARTAFHGMNALHAARSLHVYRYLLEVANMDVNKPDTTPGRKTPLERAIAGGDLPSVRYLIDHGADIHHEREGNITFLHSAAKKGRTEIVKLLLSRGAHVDGKSDHGTPLHFAAIKGYESTVKILLEHQADPNKVMPSSQATPLSAALFTTSLPCVKLLIQAGADVNATNNPLARAAGSGLTEAIKLLLKAGANPNCPDTHGRMPIELAAVYGTREDVEILFPLTNPIPTVADWSVDGVITYANLERKKLEDDDYVNTKMSDLKQKGNEAFDEQDYEKASVWYTQALEVDPCDATTLLKRCLCWLRMGEGKKAVKDATTCAKHHPKLSEAYHRLGEALMLEKDYEKACVALTHGIELDPESDEMDKLFWEAMDLKN

SEQ ID NO: 21932 - DNA, 1320 bp, Oryza sativa (japonica cultivar-group)
  CDS (1)..(1320)
atggacgacctggacatggcgctgcctcaggccttcgagctcctcctcggcagagatcgagacgcctggccgcgcggggccgcgttcctcgtcgccgcccactacggggacgtccgcgaaatgaagaggattgcaaaggagctggacgaggacggcaaagggatcgaggcgactgtggctaacacaagcttcctcggcatgaacgcccttcacgcactgggttggctcggcaaggtgccggcctaccggtatctggtagaggaggtcaaaatggacgtcaacaaggccgacactgctcagggattcacacccctggagcatgccgtctaccatggtcgcctgcctgccaccagatacctccttgatcatggcgctgatgtgcatcaaattcgctctacgggaaatgtctctcttcttcactcagctgcagtaaaagggttctctgaagtagcaaaatttctgctttctagaggagttaatgttgatgcagaatcagaaatggggacaccactggctcttgctgctttcagaggatatgatagcactgtcaaggtccttttggagcacaatgctgatcccaacaaggttacaaacaaggcacttggtgcacctttagacttggcattaaccagctcttctgtgtcctgtgtgaagctgttggttcaggctggagctgaagtgaaagttgaggggccaaataatcatttggtaagagctgctgagaaaggcttaactgaagctattaaatgcatgttggaagctggtgcaaacccaaatgttcctgacaggctcgggagaatgccaatagagctggctgctgagtatggcacacgggaagatgttgagattctctttcctttcagctctgctattccaactgtggcaaattggagtgttgatggaataattaatcatgtacagtcagaaatcaagcaactagaggacgataattttatcaaaaagagaaggtctgacatgaaacaacaaggggatgctgcatttaagaagcaggattatctaaatgcatcagtgttctacactcaggcactgaaggttgatccgtttgatggcacgttgttctcaaacaggagtctttgctggctccgcatgggtgatggagaaagggctttggatgatgccaatgcatgcgaaaagctacggccaaagtgggcaaagtcctactatcggcaaggagcagctctaatgtttctgaaggagtatgagagggctcatagggcacttggtcgagctttagagttggaccctgaaagtgaagagatcgagaatttgtattgggagtcgatggaactgtgcggttga

SEQ ID NO: 21933 - protein, 439 aa, Oryza sativa (japonica cultivar-group)
MDDLDMALPQAFELLLGRDRDAWPRGAAFLVAAHYGDVREMKRIAKELDEDGKGIEATVANTSFLGMNALHALGWLGKVPAYRYLVEEVKMDVNKADTAQGFTPLEHAVYHGRLPATRYLLDHGADVHQIRSTGNVSLLHSAAVKGFSEVAKFLLSRGVNVDAESEMGTPLALAAFRGYDSTVKVLLEHNADPNKVTNKALGAPLDLALTSSSVSCVKLLVQAGAEVKVEGPNNHLVRAAEKGLTEAIKCMLEAGANPNVPDRLGRMPIELAAEYGTREDVEILFPFSSAIPTVANWSVDGIINHVQSEIKQLEDDNFIKKRRSDMKQQGDAAFKKQDYLNASVFYTQALKVDPFDGTLFSNRSLCWLRMGDGERALDDANACEKLRPKWAKSYYRQGAALMFLKEYERAHRALGRALELDPESEEIENLYWESMELCG

SEQ ID NO: 21934 - DNA, 1608 bp, Oryza sativa subsp
  CDS (1)..(1608)
atggcggcggaggtggacgcggcggcgcctggcggcggcgagggtgccggcggagtccgatcgcggtgcggccgcggggcgctgcacctggccgcggccaacggccgcacgcacgtctgccgcttcctgctcgagggcctcggcctccccgtcgacgcgctctccgcctcaggtgcgcccccctcccggccggcggccgccgctcgttcctcgcacgtctcgtctatgctcgcggagcgcctgatttcgtgcttcgtgttcgacgccgcggcgcacgcaggtgagacgccgctgctgctggcggccacgttcgggcacacctcaacggcggcctacctcctggaccgcggcgccgacccgtccacgccggaccccaacggcggcgacaccccgctccactgggccgcctacaacggggatcgcgagctggcgaagctgctgctgctcaggggagccgacgtgggcgcggcgaacccccgcggcacggcgctgcatgtcgccgctgcacgggggcacgccgccgtcgtcagcgtcttgctgaaccacggcgctgatcccaacaagattgccaatatcgtcttcacaccgttggtttcttcacttttggggggatcattggaatgcatgaagttgctcattcaggccggtgctaacgttaatggtgctggattcaatggagcaactcctctgctgttagcatgtagtcgtaccgggtccattggattcatcaagtgcttggtggaatctggggcagatccaaacattccagacgaacttgataggttaccaatagaaattgctgcaatccatgccgaacgggaagtcattgaggttctattgccattgacccaccaagtacctactcttctagattggagtgttggtgggatcatcagatatgtaaaatatcctgcttacaaggaatgggcaagaaatgcatcatgtaaaaggaaggatgaactcaaactacaaggcaactccgctttcaacaacgaggactacgatgctgcaatactgctatacagcatggcaatgaagttcgacaacaccgacgcaaagttatattcaaacaggagtgcttgctggttaaaccttggcataggcgatgaggcactctcagatgctcagatctgcagcaagatgcaaccggactgggcgaaaggctattaccgtcaaggaatggccttctctttgctacaggattatgccagtgcttcttatgtgcttcgcagggccttaaagttggatccacaaaatgccacagtcgccaaagcattgcgctgctatgagaataagatatatatgactgaaaatgtgttggaaaagagaggggatgtcttggaaactgcgtgtccgaggatggaagaatctggtctagcttttgttcatcagaagaaacgagattggagccccgcagctgcagggaggagtgttccagatgcaacatttcaaattgacaaaaagatattgccagtttgggttaagatctggggcgtgcctcgtagaccgttgttgggttgtggctggatgtatttgccacctgtaaacaatgtgccggaatcctctgcacccgaggagcagcagatcactgttctgggtagtgagtga

SEQ ID NO: 21935 - protein, 535 aa, Oryza sativa subsp
MAAEVDAAAPGGGEGAGGVRSRCGRGALHLAAANGRTHVCRFLLEGLGLPVDALSASGAPPSRPAAAARSSHVSSMLAERLISCFVFDAAAHAGETPLLLAATFGHTSTAAYLLDRGADPSTPDPNGGDTPLHWAAYNGDRELAKLLLLRGADVGAANPRGTALHVAAARGHAAVVSVLLNHGADPNKIANIVFTPLVSSLLGGSLECMKLLIQAGANVNGAGFNGATPLLLACSRTGSIGFIKCLVESGADPNIPDELDRLPIEIAAIHAEREVIEVLLPLTHQVPTLLDWSVGGIIRYVKYPAYKEWARNASCKRKDELKLQGNSAFNNEDYDAAILLYSMAMKFDNTDAKLYSNRSACWLNLGIGDEALSDAQICSKMQPDWAKGYYRQGMAFSLLQDYASASYVLRRALKLDPQNATVAKALRCYENKIYMTENVLEKRGDVLETACPRMEESGLAFVHQKKRDWSPAAAGRSVPDATFQIDKKILPVWVKIWGVPRRPLLGCGWMYLPPVNNVPESSAPEEQQITVLGSE

SEQ ID NO: 21936 - DNA, 1308 bp, Oryza sativa subsp
  CDS (1)..(1308)
atggcggcgccgttcgtctactgccgccccaccgacgacggcaccagtgagagcgctctcctgagggcggccttcgacgggaacctcggacgcctcaaaggtattttaaagagccttgggatcgagaaaggaaagacccagtatgcagtcttagctcttaacaagcatgggattggggtgctgcacgccgcggcatgccagggccatctgaatgtttgcaagttcttggtggaggaattggggggtgacgtgaatattgctggaaaagaagatataacaccgtttatggccgctgctgagtctggtgatgttcctacggtgcagtattttcttgatcatggtggtgatgtaacaaaagcagatgttagaggatgcacagttctccaccatgctgctggcacaggatgctgtaaggtaacagagttcttgctttcaaaagggatacctgttgacatagactgtggccttggaacaccactctttcatgctgctaacaatggcaaggataagacactgaagattttgttggatcacaaggcagatcctaacgtaattatcaataatggagccggtagtcccctgatgagttcccttatctaccgatcattgaagtgtatgaagctactcataaaggatggtgctgatgttaatggcaagggtacagttgtaacccctttgatgcttgctgcgtcgcagggaggctatactaacttcattcagtttcttctgaaggctggagcaaaccccaatattcctgatgatttgggttggttgccaatagagcatgctgcattacgtgattgcagggaagaagttgaaatgctatttccattgacttctccaattccaaatgtcccaaactggagtgttaatggaataatcgctcatgcaaaagtcaaaaatacaaagccaatggatcaacatcagaaggagagtagaaaagtcgttttgaaggcacaggcagatttggtattcaagcagaagaattacgccgctgcagcaaaaatatatgatctggcaatagctcacggaccaactgcagttttgtacgcaaacaggagcatctgtagattgctcatgggtgatggtgaaggtgctctttctgatgcttacagatgccgaatgatgcggcctaactgggcaaaagcttgctaccgtcagggtgcagctcacatgctactcaaggagtacaaacatgcgtgtgatgctctcatggatgcacaaaaattagattctgggaatgtcgagattgagagggaactaaggaaagctagggaattaatggcgaaacctccagatgagcagtga

SEQ ID NO: 21937 - protein, 435 aa, Oryza sativa subsp
MAAPFVYCRPTDDGTSESALLRAAFDGNLGRLKGILKSLGIEKGKTQYAVLALNKHGIGVLHAAACQGHLNVCKFLVEELGGDVNIAGKEDITPFMAAAESGDVPTVQYFLDHGGDVTKADVRGCTVLHHAAGTGCCKVTEFLLSKGIPVDIDCGLGTPLFHAANNGKDKTLKILLDHKADPNVIINNGAGSPLMSSLIYRSLKCMKLLIKDGADVNGKGTVVTPLMLAASQGGYTNFIQFLLKAGANPNIPDDLGWLPIEHAALRDCREEVEMLFPLTSPIPNVPNWSVNGIIAHAKVKNTKPMDQHQKESRKVVLKAQADLVFKQKNYAAAAKIYDLAIAHGPTAVLYANRSICRLLMGDGEGALSDAYRCRMMRPNWAKACYRQGAAHMLLKEYKHACDALMDAQKLDSGNVEIERELRKARELMAKPPDEQ

SEQ ID NO: 21938 - DNA, 1554 bp, Oryza sativa subsp
  CDS (1)..(1554)
atggcgccgcctcgcttccctccctcctcctcctcctcctccgccgcccgccgcccgccccgatccacaccgccgaacagccccaggcctagccccgccgccgcggccgctccctcccccgcacccgcctcgccgccggtgaaggccctcctcgaggaggtcctcctccatgcggccttcgagggaaacctccgcatcttcaggaagaacgtgagggcactggacgagggggacggccgcctcgccgacaaggttggggccgtgagggacagcgacggcctcggcgcgctgcacctcgccgccgcccgtgagaagctgcccgtttgccattatcttgtggaggagctccgcgtggatgttgatgccgtcgacaacaaaggtgaaacggcattgacatttgcgatcaattgtgggaatgaggacatggtgcggtatcttcttgatcatggggttgatactgaaaagatcaacaacgatggacttactgctctccattttgctgctggtgaaggaaagtgcaaaatagttgaaattttgctgtctaaaggagcttatattgattcgttgactactggtggaacagcactgcactgtgctgcttataatgggagggatgctgttgtgaagattttattagaccaccatgcagatcacaagaaggtatcttggggtgcctatacacctctttttgttgctgtcgagtctggctcactgaaatgtctgaagctcctgattgaggctggcgcagatgtgaaaggaattggtaaagaaatacctttaataactgctgcttctaagggcttaactgacatcataaagtgcttacttgaggctggtgcagaccctaatgttcgtgactgtcttggacacatgcctatagaagttgctgcacgctgcggtgagcggaaagctattgagatcctatttccagtcacttctcgtattcagtctgtgtctgattggactgttgatggaatcattaatcacgtaaatcactacctgaggagagctgcatttcatttcattaaggggaagaaaaaacaaaaacaaagatattttttacaaagtaggaggacccgagccctcctactgaaatccgcacacccaactacccaagaccacccggagagcttagctgcccaggaggaagatttttgtgaagctacgcttgatatgggaaaattccaaggccgtgaagcagtcaagaataaagattatcttggtgccatgaacatttatactgcggctattgctctcaatcctagagatgcatctttattctcaaataggagcctttgttggcttcacttgggtgaggggaagaaggctttgatggatgctgaagcttgcaggatgatgcgaccagactggccgaaagcttgctaccgtaaaggaactgctctaatgttactgaaggactacaaaaaggcatgcaactcatttcttgatggtctcaagttggaaccagagaatattgagatgaaaaatgcattaagcgaggctttgcaagccttgaagatgtcagacagcgtcgatatggaacctttggattaa

SEQ ID NO: 21939 - protein, 517 aa, Oryza sativa subsp
MAPPRFPPSSSSSSAARRPPRSTPPNSPRPSPAAAAAPSPAPASPPVKALLEEVLLHAAFEGNLRIFRKNVRALDEGDGRLADKVGAVRDSDGLGALHLAAAREKLPVCHYLVEELRVDVDAVDNKGETALTFAINCGNEDMVRYLLDHGVDTEKINNDGLTALHFAAGEGKCKIVEILLSKGAYIDSLTTGGTALHCAAYNGRDAVVKILLDHHADHKKVSWGAYTPLFVAVESGSLKCLKLLIEAGADVKGIGKEIPLITAASKGLTDIIKCLLEAGADPNVRDCLGHMPIEVAARCGERKAIEILFPVTSRIQSVSDWTVDGIINHVNHYLRRAAFHFIKGKKKQKQRYFLQSRRTRALLLKSAHPTTQDHPESLAAQEEDFCEATLDMGKFQGREAVKNKDYLGAMNIYTAAIALNPRDASLFSNRSLCWLHLGEGKKALMDAEACRMMRPDWPKACYRKGTALMLLKDYKKACNSFLDGLKLEPENIEMKNALSEALQALKMSDSVDMEPLD

SEQ ID NO: 21940 - DNA, 1464 bp, Oryza sativa subsp
  CDS (1)..(1464)
atggcgccgcatttcgtactgggccccggcgtaccgcagcagctgctcatccagtcggcggccgccggcgacctccccgccttcaagaagtttgctcgtatgctggacggcgggaaggggcggctcaaggaggcggtggaggccgtgaagaaccgcggcgctggggctctgcaccaagccgcccgctacgggaggaccgcgatgtgcgcgtacatggtcgaggagctccaggtggacatcgacgccgccgatgagttaggcgctacgcctcttggttatgcaatttatggtgggattgtggatactgtgagctatcttcttgatcatggtgcaaatccagataagccaaatgaaaaagggtgtacccctctccatctagcagttgaacaaggacattgcgagatagtaaaggtcttactggtgaaaggtgctaatgttgattcgtcttctgaccatgggacaccactgcatgttgctgcctcaaaaagtcaggatggttgtatgaagattttgttggaccaccatgcagatgcttttggtttgttgtttgatctgatagaaaatgtctatgctgtaaatgtcataagcaatcaatttcttaccctgaaaggaatgccagcgatgaaaaaattcagatcggaccagcagtttgaccagaaaaagcgggaccaagagccttggtggtgtaacaagacattctctacagtttgtacacctctcattgctgcgatgatgggtcgctcactgaaatgttgtaagcttttgattgaggctggtgctgatgttaagggtgttggtacttttacccccttaatagttgctgcaactgaaggcttaactgatttctataagtgcttactggagggtggtgctgatcctgatgtgcctgataaatttgggtttctgcccatagaaattgctgcacgtcagaacaggaggaaagatgtggagatcctacttccagtaacttctcgtattccatctgtgcatgattggagtgttgatgggatgattacttatgtaaacaaacaggtggaggttgaccctttcttcaaaataagaccagctgatctgaagttggaaggaaatagggcatacatgagaaaagactatcttactgccgcaaaactctacaatatggcgatcgagcacgaccctgaagatatgaccttgtactctaacacgagcgtttgctggcttaagatgggtaaaggaatgaatgctttggaaactgctcaagtttgcaggatattgcgccctgattggcccaagggctgctacagggaagggaccgctcacatgttcttgaaggactatgaaaaggcctgcaatgcatttcttgatggtttcaaactggacccagcgaatattgagattgaaaatgcgctacgaatgatcatgccccaatcctctttgcagataccggaggctttgaaatcattgaaggcgtctcgtgctgcttga

SEQ ID NO: 21941 - protein, 487 aa, Oryza sativa subsp
MAPHFVLGPGVPQQLLIQSAAAGDLPAFKKFARMLDGGKGRLKEAVEAVKNRGAGALHQAARYGRTAMCAYMVEELQVDIDAADELGATPLGYAIYGGIVDTVSYLLDHGANPDKPNEKGCTPLHLAVEQGHCEIVKVLLVKGANVDSSSDHGTPLHVAASKSQDGCMKILLDHHADAFGLLFDLIENVYAVNVISNQFLTLKGMPAMKKFRSDQQFDQKKRDQEPWWCNKTFSTVCTPLIAAMMGRSLKCCKLLIEAGADVKGVGTFTPLIVAATEGLTDFYKCLLEGGADPDVPDKFGFLPIEIAARQNRRKDVEILLPVTSRIPSVHDWSVDGMITYVNKQVEVDPFFKIRPADLKLEGNRAYMRKDYLTAAKLYNMAIEHDPEDMTLYSNTSVCWLKMGKGMNALETAQVCRILRPDWPKGCYREGTAHMFLKDYEKACNAFLDGFKLDPANIEIENALRMIMPQSSLQIPEALKSLKASRAA

SEQ ID NO: 21942 - DNA, 1365 bp, Oryza sativa subsp
  CDS (1)..(1365)
atggctgtgctgtgtggactggtgaccatcgccgccttcaagaggatcgcgggcaagctggacggcgggaagggccgcctccgggagacggtggagggggtgagggaccggggcgccggggcgctgcacgtcgcctccggccgcgggatgctcgcggtgtgctcgtacctggtcgaggagctccaggtggacgtcgacgccgccgacgattcaggcgatacacctctggcttatgcagttcgtggtcgttccatcgatggtgtgaagtatcttcttgaccatggttccaatccagataagcctgataataaaggatatacacctctccatgtggcagctattaaaggagagtgtgaaatagcaaaaatcttactctcaagaggtgctcatgttgactcattttcttctcatgggacaccactgcatctttctgctttctgccagcaggatggtgtgatgaagattttgttggaccaccatgcagattgctacgcttggttaaatttagtcttgactccgcctgaacatagagttttaccactgattgagcatgcagaatgtggcatgtttaacaagctactcaaacctgtgtttacacctctcatcatggctctcaatgctggctcgctgaaatgtgttgtgcttctgcttaaggctggtgctgatgtgaagggtgttggtacggtaactcccttaataactgctgcaaacaacgggcaaactgacttctataagtgcttactggaggctggtgcagatcctaatgttccagatgaattcggccaccttccaatagaactcactgcatataacaataggaggaaagatgttgagatcttacttcccgtaacttctcgtattccatctgtgtgtgactggagtgttgatggggtaattagttatgtgaaatcgtgtccatcggtggaggatgaccctatgtacaaaatgagtccagctgatatgaagttagcagcaagtgaggcatacaggagacaagattacattactgcaatgaagctctatactaggctaacagatatctgcccgcatgatgcaaccccattctcaaataggagcctttgctggcttaagatgggtgcaggggtcaatgcatttcaggatgctcaaatttgcaggttgatgcattctgactggtcgaaggcatgctatctggaaggtgctgctcaaatgttactgaaggactttgaaaaggcatgtgacgcgttttttgatggactcaaattggatccagcaagtgatgagattgcagaagcattaaggaaatctttcgaatccttgaagatatctcatgctgccaaagtgggtattggattgccatcttctcagaagaaaatcataagataa

SEQ ID NO: 21943 - protein, 454 aa, Oryza sativa subsp
MAVLCGLVTIAAFKRIAGKLDGGKGRLRETVEGVRDRGAGALHVASGRGMLAVCSYLVEELQVDVDAADDSGDTPLAYAVRGRSIDGVKYLLDHGSNPDKPDNKGYTPLHVAAIKGECEIAKILLSRGAHVDSFSSHGTPLHLSAFCQQDGVMKILLDHHADCYAWLNLVLTPPEHRVLPLIEHAECGMFNKLLKPVFTPLIMALNAGSLKCVVLLLKAGADVKGVGTVTPLITAANNGQTDFYKCLLEAGADPNVPDEFGHLPIELTAYNNRRKDVEILLPVTSRIPSVCDWSVDGVISYVKSCPSVEDDPMYKMSPADMKLAASEAYRRQDYITAMKLYTRLTDICPHDATPFSNRSLCWLKMGAGVNAFQDAQICRLMHSDWSKACYLEGAAQMLLKDFEKACDAFFDGLKLDPASDEIAEALRKSFESLKISHAAKVGIGLPSSQKKIIR

SEQ ID NO: 21944 - DNA, 1296 bp, Oryza sativa subsp
  CDS (1)..(1296)
atggcggaggagctccccttccccgctaacatcgaagtgatgcgccacacgccgcggttcaagctcatgcaggcggcgttccacggcgacctccgcggcttgaagcggcaggcgaagattctggatatggggaggggccgcctgaggaaggccgtagaggatgtgagggtggaaggcgtgccgggcgaggaaggtacaggggtgctgcatatggctgcctcccatggccacatggagatgtgcaagtacctggtcgaaacgcttcaggtggatgtggatgatgcggatgacaaagaaaattttaaaatagactctcttgtcagctgtttttttaacaaaaggttttggccaaatgcccaaacccataagggtggtttggcaaggcaatccacaccaggtagaacatctctacttaaggcggtacattctgggcatcggggaattgccaagtatcttcttaatcatgacgccaatccagacctagccatgtgctgtgggcttacccctctacattctgccgctggattaggtgattgtgagtccgtaaaactattgcttgcaaaaggagcttatgttgacccaatgtctacttttgggacaccacttcatcttgctgctaaagaagggcaggatggcaccatgaagatattgttggacaacaatgcagattgcaacaagatggtaaacggtataacacctctcctccttgctatgaaagctgcatcagcaaaatgtatggagctgctggttgaggctggagctgatgctacttactctgatgtcatctggaattatatgtcaactacttttatggatgatgaagatagtggttcatctgtgttctcggattctgaaccagaagagattgatgccaatcaccatattcccgtcaatgacaaacctgtgaatcgaaggaaaattgcagagtttaagtcgttagggcttgaggcagttgacaagaaggattatctttctgcagcaggattctacagtgaggccatggaccttgaccctgatgatgcaaccctgctgtccaataggagcctttgctggctttatctgggtgaaggaggcaaggctttggtggatgctcatgaatgcagaaaaatgcggcctgactggccgaaggcctgctaccgtcagggtgcagctttaatgttactgaaggactatgtgagcgcgtgtgaagcactttttgatggattcaagttggatcctgaggacgttgagattgaaaatgcattacgggaagctctagagttcttgaaggtgtctcaaagcacttcggctaactga

SEQ ID NO: 21945 - protein, 431 aa, Oryza sativa subsp
MAEELPFPANIEVMRHTPRFKLMQAAFHGDLRGLKRQAKILDMGRGRLRKAVEDVRVEGVPGEEGTGVLHMAASHGHMEMCKYLVETLQVDVDDADDKENFKIDSLVSCFFNKRFWPNAQTHKGGLARQSTPGRTSLLKAVHSGHRGIAKYLLNHDANPDLAMCCGLTPLHSAAGLGDCESVKLLLAKGAYVDPMSTFGTPLHLAAKEGQDGTMKILLDNNADCNKMVNGITPLLLAMKAASAKCMELLVEAGADATYSDVIWNYMSTTFMDDEDSGSSVFSDSEPEEIDANHHIPVNDKPVNRRKIAEFKSLGLEAVDKKDYLSAAGFYSEAMDLDPDDATLLSNRSLCWLYLGEGGKALVDAHECRKMRPDWPKACYRQGAALMLLKDYVSACEALFDGFKLDPEDVEIENALREALEFLKVSQSTSAN

SEQ ID NO: 21946 - DNA, 1344 bp, Oryza sativa subsp
  CDS (1)..(1344)
atggagaagaaggataagggaaggcaccgcggccgcgacggcggaggcggaggcggcggcggtggtggtggtggtggtggtggtggtggtgtggatcgcggcggtggagggagcggaggaggagggccgggaatggggcggcgcgggagcgatgcgcgtggccagcaggcggaggcggcggccgcggcaatcagcggcatcgccacccgcctcggcttcgggtgcaccatcaatgtcggcggcgggatgccaccgcagatggagttcctgatggcgtgtacggacggcgacgtcgcgcgcctcaaggaggtggttgatagcatggatgaggatgatcggcaatcgctcgcctctgtgaggatggaggggtatgagccactgtttgaggcagcaagctcgggaaaaattgatctctgcaagtacttggtggaggagcttgggttcgatgtcaatgccgaagctaatcatgattccggtatgacacctttgttttgcgctgtgttgcatggacaagagattactgtgaagtattttcttgacaaaggtgctgatccgaataagaaagatgcagcaggctttgctcctcttcatgaagctgcacaaaaagggcacgttggaatagcacgactgttgttatctaaaggagctagtgttgatgtatcttcttctaaagggacacctcttcatgttgctgcctctaatggaaaatctagcactgtgcagattttattagagcaccgcgcaaatattcaacgatcacaagttgatgcaaaaagctttcgaaacagggtccaagtgttctatgtacctgctttgccaaacgtgatattaccagattgttatacaccattgaccgcagttctttctgccactcctgaaatagtgaatgaatctgagtgtttgaagtgcatgaaactccttgtgaaggacaaaggaagtgatggagacagaaaatctaagctgaaattacatggtggaaaagcatttgaggagggggactatgctggtgcaatcatattttacactgaggcaatgaaacttgatcctgcagatgccacactgtattcaaacaggagcctttgccatctgagaagtggtgcagcgcaggaggctttgctggatgctaatgattgcataaaactcaagccagagtggactaaaggtcactatcgcaaaggatgtgcccacatggcactcaaggaatacgaagaagcttgtactgcattcatggctggaacaaagctcaatcctttaaacgatgaaatgcaggatgcattttgggaggcagctaaaggaatgatgtatgaacatatggctggaaagcgcgtcagctcggttgattag

SEQ ID NO: 21947 - protein, 447 aa, Oryza sativa subsp
MEKKDKGRHRGRDGGGGGGGGGGGGGGGGGVDRGGGGSGGGGPGMGRRGSDARGQQAEAAAAAISGIATRLGFGCTINVGGGMPPQMEFLMACTDGDVARLKEVVDSMDEDDRQSLASVRMEGYEPLFEAASSGKIDLCKYLVEELGFDVNAEANHDSGMTPLFCAVLHGQEITVKYFLDKGADPNKKDAAGFAPLHEAAQKGHVGIARLLLSKGASVDVSSSKGTPLHVAASNGKSSTVQILLEHRANIQRSQVDAKSFRNRVQVFYVPALPNVILPDCYTPLTAVLSATPEIVNESECLKCMKLLVKDKGSDGDRKSKLKLHGGKAFEEGDYAGAIIFYTEAMKLDPADATLYSNRSLCHLRSGAAQEALLDANDCIKLKPEWTKGHYRKGCAHMALKEYEEACTAFMAGTKLNPLNDEMQDAFWEAAKGMMYEHMAGKRVSSVD

SEQ ID NO: 21948 - DNA, 1290 bp, Oryza sativa subsp
  CDS (1)..(1290)
atggcctcctccccctccgccgtcgtcctgcaggccgccctcgacggcgacctccacctcctgtgtgaaatggccaagaagttggacctgcggggattcaaggacatgaatgggcgaaatgcgcttcacttggctgcaagctatgggcatctggagatctgcaagttcctggtggaggaatcgggccttgatgtcaactcaggctctcacagaggtgagacaccaatacttctcgccgcatgtgacggggacattaatgttttaatataccttcttgatcatggtggtgacccagccatacctaacgcggggggcttcacgccgctgcactacgcagcagagtacggtgcgttccatgcttttcagttcactcgccatctgtgggatttaaggatggttcttgcatacaagttgttaggaatcctgtgtgctaacatcgttgtgccctcagggcatgttgatgttgtgagactattgctgtccaaaggagttcatgtggatcctctgaattatagtggggccccgctgcacttggctaccgcaaatgaccatgatcaggttgcgaaggttctgcttgagcatggtgctgatgctggtgctgatgtgaatgatagaagttctactggaccaagaacgacccctttagtgcttgcagttgatgatggatcagccgatattgtcaaaatcttgctagaggctggagctgaccctaacattcgtaacgaggatgggaggattcctatcatgatggcagcagctcgtggtcaacgagagcttgttgaaattctgtttcctaggacaaaaccaattccatgtctgccagattggagtgttgatgggataattagaactatgagattcacacgtaccgaacctgaggatgcagttcctgtggaaatactagtatctgattcgaagttaaatgccaaggaagcatttgcagagggtgaatacattacagcaatctacttctacaccaaggcactggaaaaagccccacttgatgccaccttgttcgccaaccgcagcctctgctggctgcggctgcgagaaggagacgtcgctctattggatgcgcgacgctgcaaagccctgcgccctggttggtccaaggcatggtaccgtgagggcgcggccctcagtctcctgaagaactacagagaagcggcggcggctttcacggaagcgctgaaacttgaccctgagaactacgagatcaagatcgcgttaagagaggcgttggagtgtcggaagagagctgcacgctctgaagaagataagaacccttga

SEQ ID NO: 21949 - protein, 429 aa, Oryza sativa subsp
MASSPSAVVLQAALDGDLHLLCEMAKKLDLRGFKDMNGRNALHLAASYGHLEICKFLVEESGLDVNSGSHRGETPILLAACDGDINVLIYLLDHGGDPAIPNAGGFTPLHYAAEYGAFHAFQFTRHLWDLRMVLAYKLLGILCANIVVPSGHVDVVRLLLSKGVHVDPLNYSGAPLHLATANDHDQVAKVLLEHGADAGADVNDRSSTGPRTTPLVLAVDDGSADIVKILLEAGADPNIRNEDGRIPIMMAAARGQRELVEILFPRTKPIPCLPDWSVDGIIRTMRFTRTEPEDAVPVEILVSDSKLNAKEAFAEGEYITAIYFYTKALEKAPLDATLFANRSLCWLRLREGDVALLDARRCKALRPGWSKAWYREGAALSLLKNYREAAAAFTEALKLDPENYEIKIALREALECRKRAARSEEDKNP

SEQ ID NO: 21950 - DNA, 1293 bp, Oryza sativa subsp
  CDS (1)..(1293)
atggccccctccccttccgacgtcgccctgcaggccgcccaggacggcaacctccgcctcctcaggaagatggcgaagaagttggatttgcgaggagtcaaggacaagaatggcctaagcgcgcttcacttcgctgcaagccatgggcacctggattgctgcaagttccttgtggaggaatcgggccttgatgtcaactcggttggtcacaaaggtgaaacgccagtgttctatgccgcgatcgatgggaacgttcaggttttggggtaccttcttgatcatggtggtgacccggtgaaacccgaggagaggggctgcacgccgctgcacaatgcggcagagaatgggcatgatgaggctgtaagactattgctgtccaaaggagttcatgtggatcctctgaattatcgtggggccccactgcacttggctgcctcaaaggaccgggttcaagccatgaaggttctgcttgaacatggtgctgatcccaacagagttgtcaatcatatcttttcaccactcatgatggcatgctgcgggcactccttgaaatgcgtgaagctacttgttgaggctggcgctgatgtgaacggtaatagtaccaatggacctacccctttaactgaagcggttgatgacagtttaaccgatgttgtcaaattcttggtaggggctggagctgaccctaacattcctgacgaggaagggaggattcctatcatggtggcagcagctcgtggtcaacgagagcttgttgaaattctatttcctcggacaaaacctattccatgtctgccagattggaatgttgacgggataattagaactatgagaaccacacgtattgaacctcagtctgctattcctgtggaagaacaagtgtctgatgcaaagtcgaaaggaaaggaagcatttgcaaagggtgactaccttacagccatctacttctacaccctggcaatggataaatccccacttgatgccaccttgtttgccaaccggagcctttgctggctgcggcagcgagaaggggacagagctttactggatgcacagcagtgcaggatgctgcgccctggttggtccaaggcatggtaccgtgagggcgcagctctcagtttcatgaaggactacaaaggagcagtggacgcattcggggaggcactgaaacttgaccccatgagcgacgaggtcaagaacgcgttaagaagatgggtgacattcggcctgtttggtacagctccaactcagctccaggagttgagtctggagtggagttgtggagctgactaa

SEQ ID NO: 21951 - protein, 430 aa, Oryza sativa subsp
MAPSPSDVALQAAQDGNLRLLRKMAKKLDLRGVKDKNGLSALHFAASHGHLDCCKFLVEESGLDVNSVGHKGETPVFYAAIDGNVQVLGYLLDHGGDPVKPEERGCTPLHNAAENGHDEAVRLLLSKGVHVDPLNYRGAPLHLAASKDRVQAMKVLLEHGADPNRVVNHIFSPLMMACCGHSLKCVKLLVEAGADVNGNSTNGPTPLTEAVDDSLTDVVKFLVGAGADPNIPDEEGRIPIMVAAARGQRELVEILFPRTKPIPCLPDWNVDGIIRTMRTTRIEPQSAIPVEEQVSDAKSKGKEAFAKGDYLTAIYFYTLAMDKSPLDATLFANRSLCWLRQREGDRALLDAQQCRMLRPGWSKAWYREGAALSFMKDYKGAVDAFGEALKLDPMSDEVKNALRRWVTFGLFGTAPTQLQELSLEWSCGAD

SEQ ID NO: 21952 - DNA, 1347 bp, Oryza sativa subsp
  CDS (1)..(1347)
atggacggcatcatgtcgctgcccgacctcttcgagaagcttctcggcgacgagatcgccgcgacgctggacgacgacggggaggggatcgcggccaccgtggcgcgcacggccttccacggcatgaacgcgctgcacgccgccagaagcctgcacgtctaccgctacttgctcgaggtggccaacatggacgtcaacaagccggacaccactccaggtaggaagactcccctcgagcgagccattgccggtggggacctgccctctgtcaggtatctcattgatcatggtgctgatatccatcatgaacgtgaaggaaacatcacttttcttcattcagctgcaaagaaaggattccctgctacatacaatctgcattctgtcatgatgagcagccttacgttgaatgtggagaaaaatgcagacaatactccactgaaacatgttcctccaagagtgaactgctctttttgtgtgttatttaggactgggaggactgaaatagtaaaattgctgctttctagaggagctcatgttgatggcaaatcagatcatgggacacctctgcattttgctgctattaaaggatatgaaagtactgtgaagattttgttggagcaccaagcagatcccaacaaggttatgccttcttctcaagcaacacctttatctgcggcgttattcactacttccttaccttgtgtgaagctattgatccaggctggagctgatgtaaatgctacaaacaaccccctggcgagagctgcagggagtggattaactgaagctataaagttgttgttgaaggctggagcaaacccaaattgtcctgacacgcatggtagaatgccaatagagctggctgctgtgtatggtacaagggaagatgttgagattctatttcctttgaccaacccaattccaactgttgctgactggagcgttgatggggtaattacttatgccaatctggaacgcaagaagctagaggatgatgattacgttaacacgaaaatgtctgacctgaaacaaaaagggaatgaagcatttgatgagcaggattatgaaaaagcatcagtgtggtacacacaggcactggaagttgatccttgtgatgccacaactcttctaaagaggtgtctttgctggcttcgcatgggtgagggaaaaaaggctgtgaaagatgcaaccacatgcgcaaaacatcacccgaagttgtcggaggcctaccatcggctaggagaagctctaatgcttgagaaggattatgagaaagcttgcgtggcgttgacccatggtatagagttggatcctgaaagtgatgagatggacaaactgttctggtaa

SEQ ID NO: 21953 - protein, 448 aa, Oryza sativa subsp
MDGIMSLPDLFEKLLGDEIAATLDDDGEGIAATVARTAFHGMNALHAARSLHVYRYLLEVANMDVNKPDTTPGRKTPLERAIAGGDLPSVRYLIDHGADIHHEREGNITFLHSAAKKGFPATYNLHSVMMSSLTLNVEKNADNTPLKHVPPRVNCSFCVLFRTGRTEIVKLLLSRGAHVDGKSDHGTPLHFAAIKGYESTVKILLEHQADPNKVMPSSQATPLSAALFTTSLPCVKLLIQAGADVNATNNPLARAAGSGLTEAIKLLLKAGANPNCPDTHGRMPIELAAVYGTREDVEILFPLTNPIPTVADWSVDGVITYANLERKKLEDDDYVNTKMSDLKQKGNEAFDEQDYEKASVWYTQALEVDPCDATTLLKRCLCWLRMGEGKKAVKDATTCAKHHPKLSEAYHRLGEALMLEKDYEKACVALTHGIELDPESDEMDKLFW

SEQ ID NO: 21954 - DNA, 1320 bp, Oryza sativa subsp
  CDS (1)..(1320)
atggcgctgcctcaggccttcgagctcctcctcggcagagatcgagacgcgtggccgcgcggggccgcgttcctcgtcgccgcccactacggggacgtccgcgaaatgaagaggattgcaaaggagctggacgaggacggcaaagggatcgaggcgactgtggctaacacaagcttcctcggcatgaacgcccttcacgcactgggttggctcggcaaggtgccggcctaccggtatctggtagaggaggtcaaaatggacgtcaacaaggccgacactgctcagggattcacacccctggagcatgccgtctaccatggtcgcctgcctgccaccagatacctccttgatcatggcgctgatgtgcatcaaattcgctctacgggaaatgtctctcttcttcactcagctgcagtaaaagggttctctgaagtagcaaaatttctgctttctagaggagttaatgttgatgcagaatcagaaatggggacaccactggctcttgctgctttcaaaggatatgatagtactgtcaaggtccttttggagcacaatgctgatcccaacaaggttacaaacaaggcacttggtgcacctttagacttggcattaaccagctcttctgtgtcctgtgtgaagctgttggttcaggctggagctgaagtgaaagttgaggggccaaataatcatttggtaagagctgctgagaaaggcttaactgaagctattaaatgcatgttggaagctggtgcaaacccaaatgttcctgacaggctcgggagaatgccaatagagctggctgctgagtatggcacacgggaagatgttgagattctctttcctttcagctctgctattccaactgtggcaaattggagtgttgatggaataattaatcatgtacagtcagaaatcaagcaactagagatattatttactcaggacgataattttatcaaaaagagaaggtctgacatgaaacaacaaggggatgctgcatttaagaagcaggattatctaaatgcatcagtgttctacactcaggcactgaaggttgatccgtttgatggcacgttgttctcaaacaggagtctttgctggctccgcatgggtgatggagaaagggctttggatgatggcaatgcatgcgaaaagctacggccaaagtgggcaaagtcctactatcggcaaggagcagctctaatgtttctgaaggagtatgagagggctcatagggcacttggtcgagctttagagttggaccctgaaagtgaagagatcgagaatttgtattgggagtcgatggaactgtgcggttga

SEQ ID NO: 21955 - protein, 439 aa, Oryza sativa subsp
MALPQAFELLLGRDRDAWPRGAAFLVAAHYGDVREMKRIAKELDEDGKGIEATVANTSFLGMNALHALGWLGKVPAYRYLVEEVKMDVNKADTAQGFTPLEHAVYHGRLPATRYLLDHGADVHQIRSTGNVSLLHSAAVKGFSEVAKFLLSRGVNVDAESEMGTPLALAAFKGYDSTVKVLLEHNADPNKVTNKALGAPLDLALTSSSVSCVKLLVQAGAEVKVEGPNNHLVRAAEKGLTEAIKCMLEAGANPNVPDRLGRMPIELAAEYGTREDVEILFPFSSAIPTVANWSVDGIINHVQSEIKQLEILFTQDDNFIKKRRSDMKQQGDAAFKKQDYLNASVFYTQALKVDPFDGTLFSNRSLCWLRMGDGERALDDGNACEKLRPKWAKSYYRQGAALMFLKEYERAHRALGRALELDPESEEIENLYWESMELCG

SEQ ID NO: 21956 - DNA, 1161 bp, Oryza sativa subsp
  CDS (1)..(1161)
atgcggggggcactgatactccttctccgatctccgttttgtagatgtttcgagaacgtgagggcactggacgagggggacggccgcctcgccgacaaggttggggccgtgagggacagcgacggcctcggcgcgctgcacctcgccgccgcccgtgagaagctgcccgtttgccattatcttgtggaggagctccgcgtggatgttgatgccgtcgacaacaaaggtgaaacggcattgacatttgcgatcaattgtgggaatgaggacatggtgcggtatcttcttgatcatggggctgatactgaaaagatcaacaacgatggacttactgctctccattttgctgctggtgaaggaaagtgcaaaatagttgaaattttgctgtctaaaggagcttatattgattcgttgactactggtggaacagcactgcactgtgctgcttataatgggagggatgctgttgtgaagattttattagaccaccatgcagatcacaagaaggtatcttggggtgcctatacacctctttttgttgctgtcgagtctggctcactgaaatgtctgaagctcctgattgaggctggcgcagatgtgaaaggaattggtaaagaaatacctttaataactgctgcttctaagggcttaactgacatcataaagtgcttacttgaggctggtgcagaccctaatgttcgtgactgtcttggacacatgcctatagaagttgctgcacgctgcggtgagcggaaagctattgagatcctatttccagtcacttctcgtattcagtctgtgtctgattggactgttgatggaatcattaatcacgtaaagtcactacctgaggtgaaggaggaagatttttgtgaagctacgcttgatatgggaaaattccaaggccgtgaagcagtcaagaataaagattatcttggtgccatgaacatttatactgcggctattgctctcaatcctagagatgcatctttattctcaaataggagcctttgttggcttcacttgggtgaggggaagaaggctttgatggatgctgaagcttgcaggatgatgcgaccagactggccgaaagcttgctaccgtaaaggaactgctctaatgttactgaaggtgggacaaaatgttcaaatcatcttttga

SEQ ID NO: 21957 - protein, 386 aa, Oryza sativa subsp
MRGALILLLRSPFCRCFENVRALDEGDGRLADKVGAVRDSDGLGALHLAAAREKLPVCHYLVEELRVDVDAVDNKGETALTFAINCGNEDMVRYLLDHGADTEKINNDGLTALHFAAGEGKCKIVEILLSKGAYIDSLTTGGTALHCAAYNGRDAVVKILLDHHADHKKVSWGAYTPLFVAVESGSLKCLKLLIEAGADVKGIGKEIPLITAASKGLTDIIKCLLEAGADPNVRDCLGHMPIEVAARCGERKAIEILFPVTSRIQSVSDWTVDGIINHVKSLPEVKEEDFCEATLDMGKFQGREAVKNKDYLGAMNIYTAAIALNPRDASLFSNRSLCWLHLGEGKKALMDAEACRMMRPDWPKACYRKGTALMLLKVGQNVQIIF

SEQ ID NO: 21958 - DNA, 1302 bp, Oryza sativa subsp
  CDS (1)..(1302)
atggcgccgcatttcgtactgggccccggcgtaccgcagcagctgctcatccagtcggcggccgccggcgacctccccgccttcaagaggattgctagtaggctggacggcggggaaggacgcctcaaggaggcggtggaggccgtgaagaaccgcggcgctggggctctgcaccaagccgcccgctacgggaggaccgcgatgtgcgcgtacatggtcgaggagctccaggtggacatcgacgccgccgatgagttaggcgctacgcctcttggttatgcaatttatggtgggattgtggatactgtgagctatcttcttgatcatggtgcaaatccagataagccaaatgaaaaagggtgtacccctctccatctagcagttgaacaaggacattgcgagatagtaaaggtcttactggtgaaaggtgctaatgttgattcatcttctgaccatgggacaccactgcatgttgctgcctcaaaaagtcaggatggttgtatgaagattttgttggaccaccatgcagataaaatgtctattgctgtaaatgtcataagcaatcaatttcttaccctgaaaggaatgccagcgatgaaaaaaattcaggctggtgctgatgttaagggtgttggtacttttacccccttaatagttgctgcaactgaaggcttaactgatttctataagtgcttactggagggtggtgctgatcctgatgtgcctgataaatttgggtttctgcccatagaaattgctgcacgtcagaacaggaggaaagatgtggagatcctacttccagtaacttctcgtattccatctgtgcatgattggagtgttgatgggatgattacttatgtaaacaaacaggtggaggttgaccctttcttcaaaataagaccagctgatctgaagttggaaggaaatagggcatacatgagaaaagactatcttactgccgcaaaactctacaatatggcgatcgagcacgaccctgaagatatgaccttgtactctaacacgagcgtttgctggcttaagatgggtaaaggaatgaatgctttggaaactgctcaagtttgcaggatattgcgccctgattggcccaagggctgctacagggaagggaccgctcacatgttcatgaaggactatgaaaaggcctgcaatgcatttcttgatggtttcaaactggacccagcgaatattgagattgaaaatgcgctacgaatgatcatgccccaatcctctttgcagataccggaggctttgaaatcattgaaggcgtctcgtgctgcttga

SEQ ID NO: 21959 - protein, 433 aa, Oryza sativa subsp
MAPHFVLGPGVPQQLLIQSAAAGDLPAFKRIASRLDGGEGRLKEAVEAVKNRGAGALHQAARYGRTAMCAYMVEELQVDIDAADELGATPLGYAIYGGIVDTVSYLLDHGANPDKPNEKGCTPLHLAVEQGHCEIVKVLLVKGANVDSSSDHGTPLHVAASKSQDGCMKILLDHHADKMSIAVNVISNQFLTLKGMPAMKKIQAGADVKGVGTFTPLIVAATEGLTDFYKCLLEGGADPDVPDKFGFLPIEIAARQNRRKDVEILLPVTSRIPSVHDWSVDGMITYVNKQVEVDPFFKIRPADLKLEGNRAYMRKDYLTAAKLYNMAIEHDPEDMTLYSNTSVCWLKMGKGMNALETAQVCRILRPDWPKGCYREGTAHMFMKDYEKACNAFLDGFKLDPANIEIENALRMIMPQSSLQIPEALKSLKASRAA

SEQ ID NO: 21960 - DNA, 1458 bp, Oryza sativa subsp
  CDS (1)..(1458)
atggagaagaaggataagggaaggcaccgcggccgcgacggcggaggcggaggcggcggcggcggtggtggtggtggtggtggtgtggatcgcggcggtggagggagcggaggaggagggccgggaatggggcggcgcgggagcgatgcgcgtggccagcaggcggaggcggcggccgcggcaatcagcggcatcgccacccgccttggcttcgggtgcaccatcaatgtcggcggcgggatgccaccgcagatggagttcctgatggcgtgtacggacggcgacgtcgcgcgcctcaaggaggtggttgatagcatggatgaggatgatcggcaatcgctcacctctgtgaggatggaggggtatgagccactgtttgaggcagcaagctcgggaaaaattgatctctgcaagtacttggtggaggagcttgggttcgatgtcaatgccgaagctaatcatgattccggtatgacacctttgttttgcgctgtgttggatggacaagagattactgtgaagtattttcttgacaaaggtgctgatccgaataagaaagatgcagcaggctttgctcctcttcatgaagctgcaaaaaaagggcacgttggaatagcacgactgttgttatctaaaggagctagtgttgatgtatcttcttctgaagggacacctcttcatgttgctgcctctaatggaaaatctagcactgtgcagattttattagagcaccgcgcaaatattcaacgatcacaagttgatgcaaaaagctttcgaaacagggtccaagtgttctatgtacctgctttgccaaacgtgatattaccagattgttatacaccattgaccgcagttctttctgccactcctgaaatagtgaatgaatctgagtgtttgaagtgcatgaaactccttgtgaaggctggtgctatttataatcttgcaactcctgatactccattgaagatagcaactagaaatggcttaactgagtgtgttgcatacttgctggagatcaccacagttaaactaagtgaacatgacaaaggaagtgatggagacagaaaatctaagctgaaattacatggtggaaaagcatttgaggagggggactatgctggtgcaatcatattttacaccgaggcaatgaaacttgatcctgcagatgccacactgtattcaaacaggagcctttgccatctgagaagtggtgcagcgcaggaggctttgctggatgctaatgattgcataaaactcaagccagagtggactaaaggtcactatcgcaaaggatgtgcccacatggcactcaaggaatacgaagaagcttgtactgcattcatggctggaacaaagctcaatcctttaaacgatgaaatgcaggatgcattttgggaggcagctaaaggaatgatgtatgaacatatggctggaaagcgcgtcagctcggttgattag

SEQ ID NO: 21961 - protein, 485 aa, Oryza sativa subsp
MEKKDKGRHRGRDGGGGGGGGGGGGGGGVDRGGGGSGGGGPGMGRRGSDARGQQAEAAAAAISGIATRLGFGCTINVGGGMPPQMEFLMACTDGDVARLKEVVDSMDEDDRQSLTSVRMEGYEPLFEAASSGKIDLCKYLVEELGFDVNAEANHDSGMTPLFCAVLDGQEITVKYFLDKGADPNKKDAAGFAPLHEAAKKGHVGIARLLLSKGASVDVSSSEGTPLHVAASNGKSSTVQILLEHRANIQRSQVDAKSFRNRVQVFYVPALPNVILPDCYTPLTAVLSATPEIVNESECLKCMKLLVKAGAIYNLATPDTPLKIATRNGLTECVAYLLEITTVKLSEHDKGSDGDRKSKLKLHGGKAFEEGDYAGAIIFYTEAMKLDPADATLYSNRSLCHLRSGAAQEALLDANDCIKLKPEWTKGHYRKGCAHMALKEYEEACTAFMAGTKLNPLNDEMQDAFWEAAKGMMYEHMAGKRVSSVD

SEQ ID NO: 21962 - DNA, 1680 bp, Oryza sativa subsp
  CDS (1)..(1680)
atggccgacgccaccgccgccctctcagagctcgctgcggcgctcgacgaggagggcaagggcgtcgccgccgtcgctgctgccgtcaaggacgccaacaagcgcaccgccctgcacttcgccgcccgcgagggccgcacccacgtctgtcacttcctcatctccgacctcgccctccccgtcgaccccaaggacgacgatgggaacctggaccttatgaaactatttctctccaagggggttgatgttgaatcagaaagcgatgccggcacacccctcatatgggctgctggtcatggacagcaagaggcagtcaaacttttgcttcaacacgatgctaaggcttctctttgtttagcactcaaccacctttcaatcagccgttcatgtggcctttccttaacttttttactgaagctagttattgcttggcagccaaatactgaaaacgatgatggtattacgcctttgttgtctgctgttgcagcgggttccctcccatgcttggatattctaattcaggcaggtgcacatccgaatatcagagctggtggagcaaccccattacatattgctgcagatggtggaaacatggaaataataaattgtttacttaaagctggaagtgaccccaatgcatgtgatgatgatggactaaagccaatacaggttgctgctttgaggaataaccgtgaagttgtggaacttcttttacctttgacatcaccaattccaggtgtttcgagttggagtattgatggaattatagaatacactaaatcagtcgaggaaaaggcacaggtaaaggaagctacaactcagaaagcagacagattacaagtaccacaacttgttgaggtgtcatctgaggcaaaagagagatcattggaggcaaaatcgagaggtgatgatgccttcagaaataaagactacctagtagcagtagatgcctacacacaggctattgagttaaatccaaacgacgccacgttgcattcaaacagaagcctttgctggctacgggcagggcaagctgaacgtgctctggaggatgcaagagcatgtcgagcgctgaggccagactgggcgaaagcttgctacagggaaggcgcggcactgcgcctgctgcagtcgccccatcgacctcgaccgctcagattaggcaccaagctaatcgaccagcttgctcgtgatgacgagaagatccaaaagaaaaccaggaaacccaagcctaagaagactgtcaaacaacatcaacaagagccccaggacaactcaagggaactcccagcttctgaacccaaggctcctcctggctggccactgcagcctcccatgtatctccccgtaacccctgctcctccaccacccccacctgctttttcagagctggaagccatccgtgccgttctggaagagagcgaaaaggttcaggagaagctggataagcagcatgctgggatgcgtgatgaactcatcaagaaatcaaaagacctgcgtgacaaggagttcaagctgccgtaccaaaaccccacgccatgcactgaggagaggtcaaactgccgccagtgttacgtgagcaatgcacaggacccactcaagtgtgctgaggcagtcaagagatttgaagcatgtgttcgcctggcgaggcaaaggggcaacacaaaagttgctcagtag

SEQ ID NO: 21963 - protein, 559 aa, Oryza sativa subsp
MADATAALSELAAALDEEGKGVAAVAAAVKDANKRTALHFAAREGRTHVCHFLISDLALPVDPKDDDGNLDLMKLFLSKGVDVESESDAGTPLIWAAGHGQQEAVKLLLQHDAKASLCLALNHLSISRSCGLSLTFLLKLVIAWQPNTENDDGITPLLSAVAAGSLPCLDILIQAGAHPNIRAGGATPLHIAADGGNMEIINCLLKAGSDPNACDDDGLKPIQVAALRNNREVVELLLPLTSPIPGVSSWSIDGIIEYTKSVEEKAQVKEATTQKADRLQVPQLVEVSSEAKERSLEAKSRGDDAFRNKDYLVAVDAYTQAIELNPNDATLHSNRSLCWLRAGQAERALEDARACRALRPDWAKACYREGAALRLLQSPHRPRPLRLGTKLIDQLARDDEKIQKKTRKPKPKKTVKQHQQEPQDNSRELPASEPKAPPGWPLQPPMYLPVTPAPPPPPPAFSELEAIRAVLEESEKVQEKLDKQHAGMRDELIKKSKDLRDKEFKLPYQNPTPCTEERSNCRQCYVSNAQDPLKCAEAVKRFEACVRLARQRGNTKVAQ

SEQ ID NO: 21964 - DNA, 1233 bp, Oryza sativa subsp
  CDS (1)..(1233)
atggcgcgagggctggacaccgggcagggcgaggcggctgtcgtggcggcggtggagggcagcggcttcgggcaccgcgctctgcacatggcggcctctggagggagcgtggacgtcctcaggtacctcgtggaggacctctgcctcggcgtcaaccagttcaatggcaaaggtcaaacaccactgttcctgtcttcaattcatgggagagctgctgctacaagatatcttctcgatcatggttccaatcctgcgattgataaaatagtgttacctcttcatggtgctgcagtgaaaggacactgcgaaatagtagagttgtttctttcaaaaggagttgatgtggatttatattctatcgctgggaccccattgctggcagctgcgattagtggccaacatagcacgatgaagatcttattggagcatcatgctgatgttggtgctgacatgaattttagagactccaatggcgttacttgtgtaatggttgcagcaaatcatggctcttctgtcatcatgaagtgcttactagatgctggtgctaatccaaacattccagatgaattcaatacgactccaattgaagttgccgctaatcatggcagaagggacattgttgaaatgttgtttcctttaacctcaccaatttcaacactgtcagattggagtatcgatggaattatttctcacgtggaaaattttggtttgaagccaagggataatgatctgtctaaaaggaaaagtgctgaactgaaattacaagctagagaggctttcgagagaaatgattatgcgcttgcagtacaacactacactaacgataatgatctgtctaaaaggaaaagtgctgaactgaaattacaagctagagaggctttcgagagaaatgattatgcgcttgcagtacaacactacactaacgcaatagaacttagcacaagtgctcatgataaggcaaccctgctagcaaacaggagcctatgctggttgcgtttgtcaaccggcattggggctattgctgatgctaacatgtgcagaatgttgcggcccagttggcccaaagcatgctatcgacaaggggcagctttcatgtttataaaggactatggaaaagcttgtgaagcttttgcagatggcttgaagttggaccctgcaaatgaagatataaagaaagctttaagggatgccgaggaggccatgaagaaagacaaaatggagcgcagaggttga

SEQ ID NO: 21965 - protein, 410 aa, Oryza sativa subsp
MARGLDTGQGEAAVVAAVEGSGFGHRALHMAASGGSVDVLRYLVEDLCLGVNQFNGKGQTPLFLSSIHGRAAATRYLLDHGSNPAIDKIVLPLHGAAVKGHCEIVELFLSKGVDVDLYSIAGTPLLAAAISGQHSTMKILLEHHADVGADMNFRDSNGVTCVMVAANHGSSVIMKCLLDAGANPNIPDEFNTTPIEVAANHGRRDIVEMLFPLTSPISTLSDWSIDGIISHVENFGLKPRDNDLSKRKSAELKLQAREAFERNDYALAVQHYTNDNDLSKRKSAELKLQAREAFERNDYALAVQHYTNAIELSTSAHDKATLLANRSLCWLRLSTGIGAIADANMCRMLRPSWPKACYRQGAAFMFIKDYGKACEAFADGLKLDPANEDIKKALRDAEEAMKKDKMERRG

SEQ ID NO: 21966 - DNA, 1335 bp, Oryza sativa subsp
  CDS (1)..(1335)
atgtcgctgcccgacctcttcgagaagcttctcggcgacgagatcgccgcgacgctggacgacgacggggaggggatcgcggccaccgtggcgcgcacggccttccacggcatgaacgcgctgcacgccgccagaagcctgcacgtctaccgctacttgctcgaggtggccaacatggacgtcaacaagccggacaccactccaggtaggaagactcccctcgagcgagccattgccggtggggacctgccctctgtcaggtatctcattgatcatggtgctgatatccatcatgaacgtgaaggaaacatcacttttcttcattcagctgcaaagaaaggattccctgctacatccaatctgcattctgtcatgatgagcagccttacgttgaatgtggagaaaaatgcagacaatactccactgaaacatgttcctccaagagtgaactgctctttttgtgtgttatttaggactgggaggactgaaatagtaaaattgctgctttctagaggagctcatgttgatggcaaatcagatcatgggacacctctgcattttgctgctattaaaggatatgaaagtactgtgaagattttgttggagcaccaagcagatcccaacaaggttatgccttcttctcaagcaacacctttatctgcggcgttattcactacttccttaccttgtgtgaagctattgatccaggctggagctgatgtaaatgctacaaacaaccccctggcgagagctgcagggagtggattaactgaagctataaagttgttgttgaaggctggagcaaacccaaattgtcctgacacgcatggtagaatgccaatagagctggctgctgtgtatggtacaagggaagatgttgagattctatttcctttgaccaacccaattccaactgttgctgactggagcgttgatggggtaattacttatgccaatctggaacgcaagaagctagaggatgatgattacgttaacacgaaaatgtctgacctgaaacaaaaagggaatgaagcatttgatgagcaggattatgaaaaagcatcagtgtggtacacacaggcactggaagttgatccttgtgatgccacaactcttctaaagaggtgtctttgctggcttcgcatgggtgagggaaaaaaggctgtgaaagatgcaaccacatgcgcaaaacatcacccgaagttgtcggaggcctaccatcggctaggagaagctctaatgcttgagaaggattatgagaaagcttgcgtggcgttgacccatggtatagagttggatcctgaaagtgatgagatggacaaactgttctggtaa

SEQ ID NO: 21967 - protein, 444 aa, Oryza sativa subsp
MSLPDLFEKLLGDEIAATLDDDGEGIAATVARTAFHGMNALHAARSLHVYRYLLEVANMDVNKPDTTPGRKTPLERAIAGGDLPSVRYLIDHGADIHHEREGNITFLHSAAKKGFPATSNLHSVMMSSLTLNVEKNADNTPLKHVPPRVNCSFCVLFRTGRTEIVKLLLSRGAHVDGKSDHGTPLHFAAIKGYESTVKILLEHQADPNKVMPSSQATPLSAALFTTSLPCVKLLIQAGADVNATNNPLARAAGSGLTEAIKLLLKAGANPNCPDTHGRMPIELAAVYGTREDVEILFPLTNPIPTVADWSVDGVITYANLERKKLEDDDYVNTKMSDLKQKGNEAFDEQDYEKASVWYTQALEVDPCDATTLLKRCLCWLRMGEGKKAVKDATTCAKHHPKLSEAYHRLGEALMLEKDYEKACVALTHGIELDPESDEMDKLFW

SEQ ID NO: 21968 - DNA, 1320 bp, Oryza sativa subsp
  CDS (1)..(1320)
atggcgctgcctcaggccttcgagctcctcctcggcagagatcgagacgcctggccgcgcggggccgcgttcctcgtcgccgcccactacggggacgtccgcgaaatgaagaggattgcaaaggagctggacgaggacggcaaagggatcgaggcgactgtggctaacacaagcttcctcggcatgaacgcccttcacgcactgggttggctcggcaaggtgccggcctaccggtatctggtagaggaggtcaaaatggacgtcaacaaggccgacactgctcagggattcacacccctggagcatgccgtctaccatggtcgcctgcctgccaccagatacctccttgatcatggcgctgatgtgcatcaaattcgctctacgggaaatgtctctcttcttcactcagctgcagtaaaagggttctctgaagtagcaaaatttctgctttctagaggagttaatgttgatgcagaatcagaaatggggacaccactggctcttgctgctttcagaggatatgatagcactgtcaaggtccttttggagcacaatgctgatcccaacaaggttacaaacaaggcacttggtgcacctttagacttggcattaaccagctcttctgtgtcctgtgtgaagctgttggttcaggctggagctgaagtgaaagttgaggggccaaataatcatttggtaagagctgctgagaaaggcttaactgaagctattaaatgcatgttggaagctggtgcaaacccaaatgttcctgacaggctcgggagaatgccaatagagctggctgctgagtatggcacacgggaagatgttgagattctctttcctttcagctctgctattccaactgtggcaaattggagtgttgatggaataattaatcatgtacagtcagaaatcaagcaactagagatattatttactcaggacgataattttatcaaaaagagaaggtctgacatgaaacaacaaggggatgctgcatttaagaagcaggattatctaaatgcatcagtgttctacactcaggcactgaaggttgatccgtttgatggcacgttgttctcaaacaggagtctttgctggctccgcatgggtgatggagaaagggctttggatgatgccaatgcatgcgaaaagctacggccaaagtgggcaaagtcctactatcggcaaggagcagctctaatgtttctgaaggagtatgagagggctcatagggcacttggtcgagctttagagttggaccctgaaagtgaagagatcgagaatttgtattgggagtcgatggaactgtgcggttga

SEQ ID NO: 21969 - protein, 439 aa, Oryza sativa subsp
MALPQAFELLLGRDRDAWPRGAAFLVAAHYGDVREMKRIAKELDEDGKGIEATVANTSFLGMNALHALGWLGKVPAYRYLVEEVKMDVNKADTAQGFTPLEHAVYHGRLPATRYLLDHGADVHQIRSTGNVSLLHSAAVKGFSEVAKFLLSRGVNVDAESEMGTPLALAAFRGYDSTVKVLLEHNADPNKVTNKALGAPLDLALTSSSVSCVKLLVQAGAEVKVEGPNNHLVRAAEKGLTEAIKCMLEAGANPNVPDRLGRMPIELAAEYGTREDVEILFPFSSAIPTVANWSVDGIINHVQSEIKQLEILFTQDDNFIKKRRSDMKQQGDAAFKKQDYLNASVFYTQALKVDPFDGTLFSNRSLCWLRMGDGERALDDANACEKLRPKWAKSYYRQGAALMFLKEYERAHRALGRALELDPESEEIENLYWESMELCG

SEQ ID NO: 21970 - DNA, 1545 bp, Ostreococcus tauri
  CDS (1)..(1545)
atgggcgcaccgcgcgcgcgtcgtcgcgccgacgtctgcgcctcgacgtacgaatgcggaaaacccgcgagcgcgacacacggcgccgtcgcacgccgccgcggggcgatgacgtcgcgaacgaccgcgcgcgaggcgtcgcggggcgacgtcgaggcgctgaaggcgttcatagacgccgtgcgcgcgggaacgagcgcggatgttcgacgggcgagcgccgccttcgccgacggcgcctccatcgttcccacgatcgccgacggcgatggacgcaaggttttacacgccgcggcggagcgaggagacgtggacgtggtgaagacgctggtgagcgagtttgggtgcgaaccggacgcgcgagacgcggaggggttcaccgcgctcatgacggcgtgcgcgagcggacgggaagacgcggcgcgggcgttgatcgaactcggggcggacgcgagggcgaagacggcgagcggggcgtcgtgcgtgcatcatgtcgtcatgggcgcgcacgcccgagggatcggtggagataaggcgaagtgcgcggcggcgttgaagacgttgacgagcggacggtacgggttgacaatgtcagaggcggtggagcagcggtgttcgcaagtcggaacgccgttgctggtggcggccatgcgcggaagctcgggaatgattgaggcattgctcgaacacggcgcgaagtacgatgccaggttggacgcaggcgtggccgctgtggcgctcgcgtgcgcgagcggagacgtccgaagcgtggaggtgctcgtcgcagcgggagcggacgtgaacgcgggtccagaagggaacatgagcgccttacacatcgccgccgcgcatcccgcgacggagagctgcgcggaggtcatggtggccgcactcttgcgaggtggcgcgaacgccgacgctgaggactcgagcgggatgaaggccattcacgccgccgctgcgacgaggcgccaaggcgtcgtcgaagcgcttcttccggtgacgaaacccgacgattcgggcgagtggaatgctagtgctattatatcgcgcgtcgccgccaagctggcggcgatgcaacgcgatgagcagacgggtaaagactcaaatggctccggctcgggcaccaaggacggagctgacaagtttgtgacgcgcgacgcggtcgcggccgcaaaaaccaagcgagagggcaacgaggcgttcgtagctggtaagtacgaagatgcagtgcgtctatactccgaatcgctcgcgcaagacggatcctgtgcgaaaacttgggccaatcgcgcggcggcgcgtctcaagctgcgcaagtttgccgacgcgctagacgacgccagggcgtctcgaacgctcgatccgatgttcatcaaggcgtggtatcgcgagggtgaggcggcgctcgagctcgaagaatatgaagattccgcgctcgcattttttgagggattgcaagtagacggcgacaacgccgacttgaagcgaatgtttgaagtcgccatcgcgcgaggcagagccgccgctgcgaagacaaagtga

SEQ ID NO: 21971 - protein, 514 aa, Ostreococcus tauri
MGAPRARRRADVCASTYECGKPASATHGAVARRRGAMTSRTTAREASRGDVEALKAFIDAVRAGTSADVRRASAAFADGASIVPTIADGDGRKVLHAAAERGDVDVVKTLVSEFGCEPDARDAEGFTALMTACASGREDAARALIELGADARAKTASGASCVHHVVMGAHARGIGGDKAKCAAALKTLTSGRYGLTMSEAVEQRCSQVGTPLLVAAMRGSSGMIEALLEHGAKYDARLDAGVAAVALACASGDVRSVEVLVAAGADVNAGPEGNMSALHIAAAHPATESCAEVMVAALLRGGANADAEDSSGMKAIHAAAATRRQGVVEALLPVTKPDDSGEWNASAIISRVAAKLAAMQRDEQTGKDSNGSGSGTKDGADKFVTRDAVAAAKTKREGNEAFVAGKYEDAVRLYSESLAQDGSCAKTWANRAAARLKLRKFADALDDARASRTLDPMFIKAWYREGEAALELEEYEDSALAFFEGLQVDGDNADLKRMFEVAIARGRAAAAKTK

SEQ ID NO: 21972 - DNA, 1608 bp, Oryza sativa subsp
  CDS (1)..(1608)
atggcggcggaggtggacgcggcggcgcctggcggcggcgagggtgccggcggagtccgatcgcggtgcggccgcggggcgctgcacctggccgcggccaacggccgcacgcacgtctgccgcttcctgctcgagggcctcggcctccccgtcgacgcgctctccgcctcaggtgcgcccccctcccggccggcggccgccgctcgttcctcgcacgtctcgtctatgctcgcggagcgcctgatttcgtgcttcgtgttcgacgccgcggcgcacgcaggtgagacgccgctgctgctggcggccacgttcgggcacacctcaacggcggcctacctcctggaccgcggcgccgacccgtccacgccggaccccaacggcggcgacaccccgctccactgggccgcctacaacggggatcgcgagctggcgaagctgctgctgctcaggggagccgacgtgggcgcggcgaacccccgcggcacggcgctgcatgtcgccgctgcacgggggcacgccgccgtcgtcagcgtcttgctgaaccacggcgctgatcccaacaagattgccaatatcgtcttcacaccgttggtttcttcacttttggggggatcattggaatgcatgaagttgctcattcaggccggtgctaacgttaatggtgctggattcaatggagcaactcctctgctgttagcatgtagtcgtaccgggtccattggattcatcaagtgcttggtggaatctggggcagatccaaacattccagacgaacttgataggttaccaatagaaattgctgcaatccatgccgaacgggaagtcattgaggttctattgccattgacccaccaagtacctactcttctagattggagtgttggtgggatcatcagatatgtaaaatatcctgcttacaaggaatgggcaagaaatgcatcatgtaaaaggaaggatgaactcaaactacaaggcaactcctctttcaacaacgaggactacgatgctgcaatactgctatacagcatggcaatgaagttcgacaacaccgacgcaaagttatattcaaacaggagtgcttgctggttaaaccttggcataggcgatgaggcactctcagatgctcagatctgcagcaagatgcaaccggactgggcgaaaggctattaccgtcaaggaatggccttctctttgctacaggattatgccagtgcttcttatgtgcttcgcagggccttaaagttggatccacaaaatgccacagtcgccaaagcattgcgctgctatgagaataagatatatatgactgaaaatgtgttggaaaagagaggggatgtcttggaaactgcgtgtccaaggatggaagaatctggtctagcttttgttcatcagaagaaacgagattggagccccgcagctgcagggaggagtgttccagatgcaacatttcaaattgacaaaaagatattgccagtttgggttaagatctggggcgtgcctcgtagaccgttgttgggttgtggctggatgtatttgccacctgtaaacaatgtgccggaatcctctgcacccgaggagcagcagatcactgttctgggtagtgagtga

SEQ ID NO: 21973 - protein, 535 aa, Oryza sativa subsp
MAAEVDAAAPGGGEGAGGVRSRCGRGALHLAAANGRTHVCRFLLEGLGLPVDALSASGAPPSRPAAAARSSHVSSMLAERLISCFVFDAAAHAGETPLLLAATFGHTSTAAYLLDRGADPSTPDPNGGDTPLHWAAYNGDRELAKLLLLRGADVGAANPRGTALHVAAARGHAAVVSVLLNHGADPNKIANIVFTPLVSSLLGGSLECMKLLIQAGANVNGAGFNGATPLLLACSRTGSIGFIKCLVESGADPNIPDELDRLPIEIAAIHAEREVIEVLLPLTHQVPTLLDWSVGGIIRYVKYPAYKEWARNASCKRKDELKLQGNSSFNNEDYDAAILLYSMAMKFDNTDAKLYSNRSACWLNLGIGDEALSDAQICSKMQPDWAKGYYRQGMAFSLLQDYASASYVLRRALKLDPQNATVAKALRCYENKIYMTENVLEKRGDVLETACPRMEESGLAFVHQKKRDWSPAAAGRSVPDATFQIDKKILPVWVKIWGVPRRPLLGCGWMYLPPVNNVPESSAPEEQQITVLGSE

SEQ ID NO: 21974 - DNA, 1206 bp, Oryza sativa subsp
  CDS (1)..(1206)
atggcgccgcctctccccagcgatccccgggcgccgacgcggcggctcctccaggcagcggcggacggcgacctcgccgccttcaagaggatcgcgggcaagctggacggcgggaagggccgcctccgggagacggtggagggggtgagggaccggggcgccggggcgctgcacgtctcctccggccgcgggatgctcgcggtgtgctcgtacctggtcgaggagctccaggtggacgtcgacgccgccgacgattcaggcgatacacctctggcttatgcagttcgtggtcgttccatcgatggagagtgtgaaatagcaaaaatcttactctcaagaggtgctcatgttgactcattttcttctcatgggacaccactgcatctttctgctttctgccagcaggatggtgtgatgaagattttgttggaccaccatgcagattttaacaagctactcaaacctgtgtttacacctctcatcatggctctcaatgctggctcgctgaaatgtgttgtgcttctgcttaaggctggtgctgatgtgaagggtgttggtacggtaactcccttaataactgctgcaaacaacgggcaaactgacttctataagtgcttactggaggctggtgcagatcctaatgttccagatgaattcggccaccttccaatagaactcgctgcatataacaataggaggaaagatgttgagatcttacttcccgtaacttctcgtattccatctgtgtgtgactggagtgttgatggggatgaccctatgtacaaaatgagtccagctgatatgaagttagcagcaagtgaggcatacaggagacaagattacattactgcaatgaagctctatactaggctaacagatatctgcccgcatgatgcaaccctattctcaaataggagcctttgctggcttaagatgggtgcaggggtcaatgcattgcaggatgctcaaatttgcaggttgatgcattctgactggtcgaaggcatgctatctggaaggtgctgctcaaatgttactgaaggactttgaaaaggcatgtgatgcgttttttgatggactcaaattggatccagcaagtgatgagattgcagaagcattaaggaaatctttcgaatccttgaagatatctcatgctgccaaagtgggtattggattgccatcttctcagaagaaaatcataagataa

SEQ ID NO: 21975 - protein, 401 aa, Oryza sativa subsp
MAPPLPSDPRAPTRRLLQAAADGDLAAFKRIAGKLDGGKGRLRETVEGVRDRGAGALHVSSGRGMLAVCSYLVEELQVDVDAADDSGDTPLAYAVRGRSIDGECEIAKILLSRGAHVDSFSSHGTPLHLSAFCQQDGVMKILLDHHADFNKLLKPVFTPLIMALNAGSLKCVVLLLKAGADVKGVGTVTPLITAANNGQTDFYKCLLEAGADPNVPDEFGHLPIELAAYNNRRKDVEILLPVTSRIPSVCDWSVDGDDPMYKMSPADMKLAASEAYRRQDYITAMKLYTRLTDICPHDATLFSNRSLCWLKMGAGVNALQDAQICRLMHSDWSKACYLEGAAQMLLKDFEKACDAFFDGLKLDPASDEIAEALRKSFESLKISHAAKVGIGLPSSQKKIIR

SEQ ID NO: 21976 - DNA, 1705 bp, Nicotiana benthamiana
  CDS (58)..(1467)
acgagggttctacataaaccccagaagcttctgccgaagtccaaagttttctcagttatggctcctgatgctgctgatgctcttgcagttagagaaaaggttatgaagttactgaatgctgcttgttcagggaacattgcgcttttcaagaatttggcaaagcaactggatgatgggaaagggttggccgggacggtggcggatgtgaaggatgctaataaaagaggggcattaatttttgctgctagagaaggccagactgcgttctgcgagttcttggtggaagagttgaagcttgatgtcaatacaaaggatgaagaaggtgagactcctgttcttcatgctgctcgtcaaggacacactgctactgtccagtacctcatagaacaaggtgctgatcctgcaacacctagcacttcgggggcaacagctttgcatcatgctgcaggaatgggacatgttgaagtggttaaattcttactctcaaagggcgtagatgttgattcacaaagtggtgctggaacaccacttatatgggctgcaggtcttgcccaggaagatgctgttaaggttttgctggaacatcatgctaatgttaatgctcaaacagaagaagatatctgtcctttggtatcagctgttgcagccaattcattgccttgcgtggaactgttagtaaaggcaggagctgatgtcaatgttagggctggtgaagcaacccctttgctcattgctgctcataatggtagtgcagaaattgttaagtgcttactacaagctggagctgatcctaatgccactgatgaggatggtaacaagccaatacatgttgcagctacaaggggttgtcggccgtctgttgaagctttgtttgcagtcacaccgcggattcagtgtgttccagaatggagtgtggatggactcattaagtttatgcaatctgagcctatcctatctgaaactaggataaaccaggaaagaacagaagctgggagggaaccaagtaagagagaaagtattattccaaagaaagatttacccgaggtgactcctgaagcaaagaagaaagctgcagatgcgaaggtgaggggagatgaggcatttaagaggaaggattacgctacggctgtggatgcttatacacaggcaatcgattttgatccaactgatggcattctgttttcgaatagaagtctttgttggatccgcttggggcaagctgaacatgctttaagtgatgccaaggcttgcagacaacttagaccagattgggcaaaagcttgttttcgggaaggggcagctctacggctattgcagagatttgaagacgcagccaatgctttctatgagggcgtacagatcgaccctgaaaatatggagctcgcaactgctttcagggaagctgttgaggctggtagagaatttcatggcaagaataagaaaaattctcagtcatccaggagttagtggtgttaagaagtgcataatgacaggacttctgctggagcaagtagataattttatcggacatgcccttttttggtagtttcagaatgtatcatgtgatgttttgccctctagtgatttgttctgttgcatcttcagaaatttatactcacaatataatttcttttttcggttaagggtcaaatatatccatgtactattcaaaataagccatatttatcctccgtttgaattcttt

SEQ ID NO: 21977 - protein, 469 aa, Nicotiana benthamiana
MAPDAADALAVREKVMKLLNAACSGNIALFKNLAKQLDDGKGLAGTVADVKDANKRGALIFAAREGQTAFCEFLVEELKLDVNTKDEEGETPVLHAARQGHTATVQYLIEQGADPATPSTSGATALHHAAGMGHVEVVKFLLSKGVDVDSQSGAGTPLIWAAGLAQEDAVKVLLEHHANVNAQTEEDICPLVSAVAANSLPCVELLVKAGADVNVRAGEATPLLIAAHNGSAEIVKCLLQAGADPNATDEDGNKPIHVAATRGCRPSVEALFAVTPRIQCVPEWSVDGLIKFMQSEPILSETRINQERTEAGREPSKRESIIPKKDLPEVTPEAKKKAADAKVRGDEAFKRKDYATAVDAYTQAIDFDPTDGILFSNRSLCWIRLGQAEHALSDAKACRQLRPDWAKACFREGAALRLLQRFEDAANAFYEGVQIDPENMELATAFREAVEAGREFHGKNKKNSQSSRS

SEQ ID NO: 21978 - DNA, 1287 bp, Sorghum bicolor
  CDS (1)..(1287)
atggcgccgcccctcgtcggctgtaagctgcaccgtcatcgtctcctccaggcggcggcccatggtgacctccgccgcttcaagaggattgcgagcgcgcttgacggcgggaagggccggatcagggaggcggtggaggtcgtcgtcgacgggaacggcgccggagcactgcacgtcgccgccgcacacgggaggacacgggtgtgtgcttacctcgtagaggagcttcagatggatgtcaacgacactgccgtcctgtcaggtgatacacctctcacctatgcagttcgttccaaaaaaaatgtggatgctgtgaggtatcttctagatcatgatgctgatccaaataagcgtgtgcatcatgggtgtaccccactaagtatcgcagttggaaaaggaatatgtgtaatggtagaactcttgctctcaaaaggagctgatgttaattctttgtcttgcggcgggacgccactgcatgttgctgcaatggaaaatcatggtgctgttatgaagattttactagactacaatgcagactgcaacaaagaatttttcatcctatttactcctttgttcactgctctccgtgctcgctcactgaactgtgtcaagcatctgattaaggctggtgctgatgtgatgaagggcattcacaagtttacccccttaatactcgctgcatatgagggcttaacagatttttatgagtgtttattagaggctggtgctgatcctaacgttcctgatgattctggactcctgccaatagaaattgcagcctttcaaaatagacggaaagatgttgagatccttttccgcgtaacatctcgtattccgtctgtgcatgactggagtgttgacggtgtacttacatttttcaaatatgtcaaatcgtttctaacagatcaggatgaccctatgtacaaaatggatctggctgatttgaagttagaaggaagcaaggcatacaacgaaaaagattattctactgcagtaaaactctactctgtggctataatgaaagccgattctggtgatgcgacattgctttcgaataggagcctgtgctttattagaatgggtgaaggagacaaggctttggttgatgctgaagcttgcagggctctgcagccttattggccaaaagcctgcttcagacaaggggctgctcatatgctcttgaaggactatgaaaaggcatgtgatgcctttcttgatggcctgaagttggacccggctaatgatgaaatggagaatgcactaaggtggtcgatacatgatgattga

SEQ ID NO: 21979 - protein, 428 aa, Sorghum bicolor
MAPPLVGCKLHRHRLLQAAAHGDLRRFKRIASALDGGKGRIREAVEVVVDGNGAGALHVAAAHGRTRVCAYLVEELQMDVNDTAVLSGDTPLTYAVRSKKNVDAVRYLLDHDADPNKRVHHGCTPLSIAVGKGICVMVELLLSKGADVNSLSCGGTPLHVAAMENHGAVMKILLDYNADCNKEFFILFTPLFTALRARSLNCVKHLIKAGADVMKGIHKFTPLILAAYEGLTDFYECLLEAGADPNVPDDSGLLPIEIAAFQNRRKDVEILFRVTSRIPSVHDWSVDGVLTFFKYVKSFLTDQDDPMYKMDLADLKLEGSKAYNEKDYSTAVKLYSVAIMKADSGDATLLSNRSLCFIRMGEGDKALVDAEACRALQPYWPKACFRQGAAHMLLKDYEKACDAFLDGLKLDPANDEMENALRWSIHDD

SEQ ID NO: 21980 - DNA, 1317 bp, Sorghum bicolor
  CDS (1)..(1317)
atgaacaggcggccggcgtacatcggtacatgcaagggaaacgatcgatgcaatgcggcggcagatggcaacctccgcgtcttcaagcggatcgcgagcgcgctcgacggcgggaagggccggatccgggaggcggtggaggccgtcagggacgagctcggcgacggagtgctacacgtcgccgccgcgctcgggaggacacgggtgtgtgcctacctagtcgaggagcttcacatggacatcaacgctgctgccgtgtcaggtcaaacacctctcagttacgcagtttgttctgacgataatgtagaagttgtgaggtatcttcttgatcatgacgctgatccagataagcctgtgtatcatgggtgtaactcgctacatattgcagttgcaaaaggattatgtgtaatggtagaactcttgctctcaaaaggagctgatgttaattctatgtcctactgcgggacgccgctgaatgttgctgcaatggaaaatcagggtgctgttatgaagattttactggactacaatgctgattgcaacaaagaatattccaccatttttactcctttgtcaactgctctctgtgctcgctcgctgagctgtgtcaagcttctgattaaggctggtgctgatgtgacgacaaagggcactcataagttttcccccttaatattcgctgcaaatgagggcttaacagatttttatgagtgtttactggaggctggtgctgatcccaatgttcctgatgattctggactccttccaatagaaattgcagcgcttgaaaatagacggaaagatgttgagatccttttgcgcgtgacagctcgtatcccatctgtgcctgactggagtgttgatggggtacttgcatatgttaaatcaatacctacagatgaggatgaccctgtgtacaaaatgaacctggctgatttgaagttagaaggaaacaaagcattcaagaaaaaagattattatactgcagtaaaattctactccgtggctataatgaagaacgccaattctgttgatgcaacattgttttcgaataggagcctttgctggattaaaatgggtgaaggaaacaaggctttgattgatgctgaagcttgtaggcttttccagccttattgggcaaaagcctgctaccggcaaggtgctgctcatatgttcttgaaggactatgaaaaggcatgtggtgcatttcttgatggcctgaagttggacccggctaatgcagaattggagaatgaacttcgagagtctttgaactccctgacgatatctcgtggcacaacaaaggtatcggaataa

SEQ ID NO: 21981 - protein, 438 aa, Sorghum bicolor
MNRRPAYIGTCKGNDRCNAAADGNLRVFKRIASALDGGKGRIREAVEAVRDELGDGVLHVAAALGRTRVCAYLVEELHMDINAAAVSGQTPLSYAVCSDDNVEVVRYLLDHDADPDKPVYHGCNSLHIAVAKGLCVMVELLLSKGADVNSMSYCGTPLNVAAMENQGAVMKILLDYNADCNKEYSTIFTPLSTALCARSLSCVKLLIKAGADVTTKGTHKFSPLIFAANEGLTDFYECLLEAGADPNVPDDSGLLPIEIAALENRRKDVEILLRVTARIPSVPDWSVDGVLAYVKSIPTDEDDPVYKMNLADLKLEGNKAFKKKDYYTAVKFYSVAIMKNANSVDATLFSNRSLCWIKMGEGNKALIDAEACRLFQPYWAKACYRQGAAHMFLKDYEKACGAFLDGLKLDPANAELENELRESLNSLTISRGTTKVSE

SEQ ID NO: 21982 - DNA, 1296 bp, Oryza sativa subsp
  CDS (1)..(1296)
atggcggaggagctccccttccccgctaacatcgaagtgatgcgccacacgccgcggttcaagctcatgcaggcggcattccacggcgacctccgcggcttgaagcggcaggcgaagattctggatatggggaggggccgcctgaggaaggccgtagaggatgtgagggtggaaggcgtgccgggcgaggaaggtacaggggtgctgcatatggctgcctcccatggccacatggagatgtgcaagtacctggtcgaaacgcttcaggtggatgtggatgatgcggatgacaaagaaaattttaaaatagactctcttgtcagctgtttttttaacaaaaggttttggccaaatgcccaaacccataagggtggtttggcaaggcaatccacaccaggtagaacatctctacttaaggcggtacattctgggcatcggggaattgccaagtatcttcttaatcatgacgccaatccagacctagccatgtgctgtgggcttacccctctacattctgccgctggattaggtgattgtgagtccgtaaaactattgcttgcaaaaggagcttatgttgacccaatgtctacttttgggacaccacttcatcttgctgctaaagaagggcaggatggcaccatgaagatattgttggacaacaatgcagattgcaacaagatggtaaacggtataacacctctcctccttgctatgaaagctgcatcagcaaaatgtatggagctgctggttgaggctggagctgatgctacttactctgatgtcatctggaattatatgtcaactacttttatggatgatgaagatagtggttcatctgtgttctcggattctgaaccagaagagattgatgccaatcaccatattcccgtcaatgacaaacctgtgaatcgaaggaaaattgcagagtttaagtcgttagggcttgaggcagttgagaagaaggattatctttctgcagcaggattctacagtgaggccatggaccttgaccctgatgatgcaaccctgctgtccaataggagcctttgctggctttatctgggtgaaggaggcaaggctttggtggatgctcataaatgcagaaaaatgcggcctgactggccaaaggcctgctaccgtcagggtgcagctttaatgttactgaaggactatgtgagcgcgtgtgaagcactttttgatggattcaagttggatcctgaggacgttgagattgaaaatgcattacgggaagctctagagttcttgaaggtgtctcaaagcacttcggctaactga

SEQ ID NO: 21983 - protein, 431 aa, Oryza sativa subsp
MAEELPFPANIEVMRHTPRFKLMQAAFHGDLRGLKRQAKILDMGRGRLRKAVEDVRVEGVPGEEGTGVLHMAASHGHMEMCKYLVETLQVDVDDADDKENFKIDSLVSCFFNKRFWPNAQTHKGGLARQSTPGRTSLLKAVHSGHRGIAKYLLNHDANPDLAMCCGLTPLHSAAGLGDCESVKLLLAKGAYVDPMSTFGTPLHLAAKEGQDGTMKILLDNNADCNKMVNGITPLLLAMKAASAKCMELLVEAGADATYSDVIWNYMSTTFMDDEDSGSSVFSDSEPEEIDANHHIPVNDKPVNRRKIAEFKSLGLEAVEKKDYLSAAGFYSEAMDLDPDDATLLSNRSLCWLYLGEGGKALVDAHKCRKMRPDWPKACYRQGAALMLLKDYVSACEALFDGFKLDPEDVEIENALREALEFLKVSQSTSAN

SEQ ID NO: 21984 - DNA, 1736 bp, Solanum tuberosum
  CDS (22)..(1425)
tagtactatcatctctcagttatggctcctgatgctactgatgctcttgcagttagagaaaaagttaataagtttctgaaggcggcttgttcaggggatattgagcttttcaagaagttggcaaagcaactggatgatggaaaagggttggctggtacagtggcggatgtgaaggatggtaataaaagaggggcattgatttttgccgcaagagaaagcaagattgagttgtgcaagtatttggtggaggaattgaaggttgatgtcaatgaaaaagatgatgaaggtgagactcctcttcttcatgctgctagggaaggacacactgctactgtccagtacctcatagaacagggtgcagatcctgcaatacccagcgcctcgggggcaacagctttgcatcatgctgcaggaaatggacatgttgaattggttaaattgttactatcaaagggtgtagatgttgatttacaaagtgaggctggaacaccgcttatgtgggctgcaggtttcggccaggaaaaggttgtcaaggttttgctggaacaccatgctaatgttcatgctcaaacaaaagatgaaaataatgtctgtcctttggtatcagctgtagcaactgattcattgccttgcgtggagctgttagcgaaggcaggggctgatgtcaatgttaggactggtgatgcaactcctttgctcattgctgctcataatggtagtgcaggagtcattaactgcttactacaagctggagctgatcctaatgcggctgaggaggatggtaccaagccaatacaagttgcagctgcaagcggcagtagggaagctgttgaagctttattgcccgtcacagaacggattcagagtgttccagaatggagtgtggatggagtgattgagtttgtgcaatctgaatataagagagaacaggaaagagcagaagctgggaggaaagcaaacaagtcaagagagcctattattccaaaaagagatttacccgaggtgagtcctgaagcaaagaagagagctgcagatgcaaaggcgaggggagatgaggcatttaagaggaatgattttgctacagctatagatgcttatacacaggcaatcgattttgatccaactgatggcactctgttttccaatagaagtctttgttggctccgcctgggtcaagctgaacgtgccttaagtgatgccagggcctgcagagaacttagaccagattgggcaaaaggttgttatcgggaaggtgcagctctacgtctattgcagaggtttgaagaggcagccaatgctttctatgagggtgtacagatcaaccctatcaatatggagctcgtaactgctttcagggaagctgttgaggctggtagaaaagttcatgccacaaacaagtttaattcgccgtcatccttgagttagaaagcgcataatgagagagaacaaatggtcgcttcttttatctgggcgatagttttttcactggagtaagttgattatggggcatgccttttttgagtagttccaaatggattatttaatcttttgttctgttgcatcttcagcaatttatagaccaacaacatgatataaatacttttaagctttcttatgtgttaatcctgcaaatctcaagttttcacttgtgagtaatttcgaagtcattatttttattctgtttagggcttgtttggaaagccacctggtaattggaaaaaaaaaaaaaaaaaaaa

SEQ ID NO: 21985 - protein, 467 aa, Solanum tuberosum
MAPDATDALAVREKVNKFLKAACSGDIELFKKLAKQLDDGKGLAGTVADVKDGNKRGALIFAARESKIELCKYLVEELKVDVNEKDDEGETPLLHAAREGHTATVQYLIEQGADPAIPSASGATALHHAAGNGHVELVKLLLSKGVDVDLQSEAGTPLMWAAGFGQEKVVKVLLEHHANVHAQTKDENNVCPLVSAVATDSLPCVELLAKAGADVNVRTGDATPLLIAAHNGSAGVINCLLQAGADPNAAEEDGTKPIQVAAASGSREAVEALLPVTERIQSVPEWSVDGVIEFVQSEYKREQERAEAGRKANKSREPIIPKRDLPEVSPEAKKRAADAKARGDEAFKRNDFATAIDAYTQAIDFDPTDGTLFSNRSLCWLRLGQAERALSDARACRELRPDWAKGCYREGAALRLLQRFEEAANAFYEGVQINPINMELVTAFREAVEAGRKVHATNKFNSPSSLS

SEQ ID NO: 21986 - DNA, 1458 bp, Oryza sativa
  CDS (1)..(1458)
atggagaagaaggataagggaaggcaccgcggccgcgacggcggaggcggaggcggcggcggcggtggtggtggtggtggtggtgtggatcccgccggtggagggagcggaggaggagggccgggaatggggcggcgcgggagcgatgcgcgtggccagcaggcggaggcggcggccgcggcaatcagcggcatcgccacccgccttggcttcgggtgcaccatcaatgtcggcggcgggatgccaccgcagatggagttcctgatggcgtgtacggacggcgacgtcgcgcgcctcaaggaggtggttgatagcatggatgaggatgatcggcaatcgctcacctctgtgaggatggaggggtatgagccactgtttgaggcagcaagctcgggaaaaattgatctctgcaagtacttggtggaggagcttgggttcgatgtcaatgccgaagctaatcatgattccggtatgacacctttgttttgcgctgtgttggatggacaagagattactgtgaagtattttcttgacaaaggtgctgatccgaataagaaagatgcagcaggctttgctcctcttcatgaagctgcaaaaaaagggcacgttggaatagcacgactgttgttatctaaaggagctagtgttgatgtatcttcttctgaagggacacctcttcatgttgctgcctctaatggaaaatctagcactgtgcagattttattagagcaccgcgcaaatattcaacgatcacaagttgatgcaaaaagctttcgaaacagggtccaagtgttctatgtacctgctttgccaaacgtgatattaccagattgttatacaccattgaccgcagttctttctgccactcctgaaatagtgaatgaatctgagtgtttgaagtgcatgaaactccttgtgaaggctggtgctatttataatcttgcaactcctgatactccattgaagatagcaactagaaatggcttaactgagtgtgttgcatacttgctggagatcaccacagttaaactaagtgaacatgacaaaggaagtgatggagacagaaaatctaagctgaaattacatggtggaaaagcatttgaggagggggactatgctggtgcaatcatattttacaccgaggcaatgaaacttgatcctgcagatgccacactgtattcaaacaggagcctttgccatctgagaagtggtgcagcgcaggaggctttgctggatgctaatgattgcataaaactcaagccagagtggactaaaggtcactatcgcaaaggatgtgcccacatggcactcaaggaatacgaagaagcttgtactgcattcatggctggaacaaagctcaatcctttaaacgatgaaatgcaggatgcattttgggaggcagctaaaggaatgatgtatgaacatatggctggaaagcgcgtcagctcggttgattag

SEQ ID NO: 21987 - protein, 485 aa, Oryza sativa
MEKKDKGRHRGRDGGGGGGGGGGGGGGGVDPAGGGSGGGGPGMGRRGSDARGQQAEAAAAAISGIATRLGFGCTINVGGGMPPQMEFLMACTDGDVARLKEVVDSMDEDDRQSLTSVRMEGYEPLFEAASSGKIDLCKYLVEELGFDVNAEANHDSGMTPLFCAVLDGQEITVKYFLDKGADPNKKDAAGFAPLHEAAKKGHVGIARLLLSKGASVDVSSSEGTPLHVAASNGKSSTVQILLEHRANIQRSQVDAKSFRNRVQVFYVPALPNVILPDCYTPLTAVLSATPEIVNESECLKCMKLLVKAGAIYNLATPDTPLKIATRNGLTECVAYLLEITTVKLSEHDKGSDGDRKSKLKLHGGKAFEEGDYAGAIIFYTEAMKLDPADATLYSNRSLCHLRSGAAQEALLDANDCIKLKPEWTKGHYRKGCAHMALKEYEEACTAFMAGTKLNPLNDEMQDAFWEAAKGMMYEHMAGKRVSSVD

SEQ ID NO: 21988 - DNA, 1326 bp, Oryza sativa subsp
  CDS (1)..(1326)
atgggcgaccccaacccgagcttcggcttccgcgtgggcctcgccttcctccgcgcgctcccgtacctcaacgacggcggcccgcagagccagttcttcgaggcggccacccacggcgacgtcagccgcctcaggggtgagcatggcggctggtcacgcttagcggcggccggtccggtgctagccttctcctgggcttgtgtgttggcgatgtcgaacttcgcaccgtctcgtgcgagttgttcaaaaaaaaaagagttggcgagcggcgaggacgcggaggggaaggcgaggcttgccgacgacatcagcttctcgggcatcgggccgctccaggccgcagcgcgattgggggaagtggacgcgtgcaggtgcatggtggaggagctcggcttcgacatcaatgccggcagagagcttgggcatgatgaagtagaacgactgttgctatctagaggagctagcgttgatatagcttattttcatgggacaccactacatattgctgctgcatatgggaaggccagcgtcatgaaagttttattggagcacgatgcagatgcaggtgctgacattaacttcagtgatcgtgacactccgttggtggtagcaattactaatggcttgactaactgcattaaatacttgctaaaggctggtgcagaccctaatatcccaacttgtcattgtggtgccttgccaatacaacttgctgcaagctatggaagaagaaaggatgtggaattactgtttcccttaacttcccccattcgagctgtgtcaaactggactgttgaaggaattcttgcccatgccaaatcaaagcatgccagatcaaaatgttcaaagcccaaggacaagcaggatgatcataataaaaaggctcagttcaaactacgtggtgagaaagctattaaggacaagcatgatgagcaggataaaaaggctcagctcaaactacagggtgagaaagctgttaagagaaaggactaccatggcgcctcaattttctacactgaggcaattgagctggatcctactgatgcaacattgtattccaataggagcctttgccatcttcaaatgaccgaagctttgtttgatgctgattattgcataaaatcgcggcctgaatggttaaaaggttactacaggaaaggggctgctctcatgttgctgaaggagtatgaaaaggcatgtgacgcattcttggctggactgaagttggatcctttgaatgctgagatggagaaagtattccgggaggcggtcgaggcgatgaagaagcatcatgttactacaaaaagcttcaagccatcagattag

SEQ ID NO: 21989 - protein, 441 aa, Oryza sativa subsp
MGDPNPSFGFRVGLAFLRALPYLNDGGPQSQFFEAATHGDVSRLRGEHGGWSRLAAAGPVLAFSWACVLAMSNFAPSRASCSKKKELASGEDAEGKARLADDISFSGIGPLQAAARLGEVDACRCMVEELGFDINAGRELGHDEVERLLLSRGASVDIAYFHGTPLHIAAAYGKASVMKVLLEHDADAGADINFSDRDTPLVVAITNGLTNCIKYLLKAGADPNIPTCHCGALPIQLAASYGRRKDVELLFPLTSPIRAVSNWTVEGILAHAKSKHARSKCSKPKDKQDDHNKKAQFKLRGEKAIKDKHDEQDKKAQLKLQGEKAVKRKDYHGASIFYTEAIELDPTDATLYSNRSLCHLQMTEALFDADYCIKSRPEWLKGYYRKGAALMLLKEYEKACDAFLAGLKLDPLNAEMEKVFREAVEAMKKHHVTTKSFKPSD

SEQ ID NO: 21990 - DNA, 1329 bp, Oryza sativa
  CDS (1)..(1329)
atggcgccgcctctccccagcgatccccgggcgccgacgcggcggctcctccaggcagcggcggacggcgacctcgccgccttcaagaggatcgcgggcaagctggacggcgggaagggccgcctccgggagacggtggagggggtgagggaccggggcgccggggcgctgcacgtctcctccggccgcgggatgctcgcggtgtgctcgtacctggtcgaggagctccaggtggacgtcgacgccgccgacgattcaggcgatacacctctggcttatgcagttcgtggtcgttccatcgatggtgtgaagtatcttcttgaccatggttccaatccagataagcctgataataaaggatatacacctctccatgtggcagctattaaaggagagtgtgaaatagcaaaaatcttactctcaagaggtgctcatgttgactcattttcttctcatgggacaccactgcatctttctgctttctgccagcaggatggtgtgatgaagattttgttggaccaccatgcagattttaacaagctactcaaacctgtgtttacacctctcatcatggctctcaatgctggctcgctgaaatgtgttgtgcttctgcttaaggctggtgctgatgtgaagggtgttggtacggtaactcccttaataactgctgcaaacaacgggcaaactgacttctataagtgcttactggaggctggtgcagatcctaatgttccagatgaattcggccaccttccaatagaactcgctgcatataacaataggaggaaagatgttgagatcttacttcccgtaacttctcgtattccatctgtgtgtgactggagtgttgatggggtaattagttatgtgaaatcgtgtccatcggtggaggatgaccctatgtacaaaatgagtccagctgatatgaagttagcagcaagtgaggcatacaggagacaagattacattactgcaatgaagctctatactaggctaacagatatctgcccgcatgatgcaaccctattctcaaataggagcctttgctggcttaagatgggtgcaggggtcaatgcattgcaggatgctcaaatttgcaggttgatgcattctgactggtcgaaggcatgctatctggaaggtgctgctcaaatgttactgaaggactttgaaaaggcatgtgatgcgttttttgatggactcaaattggatccagcaagtgatgagattgcagaagcattaaggaaatctttcgaatccttgaagatatctcatgctgccaaagtgggtattggattgccatcttctcagaagaaaatcataagataa

SEQ ID NO: 21991 - protein, 442 aa, Oryza sativa
MAPPLPSDPRAPTRRLLQAAADGDLAAFKRIAGKLDGGKGRLRETVEGVRDRGAGALHVSSGRGMLAVCSYLVEELQVDVDAADDSGDTPLAYAVRGRSIDGVKYLLDHGSNPDKPDNKGYTPLHVAAIKGECEIAKILLSRGAHVDSFSSHGTPLHLSAFCQQDGVMKILLDHHADFNKLLKPVFTPLIMALNAGSLKCVVLLLKAGADVKGVGTVTPLITAANNGQTDFYKCLLEAGADPNVPDEFGHLPIELAAYNNRRKDVEILLPVTSRIPSVCDWSVDGVISYVKSCPSVEDDPMYKMSPADMKLAASEAYRRQDYITAMKLYTRLTDICPHDATLFSNRSLCWLKMGAGVNALQDAQICRLMHSDWSKACYLEGAAQMLLKDFEKACDAFFDGLKLDPASDEIAEALRKSFESLKISHAAKVGIGLPSSQKKIIR

SEQ ID NO: 21992 - DNA, 1377 bp, Oryza sativa
  CDS (1)..(1377)
atggccgacgccaccgccgccctctcagctcggagcaaggtgcaagctttcctcgaagcggctcgtgccggtgatctcgactccctcaagaagctcgctgcggcgctcgacgaggagggcaagggcgtcgccgccgtcgctgctgccgtcaaggacgccaacaagcgcaccgccctgcacttcgccgcccgcgagggccgcacccacgtctgtcacttcctcatctccgacctcgccctccccgtcgaccccaaggacgacgatggtgaaactccactcatccatgctacgcgccaagcccatctccaaactgtaacctatctgcttcaccatggagcagatccttccgttgcttcttccctcggagccacgccattgcaccatgctgccggcatagggaacctggaccttatgaaactatttctctccaagggggttgatgttgaatcagaaagcgatgccggcacacccctcatatgggctgctggtcatggacagcaagaggcagtcaaacttttgcttcaacacgatgctaagccaaatactgaaaacgatgatggtattacgcctttgttgtctgctgttgcagcgggttccctcccatgcttggatattctaattcaggcaggtgcacatccgaatatcagagctggtggagcaaccccattacatattgctgcagatggtggaaacatggaaataataaattgtttacttaaagctggaagtgaccccaatgcatgtgatgatgatggactaaagccaatacaggttgctgctttgaggaataaccgtgaagttgtggaacttcttttacctttgacatcaccaattccaggtgtttcgagttggagtattgatggaattatagaatacactaaatcagtcgaggaaaaggtaaaggaagctacaactcagaaagcagacagattacaagtaccacaacttgttgaggtgtcatctgaggcaaaagagagatcattggaggcaaaatcgagaggtgatgatgccttcagaaataaagactacctagtagcagtagatgcctacacacaggctattgagttaaatccaaacgacgccacgttgcattcaaacagaagcctttgctggctacgggcagggcaagctgaacgtgctctggaggatgcaagagcatgtcgagcgctgaggccagactgggcgaaagcttgctacagggaaggcgcggcactgcgcctgctgcagaggttcgaagaagccgcgaatgccttctatgagggggtgcagcttgagccagagaacggcgagcttgtgagcgcgttcagggaggcggttgaagccgggaggaaattccatgggacggacaagaagcaaaaggcagatgcatcaacgtga

SEQ ID NO: 21993 - protein, 458 aa, Oryza sativa
MADATAALSARSKVQAFLEAARAGDLDSLKKLAAALDEEGKGVAAVAAAVKDANKRTALHFAAREGRTHVCHFLISDLALPVDPKDDDGETPLIHATRQAHLQTVTYLLHHGADPSVASSLGATPLHHAAGIGNLDLMKLFLSKGVDVESESDAGTPLIWAAGHGQQEAVKLLLQHDAKPNTENDDGITPLLSAVAAGSLPCLDILIQAGAHPNIRAGGATPLHIAADGGNMEIINCLLKAGSDPNACDDDGLKPIQVAALRNNREVVELLLPLTSPIPGVSSWSIDGIIEYTKSVEEKVKEATTQKADRLQVPQLVEVSSEAKERSLEAKSRGDDAFRNKDYLVAVDAYTQAIELNPNDATLHSNRSLCWLRAGQAERALEDARACRALRPDWAKACYREGAALRLLQRFEEAANAFYEGVQLEPENGELVSAFREAVEAGRKFHGTDKKQKADAST

SEQ ID NO: 21994 - DNA, 1317 bp, Oryza sativa
  CDS (1)..(1317)
atggccgacgccaccgccgccctctcagctcggagcaaggtgcaagctttcctcgaagcggctcgtgccggtgatctcgactccctcaagaagctcgctgcggcgctcgacgaggagggcaagggcgtcgccgccgtcgctgctgccgtcaaggacgccaacaagcgcaccgccctgcacttcgccgcccgcgagggccgcacccacgtctgtcacttcctcatctccgacctcgccctccccgtcgaccccaaggacgacgatggtgaaactccactcatccatgctacgcgccaagcccatctccaaactgtaacctatctgcttcaccatggagcagatccttccgttgcttcttccctcggagccacgccattgcaccatgctgccggcatagggaacctggaccttatgaaactatttctctccaagggggttgatgttgaatcagaaagcgatgccggcacacccctcatatgggctgctggtcatggacagcaagaggcagtcaaacttttgcttcaacacgatgctaagccaaatactgaaaacgatgatggtattacgcctttgttgtctgctgttgcagcgggttccctcccatgcttggatattctaattcaggcaggtgcacatccgaatatcagagctggtggagcaaccccattacatattgctgcagatggtggaaacatggaaataataaattgtttacttaaagctggaagtgaccccaatgcatgtgatgatgatggactaaagccaatacaggttgctgctttgaggaataaccgtgaagttgtggaacttcttttacctttgacatcaccaattccaggtgtttcgagttggagtattgatggaattatagaatacactaaatcagtcgaggaaaaggcacaggtaaaggaagctacaactcagaaagcagacagattacaagtaccacaacttgttgaggtgtcatctgaggcaaaagagagatcattggaggcaaaatcgagaggtgatgatgccttcagaaataaagactacctagtagcagtagatgcctacacacaggctattgagttaaatccaaacgacgccacgttgcattcaaacagaagcctttgctggctacgggcagggcaagctgaacgtgctctggaggatgcaagagcatgtcgagcgctgaggccagactgggcgaaagcttgctacagggaaggcgcggcactgcgcctgctgcagaggttcgaagaagccgcgaatgccttctatgagggggtgcagcttgagccagagaacggcgagcttgtgagcgcgttcaggtag

SEQ ID NO: 21995 - protein, 438 aa, Oryza sativa
MADATAALSARSKVQAFLEAARAGDLDSLKKLAAALDEEGKGVAAVAAAVKDANKRTALHFAAREGRTHVCHFLISDLALPVDPKDDDGETPLIHATRQAHLQTVTYLLHHGADPSVASSLGATPLHHAAGIGNLDLMKLFLSKGVDVESESDAGTPLIWAAGHGQQEAVKLLLQHDAKPNTENDDGITPLLSAVAAGSLPCLDILIQAGAHPNIRAGGATPLHIAADGGNMEIINCLLKAGSDPNACDDDGLKPIQVAALRNNREVVELLLPLTSPIPGVSSWSIDGIIEYTKSVEEKAQVKEATTQKADRLQVPQLVEVSSEAKERSLEAKSRGDDAFRNKDYLVAVDAYTQAIELNPNDATLHSNRSLCWLRAGQAERALEDARACRALRPDWAKACYREGAALRLLQRFEEAANAFYEGVQLEPENGELVSAFR

SEQ ID NO: 21996 - DNA, 1194 bp, Oryza sativa
  CDS (1)..(1194)
atggcggaggagctccccttccccgctaacatcgaagtgatgcgccacacgccgcggttcaagctcatgcaggcggcattccacggcgacctccgcggcttgaagcggcaggcgaagattctggatatggggaggggccgcctgaggaaggccgtagaggatgtgagggtggaaggcgtgccgggcgaggaaggtacaggggtgctgcatatggctgcctcccatggccacatggagatgtgcaagtacctggtcgaaacgcttcaggtggatgtggatgatgcggatgacaaaggtagaacatctctacttaaggcggtacattctgggcatcggggaattgccaagtatcttcttaatcatgacgccaatccagacctagccatgtgctgtgggcttacccctctacattctgccgctggattaggtgattgtgagtccgtaaaactattgcttgcaaaaggagcttatgttgacccaatgtctacttttgggacaccacttcatcttgctgctaaagaagggcaggatggcaccatgaagatattgttggacaacaatgcagattgcaacaagatggtaaacggtataacacctctcctccttgctatgaaagctgcatcagcaaaatgtatggagctgctggttgaggctggagctgatgctacttactctgatgtcatctggaattatatgtcaactacttttatggatgatgaagatagtggttcatctgtgttctcggattctgaaccagaagagattgatgccaatcaccatattcccgtcaatgacaaacctgtgaatcgaaggaaaattgcagagtttaagtcgttagggcttgaggcagttgagaagaaggattatctttctgcagcaggattctacagtgaggccatggaccttgaccctgatgatgcaaccctgctgtccaataggagcctttgctggctttatctgggtgaaggaggcaaggctttggtggatgctcataaatgcagaaaaatgcggcctgactggccaaaggcctgctaccgtcagggtgcagctttaatgttactgaaggactatgtgagcgcgtgtgaagcactttttgatggattcaagttggatcctgaggacgttgagattgaaaatgcattacgggaagctctagagttcttgaaggtgtctcaaagcacttcggctaactga

SEQ ID NO: 21997 - protein, 397 aa, Oryza sativa
MAEELPFPANIEVMRHTPRFKLMQAAFHGDLRGLKRQAKILDMGRGRLRKAVEDVRVEGVPGEEGTGVLHMAASHGHMEMCKYLVETLQVDVDDADDKGRTSLLKAVHSGHRGIAKYLLNHDANPDLAMCCGLTPLHSAAGLGDCESVKLLLAKGAYVDPMSTFGTPLHLAAKEGQDGTMKILLDNNADCNKMVNGITPLLLAMKAASAKCMELLVEAGADATYSDVIWNYMSTTFMDDEDSGSSVFSDSEPEEIDANHHIPVNDKPVNRRKIAEFKSLGLEAVEKKDYLSAAGFYSEAMDLDPDDATLLSNRSLCWLYLGEGGKALVDAHKCRKMRPDWPKACYRQGAALMLLKDYVSACEALFDGFKLDPEDVEIENALREALEFLKVSQSTSAN

SEQ ID NO: 21998 - DNA, 1254 bp, Zea mays
  CDS (1)..(1254)
atgcctgcgctctccgacgtcgcgcttcaggctgccatcgccggcaacctccgcctcctgaagctggtggcgagcaagatgaatctgcgcgaagcgaaggacgccgctgggcggaacgcgctccacctggccgcggagatgggccgtcttgaggtttgcaggttcctggtggaggaatcgggcttcgaggtgaacttcgcctgcgccgaaggcgggtcgccggtccactgcgccgcggccgggggcagcgagagcgtcttgggctaccttctcgaccacggtggcgaccctgtgatgccggactccatgggctccactccactgcatgatgcggcagaggaagggcattgtgcggctgtgaggatgctgctgtccaagggtgtcgatgtggatccacacggctgtcgtgggacgccgctgcacttggcctgctccaatgaccgggatcaggttgttaggatcctgctggaacatggcgcagatcccaacaaagttgtcggtcatgtcctcccaccactcatgatggcatactgtggcggttctttgagatgcatgaagctactgattgaggctggtgcggatgtgaacttgattgctccttctggagtaattttggctcaggcagtttgtgatgggtcaactgagattgtcaagtttttgctagaggttggagctgatcctaacattcctgatgaggatgggaaaatcccgatcatgtacccagcatttaatgggcatcgggagcttgttgaaattctatttcctaagacaagaccagtttcatctttgccagactggagcgttgatgggattattagaagtatgaaagatctgtttttcaagcctcaggatgcagctgtggtggaaaaaaagatagctgatgcgaagtcacaagggaaggaagctttcgcaaggggagagtaccctgcagcagtatacttctataccatggtactagagaacgaccttgatgctactgcgtttgccaaccggagcctgtgctggttgcggctgagggagggggccaaggctctgttagatgctcaacagtgcaaaatgatacggcctcgttggtcgaaggcatggtatcgcgagggcgcggctctcagcttgctgaaggactaccaaggggcagtcaacgcgttcacggaagcattgaaactggatcctgcaagtttagagatcaagaaagccttaagggaggccaccgattccctggcgaacgttggccgctccggagaacagaacccatga

SEQ ID NO: 21999 - protein, 417 aa, Zea mays
MPALSDVALQAAIAGNLRLLKLVASKMNLREAKDAAGRNALHLAAEMGRLEVCRFLVEESGFEVNFACAEGGSPVHCAAAGGSESVLGYLLDHGGDPVMPDSMGSTPLHDAAEEGHCAAVRMLLSKGVDVDPHGCRGTPLHLACSNDRDQVVRILLEHGADPNKVVGHVLPPLMMAYCGGSLRCMKLLIEAGADVNLIAPSGVILAQAVCDGSTEIVKFLLEVGADPNIPDEDGKIPIMYPAFNGHRELVEILFPKTRPVSSLPDWSVDGIIRSMKDLFFKPQDAAVVEKKIADAKSQGKEAFARGEYPAAVYFYTMVLENDLDATAFANRSLCWLRLREGAKALLDAQQCKMIRPRWSKAWYREGAALSLLKDYQGAVNAFTEALKLDPASLEIKKALREATDSLANVGRSGEQNP

SEQ ID NO: 22000 - DNA, 1374 bp, Zea mays
  CDS (1)..(1374)
atggttccaccgccgcgaccgcccggtggcggcatagacaagtacgacttctactactggctcgggtgccagatcctcgccctaggcaattcgattaagctcaagctcgtcgaggcgatccaggacggggatgtccgccgactcaaggggctggtcaatagcatgaaaaagaagaccagagagaagctttccgacatgaatgttgatcgcatggggttgctacaattggccgtgcacctaggaaaactggaggtatgcaggtactttgtggaggacctcgggtttgacgtggagcgtggtggcagctgtgatggtgtgacacctttgggtggtgcatcattgtttggagaagtggcttgtgccaggtttcttcttgaccatggagctgatccaaataagatggacagccattgttatgttgccctgcacaatgctgcaaaaaatgggaatggagaaataatacgactgttagtatccagaggagccagggttgatatagctgctcctcatgggacaccgctacatattgctgcttcctatgggaacactggtgctgtgaagatcttactggagcaccatgcagacccaaacagcatttcagaagtgtcaggcagccctctagtttcagctcttcaacctaacaaactagtgaatgaatctgattcgctggaatccgtgaagctacttatcaaggctggtgctgatgtgaattctgctagtccaaacactcccttggtggtagcaactgtgaatggcttgactgattgtattaagtatttgctggaggcaggtgcagacgctaacattccaagtaatcagtccggccagaggccaatccaaattgcttcaagattgggaagaagagatcatgtggagattcttttccctttcacttctccgctccgaacaatgtcagactggagtgttgaaggaattattgctcatgaaaaatcacggtcctcactgtccaaggtcaatacctgtaacaatctcaatgatagaaaggtcgagctgagattacttggagaaaaagcagtcaagaggaaggactacaatggtgcgttggagctctactctgaggcgattgggctagactccttcgatgcaaccttgtattcaaataggagcctttgctatctaaaaattggtgaagcccagaaggctttgttagatgctgagacttgcataaacaaccgacctgattgggtcaaaggttactaccggaaaggagctgctcttatgttgctcaaggagcacaagagagcgttggatgcgtttttggatggactgaaagtggatcctaccagtgctgaaatggagaaagcaatgcgggcggcgcttgaggccgtgaaaatggagagtgttgctgtttaa

SEQ ID NO: 22001 - protein, 457 aa, Zea mays
MVPPPRPPGGGIDKYDFYYWLGCQILALGNSIKLKLVEAIQDGDVRRLKGLVNSMKKKTREKLSDMNVDRMGLLQLAVHLGKLEVCRYFVEDLGFDVERGGSCDGVTPLGGASLFGEVACARFLLDHGADPNKMDSHCYVALHNAAKNGNGEIIRLLVSRGARVDIAAPHGTPLHIAASYGNTGAVKILLEHHADPNSISEVSGSPLVSALQPNKLVNESDSLESVKLLIKAGADVNSASPNTPLVVATVNGLTDCIKYLLEAGADANIPSNQSGQRPIQIASRLGRRDHVEILFPFTSPLRTMSDWSVEGIIAHEKSRSSLSKVNTCNNLNDRKVELRLLGEKAVKRKDYNGALELYSEAIGLDSFDATLYSNRSLCYLKIGEAQKALLDAETCINNRPDWVKGYYRKGAALMLLKEHKRALDAFLDGLKVDPTSAEMEKAMRAALEAVKMESVAV

SEQ ID NO: 22002 - DNA, 1569 bp, Triticum aestivum
  CDS (1)..(1569)
atggccaaggggaggcgccgcgccgtccggccccgcgggggcgggtcggccggagcggcggcggcggcgtcggggagcaaggactacatctcggccggcgtcaacctcatgggcgcccacctcgggatgcgccgcatgaacagcgagcagtcggaggcgattaagcgcgtcatcgagtcctcggacgtcgtcgaccccgaccgcgccatgaggatggtggacagcgtgaatgcgagcgacagcgactcgtcggacgccgaggagatggaggactacgggccgctgcacgaggcggccggcacggggaggatggacacctgcaagtacctggtggaggagcttgggttcgacatcaatgccgatgccaacaatgattcgggcatgacacccttggcttgcgcggtggcgcgtggtaaagcaattgctgtgaggtatttgcttgacaaaggtgctaatctgaataagcaagatagtgttggcttttctcctctgcactatgctacaaagaaaggaaacgatgggctggtacgactgttgctatccaaaggagctagtgctgatatatcctcttgtgaagggacgccactacacgtggctgtgtcggatgggaattatggcatcgtccagtctttattgcagcatgatgcagatccaaacagggttttttcagatttaggagcacccatgactgctgcagttctttgtgctgatattatttctgtcgctggaaaaatttctgtgtctgctgctttgaagtgcatgaagctacttgtcaaggctggtgctggtttgaactgtacaactcctgatactccattggtgatagcaaccagcaaagacttaactgaatgtgtccagtacttgttggaggtcggtgcagatgccaatattccaagcaactataacggtacgacaccaatagaaattgctgcagactctggaagaagagagctcgtggagattctatttccatacactaaacccattcaacgtgtgtcaaactggagtgttgatggaatcattactcacgcaaaacacttgaaggaaaagggtaagcaatgtgataaggccagcaaggttaagcaaagtgataagggcagcaaggttaagcggaaagaggatgccagtccacggaagtcctcttccgaggagaaggtagttcaagataagaaggctgagctgaaatcacttggtgcaaaagcagtagaggaaaaggactatgccggtgcatcaaaattctacagcgaggcaatcaaagtggatcctaaagatgcgacgctctattcaaacaggagcctatgccatctaaggattggtgaagcacatgatgctctggtggatgctgatgcttgcatcaggctgcggcctgattggccaaagggttactgccggaaaggagctgccttaacagcgctcaaggaccacaaggaagcatgcgatgcgtacatggctgcggtgaaactggatccatcaaatgaggagttgcatgaagcattttgggaggcggtcgtggcaatgaaggcggaacttggcgctgggcaaagcggcagctcatcggactctgattag

SEQ ID NO: 22003 - protein, 522 aa, Triticum aestivum
MAKGRRRAVRPRGGGSAGAAAAASGSKDYISAGVNLMGAHLGMRRMNSEQSEAIKRVIESSDVVDPDRAMRMVDSVNASDSDSSDAEEMEDYGPLHEAAGTGRMDTCKYLVEELGFDINADANNDSGMTPLACAVARGKAIAVRYLLDKGANLNKQDSVGFSPLHYATKKGNDGLVRLLLSKGASADISSCEGTPLHVAVSDGNYGIVQSLLQHDADPNRVFSDLGAPMTAAVLCADIISVAGKISVSAALKCMKLLVKAGAGLNCTTPDTPLVIATSKDLTECVQYLLEVGADANIPSNYNGTTPIEIAADSGRRELVEILFPYTKPIQRVSNWSVDGIITHAKHLKEKGKQCDKASKVKQSDKGSKVKRKEDASPRKSSSEEKVVQDKKAELKSLGAKAVEEKDYAGASKFYSEAIKVDPKDATLYSNRSLCHLRIGEAHDALVDADACIRLRPDWPKGYCRKGAALTALKDHKEACDAYMAAVKLDPSNEELHEAFWEAVVAMKAELGAGQSGSSSDSD

SEQ ID NO: 22004 - DNA, 1383 bp, Glycine max
  CDS (1)..(1383)
atggctcccgatgcttccgacgcacttgcagtaaggcagaaagttcaattatttctgaacgcggctcgtactggttcaattgatctcttgaagaaattggcgttgcagctggacgagggcaaggatttggcgaaatcggtggaagcaataaaggacgccaacaagagaggagcactgcattttgccgcgcgagaaggccaaacctctgtttgcgagtacctcttaaccgatttgaagctctctgtcgattctcaagatgatgatggcgagactgcactcattcatgctgctcgtcagggacataccgccaccgctaaatatctgattgaccacggtgctgatcctactgtggctagcaatttaggggccacggcattacaccattctgcggggataggagatgctgagctgctcaagtacttgctgtccaggggagttaatcctgatctagaaagtgatgcgggaacacctttggtttgggctgctggtcatgcccaaccagctgctgtcagtgtactgttggaacatggtgcaaatccgcatgccgaaactgatgatggtattaccccactcctttcagctgtggcagccggttctctagcatgcttagagctgttaattcaggcaggtgctaaagcaaatataagtgctggtggagcaactcctttgcacatcgcagctgataatggaagtcttgaactattaaattgcttattgaaagtgggagctgatcctgatgtctctgacgaggatggtgtcaagccaatacaagttgctgctgcaaggggctatccaaaagctgttgagatattgttccccttgacgtccaaagtagatactattcctacttggactgttgatgggatacttgagtatatgcaatctgaaactagaaagcaacaggatgaatcgataaatgcaaaagaaactaatcagcccaaggaagctgattttccggagcaaaatgtccctgaggtggcacctgaagccaaaaagagagcagcagaagcaaagtcaagaggggatggggcttttaaaaggaatgaccatcatatggctatagatttttatacccaagcaattgatctgaaccccattgatgctactttgctatccaatagaagtctctgttggattaagttgggccaagctgagcatgctttagctgatgcaaaggcctgtagagctttaagaccagattggccaaaagcttgttatagggaaggagcggctctgcgtttgttgcagaaatttgatgaagctgcaaatgctttttatgagggagtaacgcttgatcctgaaaataaggagcttgtaaatgcgttcagggaagctgtcgaggctgggaggaaatttcatggaacggctgaaaataaatcatag

SEQ ID NO: 22005 - protein, 460 aa, Glycine max
MAPDASDALAVRQKVQLFLNAARTGSIDLLKKLALQLDEGKDLAKSVEAIKDANKRGALHFAAREGQTSVCEYLLTDLKLSVDSQDDDGETALIHAARQGHTATAKYLIDHGADPTVASNLGATALHHSAGIGDAELLKYLLSRGVNPDLESDAGTPLVWAAGHAQPAAVSVLLEHGANPHAETDDGITPLLSAVAAGSLACLELLIQAGAKANISAGGATPLHIAADNGSLELLNCLLKVGADPDVSDEDGVKPIQVAAARGYPKAVEILFPLTSKVDTIPTWTVDGILEYMQSETRKQQDESINAKETNQPKEADFPEQNVPEVAPEAKKRAAEAKSRGDGAFKRNDHHMAIDFYTQAIDLNPIDATLLSNRSLCWIKLGQAEHALADAKACRALRPDWPKACYREGAALRLLQKFDEAANAFYEGVTLDPENKELVNAFREAVEAGRKFHGTAENKS

SEQ ID NO: 22006 - DNA, 1371 bp, Zea mays
  CDS (1)..(1371)
atggccgacgccaccgccgccctctcagctcggagcaaggtgcaggctttcctggaggctgcgcgcgccggcgacctccaatccctcaagaacctcgtcgcggcgctcgacgaggacggcacgggcgccgcctccgtcgccgccgccgtgcgtgacgccaacaagcgcaccgccctccacttcgcggcgatcggatgtcgcaccgacgtctgtgaattcctcatcggcgagctcggcctccctgtcgacccaaaggacgatgatggcgaaactccgctcacccatgcgacacgccagggccatctggacactgtcaagtatcttctcgaccatggagctgatccttcgctggccaccagcctaggagccacagcgctacaccatgctgcaggcatagggaacacggaactcatgaagcttctcctctccaagggagttgacgtcgagtcagaaagtgatgctggcactccccttgtgtgggctgctggtcatggcaaccaggatgctgtcaaacttctgcttcaacacaatgctaagccaaatactgaaaacgatgatggtgtcacagcattgttatctgctgttgctgcaggttccctcccatgcttggaggtcctaattgaggctggtgcaaacccaaatgtcaaggctggtggagcaaccccattgcatattgctgcagatagtggaaatatagaagtcatcaaatgtttgcttaaagctggagctgacccaaatacctgtgatgatgatgaattgaagccagttcaggttgctgcttggagaaataaccgtgaagctgttgaacttcttttaccgttaacatccccaattccaggtgtttcaaactggaacgtagatgggattatagaacacatgctccctaaagagtatgaggaaaagtctcaactgaaggaagcggcatctctgaaatcaggcctaacacaaactattgaggtgtcatctgaagcaaaaaagaggtccttggaagccaaatcaagaggtgatgatgccttcagaagaaaggactaccttgtagcggtggatgcttatacgcaggctacagagttggacccaactgatgcaacagtgctctcaaacagaagcctgtgctggctgcgggcagggcaagctgagcgtgctctggaggacgccaaagcatgccgtgcattgagaccagattgggcgaaagcctgctacagggaaggtgcggcgcatcgtctgttacagaggtttgaggaagccgcaaacgccttctatgagggggtgcagcttgagccggagaacacggagctcgtcaacgcattcagggaggccatcgaagccgggaggaagttccatggcgtcaacacgccaaactcaacacaatga

SEQ ID NO: 22007 - protein, 456 aa, Zea mays
MADATAALSARSKVQAFLEAARAGDLQSLKNLVAALDEDGTGAASVAAAVRDANKRTALHFAAIGCRTDVCEFLIGELGLPVDPKDDDGETPLTHATRQGHLDTVKYLLDHGADPSLATSLGATALHHAAGIGNTELMKLLLSKGVDVESESDAGTPLVWAAGHGNQDAVKLLLQHNAKPNTENDDGVTALLSAVAAGSLPCLEVLIEAGANPNVKAGGATPLHIAADSGNIEVIKCLLKAGADPNTCDDDELKPVQVAAWRNNREAVELLLPLTSPIPGVSNWNVDGIIEHMLPKEYEEKSQLKEAASLKSGLTQTIEVSSEAKKRSLEAKSRGDDAFRRKDYLVAVDAYTQATELDPTDATVLSNRSLCWLRAGQAERALEDAKACRALRPDWAKACYREGAAHRLLQRFEEAANAFYEGVQLEPENTELVNAFREAIEAGRKFHGVNTPNSTQ

SEQ ID NO: 22008 - DNA, 20 bp, Artificial sequence
  primer
atggctcctgatgcttctac

SEQ ID NO: 22009 - DNA, 21 bp, Artificial sequence
  primer
ttatgatttggccttaacctc

SEQ ID NO: 22010 - protein, 681 aa, Artificial sequence
  consensus sequence
  Variant (2)..(26): Xaa in position 2 to 26 is any amino acid
  Variant (27)..(46): Xaa in position 27 to 46 is any or no amino acid
  Variant (49)..(49): Xaa in position 49 is any amino acid
  Variant (51)..(58): Xaa in position 51 to 58 is any amino acid
  Variant (59)..(65): Xaa in position 59 to 65 is any or no amino acid
  Variant (67)..(67): Xaa in position 67 is any amino acid
  Variant (69)..(80): Xaa in position 69 to 80 is any amino acid
  Variant (81)..(114): Xaa in position 81 to 114 is any or no amino acid
  Variant (116)..(116): Xaa in position 116 is any amino acid
  Variant (120)..(121): Xaa in position 120 to 121 is any amino acid
  Variant (123)..(129): Xaa in position 123 to 129 is any amino acid
  Variant (130)..(133): Xaa in position 130 to 133 is any or no amino acid
  Variant (136)..(138): Xaa in position 136 to 138 is any amino acid
  Variant (140)..(140): Xaa in position 140 is any amino acid
  Variant (141)..(149): Xaa in position 141 to 149 is any or no amino acid
  Variant (151)..(152): Xaa in position 151 to 152 is any amino acid
  Variant (153)..(153): Xaa in position 153 is any or no amino acid
  Variant (156)..(157): Xaa in position 156 to 157 is any amino acid
  Variant (159)..(160): Xaa in position 159 to 160 is any amino acid
  Variant (161)..(207): Xaa in position 161 to 207 is any or no amino acid
  Variant (209)..(215): Xaa in position 209 to 215 is any amino acid
  Variant (219)..(219): Xaa in position 219 is any amino acid
  Variant (221)..(222): Xaa in position 221 to 222 is any amino acid
  Variant (223)..(230): Xaa in position 223 to 230 is any or no amino acid
  Variant (232)..(237): Xaa in position 232 to 237 is any amino acid
  Variant (242)..(243): Xaa in position 242 to 243 is any amino acid
  Variant (246)..(255): Xaa in position 246 to 255 is any amino acid
  Variant (258)..(258): Xaa in position 258 is any amino acid
  Variant (260)..(260): Xaa in position 260 is any amino acid
  Variant (262)..(262): Xaa in position 262 is any amino acid
  Variant (263)..(303): Xaa in position 263 to 303 is any or no amino acid
  Variant (306)..(312): Xaa in position 306 to 312 is any amino acid
  Variant (313)..(352): Xaa in position 313 to 352 is any or no amino acid
  Variant (354)..(356): Xaa in position 354 to 356 is any amino acid
  Variant (358)..(359): Xaa in position 358 to 359 is any amino acid
  Variant (363)..(364): Xaa in position 363 to 364 is any amino acid
  Variant (365)..(382): Xaa in position 365 to 382 is any or no amino acid
  Variant (384)..(394): Xaa in position 384 to 394 is any amino acid
  Variant (397)..(397): Xaa in position 397 is any amino acid
  Variant (398)..(398): Xaa in position 398 is any or no amino acid
  Variant (400)..(401): Xaa in position 400 to 401 is any amino acid
  Variant (402)..(409): Xaa in position 402 to 409 is any or no amino acid
  Variant (411)..(412): Xaa in position 411 to 412 is any amino acid
  Variant (414)..(416): Xaa in position 414 to 416 is any amino acid
  Variant (419)..(419): Xaa in position 419 is any amino acid
  Variant (420)..(426): Xaa in position 420 to 426 is any or no amino acid
  Variant (428)..(428): Xaa in position 428 is any amino acid
  Variant (430)..(433): Xaa in position 430 to 433 is any amino acid
  Variant (434)..(441): Xaa in position 434 to 441 is any or no amino acid
  Variant (443)..(445): Xaa in position 443 to 445 is any amino acid
  Variant (447)..(453): Xaa in position 447 to 453 is any amino acid
  Variant (454)..(514): Xaa in position 454 to 514 is any or no amino acid
  Variant (516)..(517): Xaa in position 516 to 517 is any amino acid
  Variant (519)..(520): Xaa in position 519 to 520 is any amino acid
  Variant (522)..(525): Xaa in position 522 to 525 is any amino acid
  Variant (528)..(529): Xaa in position 528 to 529 is any amino acid
  Variant (531)..(533): Xaa in position 531 to 533 is any amino acid
  Variant (535)..(539): Xaa in position 535 to 539 is any amino acid
  Variant (540)..(580): Xaa in position 540 to 580 is any or no amino acid
  Variant (585)..(586): Xaa in position 585 to 586 is any amino acid
  Variant (592)..(592): Xaa in position 592 is any amino acid
  Variant (594)..(595): Xaa in position 594 to 595 is any amino acid
  Variant (597)..(598): Xaa in position 597 to 598 is any amino acid
  Variant (599)..(600): Xaa in position 599 to 600 is any or no amino acid
  Variant (603)..(603): Xaa in position 603 is any amino acid
  Variant (606)..(607): Xaa in position 606 to 607 is any amino acid
  Variant (609)..(612): Xaa in position 609 to 612 is any amino acid
  Variant (614)..(614): Xaa in position 614 is any amino acid
  Variant (616)..(616): Xaa in position 616 is any amino acid
  Variant (618)..(619): Xaa in position 618 to 619 is any amino acid
  Variant (622)..(622): Xaa in position 622 is any amino acid
  Variant (624)..(624): Xaa in position 624 is any amino acid
  Variant (626)..(628): Xaa in position 626 to 628 is any amino acid
  Variant (630)..(634): Xaa in position 630 to 634 is any amino acid
  Variant (635)..(647): Xaa in position 635 to 647 is any or no amino acid
  Variant (649)..(650): Xaa in position 649 to 650 is any amino acid
  Variant (651)..(665): Xaa in position 651 to 665 is any or no amino acid
  Variant (667)..(667): Xaa in position 667 is any amino acid
  Variant (668)..(672): Xaa in position 668 to 672 is any or no amino acid
  Variant (674)..(674): Xaa in position 674 is any amino acid
  Variant (676)..(678): Xaa in position 676 to 678 is any amino acid
  Variant (679)..(680): Xaa in position 679 to 680 is any or no amino acid
GXXXXXXXXXXXXXXXXXXXXXXXXXXXXXXXXXXXXXXXXXXXXXLHXAXXXXXXXXXXXXXXXLXEXXXXXXXXXXXXXXXXXXXXXXXXXXXXXXXXXXXXXXXXXXXXXXGXTPLXXAXXXXXXXXXXXYLXXXGXXXXXXXXXXGXXXLHXXAXXXXXXXXXXXXXXXXXXXXXXXXXXXXXXXXXXXXXXXXXXXXXXXXXGXXXXXXXLLSXGXXXXXXXXXXVXXXXXXGTPLXXAAXXXXXXXXXXLLXHXAXXXXXXXXXXXXXXXXXXXXXXXXXXXXXXXXXXXXXXXXXXPLXXXXXXXXXXXXXXXXXXXXXXXXXXXXXXXXXXXXXXXXXXXXXXXCXXXLXXAGAXXXXXXXXXXXXXXXXXXXXAXXXXXXXXXXXLLXXGXXXXXXXXXXGXXPXXXAAXXXXXXXXEXLXXXXXXXXXXXXWXXXGXXXXXXXXXXXXXXXXXXXXXXXXXXXXXXXXXXXXXXXXXXXXXXXXXXXXXXXXXXXXXXXXXXXXKXXGXXAXXXXDYXXAXXXYXXXXXXXXXXXXXXXXXXXXXXXXXXXXXXXXXXXXXXXXXXXXXXDATLXXNRSLCXLXXGXXXXALXDAXXCXXXXPXWXKXXYRXGXAXXXLXXXXXXXXXXXXXXXXXXAXXXXXXXXXXXXXXXXXAXXXXXXLXPXXXXXE

SEQ ID NO: 22011 - protein, 31 aa, Artificial sequence
  protein pattern
  Variant (2)..(3): Xaa in position 2 to 3 is any amino acid
  Variant (5)..(8): Xaa in position 5 to 8 is any amino acid
  Variant (10)..(10): Xaa in position 10 is any amino acid
  Variant (12)..(12): Xaa in position 12 is any amino acid
  Variant (14)..(14): Xaa in position 14 is Ala, Gly or Ser
  Variant (15)..(15): Xaa in position 15 is any amino acid
  Variant (16)..(16): Xaa in position 16 is Phe or Tyr
  Variant (18)..(18): Xaa in position 18 is any amino acid
  Variant (20)..(20): Xaa in position 20 is any amino acid
  Variant (22)..(24): Xaa in position 22 to 24 is any amino acid
  Variant (25)..(25): Xaa in position 25 is Ile, Leu or Met
  Variant (26)..(30): Xaa in position 26 to 30 is any amino acid
  Variant (31)..(31): Xaa in position 31 is Ala, Pro or Val
AXXCXXXXPXWXKXXXRXGXAXXXXXXXXXX

SEQ ID NO: 22012 - protein, 36 aa, Artificial sequence
  protein pattern
  Variant (2)..(2): Xaa in position 2 is any amino acid
  Variant (3)..(4): Xaa in position 3 to 4 is any or no amino acid
  Variant (6)..(10): Xaa in position 6 to 10 is any amino acid
  Variant (11)..(12): Xaa in position 11 to 12 is any or no amino acid
  Variant (15)..(15): Xaa in position 15 is Ala or Pro
  Variant (17)..(18): Xaa in position 17 to 18 is any amino acid
  Variant (19)..(19): Xaa in position 19 is Ala or Ser
  Variant (21)..(22): Xaa in position 21 to 22 is any amino acid
  Variant (23)..(23): Xaa in position 23 is Ala, Asp, Gly, Asn, Gln or Ser
  Variant (24)..(26): Xaa in position 24 to 26 is any amino acid
  Variant (27)..(27): Xaa in position 27 is Ala, Cys, Thr or Val
  Variant (28)..(28): Xaa in position 28 is Leu, Met or Val
  Variant (29)..(29): Xaa in position 29 is any amino acid
  Variant (30)..(30): Xaa in position 30 is Ile, Leu or Val
  Variant (33)..(33): Xaa in position 33 is Asp, Glu, Asn or Gln
  Variant (34)..(35): Xaa in position 34 to 35 is any amino acid
GXXXDXXXXXXXGTXLXXXAXXXXXXXXXXLLXXXA

SEQ ID NO: 22013 - protein, 20 aa, Artificial sequence
  protein pattern
  Variant (2)..(3): Xaa in position 2 to 3 is any amino acid
  Variant (4)..(5): Xaa in position 4 to 5 is any or no amino acid
  Variant (7)..(7): Xaa in position 7 is any amino acid
  Variant (8)..(8): Xaa in position 8 is any or no amino acid
  Variant (12)..(12): Xaa in position 12 is any amino acid
  Variant (14)..(14): Xaa in position 14 is Phe, His, Trp or Tyr
  Variant (15)..(15): Xaa in position 15 is Ile or Leu
  Variant (16)..(19): Xaa in position 16 to 19 is any amino acid
  Variant (20)..(20): Xaa in position 20 is Ala or Gly
DXXXXLXXNRSXCXXXXXXX

SEQ ID NO: 22014 - protein, 24 aa, Artificial sequence
  protein pattern
  Variant (2)..(2): Xaa in position 2 is any amino acid
  Variant (3)..(3): Xaa in position 3 is any or no amino acid
  Variant (5)..(7): Xaa in position 5 to 7 is any or no amino acid
  Variant (9)..(15): Xaa in position 9 to 15 is any amino acid
  Variant (16)..(16): Xaa in position 16 is Phe, Leu or Met
  Variant (18)..(19): Xaa in position 18 to 19 is any amino acid
  Variant (20)..(20): Xaa in position 20 is Asp or Gly
  Variant (21)..(21): Xaa in position 21 is Ala or Ser
  Variant (22)..(22): Xaa in position 22 is Asp or Asn
  Variant (23)..(23): Xaa in position 23 is Ala or Pro
  Variant (24)..(24): Xaa in position 24 is Asp or Asn
LXXAXXXGXXXXXXXXLXXXXXXX

SEQ ID NO: 22015 - DNA, 1047 bp, Arabidopsis thaliana
  CDS (1)..(1047)
atgggttgtgttcaatgcaaatgttgtagccgatatccttcgtcatcatcagatggagattctcgtggacctttagaagccaatggtgttcttaaggggaaagatcagaaacctcttggatctattcacgttccttctcctaatttcgatatggtttactctgtgttatctcaacgaggctattaccctgactcacctgataaggagaatcaagacacttactgcatcaaaacagagcttcaaggtaacccgaatgttcatttcttcggtgtctttgatggtcacggtgtgttgggtacgcagtgttcgaattttgttaaggagagggttgtggaaatgttgtctgaagacccaactctgcttgaggatccggagaaagcttacaagtctgcttttttgagggttaatgaagagttacacgatagtgaaatcgacgattcgatgagtggtactactgccattacggttcttgttgttggggataagatttatgttgccaatgtaggagattcgagggcggttctcgctgttaaagacaggaatcggattctagcagaggatttgtcttacgatcaaacgccttttaggaaagatgaatgcgagagggttaaagcttgtggagctagagtgctgagtgtggatcaagtggaagggttgaaagatccgaatatacaaacatgggcaaacgaagagagtgaaggaggagatccgccgagactttgggtacaaaacgggatgtatccgggaaccgcattcacgaggagtgttggtgattttacagctgagagcattggagttattgcagagccagaagtgtcaatggttcatctctcgcctaaccatttgttctttgttgttgcaagcgatgggattttcgagtttcttccaagccaagctgttgttgatatggtggggagatacgcagatccgcgcgatggatgcgctgcagcagcagcggaatcatataaactgtggttggagcatgagaataggacagatgatatcacaattatcattgtacagattaaaaagctgtctaatgaatga

SEQ ID NO: 22016 - protein, 348 aa, Arabidopsis thaliana
MGCVQCKCCSRYPSSSSDGDSRGPLEANGVLKGKDQKPLGSIHVPSPNFDMVYSVLSQRGYYPDSPDKENQDTYCIKTELQGNPNVHFFGVFDGHGVLGTQCSNFVKERVVEMLSEDPTLLEDPEKAYKSAFLRVNEELHDSEIDDSMSGTTAITVLVVGDKIYVANVGDSRAVLAVKDRNRILAEDLSYDQTPFRKDECERVKACGARVLSVDQVEGLKDPNIQTWANEESEGGDPPRLWVQNGMYPGTAFTRSVGDFTAESIGVIAEPEVSMVHLSPNHLFFVVASDGIFEFLPSQAVVDMVGRYADPRDGCAAAAAESYKLWLEHENRTDDITIIIVQIKKLSNE

SEQ ID NO: 22017 - DNA, 2368 bp, Glycine max
  CDS (505)..(1776)
ctcgagccgttcttgcaaacggacccatacatgaaatagaatctcaattcaattcctcttcctcttcctcctcctctgtccctatcaatctcttttgtaaacttctctttggactcttccttttgcatcaggctttctcccgatactcctcccttctctgcacccaacgaaaagcacaattctttttctccttttcgataaccccatcacacattctgcgtctaaaatgccaaaataataccccccttgtcttttccttcttgctgggcttctccctttagagctcttttctccacactcatcaatcgcacaagacaattccctgctcaaaatcctgactatgtctctaggttttgtgaacgaactatcctcaaaatctgtttcccacgttgtggaggagttccggaagcatctaacactgtagttcttacctaaacattattactctttgaactgcttcagtgagtgctttctgttgttgttgttgtcgttgttgtttccaagatgggttgtgtccatggcaagtgttgctgtggtgacagttcttcatcagatgatggttctagggattaccgagaacttgacttcattaatggccaccccacgcgtccgctcgctcagagatcattgaagcatgttcctgttccttcccacaacttcattttggagtacactttcctcagtcagcgggggtactaccctgattcacctgataaagaaaaccaagatagtttctgcatcactacacaactccaaggtaaccccaatgtccatttctttggtgtctatgatgggcatggccaatttggtagccagtgttcgaattttgttaagcataggctggttgagaagttgtcaaatgaccctgcattgttggaggaccctgttcaggcttacaattctgcattcttggcaacaaatcaagaattgcgtagtactagtgagattgatgattctatgagtggcaccaccgcgattacggtgcttgttattggtgacactctttatgttgctaatcgagctgattctagagccgtgctggctgttaaggatggaaaccacattgttgctgaggacttgtcctctgatcagacaccatttcggagggatgaatatgagagagtgaagctttgtggggcgagggtgttaagtgttgatcaagtggaagggctaaaggatccagatatccagcattggggtgatgaagagagtcggggtggcgatcctccaagattgtgggttcctaatgggatgtatcctggaactgcatttacaaggagtataggggataatttggcagagacaattggtgtcattgctattccggaggtgaaaacggttcagcttacacctaatcatcttttctttgttgtggcaagtgatggcatatttgaattcctgacaagccaaactgttgttgatatggcagcaagctatatggatcctcgtgatgcatgttcagctattgcagagaagtcgtataaactatggttggaacttgagaacagaacagatgatataacaatcatcattgttcagatcaaaggtctctctaattcaggtacatctggagttggatccgatgagatcaatggtgggggtactgtaatgaattccaggacaggaactcatgagatatctgctacccctggatctaatgtttatcgttctgtcagaaacagtttatccgatttgcactcctgtcagcatgtggcttcagtgacgagcgcagcgatagaggttcactctccagcatgtccaagaccaattgaatgatgattgaagagaggctttactgaagcttcatcaagtctctttgcagtttctcccaagtggtacatttccacgttccaacttcctgagcattgtgcattactgttgtacatttactggtcactacattttaggctgccaacttgccagcttaaggtgctctgcattatcttggcagcaaaaggaattttcagaatgtaaaaatcacagttggtatttggtaaaattcaaatttcatgcagaaaccaaacccctcagaggagaacacttgtgctcaccttcctgtgacgcaattgcacctccactctacagatttgatctttggaaggggaatcaataacgagcttgaaataaaaggaaggtggtatacaaggagctgtgactgtgactatcatttgcaatggatcgttgaagaaactcataggatggtcgatggtaaacttgggaggcagacagatgctactcagcatttaaattcattgtcctcattatcatgtagatgtggatcaaacctttgtctggattgtcgattgatagaatttcaagattaatttcatattgcccaaaaaaaaaaaaaaaaagaaaaaaaaaaaaa

SEQ ID NO: 22018 - protein, 423 aa, Glycine max
MGCVHGKCCCGDSSSSDDGSRDYRELDFINGHPTRPLAQRSLKHVPVPSHNFILEYTFLSQRGYYPDSPDKENQDSFCITTQLQGNPNVHFFGVYDGHGQFGSQCSNFVKHRLVEKLSNDPALLEDPVQAYNSAFLATNQELRSTSEIDDSMSGTTAITVLVIGDTLYVANRADSRAVLAVKDGNHIVAEDLSSDQTPFRRDEYERVKLCGARVLSVDQVEGLKDPDIQHWGDEESRGGDPPRLWVPNGMYPGTAFTRSIGDNLAETIGVIAIPEVKTVQLTPNHLFFVVASDGIFEFLTSQTVVDMAASYMDPRDACSAIAEKSYKLWLELENRTDDITIIIVQIKGLSNSGTSGVGSDEINGGGTVMNSRTGTHEISATPGSNVYRSVRNSLSDLHSCQHVASVTSAAIEVHSPACPRPIE

SEQ ID NO: 22019 - DNA, 1815 bp, Zea mays
  CDS (155)..(1510)
aattcggcacgaggctcctccacttcttctccccgtcccatttcttaactccccgagcccccaaaatcacgcacccagagaggggagaggcggagtgacgggggagaggcggaggccacgccccaaacccaaaccctagccacacgcgacgccgatgggatgcgcgcagggcaagtgctgcctgccgcggcacccgaggaggggctccgccgccgtcggcgggcgcggcggcgccacgcttggccgcgccgcggtgcccggggccgggctggtgctggagtacgccgcgttggccgtggcggggctctacccagactccccggccagggagtcccaggacacgcacctcgtcgccacgcgcttcgcgggggatcctgacctccacctcttcgccgtcttcgacggccacggcgctgccggagcctcctgcgccgggttcgcgcgggacgcgctcccgcgcctcctcctcgcctcgctcgccgcgggcccagccgccgcgttccgggacgccatgctggccgccaacgccgagatgcatgcggcgcccggcgtcgacgactccatgagcgggaccaccgccgtggccgccctcgtcgccggcggcgcgctccacgttgccaacgtcggcgactcgcgcgccgtcgccggtgtctggcgcgccggccggctcgtcgccgaggacctctcctgggaccagaccccgttccgcgccgacgagcgcgcgcgcgtcaaagcctgtggcgcccgcgtcatgtccgtcgagcaggtggagggcatgcgcgatcccgaggacgtgggctggacgcccaacgagggggacccgccacgcgtctgggcgcgcgacgcactctacccaggcaccgccttcacccgcagcctcggggacctcgccgccgaggccgtcggggtcatcgccgagccggaggtgaagagcgtcgagatcactccatcgcacctcttcttcgttgtcgccagcgatggcgtgttcgagttcctctccagccaggaagttgttgacagggttgccatgtatcaagatcctcgggatgcctgctcagcaatcgctgctgagtcatacaaactatggcttgagcatgaaaacaggacagatgatataacaataatcattgtgcatattcgagacatggaaaatgcagggagtgacaaagcggactatggtagcatcggagcatcaatagctgggcagacaatacagtcagagatacctgtatttgtacaaccagaagcaagtaacatgaacagatctgctgctaccggaatgcgatcaccgtcttttggctctccaactgaacggagcctctcatgtgttgctccttctcctacggatcctttgttgatacatggcagagtatcagatgcttccaagcctgggcaaagtgagcagcgagctgcatcacaaccaccggtacaaacttggcatcaaatagacggggttactactgagctggagcggtctatgcagcaaagcatccttccaacctcctgctgaaagtagagaatgcgagttgaatgacaaaaagaggcctcgagataacccaccgccatcttggagctactaaccgtaccatggatgcgatgtttgccagcagcaaatctcgtgctgttgctcgtgttttggtagagcacctgctgctgccgacgatgcgaggttcctgatcctgtgtgggatcatctaaccatgggctgagtggaattgagttattctccgtttcatttgtactttgtttacttttcacaagatatagattaattctaagttgatgcctgtcgaggtatcagtatcatttgagacgc

SEQ ID NO: 22020 - protein, 451 aa, Zea mays
MGCAQGKCCLPRHPRRGSAAVGGRGGATLGRAAVPGAGLVLEYAALAVAGLYPDSPARESQDTHLVATRFAGDPDLHLFAVFDGHGAAGASCAGFARDALPRLLLASLAAGPAAAFRDAMLAANAEMHAAPGVDDSMSGTTAVAALVAGGALHVANVGDSRAVAGVWRAGRLVAEDLSWDQTPFRADERARVKACGARVMSVEQVEGMRDPEDVGWTPNEGDPPRVWARDALYPGTAFTRSLGDLAAEAVGVIAEPEVKSVEITPSHLFFVVASDGVFEFLSSQEVVDRVAMYQDPRDACSAIAAESYKLWLEHENRTDDITIIIVHIRDMENAGSDKADYGSIGASIAGQTIQSEIPVFVQPEASNMNRSAATGMRSPSFGSPTERSLSCVAPSPTDPLLIHGRVSDASKPGQSEQRAASQPPVQTWHQIDGVTTELERSMQQSILPTSC

SEQ ID NO: 22021 - DNA, 1279 bp, Zea mays
  CDS (47)..(1075)
gggagaggctccaaaccctagccacacacgacgcaacgcaacgccgatggggtgcgcgcagggcaagtgctgcctacggcggcacccgaggaggggctccgccgctgccgccgttggcggcggcgccacgctcggccgcgccgcggtgcccggggccgggctggtactggagtacgccgcgctggctgtggcggggctgtacccggactccacagcccgggagtcccaggacgcgcaccttgtcgccacgcgcttcgcgggcgacccggacctccacctcttcgctgtcttcgacggtcatggcactgccggcaccgcctgcgctgggttcgcgcgggacgcgctcccgcgcctcctcgcgtcgctctctctcgccagcgccgccgaccccaccgcggcgttccgcgaggccatgctgggcgccaacgccgagatgcacgcggctcccgaggtcgacgactccatgagcgggaccaccgccgtggccgccctcgtctccggcggcgctctccacgtcgccaacgtcggcgactcgcgcgccgtcgccggggtctggcgcgccggccgcgtcgtcgccgaggacctctcctgggaccagactccgttccgcgccgacgagcgcgagcgcgtcagggcctgcggtgcccgggtcatgtccgtcgaacaggtggagggcatgcgcgatccggaggccgagcgttgggcgcccgacgagggggacccgccccgcgtctgggcgcgcgacggcctctaccccggcacagccttcacgcgcagcctcggtgacctcgccgccgaggccatcggggtcatcgccgagccggaggtcaagagcgtcgagatcactccatcgcacctcttcttcgttgtcgccagcgatggcgtgttcgagttcctctccagccaggaagttgttgacagggttgccacgtatcaagatcctcgagatgcctgctcagcaatcgctgcagagtcatacaaactatggctggagcacgaaaataggacagatgatataacgataatcattgtgcatatccgagacatggaaagtgtaggtgcaccaaaattttaaattctgcaagcataaacagaagtaacttattcagtgactggctgaaaatttgttgttcttcccaaaatttactgtcaggccctgcagggagtgacaaagcggactacggtagcgtgggagcgtcaatagctgtgcacgcaatacagtcagaggtacctgtatttgtagaatcagaagcaagtcacatgaacagatctttctcct

SEQ ID NO: 22022 - protein, 342 aa, Zea mays
MGCAQGKCCLRRHPRRGSAAAAVGGGATLGRAAVPGAGLVLEYAALAVAGLYPDSTARESQDAHLVATRFAGDPDLHLFAVFDGHGTAGTACAGFARDALPRLLASLSLASAADPTAAFREAMLGANAEMHAAPEVDDSMSGTTAVAALVSGGALHVANVGDSRAVAGVWRAGRVVAEDLSWDQTPFRADERERVRACGARVMSVEQVEGMRDPEAERWAPDEGDPPRVWARDGLYPGTAFTRSLGDLAAEAIGVIAEPEVKSVEITPSHLFFVVASDGVFEFLSSQEVVDRVATYQDPRDACSAIAAESYKLWLEHENRTDDITIIIVHIRDMESVGAPKF

SEQ ID NO: 22023 - DNA, 1170 bp, Oryza sativa (japonica cultivar-group)
  CDS (1)..(1170)
atggggatctgtgcatcttcagagcagctggagcatgttcatgagacagatgagagcattgtgtatgtgaaggatgagcaaggaagggggggtaggggggtggagagtgggggggctaggaaggtggcctccctcttctcccagaggggcaagaaaggccccaaccaggactctgtcatcctctgccagggattcggcatggaggacggcgtgttctgcggcgtgttcgacggccatggccggtgcgggcaattcatcagcaagctggtgcgggactacctcccgttcatgatcctgagccaccggaacgcgctgctcctggccgacgccgccgccgacgacgacgacgacgccgcgttcagcgacgacgcggcggcgtcgtcgtccgcggacagcagcggcaactcgtcgccgcagccgtcggcgtcggcgtcggcgcagatgctggaggagtggaggcaggcgtgcgccagcgcgttcgccgccatggacggcgagctcaagctccagccgaacctcgactgcgcgttcagcggcacgacggcggtgtgcgccatcaagcagggcagggacctcatcatcgccaacctcggcgactcgagggcggtgctcgccaccatgtcggacaccggctacctccaggcggtgcagctgacggtggaccacaagccgagcgtgccggaggaggcggcgaggatcaagcggagcggggggagggtgttcgggctgaaggacgagccgggggtgatgcgggtgtggctccccggcgagaactcgccggggctcgccatggcgaggtcgctgggcgacatgaggctgaagcggcacggcgtgatcccggcgccggaggtgacgtcgcggcgcgtgacgggcgccgacctgttcatggtgctcgccacggacggggtgtgggacgtgctgagcaacgaggaggtggtgtccatcgtgtgcgcgacgccgcggaagcagcacgcgtcgaaggcggtggtggaggccgccgtgcagcggtggcgggccaagttcccgacgtccagggtggacgactgctccgccgtctgcctcttcctccacgaccacaccctcggcacggccgccgccgcctccgccgcagccgccgcggccgccagaaaggcgcgcagggcctccaccgccacgccgccggcgagctga

SEQ ID NO: 22024 - protein, 389 aa, Oryza sativa (japonica cultivar-group)
MGICASSEQLEHVHETDESIVYVKDEQGRGGRGVESGGARKVASLFSQRGKKGPNQDSVILCQGFGMEDGVFCGVFDGHGRCGQFISKLVRDYLPFMILSHRNALLLADAAADDDDDAAFSDDAAASSSADSSGNSSPQPSASASAQMLEEWRQACASAFAAMDGELKLQPNLDCAFSGTTAVCAIKQGRDLIIANLGDSRAVLATMSDTGYLQAVQLTVDHKPSVPEEAARIKRSGGRVFGLKDEPGVMRVWLPGENSPGLAMARSLGDMRLKRHGVIPAPEVTSRRVTGADLFMVLATDGVWDVLSNEEVVSIVCATPRKQHASKAVVEAAVQRWRAKFPTSRVDDCSAVCLFLHDHTLGTAAAASAAAAAAARKARRASTATPPAS

SEQ ID NO: 22025 - DNA, 3261 bp, Oryza sativa (japonica cultivar-group)
  CDS (1)..(3261)
atgggctgctcaccttctaaggtgtgttcatgtccacattataagggcagtttgtgcttctgtgactgtggatgctttggacaaacacctgactccccaagagagtcaaggggaaaatcaaaccgggttaggggaaagacagattctagtgcttcagatgcttcttctgatgacctagaggaagatgatgatggattgcaccaaatgaacattacaagggactctaatgttggtatcaatcgactctcaagggtctcatcacaatttcttccaccagaaggttcacgtaaagttcgaatcccattggggaattatgacctgagatattcctacttgtctcaaagaggctactacccagaatcattggacaagccaaaccaagacagtttttgtatacatactccatttggaacaagccctgatgaccatttctttggtgtatttgatggccatggagaatatggagctcagtgctcacaatttgtaaagcgaagactatgcgaaaacctgctcagagatgaccggttccgtactgatgttgttcaggctcttcattctgctttcttggcaacaaattcacagcttcatgcagacagcttagatgattctatgagtggtactactgcagtcactgtgctggtgaggggtaaaactatttacattgcgaatacgggtgattcacgtgctgttattgccgaaaaaagaggggaagatgttgttgctgttgacctgtccatagatcaaacaccctacaggactgatgagcttgaaagggtcaaggagtgtggtgctagggttatgacgttggatcagatagaggggctaaagaacccagatgtacagtgttggggcaccgaggaaagtgatgacggtgatcctccaaggttgtgggtgcaaaatggcatgtatccaggaactgcttttactcgcagcattggagattctgtcgctgaatctatcggtgttgtcgctaatcctgagatttttatcctggagctcaatgccaaccatccattctttgttcttgctagtgatggagtttttgagtttctttctagtcaaactgttgtcgacatgattgctaaatacaaggatcctcgtgatgcgtgcgctgcaattgttgctgaatcctatcgcctctggctacagtatgaaactcgtacagatgacattacaataatagttgttcatattaacgggttaactgatatggaatgtactcaaactgtaatgaaagtatctttacaaccttcccaacaagtcgtagaattggtaggctcagaatcaccatcgacaataagtttgaatcccaagaaccagcgttccaggcaagatctatcacgtgctcggctgagagcacttgaaagttccctggaaaatggtcgactatgggtccctccatccccatcgcatcggaagacatgggaagagcaagcacatattgagcgaatactacacgaccatttcctcttcaggaagctcactgactcacagtgccatgttttacttgattgcatgcaaagagttgaggtgaaagctggggatatagtggtgcagcagggcggtgaaggcgagtgcttctatgtagttgggagtggtgagtttgaagtgctagccattcaggaagaagatggaaaggaagttacaaaggttctacatcggtatactgctgacaaactatcttcttttggggagctagcactaatgtataataaaccacttcaagcttcagtccgtgctgtgactactggaactttatgggctctaaagcgagaggattttcggggaattctgatgtcagagttttcaaatataccatcattaaagttgctccgatcagtggagctgtttacgagattgacaatgcttcaactaagtcaacttgctgattctcttgttgaagtaacttttggggatggtcaaatgatagtagacaagaatgatgatgcatcttccttgtatattattcaaagaggtcgtgtgaaacttaaattggctgcagatcaggtaaattcagatgcctgggatcttcttagttctcaaacaaaggtggcccaatcaagtcgagaagatggtaattacgtgtttgagatagatgaagggggacactttggagagtgggctctctttggggagacaattgcttttactgctatgtcagttggtgatgtgacttgttctactattgcaaaggagaagtttgactcaattattgggcccttgccaaaagtttcccagtctgattccaagctcaaagattccttggttcctaaagggcatggtgcagatgatagttccttcaggaaggcgcagctatctgatttggaatggaaaatgtgcatatatgccgctgattgcagtgagattggtcttgtccaactaagaggttctgacaagatcaaaagcttaaagaggttttacatcaagagagtaaaagaccttcataaggaaaaacacgtatttgatgagaaggatctcatgaaatctttgagccaatcaacttgtgtgccagaagttctatgtacttgcgctgatcaatcctacctaggaatactgctgaattgttgcctttgttgctcactggcttcaatacttcatgcaccactaaatgagtcgtctgcacgattctatgcagcctctgtcgtcgtagcgctagaaaatctccatcagaggtccattctttacagaggtgtttctgcagacattcttatggtcgaccgatcagggcatcttcaactagttgacttcaggtttgcaaagaagttgcaaggtgaaaggacttacacaatatgtgggattgccgactctctagctccagagatagttcttggtaggggccatggattttctgctgactggtgggcgctgggagtgttgatttatttcatgctgcaatcagacatgccatttggctcttggagggagagtgaactggaaccttttgcaaagattgccaagggtcaccttgtcatgccatcaacattcagcatcgaagttgttgaccttattacaaagctactcgaggtaaacgaaaatgcgcgccttggggccaagggagcggaatctgtgaaaagacacccctggtttgatggcattgactggaaacaaatagcagatggtacttatacagtaccccaagaaatcaccgatcgtgtcgacagctatgtagaaactcttacagaggacttgacagcatccccttccatgccaagtgaagaaacagctgatcaggctgctccagaatggatccaggattggtga

SEQ ID NO: 22026 - protein, 1086 aa, Oryza sativa (japonica cultivar-group)
MGCSPSKVCSCPHYKGSLCFCDCGCFGQTPDSPRESRGKSNRVRGKTDSSASDASSDDLEEDDDGLHQMNITRDSNVGINRLSRVSSQFLPPEGSRKVRIPLGNYDLRYSYLSQRGYYPESLDKPNQDSFCIHTPFGTSPDDHFFGVFDGHGEYGAQCSQFVKRRLCENLLRDDRFRTDVVQALHSAFLATNSQLHADSLDDSMSGTTAVTVLVRGKTIYIANTGDSRAVIAEKRGEDVVAVDLSIDQTPYRTDELERVKECGARVMTLDQIEGLKNPDVQCWGTEESDDGDPPRLWVQNGMYPGTAFTRSIGDSVAESIGVVANPEIFILELNANHPFFVLASDGVFEFLSSQTVVDMIAKYKDPRDACAAIVAESYRLWLQYETRTDDITIIVVHINGLTDMECTQTVMKVSLQPSQQVVELVGSESPSTISLNPKNQRSRQDLSRARLRALESSLENGRLWVPPSPSHRKTWEEQAHIERILHDHFLFRKLTDSQCHVLLDCMQRVEVKAGDIVVQQGGEGECFYVVGSGEFEVLAIQEEDGKEVTKVLHRYTADKLSSFGELALMYNKPLQASVRAVTTGTLWALKREDFRGILMSEFSNIPSLKLLRSVELFTRLTMLQLSQLADSLVEVTFGDGQMIVDKNDDASSLYIIQRGRVKLKLAADQVNSDAWDLLSSQTKVAQSSREDGNYVFEIDEGGHFGEWALFGETIAFTAMSVGDVTCSTIAKEKFDSIIGPLPKVSQSDSKLKDSLVPKGHGADDSSFRKAQLSDLEWKMCIYAADCSEIGLVQLRGSDKIKSLKRFYIKRVKDLHKEKHVFDEKDLMKSLSQSTCVPEVLCTCADQSYLGILLNCCLCCSLASILHAPLNESSARFYAASVVVALENLHQRSILYRGVSADILMVDRSGHLQLVDFRFAKKLQGERTYTICGIADSLAPEIVLGRGHGFSADWWALGVLIYFMLQSDMPFGSWRESELEPFAKIAKGHLVMPSTFSIEVVDLITKLLEVNENARLGAKGAESVKRHPWFDGIDWKQIADGTYTVPQEITDRVDSYVETLTEDLTASPSMPSEETADQAAPEWIQDW

SEQ ID NO: 22027 - DNA, 1386 bp, Oryza sativa (japonica cultivar-group)
  CDS (1)..(1386)
atggggtgcgcgcaggggaagtgctgcgtgccgcggcggcagaggggacgcggcggcggcggggcggtgggtgggcgcggcggcgcgacgctggggcgggtggcggtgccgggggcggggctggtgctggagtacgcgacgctggcggtggcggggctgtacccggactcgcccgggagggagtcgcaggacgcgcacctggtggcgacgcggttcgcggggcaccccgacctccacctgttcgcggtgttcgacgggcacggcgcgtgcggcgccgcgtgcgccgggttcgcgcgcgacgcgctcccgcggctgctcgcgggggtgggggtgggggcgggggaggagggaggggggaggatggtggtggtggaggaccccgcggcggcgttccgggaggcgctcccggcggcgaacgcggagatgcacgcggcggacgaggtggacgactcgatgagcgggaccaccgccgtggcggcgctggtggcggggggtgcgctccacgtggccaacgtgggggactcacgcgccgtggccggggtttggcgcgaggggcgcgtggcggcggaggagctctcgtgggaccagacgccgttccgcgccgacgagcgcgcccgcgtgaaggcgtgcggcgcgcgggtgatgtcggtcgagcaggtggagggcgtgcgcgacccggaggcggagagctgggtcgccgacgagggggacccacctcgcgtgtgggcgcgcgacgggctctaccccggcacggccttcacgcgcagcctcggcgaccaagccgccgaggctgttggtgtcatcgccgaacctgaggtgaaaagtgtagagatcactccagcccacctattcttcgtcgtcgcaagcgatggcgtgtttgagtttctctccagccaggatgtcgtggacatggtggctgcatatgaagatccccgggaagcttgctcagcaattgctgcagagtcgtacaaactatggctggagcatgaaaacaggacggatgacattacgataatcattgtgcacatccgggattccgaaaatccaggtcctgcagggagccagaaaatgaacggcagcagctcgggagcggtgcaaccagagctaactgtatttgtaccgtcagaagctagccatctgaacagagatgctgctactgaaatgccgtcgtcctcttcaggctctccaacagaacaacacctctcctgcgtcgctccttctccgactcaccctctgcttggagttgggagaacatcagaaacccccaagctgatagaaagcgagagagctatgtcgcaaccagcggaagcatcatggcatcaaagggatggtgttgtcaacatggatcgatcagtgcagcgcagcatcccaacagcctcctgctaa

SEQ ID NO: 22028 - protein, 461 aa, Oryza sativa (japonica cultivar-group)
MGCAQGKCCVPRRQRGRGGGGAVGGRGGATLGRVAVPGAGLVLEYATLAVAGLYPDSPGRESQDAHLVATRFAGHPDLHLFAVFDGHGACGAACAGFARDALPRLLAGVGVGAGEEGGGRMVVVEDPAAAFREALPAANAEMHAADEVDDSMSGTTAVAALVAGGALHVANVGDSRAVAGVWREGRVAAEELSWDQTPFRADERARVKACGARVMSVEQVEGVRDPEAESWVADEGDPPRVWARDGLYPGTAFTRSLGDQAAEAVGVIAEPEVKSVEITPAHLFFVVASDGVFEFLSSQDVVDMVAAYEDPREACSAIAAESYKLWLEHENRTDDITIIIVHIRDSENPGPAGSQKMNGSSSGAVQPELTVFVPSEASHLNRDAATEMPSSSSGSPTEQHLSCVAPSPTHPLLGVGRTSETPKLIESERAMSQPAEASWHQRDGVVNMDRSVQRSIPTASC

SEQ ID NO: 22029 - DNA, 1545 bp, Arabidopsis thaliana
  CDS (1)..(1545)
atgggttgtgcttattccaaaacttgcattggtcagatttgtgctacgaaagagaatagtatcaggcaaacgcatcaacaagctccgtccagaggtggcacgagagctactgcggcggcggcggcggttgaggaggataatccggtgtttaatttctcttcagatgcggtggatgatgtagataacgacgaaattcatcagcttggtttgagtagagaccaggaatgggggattactcggctttctagggtttcttctcaatttctaccaccagatgggtcaagggttgtcaaggttccgtcttgtaactatgaattgagatgctcgtttttgtctcaaagagggtattatcctgatgctcttgataaggccaatcaagatagtttcgctattcatactccttttgggagtaattcggatgatcatttctttggggtttttgatgggcatggtgagtttggtgctcagtgttctcagtttgtgaagcggaggttgtgtgagaatcttcttagacatggtaggtttcgtgtggatcctgctgaggcttgtaattcggctttcttgaccacgaattctcagttacatgctgatttggtagatgatagtatgagtgggactactgcgattacggttatggttagaggaaggacgatatatgtggcgaatgcaggtgattccagggcggttttagctgagaagagggatggtgatcttgtagctgttgatttgtctattgaccagactccttttagacctgatgagcttgaaagggttaagctttgtggtgctagagttcttactcttgatcagattgaaggcttgaaaaatcctgatgttcagtgttggggtactgaggaagatgatgatggagaccctccgagactttgggtgcctaatggaatgtatcctggaactgcttttaccaggagtattggtgattctattgcagagacaattggtgttgttgctaaccctgagattgctgttgttgagctcacaccggataatcctttctttgtggttgctagtgatggcgtatttgagttcatctctagtcaaacggtggttgacatggttgcaaaacataaggatcctcgagatgcttgtgctgcaattgttgctgaatcatataggctatggctacagtatgaaactcggacagatgatataacaatcatcgtcgtgcacattgatggactaaaagatgatgctcctcggcaattgtcgagtacaggaactcaattgcagcctcctattccacaagttgtggagcttacaggttcggaatctccttccacctttggatggaactctaaaaatcaacgtgtgaggcatgatctatctcgagctaggatacgtgccattgagaattcactagagaatggacatgcttgggttcctccatctccagcccacagaaaaacctgggaagaagaagtaagagtgcttgtctgcttcgtatttgctcaaccaatcaggaatgcctcaagtcattcttatattcgaaggctaaatgctggattttctcgtgcaggcacacattga

SEQ ID NO: 22030 - protein, 514 aa, Arabidopsis thaliana
MGCAYSKTCIGQICATKENSIRQTHQQAPSRGGTRATAAAAAVEEDNPVFNFSSDAVDDVDNDEIHQLGLSRDQEWGITRLSRVSSQFLPPDGSRVVKVPSCNYELRCSFLSQRGYYPDALDKANQDSFAIHTPFGSNSDDHFFGVFDGHGEFGAQCSQFVKRRLCENLLRHGRFRVDPAEACNSAFLTTNSQLHADLVDDSMSGTTAITVMVRGRTIYVANAGDSRAVLAEKRDGDLVAVDLSIDQTPFRPDELERVKLCGARVLTLDQIEGLKNPDVQCWGTEEDDDGDPPRLWVPNGMYPGTAFTRSIGDSIAETIGVVANPEIAVVELTPDNPFFVVASDGVFEFISSQTVVDMVAKHKDPRDACAAIVAESYRLWLQYETRTDDITIIVVHIDGLKDDAPRQLSSTGTQLQPPIPQVVELTGSESPSTFGWNSKNQRVRHDLSRARIRAIENSLENGHAWVPPSPAHRKTWEEEVRVLVCFVFAQPIRNASSHSYIRRLNAGFSRAGTH

SEQ ID NO: 22031 - DNA, 996 bp, Arabidopsis thaliana
  CDS (1)..(996)
atgggtcattgcttttcgttaccgtcttctcaatcggagattcatgaggataatgagcacggtgatggaaatgtggtgtgttatggagaagagttcggtttagatcaagaccttccggttcatcgactcggttcggtctgctccatacaaggaaccaaagtgcttaaccaagatcatgctgttctttaccagggatatggaacaagagatacagagctatgtggagtgtttgatggacacggcaaaaatgggcacatggtgagcaaaatggtgaggaatagattgccatcggttttgttagcactaaaggaagagctaaaccaagaatctaatgtttgtgaagaagaagcttcaaaatgggaaaaggcttgttttactgcctttagactcattgatagagagcttaatcttcaagtctttaattgctctttcagtggctccactggtgtggttgccataactcagggagatgatcttgtgatagcgaaccttggtgattcaagggcagtattggggacaatgactgaagatggtgagatcaaggcagtacagttaacatcagacctaacacctgatgttcctagtgaagcagagaggatcaggatgtgcaaaggtcgtgttttcgcaatgaaaacagaaccaagcagccaaagggtgtggttaccaaaccaaaacataccaggattagccatgtcaagagcttttggagatttcaggctcaaagaccatggtgttattgcggttcctgaaatctctcaacaccgaattacttctaaagaccagttccttgtactcgctactgacggggtttgggatatgcttagcaatgatgaagttgtatcgcttatatggagttccgggaaaaagcaagcttcggccgctaaaatggtggcggaggcggctgaagctgcatggaagaaaaggcttaagtatacgaaggtagatgatattacagtaatatgtcttttcttacagaacaaggaacaaccaagttga

SEQ ID NO: 22032 - protein, 331 aa, Arabidopsis thaliana
MGHCFSLPSSQSEIHEDNEHGDGNVVCYGEEFGLDQDLPVHRLGSVCSIQGTKVLNQDHAVLYQGYGTRDTELCGVFDGHGKNGHMVSKMVRNRLPSVLLALKEELNQESNVCEEEASKWEKACFTAFRLIDRELNLQVFNCSFSGSTGVVAITQGDDLVIANLGDSRAVLGTMTEDGEIKAVQLTSDLTPDVPSEAERIRMCKGRVFAMKTEPSSQRVWLPNQNIPGLAMSRAFGDFRLKDHGVIAVPEISQHRITSKDQFLVLATDGVWDMLSNDEVVSLIWSSGKKQASAAKMVAEAAEAAWKKRLKYTKVDDITVICLFLQNKEQPS

SEQ ID NO: 22033 - DNA, 1158 bp, Arabidopsis thaliana
  CDS (1)..(1158)
atgttatcccttttcttcaactttttgacctcttgtctctggccctcttcttccaccacttcccacacttattctgattccaaaggcaaacaagacggccttctctggtacaaagactctgctcaccacctttttggtgatttctccatggccgttgtccaggccaacaacctcctcgaggatcagagccaggtcgaatccggtcctttgaccaccctctcttcttctggtccctatggaacctttgttggcgtctatgacggccacggaggccctgagacctcccgttttgtcaacgatcatctctttcaccatctcaagagattcgcagcggagcaggattccatgtctgtggatgtgataagaaaggcctatgaggcaaccgaagaagggtttctaggggtggtggccaagcagtgggcagtgaagccacatatagcagcggttggctcttgttgcctgatcggtgtggtctgcgatgggaagctttacgtagctaacgttggggactcccgtgcggttttgggaaaggtcatcaaggccacaggtgaggttaatgcgcttcagctctcagctgagcataacgtgagcatagagtctgtgaggcaggaaatgcactccttacaccctgatgactcccatattgtcgtcttaaaacacaatgtctggcgtgttaagggcattattcaggtatcacgatccataggagacgtgtatcttaagaaatcggagttcaacaaggaacctttgtacacaaagtaccgattgcgggagccaatgaaaagacctatcttgagttgggaaccgtcgataaccgtgcatgatctccaaccagacgatcagtttctgatatttgcatcagacggactttgggagcagcttagcaaccaagaggctgttgaaatcgttcagaaccacccaagaaacgggatagcgaggagactggtgaaagctgcgctgcaggaggcagcaaagaaaagagagatgagatattctgatctcaacaagattgagagaggagtcaggaggcatttccatgacgacatcactgtggtcgtcctcttcctggacaccaatctgctcagcagagcctcctctcttaaaaccccttctgtttctatccgtggtggtggtatcactttacctaagaaactttaa

SEQ ID NO: 22034 - protein, 385 aa, Arabidopsis thaliana
MLSLFFNFLTSCLWPSSSTTSHTYSDSKGKQDGLLWYKDSAHHLFGDFSMAVVQANNLLEDQSQVESGPLTTLSSSGPYGTFVGVYDGHGGPETSRFVNDHLFHHLKRFAAEQDSMSVDVIRKAYEATEEGFLGVVAKQWAVKPHIAAVGSCCLIGVVCDGKLYVANVGDSRAVLGKVIKATGEVNALQLSAEHNVSIESVRQEMHSLHPDDSHIVVLKHNVWRVKGIIQVSRSIGDVYLKKSEFNKEPLYTKYRLREPMKRPILSWEPSITVHDLQPDDQFLIFASDGLWEQLSNQEAVEIVQNHPRNGIARRLVKAALQEAAKKREMRYSDLNKIERGVRRHFHDDITVVVLFLDTNLLSRASSLKTPSVSIRGGGITLPKKL

SEQ ID NO: 22035 - DNA, 1122 bp, Arabidopsis thaliana
  CDS (1)..(1122)
atgggacatttctcatcgatgttcaatggattagctcgatcattttctataaagaaagtgaagaacaacaatggaaactgcgacgcaaaggaagctgctgatgagatggcaagcgaggctaagaaaaaagaattgattctgaaatcctctggttatgttaatgtacaaggatctaataatttagcctctcttttctccaaacgcggcgaaaaaggcgttaatcaggattgtgcactcgtttgggagggatttgggtgccaagaagacatgatcttctgcgggatattcgatggacacggtccatggggtcactatgtagccaaacaagtaagaaactcaatgcctttgtcgcttctttgcaactggcaaaagattcttgctcaggccactctagaacccgagctcgacctcgaaggctctaataaaaaaatctcaagattcgacatatggaagcaatcctatctaaaaacgtgtgcaacggttgatcaagagcttgaacatcaccgcaagatcgattcttactatagcggcacaacagctctaaccattgtgagacagggtgaagttatttatgtagcaaatgtaggcgattcaagagcggtactagccatggagtcggatgagggaagcttggttgcggttcagctcaccctcgatttcaaaccgaatctaccacaggagaaggagcggataattggctgcaaagggcgggttttctgtctagatgatgagccgggagtccatcgtgtgtggcagccagacgcagaaacaccggggctcgcaatgtcaagagcattcggagactactgtattaaagagtatggattggtctcagtccctgaagtcactcaaagacacatctctactaaagaccacttcataatcttggccagtgatgggatatgggatgtgatctctaaccaagaggctatagagattgtctcctcaacggctgagcggcctaaggcggctaagcgattagtagagcaagcggttcgggcttggaagaaaaagagacgaggatactccatggatgatatgtcagtcgtctgcctcttcctccattcttcttcatcgtcatctctatcacaacatcatcatgccatgacgattttaaagtaa

SEQ ID NO: 22036 - protein, 373 aa, Arabidopsis thaliana
MGHFSSMFNGLARSFSIKKVKNNNGNCDAKEAADEMASEAKKKELILKSSGYVNVQGSNNLASLFSKRGEKGVNQDCALVWEGFGCQEDMIFCGIFDGHGPWGHYVAKQVRNSMPLSLLCNWQKILAQATLEPELDLEGSNKKISRFDIWKQSYLKTCATVDQELEHHRKIDSYYSGTTALTIVRQGEVIYVANVGDSRAVLAMESDEGSLVAVQLTLDFKPNLPQEKERIIGCKGRVFCLDDEPGVHRVWQPDAETPGLAMSRAFGDYCIKEYGLVSVPEVTQRHISTKDHFIILASDGIWDVISNQEAIEIVSSTAERPKAAKRLVEQAVRAWKKKRRGYSMDDMSVVCLFLHSSSSSSLSQHHHAMTILK

SEQ ID NO: 22037 - DNA, 1167 bp, Oryza sativa subsp
  CDS (1)..(1167)
atggggatctgtgcatcttcagagcagctggagcatgttcatgagacagatgagagcattgtgtatgtgaaggatgagcaaggaagggggggtaggggggtggagagtgggggggctaggaaggtggcctccctcttctcccagaggggcaagaaaggccccaaccaggactctgtcatcctctgccagggattcggcatggaggacggcgtgttctgcggcgtgttcgacggccatggccggtgcgggcaattcatcagcaagctggtgcgggactacctgccgttcatgatcctgagccaccggaacgcgctgctcctggccgacgccgccgccgacgacgacgacgacgccgcgttcagcgacgacgcggcggcgtcgtcgtccgcggacagcagcggcaactcgtcgccgcagccgtcggcgtcggcgtcggcgcagatgctggaggaatggaggcaggcgtgcgccagcgcgttcgccgccatggacggcgagctcaagctccagcccaacctcgactgcgcgttcagcggcacgacggcggtgtgcgccatcaagctgggcaaggacctcatcatcgccaacctcggcgactcgagggccgtgctcgccaccatgtcggacaccggctacctccaggcggtgcagctgacggtggaccacaaaccaagcgtgcccgaggaggcggcgaggatcaagcggagcggggggagggtgttcgggctgaaggacgagccaggggtgatgcgggtgtggctgcccggggagaactcgccggggctcgccatggcgaggtcgctgggcgacatgaggctgaagcggcacggcgtgatcccggcgccggaggtgacgtcgcggcgcgtgacgggcgccgacctgttcatggtgctcgccacggacggggtgtgggacgtgctgagcaacgaggaggtggtgtccatcgtgtgcgcgacgccgcggaagcagcacgcgtcgaaggcggtggtggaggccgccgtgcagcggtggcgggccaagttcccgacgtccagggtggacgactgctccgccgtctgcctcttcctccacgaccacaccctcggcacggccgccgccgccgccgcagccgccgcggccgccaggaaggcgcgcagggcctccaccgccacgccgccggcgagctga

SEQ ID NO: 22038 - protein, 388 aa, Oryza sativa subsp
MGICASSEQLEHVHETDESIVYVKDEQGRGGRGVESGGARKVASLFSQRGKKGPNQDSVILCQGFGMEDGVFCGVFDGHGRCGQFISKLVRDYLPFMILSHRNALLLADAAADDDDDAAFSDDAAASSSADSSGNSSPQPSASASAQMLEEWRQACASAFAAMDGELKLQPNLDCAFSGTTAVCAIKLGKDLIIANLGDSRAVLATMSDTGYLQAVQLTVDHKPSVPEEAARIKRSGGRVFGLKDEPGVMRVWLPGENSPGLAMARSLGDMRLKRHGVIPAPEVTSRRVTGADLFMVLATDGVWDVLSNEEVVSIVCATPRKQHASKAVVEAAVQRWRAKFPTSRVDDCSAVCLFLHDHTLGTAAAAAAAAAAARKARRASTATPPAS

SEQ ID NO: 22039 - DNA, 1335 bp, Oryza sativa subsp; identical to SEQ ID NO: 5358
  CDS (1)..(1335)

SEQ ID NO: 22040 - protein, 444 aa, Oryza sativa subsp; identical to SEQ ID NO: 5359

SEQ ID NO: 22041 - DNA, 984 bp, Oryza sativa subsp; identical to SEQ ID NO: 898
  CDS (1)..(984)

SEQ ID NO: 22042 - protein, 327 aa, Oryza sativa subsp; identical to SEQ ID NO: 899

SEQ ID NO: 22043 - DNA, 3219 bp, Oryza sativa subsp
  CDS (1)..(3219)
atgggctgctcaccttctaaggtgtgttcatgtccacattataagggcagtttgtgcttctgtgactgtggatgctttggacaaacacctgactccccaagagagtcaaggggaaaatcaaaccgggttaggggaaagacagattctagtgcttcagatgcttcttctgatgacctagaggaagatgatgatggattgcaccaaatgaacattacaagggactctaatgttggtatcaatcgactctcaagggtctcatcacaatttcttccaccagaaggttcacgtaaagttcgaatcccattggggaattatgacctgagatattcctacttgtctcaaagaggctactacccagaatcattggacaagccaaaccaagacagtttttgtatacatactccatttggaacaagccctgatgaccatttctttggtgtatttgatggccatggagaatatggagctcagtgctcacaatttgtaaagcgaagactatgcgaaaacctgctcagagatgaccggttccgtactgatgttgttcaggctcttcattctgctttcttggcaacaaattcacagcttcatgcagacagcttagatgattctatgagtggtactactgcagtcactgtgctggtgaggggtaaaactatttacattgcgaatacgggtgattcacgtgctgttattgccgaaaaaagaggggaagatgttgttgctgttgacctgtccatagatcaaacaccctacaggactgatgagcttgaaagggtcaaggagtgtggtgctagggttatgacgttggatcagatagaggggctaaagaacccagatgtacagtgttggggcaccgaggaaagtgatgacggtgatcctccaaggttgtgggtgcaaaatggcatgtatccaggaactgcttttactcgcagcattggagattctgtcgctgaatctatcggtgttgtcgctaatcctgagatttttatcctggagctcaatgccaaccatccattctttgttcttgctagtgatggagtttttgagtttctttctagtcaaactgttgtcgacatgattgctaaatacaaggatcctcgtgatgcgtgcgctgcaattgttgctgaatcctatcgcctctggctacagtatgaaactcgtacagatgacattacaataatagttgttcatattaacgggttaactgatatggaatgtactcaaactgtaatgaaagtatctttacaaccttcccaacaagtcgtagaattggtaggctcagaatcaccatcgacaataagtttgaatcccaagaaccagcgttccaggcaagatctatcacgtgctcggctgagagcacttgaaagttccctggaaaatggtcgactatgggtccctccatccccatcgcatcggaagacatgggaagagcaagcacatattgagcgaatactacacgaccatttcctcttcaggaagctcactgactcacagtgccatgttttacttgattgcatgcaaagagttgaggtgaaagctggggatatagtggtgcagcagggcggtgaaggcgagtgcttctatgtagttgggagtggtgagtttgaagtgctagccattcaggaagaagatggaaaggaagttacaaaggttctacatcggtatactgctgacaaactatcttcttttggggagctagcactaatgtataataaaccacttcaagcttcagtccgtgctgtgactactggaactttatgggctctaaagcgagaggattttcggggaattctgatgtcagagttttcaaatataccatcattaaagttgctccgatcagtggagctgtttacgagattgacaatgcttcaactaagtcaacttgctgattctcttgttgaagtaacttttggggatggtcaaatgatagtagacaagaatgatgatgcatcttccttgtatattattcaaagaggtcgtgtgaaacttaaattggctgcagatcaggtggcccaatcaagtcgagaagatggtaattacgtgtttgagatagatgaagggggacactttggagagtgggctctctttggggagacaattgcttttactgctatgtcagttggtgatgtgacttgttctactattgcaaaggagaagtttgactcaattattgggcccttgccaaaagtttcccagtctgattccaagctcaaagattccttggttcctaaagggcatggtgcagatgatagttccttcaggaaggcgcagctatctgatttggaatggaaaatgtgcatatatgccgctgattgcagtgagattggtcttgtccaactaagaggttctgacaagatcaaaagcttaaagaggttttacatcaagagagtaaaagaccttcataaggaaaaacacgtatttgatgagaaggatctcatgaaatctttgagccaatcaacttgtgtgccagaagttctatgtacttgcgctgatcaatcctacctaggaatactgctgaattgttgcctttgttgctcactggcttcaatacttcatgcaccactaaatgagtcgtctgcacgattctatgcagcctctgtcgtcgtagcgctagaaaatctccatcagaggtccattctttacagaggtgtttctgcagacattcttatggtcgaccgatcagggcatcttcaactagttgacttcaggtttgcaaagaagttgcaaggtgaaaggacttacacaatatgtgggattgccgactctctagctccagagatagttcttggtaggggccatggattttctgctgactggtgggcgctgggagtgttgatttatttcatgctgcaatcagacatgccatttggctcttggagggagagtgaactggaaccttttgcaaagattgccaagggtcaccttgtcatgccatcaacattcagcatcgaagttgttgaccttattacaaagctactcgaggtaaacgaaaatgcgcgccttggggccaagggagcggaatctgtgaaaagacacccctggtttgatggcattgactggaaacaaatagcagatggtacttatacagtaccccaagaaatcaccgatcgtgtcgacagctatgtagaaactcttacagaggacttgacagcatccccttccatgccaagtgaagaaacagctgatcaggctgctccagaatggatccaggattggtga

SEQ ID NO: 22044 - protein, 1072 aa, Oryza sativa subsp
MGCSPSKVCSCPHYKGSLCFCDCGCFGQTPDSPRESRGKSNRVRGKTDSSASDASSDDLEEDDDGLHQMNITRDSNVGINRLSRVSSQFLPPEGSRKVRIPLGNYDLRYSYLSQRGYYPESLDKPNQDSFCIHTPFGTSPDDHFFGVFDGHGEYGAQCSQFVKRRLCENLLRDDRFRTDVVQALHSAFLATNSQLHADSLDDSMSGTTAVTVLVRGKTIYIANTGDSRAVIAEKRGEDVVAVDLSIDQTPYRTDELERVKECGARVMTLDQIEGLKNPDVQCWGTEESDDGDPPRLWVQNGMYPGTAFTRSIGDSVAESIGVVANPEIFILELNANHPFFVLASDGVFEFLSSQTVVDMIAKYKDPRDACAAIVAESYRLWLQYETRTDDITIIVVHINGLTDMECTQTVMKVSLQPSQQVVELVGSESPSTISLNPKNQRSRQDLSRARLRALESSLENGRLWVPPSPSHRKTWEEQAHIERILHDHFLFRKLTDSQCHVLLDCMQRVEVKAGDIVVQQGGEGECFYVVGSGEFEVLAIQEEDGKEVTKVLHRYTADKLSSFGELALMYNKPLQASVRAVTTGTLWALKREDFRGILMSEFSNIPSLKLLRSVELFTRLTMLQLSQLADSLVEVTFGDGQMIVDKNDDASSLYIIQRGRVKLKLAADQVAQSSREDGNYVFEIDEGGHFGEWALFGETIAFTAMSVGDVTCSTIAKEKFDSIIGPLPKVSQSDSKLKDSLVPKGHGADDSSFRKAQLSDLEWKMCIYAADCSEIGLVQLRGSDKIKSLKRFYIKRVKDLHKEKHVFDEKDLMKSLSQSTCVPEVLCTCADQSYLGILLNCCLCCSLASILHAPLNESSARFYAASVVVALENLHQRSILYRGVSADILMVDRSGHLQLVDFRFAKKLQGERTYTICGIADSLAPEIVLGRGHGFSADWWALGVLIYFMLQSDMPFGSWRESELEPFAKIAKGHLVMPSTFSIEVVDLITKLLEVNENARLGAKGAESVKRHPWFDGIDWKQIADGTYTVPQEITDRVDSYVETLTEDLTASPSMPSEETADQAAPEWIQDW

SEQ ID NO: 22045 - DNA, 1299 bp, Ostreococcus tauri
  CDS (1)..(1299)
atgggcgacgcgacgcgcgggcgctcggacgcgcgcacgtcgacgcgcggtcgcgcgcgggggggaccgcgcctcgggacgcggcgacgcgatggacgcgccgggcgccgccggccgacgacgcgcgcgcggcggttcagcatggatgtcacccggcgagaggtctcgagggcgcgggaggtgaagctgggtgatcggtggggggtacgcgtcgcggtggtgtgtcaggagggatggtatccgaggaaggaggatcacgtgaatcaagacgcgtgggtcgtcgtcgcgggcgaggggttgacgcatcgagaggagagcatcgatgaatttgggagcgatgtggtattggagcggtcgtgtggggaactgttgctcggcgtgttcgatgggcacgggaaacacggcgaggcgtgcgcgacgatcgccggcggcgcgtttgcggagtttttaaagcgagaaactcgagggatttcgatgggaacgggggggtacgagcgcacgttcgagcgcgtgaacgcgacggtgtgtgattcgctcggggatgatgcctcgttcagtgggtccacggcgatcacggcgctttttgactcgcgcgggacggtgcgcgtggggaacgtgggcgactctcgcgcggtggtcggcgtcgaggtcggtccagggcaaacgccgaggaatcggcacacgaagaagtgggaggtgaaggatttaacgagggatcagacgtgctttcgcgcggatgagcgaaagcggatgcgagtcgaggcgcagagcgcgatgacgttcgccaccatcgggatggttttgggcgaaaccgagtcgcacgaagactttggcgacggtgaacccgggtcggaggacgagtactgcgacgatccaccgcgggtgttcatggcgggtcagcgattccccgggtgcgcgttcacgcgctcgatcggggacacggtggggaaatcactcggggtctccgcgacgccagagatgtcgacgtacgacttggcggaagagcctacgacgcggtgcttaatcctcgcctcggacggcgtcttcgagttcatgtcgagcgcggaaacgatgtccatcgcagaaaagttctacgatgagaacgccccggaggcggctgagctcgccgcgcacgccatcgttcgcgccgcgtacacgcgttggcaagagaacgacgagcgcgcggacgacatcaccgccgtcgtcgcttttatttatcccgccgatccgggaacgtccacggccacggtcgtcgtgaacgatgtcatcgaagcgacgatgaataaactggcgatttga

SEQ ID NO: 22046 - protein, 432 aa, Ostreococcus tauri
MGDATRGRSDARTSTRGRARGGPRLGTRRRDGRAGRRRPTTRARRFSMDVTRREVSRAREVKLGDRWGVRVAVVCQEGWYPRKEDHVNQDAWVVVAGEGLTHREESIDEFGSDVVLERSCGELLLGVFDGHGKHGEACATIAGGAFAEFLKRETRGISMGTGGYERTFERVNATVCDSLGDDASFSGSTAITALFDSRGTVRVGNVGDSRAVVGVEVGPGQTPRNRHTKKWEVKDLTRDQTCFRADERKRMRVEAQSAMTFATIGMVLGETESHEDFGDGEPGSEDEYCDDPPRVFMAGQRFPGCAFTRSIGDTVGKSLGVSATPEMSTYDLAEEPTTRCLILASDGVFEFMSSAETMSIAEKFYDENAPEAAELAAHAIVRAAYTRWQENDERADDITAVVAFIYPADPGTSTATVVVNDVIEATMNKLAI

SEQ ID NO: 22047 - DNA, 3357 bp, Ostreococcus tauri
  CDS (1)..(3357)
atgggttgcgcctcctccgccaccgccgagggaacatccaaggacggcaccgccgtcgtccgctcgcccgaacgcgcgtcgacgtccgcgaacgacgcgtcaaagacgaaacaatcacaatccaaatcaccgagcgtgagctaccaagtgcgcctgcgcggagggccgttgacgcaggacgaatacaacgcgcggttaacgggcgtgcacggggcgaacgcgatcgatgtcgcgtttaagggcgagagcggggaggcgcggtcgtacacattacgatacgcgctgtgctcccagcgcggatactacccagaggcgccgaataagcgcaatcaagacgcgtgggtgtgcgcacggaatttccgaggtaaaaaggatgagttgttgttcggcgtgttcgatggacacggggagtttgggacggagtgcgcggagttcgcgtgcgaacgactgccgatggagatcgcgacgagggggttcgggaacgtgagcgcgtacgaggcggcgtttcgggcgacgaatgcggggttacgggcgagcgacgtggatgattcgttgagcggaaccacggcggttatcgcgcacatcaaaggaagggatatgtatgtgatgaactgcggggattcgcgggcgacgatggcaatggcgacgaggaacgtcaagggagaggttacgggggtggacacggttgatttgagctcggatcagacgccgtttcgcgcggatgagtgcgagcgagtgaagcgagagggagcgcgcgtgctcacgctcgatcaactcgaggggtttaaggatcccgcggtgcagtgctgggggacggagcaagacgacgacggcgatcctccgaggctttgggcaaagaacgggatgtatccaggaacagcgttcacgcgttccatcggcgacgccgtggccgagcgcataggcgtcatctcgactccggaaatcgagcacgttcgcttgagcgaggatactaaggcagtgatcattgcctcggacggtgttttcgagttcattccatcgacaagcgtggtcaaggcggcgacgtcgacgaaggatccacagcaaagcgccatcgcgctcgtggtcgagtcctacaagctttggctgcagtacgagacacgcacggatgatatcactgtcatcgtcatcctgatagaggacttcctggaggagaaacagcaagaaatcgcaccagtcacgccgctcaaatcagtccaaagcgtgggggctctgttcaactttccggatcgcatggacccgctctcgtcgccgtttccgtcgtcagcgagaccgagacgtcgtgtcatgccgacttttaccatgcaaacacgtcgtagctatcgcgtcgttcacccgtacggggttccatcggatatcacgctccaagacggcagtccgttggaggaacagatgggagatttgtcaatcgcgatttcgtcggacaggtcgcccctgatttctatcatcaggcagtcgttcttattttacgacgccccagaacacttgttagagcaagtagccaaggtcatgtacaagaagcgcttcgaaaacggcgacgtcatcgtgacacagaacgacaaaaactgcgtgcgagcgttgtacgtcgtgcagagcgggacgctgactggacgagacaacgtgcaatgggtcgagaacgagggagacgacaatgcgaagaagaagcaaaccgaaaagttgcgagcgtacggtagagacggggataggatgtgctttaacgaacagtgcatggcgcacgcacagatgccgcacgagacagtgactgctaccagcgacggagtgctttgggttctagatttcgccgcatacgtcactatcacgcgcgaggccaatgaacgaagcgttgatatgttgacacgtgtgctccgaggagtcgatgcgttgaagcccgtgagtttgagtgacttgaggcgcgtagcggcgaagattgtcctcaacagagccaactcgctcgtcaagacagctaaggatcagctcattgcgaatcaaggacagattctcaccgcaatgcacgtcatgaacaagggagaggtcgcgtgtaccgtgaggtcgaacgcacgcgacgagagcgaacctcccagggtcgttctgaagttgacagtcgggcaatattttggtgaacgcgctctgctttctgcagctggagcgccatgcgcgacaaacattcagtcgctcagcgatgatgtgcaggtttggaaagtcacgagagaggacatctcatctgtcactggtagcgaagtaataatgcgaacatcatcggcgttggagcgaacggcatcgagcgagcgtttactcgcacctcgcacctcggcgggtttggacattccccatgaacggaggttgagtttcggcgatgacgatcgcgctacgcgtgaggcgttgtacatgacacttcttggccacatgcgcgagactaagggaatgcacaaggaggcgacagtacaaatttccctcgcgaggacagagtcgctctctcgagtggaaggcgttctgcgcgagcgcaaaatcatcaccgctctcaccgctgggtctactttgccaccgtccttcattccgacgccgggtatcccgtcaagagacgcaagcttcatctccatcccgtatcctttcgttccgaggtgtgcgctggaggctgtgatcgcgtgcggcggtgggtcaaatattgaagtggtgcgatactacatcgcatcgctcgtcgtcgtcctcgagtacatgcactcgatggacatcgtgttccgaggcatggatccggagaccatggttatcgatgagcgtggcatgcttcgtttaacggacttccgattcgccaagcgcctctccgtgacggacaagactcccgggaggacttatactgtgtgcggcgctgcggcgtacatggcacctgaagtcgttcgaggcctaggccacgacgagcgtgccgactggttctcactgggcgtcttcatcgcgcaccttcttcgtggggcgcccccgttcgggatgacggtagggcacaagacatacgaggcgatttgcatgtgcgatttggccagcgcgttcccggcgtcgatcgataagaagattcctgaggcggagatcctcgcgcggtgcctcctcgtcgtcgacccggacagtcgtctgcacagtacatcgtcagtgaagcagtgtgatctgttgtgcgacgtcgattgggacgcgttggcgaaccaaccaccgcccaaggcggtggagacactcactcgatcggcgtatcgcggccgaggcgtgccgccgattcgagacgcgacagagccccaaaacgtggtcgaacgaaccgcctgggtcgacacattcatggctctggactccatcgcaccttag

SEQ ID NO: 22048 - protein, 1118 aa, Ostreococcus tauri
MGCASSATAEGTSKDGTAVVRSPERASTSANDASKTKQSQSKSPSVSYQVRLRGGPLTQDEYNARLTGVHGANAIDVAFKGESGEARSYTLRYALCSQRGYYPEAPNKRNQDAWVCARNFRGKKDELLFGVFDGHGEFGTECAEFACERLPMEIATRGFGNVSAYEAAFRATNAGLRASDVDDSLSGTTAVIAHIKGRDMYVMNCGDSRATMAMATRNVKGEVTGVDTVDLSSDQTPFRADECERVKREGARVLTLDQLEGFKDPAVQCWGTEQDDDGDPPRLWAKNGMYPGTAFTRSIGDAVAERIGVISTPEIEHVRLSEDTKAVIIASDGVFEFIPSTSVVKAATSTKDPQQSAIALVVESYKLWLQYETRTDDITVIVILIEDFLEEKQQEIAPVTPLKSVQSVGALFNFPDRMDPLSSPFPSSARPRRRVMPTFTMQTRRSYRVVHPYGVPSDITLQDGSPLEEQMGDLSIAISSDRSPLISIIRQSFLFYDAPEHLLEQVAKVMYKKRFENGDVIVTQNDKNCVRALYVVQSGTLTGRDNVQWVENEGDDNAKKKQTEKLRAYGRDGDRMCFNEQCMAHAQMPHETVTATSDGVLWVLDFAAYVTITREANERSVDMLTRVLRGVDALKPVSLSDLRRVAAKIVLNRANSLVKTAKDQLIANQGQILTAMHVMNKGEVACTVRSNARDESEPPRVVLKLTVGQYFGERALLSAAGAPCATNIQSLSDDVQVWKVTREDISSVTGSEVIMRTSSALERTASSERLLAPRTSAGLDIPHERRLSFGDDDRATREALYMTLLGHMRETKGMHKEATVQISLARTESLSRVEGVLRERKIITALTAGSTLPPSFIPTPGIPSRDASFISIPYPFVPRCALEAVIACGGGSNIEVVRYYIASLVVVLEYMHSMDIVFRGMDPETMVIDERGMLRLTDFRFAKRLSVTDKTPGRTYTVCGAAAYMAPEVVRGLGHDERADWFSLGVFIAHLLRGAPPFGMTVGHKTYEAICMCDLASAFPASIDKKIPEAEILARCLLVVDPDSRLHSTSSVKQCDLLCDVDWDALANQPPPKAVETLTRSAYRGRGVPPIRDATEPQNVVERTAWVDTFMALDSIAP

SEQ ID NO: 22049 - DNA, 1416 bp, Ostreococcus tauri
  CDS (1)..(1416)
atgaaggagcacgtgactacctgtagtgacggttcgaacattcgttgggcagccttgtcgcaaaagggatactatccgactgattttaataggctgaagaagaaccaagattccttcgatctccaggcgaatgttgccggacgcgagggcaagcattttgcggcagtctttgatggtcatggaaccaccggcgatgtgtgttccaactttgcgaaacttcacatactcaaagagtttgagtctacgatgcgccgaagtgaaaatgccgcgtcggctcttcgcgacgcacacgaggtcgtgaaccaagctctccacgacgacaagtcgataaatgacgaaaaatctggcacgacatccgtgtgcgtgtatctggacgacacgaacttgtgcatagcgaacgttggtgattctatctgcatggtgggtaaaatcggtgccaaagatggccgaacgctagaggctaaagtgctgatgaaagagcacacgctcaccgatccagctgagcgccagcgtattgagagctccggtggccgcgtcatgaaggagtcacagatagacagcgatgccgcacaaacacacgcctcaccgatgcgaaagttcagaaagagtctttccttgaaagaagttgatgatggagagcaactgcgcgtgtacgccgctaagggcaagaatccagggacggcgttttcgcgctcgctcggcgattccatggcggaatcgcttggcgtcattgctgagccagatatcgagcactacgctctacgagccgaagatcgagtcgttatcctctgtagcgatggcatcagcgatttcatcgcccctgacgaggttatgaaagtctgctcgttgtacaacaatccggcggacgcttgtcgtgctctcgtgggcgaggcgtataagcgctggatatcctcggaagatcgtaccgatgatatcacaatcatcatcggtttccgtggaagtaagagtgatccctcaggagatatcccagtggcatcttcgagcactgctctgacgacggaaggcaagatttggaccgtcggcatgggctttgcgagtggcttcttgggcggtttgtgcggcatccgtggcccaccaatcatcctctactttcttcacgcccctattaaaatgtccaaggcggtccaaaagggcaacggggccgtcatcacggcggcgaacgtctttgtgcgagtgttggtttacgcgatcaagtctgctgtggacgaaaagcacaaccagttcgcgtcggacgatgttcctctgtatgttgtcatcgccatcgtgagcataggcggcgtcgcgattggtcaggatatctttcagatgatgaaggatagtcaagccacgataaagacggttttgtgcttcctcttgctcttgtgcggcatcagtttgataatctccggggcgtga

SEQ ID NO: 22050 - protein, 471 aa, Ostreococcus tauri
MKEHVTTCSDGSNIRWAALSQKGYYPTDFNRLKKNQDSFDLQANVAGREGKHFAAVFDGHGTTGDVCSNFAKLHILKEFESTMRRSENAASALRDAHEVVNQALHDDKSINDEKSGTTSVCVYLDDTNLCIANVGDSICMVGKIGAKDGRTLEAKVLMKEHTLTDPAERQRIESSGGRVMKESQIDSDAAQTHASPMRKFRKSLSLKEVDDGEQLRVYAAKGKNPGTAFSRSLGDSMAESLGVIAEPDIEHYALRAEDRVVILCSDGISDFIAPDEVMKVCSLYNNPADACRALVGEAYKRWISSEDRTDDITIIIGFRGSKSDPSGDIPVASSSTALTTEGKIWTVGMGFASGFLGGLCGIRGPPIILYFLHAPIKMSKAVQKGNGAVITAANVFVRVLVYAIKSAVDEKHNQFASDDVPLYVVIAIVSIGGVAIGQDIFQMMKDSQATIKTVLCFLLLLCGISLIISGA

SEQ ID NO: 22051 - DNA, 1122 bp, Arabidopsis thaliana
  CDS (1)..(1122)
atgggacatttctcatcgatgttcaatggattagctcgatcattttctataaagaaagtgaagaacaacaatggaaactgcgacgcaaaggaagctgctgatgagatggcaagcgaggctaagaaaaaagaattgattctgaaatcctctggttatgttaatgtacaaggatctaataatttagcctctcttttctccaaacgcggcgaaaaaggcgttaatcaggattgtgcactcgtttgggagggatttgggtgccaagaagacatgatcttctgcgggatattcgatgggcacggtccatggggtcactatgtagccaaacaagtaagaaactcaatgcctttgtcgcttctttgcaactggcaaaagattcttgctcaggccactctagaacccgagctcgacctcgaaggctctaataaaaaaatctcaagattcgacatatggaagcaatcctatctaaaaacgtgtgcaacggttgatcaagagcttgaacatcaccgcaagatcgattcttactatagcggcacaacagctctaaccattgtgagacagggtgaagttatttatgtagcaaatgtaggcgattcaagagcggtactagccatggagtcggatgcgggaagcttggttgcggttcagctcaccctcgatttcaaaccgaatctaccacaggagaaggagcggataattggctgcaaagggcgggttttctgtctagatgatgagccgggagtccatcgtgtgtggcagccagacgcagaaacaccggggctcgcaatgtcaagagcattcggagactactgtattaaagagtatggattggtctcagtccctgaagtcactcaaagacacatctctactaaagaccacttcataatcttggccagtgatgggatatgggatgtgatctctaaccaagaggctatagagattgtctcctcaacggctgagcggcctaaggcggctaagcgattagtagagcaagcggttcgggcttggaagaaaaagagacaaggatactccatggatgatatgtcagtcgtctgcctcttcctccattcttcttcatcgtcatctctatcacaacatcatcatgccatgacgattttaaagtaa

SEQ ID NO: 22052 - protein, 373 aa, Arabidopsis thaliana
MGHFSSMFNGLARSFSIKKVKNNNGNCDAKEAADEMASEAKKKELILKSSGYVNVQGSNNLASLFSKRGEKGVNQDCALVWEGFGCQEDMIFCGIFDGHGPWGHYVAKQVRNSMPLSLLCNWQKILAQATLEPELDLEGSNKKISRFDIWKQSYLKTCATVDQELEHHRKIDSYYSGTTALTIVRQGEVIYVANVGDSRAVLAMESDAGSLVAVQLTLDFKPNLPQEKERIIGCKGRVFCLDDEPGVHRVWQPDAETPGLAMSRAFGDYCIKEYGLVSVPEVTQRHISTKDHFIILASDGIWDVISNQEAIEIVSSTAERPKAAKRLVEQAVRAWKKKRQGYSMDDMSVVCLFLHSSSSSSLSQHHHAMTILK

SEQ ID NO: 22053 - DNA, 1509 bp, Medicago sativa
  CDS (1)..(1509)
atggggtcctgcttctctacggaaagcaggagccctcatccgaattcgccctcgtcgtcgtcatcgtcttttaggaagaatagaaagaacagtaagaagaagcttggatcaagagcttcttcttttgaatattggaggaatgagcctcttcataagattcatgataggatcttccttaatggttcatctgaatttgcttccttgtttactcaacaaggaaaaaagggtaccaaccaagatgctatggttgtttgggagaacttttgttctagagaagatacaatattctgtggagtgtttgatggccacggtccatatggccatatggttgcaaaaagagtgagggattctcttcctctaaaactgaatacccaatgggaacttaatgtatctggtgatgatgtcctcaaggagattagcattaatgctgcaggaagtatgatcttggaagatgccacatttgcatctgcagatgaagaatccagggtatccattgatgctgaggaaatggaaaaactcccagaaatctttcacacactcaaagagtcctttctgaaagcattcaaagttatggatagagaattgaagatgcaccaaactattgattgcttctgtagtgggacaacagcagtaacactggttaagcagggtcgtgatcttattattggaaatgttggtgactctagagctgtgttgggtacaagagagaaagacgattctcttgttgcagtccagttaactgtggatttaaaacccaaccttccagccgaagcagagagaattcgcaaatgtaaaggacgtgtttttgctctccatgatgaacccgaagtttgtcgagtctggttgccaaacagtgattcccctgggcttgccatggcaagggcttttggagatttttgtctgaaagattttggtctgatatctgttccagaggtgtcatacagaagactcaccgagaaggatgagtttgttgtcatggcaacagacgggatttgggatgtactatctaacaaggaagtggtcgacattatagcagctgcaccacggcgtgcaacagcagctagatcactggttgagacagcagttagagcatggagatacaaatatccaacttcgaaagtcgatgactgtgccgtggtttgtctctttctagacaaaggcatgcaaaaaatatcaactgcttctcatgccaacaagtccaaagagcatcgtcctagttcaggaattcaagtcagctacaatggtgataacgaggaagatgtttctggacctaatgctctagaaagatcaggaacatgcaggaaaggcaatgacaataataatatatcacatgaagataaagaagaggaagagtttaaggaagaggaagagattgatcctgagttggagaaagagtggtctgctcttgaaggtgtatcgcgtgtcaacacattattaaaccttccaagatttgttcctgataaagaagacaaagcagctgcagcagcaaggagcaaaaaactcaaatga

SEQ ID NO: 22054 - protein, 502 aa, Medicago sativa
MGSCFSTESRSPHPNSPSSSSSSFRKNRKNSKKKLGSRASSFEYWRNEPLHKIHDRIFLNGSSEFASLFTQQGKKGTNQDAMVVWENFCSREDTIFCGVFDGHGPYGHMVAKRVRDSLPLKLNTQWELNVSGDDVLKEISINAAGSMILEDATFASADEESRVSIDAEEMEKLPEIFHTLKESFLKAFKVMDRELKMHQTIDCFCSGTTAVTLVKQGRDLIIGNVGDSRAVLGTREKDDSLVAVQLTVDLKPNLPAEAERIRKCKGRVFALHDEPEVCRVWLPNSDSPGLAMARAFGDFCLKDFGLISVPEVSYRRLTEKDEFVVMATDGIWDVLSNKEVVDIIAAAPRRATAARSLVETAVRAWRYKYPTSKVDDCAVVCLFLDKGMQKISTASHANKSKEHRPSSGIQVSYNGDNEEDVSGPNALERSGTCRKGNDNNNISHEDKEEEEFKEEEEIDPELEKEWSALEGVSRVNTLLNLPRFVPDKEDKAAAAARSKKLK

SEQ ID NO: 22055 - DNA, 1455 bp, Oryza sativa subsp; identical to SEQ ID NO: 5396
  CDS (1)..(1455)

SEQ ID NO: 22056 - protein, 484 aa, Oryza sativa subsp; identical to SEQ ID NO: 5397

SEQ ID NO: 22057 - DNA, 1200 bp, Oryza sativa subsp
  CDS (1)..(1200)
atggggtgcgcgcaggggaagtgctgcgtgccgcggcggcagaggggacgcggcggcggcggggcggtgggtgggcgcggcggcgcgacgctggggcgggtggcggtgccgggggcggggctggtgctggagtacgcgacgctggcggtggcggggctgtacccggactcgcccgggagggagtcgcaggacgcgcacctggtggcgacgcggttcgcggggcaccccgacctccacctgttcgcggtgttcgacgggcacggcgcgtgcggcgccgcgtgcgccgggttcgcgcgcgacgcgctcccgcggctgctcgcgggggtgggggtgggggcgggggaggagggaggggggaggatggtggtggtggaggaccccgcggcggcgttccgggaggcgctcccggcggcgaacgcggagatgcacgcggcggacgaggtggacgactcgatgagcgggaccaccgccgtggcggcgctggtggcggggggtgcgctccacgtggccaacgtgggggactcacgcgccgtggccggggtttggcgcgaggggcgcgtggcggcggaggagctctcgtgggaccagacgccgttccgcgccgacgagcgcgcccgcgtgaaggcgtgcggcgcgcgggtgatgtcggtcgagcaggtggagggcgtgcgcgacccggaggcggagagctgggtcgccgacgagggggacccacctcgcgtgtgggcgcgcgacgggctctaccccggcacggccttcacgcgcagcctcggcgaccaagccgccgaggctgttggtgtcatcgccgaacctgaggtgaaaagtgtagagatcactccagcccacctattcttcgtcgtcgcaagcgatggcgtgtttgagtttctctccagccaggatgtcgtggacatggtggctgcatatgaagatccccgggaagcttgctcagcaattgctgcagagtcgtacaaactatggctggagcatgaaaacaggacggatgacattacgataatcattgtgcacatccgggattccgaaaatgttgataaattcttatacagaaagcggattccttctgcagggagctgttgctgtgcgatggctgtggtgctggctttgcagagtgtccgtcatgcaccggtggcaaatcctctcggtgctgttgctcgtgtttttcttagagcacctgctgactga

SEQ ID NO: 22058 - protein, 399 aa, Oryza sativa subsp
MGCAQGKCCVPRRQRGRGGGGAVGGRGGATLGRVAVPGAGLVLEYATLAVAGLYPDSPGRESQDAHLVATRFAGHPDLHLFAVFDGHGACGAACAGFARDALPRLLAGVGVGAGEEGGGRMVVVEDPAAAFREALPAANAEMHAADEVDDSMSGTTAVAALVAGGALHVANVGDSRAVAGVWREGRVAAEELSWDQTPFRADERARVKACGARVMSVEQVEGVRDPEAESWVADEGDPPRVWARDGLYPGTAFTRSLGDQAAEAVGVIAEPEVKSVEITPAHLFFVVASDGVFEFLSSQDVVDMVAAYEDPREACSAIAAESYKLWLEHENRTDDITIIIVHIRDSENVDKFLYRKRIPSAGSCCCAMAVVLALQSVRHAPVANPLGAVARVFLRAPAD

SEQ ID NO: 22059 - DNA, 1122 bp, Arabidopsis thaliana
  CDS (1)..(1122)
atgggacatttctcatcgatgttcaatggattagctcgatcattttctataaagaaagtgaagaacaacaatggaaactgcgacgcaaaggaagctgctgatgagatggcaagcgaggctaagaaaaaagaattgattctgaaatcctctggttatgttaatgtacaaggatctaataatttagcctctcttttctccaaacgcggcgaaaaaggcgttaatcaggattgtgcactcgtttgggagggatttgggtgccaagaagacatgatcttctgcgggatattcgatggacacggtccatggggtcactatgtagccaaacaagtaagaaactcaatgcctttgtcgcttctttgcaactggcaaaagattcttgctcaggccactctagaacccgagctcgacctcgaaggctctaataaaaaaatctcaagattcgacatatggaagcaatcctatctaaaaacgtgtgcaacggttgatcaagagcttgaacatcaccgcaagatcgattcttactatagcggcacaacagctctaaccattgtgagacagggtgaagttatttatgtagcaaatgtaggcgattcaagagcggtactagccatggagtcggatgagggaagcttggttgcggttcagctcaccctcgatttcaaaccgaatctaccacaggagaaggagcggataattggctgcaaagggcgggttttctgtctagatgatgagccgggagtccatcgtgtgtggcagccagacgcagaaacaccggggctcgcaatgtcaagagcattcggagactactgtattaaagagtatggattggtctcagtccctgaagtcactcaaagacacatctctactaaagaccacttcataatcttggccagtgatgggatatgggatgtgatctctaaccaagaggctatagagattgtctcctcaacggctgagcggcctaaggcggctaagcgattattagagcaagcggttcgggcttggaagaaaaagagacgaggatactccatggatgatatgtcagtcgtctgcctcttcctccattcttcttcatcgtcatctctatcacaacatcatcatgccatgacgattttaaagtaa

SEQ ID NO: 22060 - protein, 373 aa, Arabidopsis thaliana
MGHFSSMFNGLARSFSIKKVKNNNGNCDAKEAADEMASEAKKKELILKSSGYVNVQGSNNLASLFSKRGEKGVNQDCALVWEGFGCQEDMIFCGIFDGHGPWGHYVAKQVRNSMPLSLLCNWQKILAQATLEPELDLEGSNKKISRFDIWKQSYLKTCATVDQELEHHRKIDSYYSGTTALTIVRQGEVIYVANVGDSRAVLAMESDEGSLVAVQLTLDFKPNLPQEKERIIGCKGRVFCLDDEPGVHRVWQPDAETPGLAMSRAFGDYCIKEYGLVSVPEVTQRHISTKDHFIILASDGIWDVISNQEAIEIVSSTAERPKAAKRLLEQAVRAWKKKRRGYSMDDMSVVCLFLHSSSSSSLSQHHHAMTILK

SEQ ID NO: 22061 - DNA, 1014 bp, Arabidopsis thaliana
  CDS (1)..(1014)
atgggtcattgcttttcgttaccgtcttctcaatcggagattcatgaggataatgagcacggtgatggaaatgtggtgtgttatggagaagagttcggtttagatcaagaccttccggttcatcgactcggttcggtctgctccatacaaggaaccaaagtgcttaaccaagatcatgctgttctttaccagggatatggaacaagagatacagagctatgtggagtgtttgatggacacggcaaaaatgggcacatggtgagcaaaatggtgaggaatagattgccatcggttttgttagcactaaaggaagagctaaaccaagaatctaatgtttgtgaagaagaagcttcaaaatgggaaaaggcttgttttactgcctttagactcattgatagagagcttaatcttcaagtctttaattgctctttcagtggctccactggtgtggttgccataactcagggagatgatcttgtgatagcgaaccttggtgattcaagggcagtattggggacaatgactgaagatggtgagatcaaggcagtacagttaacatcagacctaacacctgatgttcctacgagttctagcgtttcaggtgaagcagagaggatcaggatgtgcaaaggtcgtgttttcgcaatgaaaacagaaccaagcagccaaagggtgtggttaccaaaccaaaacataccaggattagccatgtcaagagcttttggagatttcaggctcaaagaccatggtgttattgcggttcctgaaatctctcaacaccgaattacttctaaagaccagttccttgtactcgctactgacggggtttgggatatgcttagcaatgatgaagttgtatcgcttatatggagttccgggaaaaagcaagcttcggccgctaaaatggtggcggaggcggctgaagctgcatggaagaaaaggcttaagtatacgaaggtagatgatattacagtaatatgtcttttcttacagaacaaggaacaaccaagttga

SEQ ID NO: 22062 - protein, 337 aa, Arabidopsis thaliana
MGHCFSLPSSQSEIHEDNEHGDGNVVCYGEEFGLDQDLPVHRLGSVCSIQGTKVLNQDHAVLYQGYGTRDTELCGVFDGHGKNGHMVSKMVRNRLPSVLLALKEELNQESNVCEEEASKWEKACFTAFRLIDRELNLQVFNCSFSGSTGVVAITQGDDLVIANLGDSRAVLGTMTEDGEIKAVQLTSDLTPDVPTSSSVSGEAERIRMCKGRVFAMKTEPSSQRVWLPNQNIPGLAMSRAFGDFRLKDHGVIAVPEISQHRITSKDQFLVLATDGVWDMLSNDEVVSLIWSSGKKQASAAKMVAEAAEAAWKKRLKYTKVDDITVICLFLQNKEQPS

SEQ ID NO: 22063 - DNA, 1338 bp, Oryza sativa
  CDS (1)..(1338)
atggggtgcgcgcaggggaagtgctgcgtgccgcggcggcagaggggacgcggcggcggcggggcggtgggtgggcgcggcggcgcgacgctggggcgggtggcggtgccgggggcggggctggtgctggagtacgcgacgctggcggtggcggggctgtacccggactcgcccgggagggagtcgcaggacgcgcacctggtggcgacgcggttcgcggggcaccccgacctccacctgttcgcggtgttcgacgggcacggcgcgtgcggcgccgcgtgcgccgggttcgcgcgcgacgcgctcccgcggctgctcgcgggggtgggggtgggggcgggggaggagggaggggggaggatggtggtggtggaggaccccgcggcggcgttccgggaggcgctcccggcggcgaacgcggagatgcacgcggcggacgaggtggacgactcgatgagcgggaccaccgccgtggcggcgctggtggcggggggtgcgctccacgtggccaacgtgggggactcacgcgccgtggccggggtttggcgcgaggggcgcgtggcggcggaggagctctcgtgggaccagacgccgttccgcgccgacgagcgcgcccgcgtgaaggcgtgcggcgcgcgggtgatgtcggtcgagcaggtggagggcgtgcgcgacccggaggcggagagctgggtcgccgacgagggggacccacctcgcgtgtgggcgcgcgacgggctctaccccggcacggccttcacgcgcagcctcggcgaccaagccgccgaggctgttggtgtcatcgccgaacctgaggtgaaaagtgtagagatcactccagcccacctattcttcgtcgtcgcaagcgatggcgtgtttgagtttctctccagccaggatgtcgtggacatgtgtgtcaacttgtcagcctttggcttatatgaagcatccgatgttccaagaactggtgttgcagctaagcttatgaaatgtttgaatgaaaatgggataagcccagcctctacatccaaactagatgtacacagccaaaaacccaaccagagtatgactttggcatatgttctgttcaggggaagcatgaaattgctccagtgggacacagaagtaagcttaatgcttaatgcttttgttaagatcaccaatacaaagacaaagtggtatatgttagttccaattaggattttgatgagcatagtgttgcatgctagggtgcgcaaaacctctatgtaccgtgatgtttattccctgtggattacggaacatcatcaacgtttcacggattacagtgaaggggaggttatctgtggagtcatctag

SEQ ID NO: 22064 - protein, 445 aa, Oryza sativa
MGCAQGKCCVPRRQRGRGGGGAVGGRGGATLGRVAVPGAGLVLEYATLAVAGLYPDSPGRESQDAHLVATRFAGHPDLHLFAVFDGHGACGAACAGFARDALPRLLAGVGVGAGEEGGGRMVVVEDPAAAFREALPAANAEMHAADEVDDSMSGTTAVAALVAGGALHVANVGDSRAVAGVWREGRVAAEELSWDQTPFRADERARVKACGARVMSVEQVEGVRDPEAESWVADEGDPPRVWARDGLYPGTAFTRSLGDQAAEAVGVIAEPEVKSVEITPAHLFFVVASDGVFEFLSSQDVVDMCVNLSAFGLYEASDVPRTGVAAKLMKCLNENGISPASTSKLDVHSQKPNQSMTLAYVLFRGSMKLLQWDTEVSLMLNAFVKITNTKTKWYMLVPIRILMSIVLHARVRKTSMYRDVYSLWITEHHQRFTDYSEGEVICGVI

SEQ ID NO: 22065 - DNA, 1296 bp, Oryza sativa; identical to SEQ ID NO: 968
  CDS (1)..(1296)

SEQ ID NO: 22066 - protein, 431 aa, Oryza sativa; identical to SEQ ID NO: 969

SEQ ID NO: 22067 - DNA, 1056 bp, Brassica napus
  CDS (1)..(1056)
atggtgcttctgcctgctttcttggatgggttggcgagaagtgtgtcgttgaagaaaggaaaatatataccagaagatgaagatggagggggagagatcgcaaaatcgttgatgaaagatgccaagaagaactcgactttgcttggctcatcaggctttgttaagtcagaaacttctaagagattcacctctatttgttctaatagaggtgagaaaggaatcaaccaagatcgtgccattgtttgggaggagtttgggtgccaagaagacataacattttgtgggatgctcgatggacatggaccatggggacatgtgataaccaaaagagtcaaaaagttatttccatcttcactgctttgccaatggcaacaaactcttgcatcattatcattgtcgccggaatgtttctccccgtttgatatttggaagcaatcttgcctgaagacattctccctcatcgatcttgatctcaaaatccatccttccattgattcttactgcagcggctgcaccgctctaactgctgtcttgcagggtgatcatcttgttgtagcaaatgccggtgactcacgagcagtaatagcaacgacttctgacgacggaagtggtttagtaccggttcagctatcagtagactttaaaccgaacattcctgaggaagcagaacggataaaacaatcagatggacgactgttttgcctagatgatgaaccgggagtgtaccgggtaggcatgccaaatggaagatcactcggtttagctgtctcaagagcgtttggagactactgtcttaaagactttggtttagtctctgtaccggaagtgacataccgaaagataaccgataaggaccagttcctcatcttggccactgatgggatgtgggatgtgatgacaaatgatgaggcagtagagatagtaagaggagtcaaagagagaagaaagagtgcaaagagattggtggagagagctatgatgctttggcgtaggaagagaagaagcatcgccatggatgatatctctgctctttgtctcttctttcatccgtcttag

SEQ ID NO: 22068 - protein, 351 aa, Brassica napus
MVLLPAFLDGLARSVSLKKGKYIPEDEDGGGEIAKSLMKDAKKNSTLLGSSGFVKSETSKRFTSICSNRGEKGINQDRAIVWEEFGCQEDITFCGMLDGHGPWGHVITKRVKKLFPSSLLCQWQQTLASLSLSPECFSPFDIWKQSCLKTFSLIDLDLKIHPSIDSYCSGCTALTAVLQGDHLVVANAGDSRAVIATTSDDGSGLVPVQLSVDFKPNIPEEAERIKQSDGRLFCLDDEPGVYRVGMPNGRSLGLAVSRAFGDYCLKDFGLVSVPEVTYRKITDKDQFLILATDGMWDVMTNDEAVEIVRGVKERRKSAKRLVERAMMLWRRKRRSIAMDDISALCLFFHPS

SEQ ID NO: 22069 - DNA, 1272 bp, Brassica napus; identical to SEQ ID NO: 1438
  CDS (1)..(1272)

SEQ ID NO: 22070 - protein, 423 aa, Brassica napus; identical to SEQ ID NO: 1439

SEQ ID NO: 22071 - DNA, 1269 bp, Brassica napus; identical to SEQ ID NO: 972
  CDS (1)..(1269)

SEQ ID NO: 22072 - protein, 422 aa, Brassica napus; identical to SEQ ID NO: 973

SEQ ID NO: 22073 - DNA, 927 bp, Brassica napus; identical to SEQ ID NO: 1442
  CDS (1)..(927)

SEQ ID NO: 22074 - protein, 308 aa, Brassica napus; identical to SEQ ID NO: 1443

SEQ ID NO: 22075 - DNA, 939 bp, Glycine max; identical to SEQ ID NO: 1448
  CDS (1)..(939)

SEQ ID NO: 22076 - protein, 312 aa, Glycine max; identical to SEQ ID NO: 1449

SEQ ID NO: 22077 - DNA, 1104 bp, Brassica napus; identical to SEQ ID NO: 1450
  CDS (1)..(1104)

SEQ ID NO: 22078 - protein, 367 aa, Brassica napus; identical to SEQ ID NO: 1451

SEQ ID NO: 22079 - DNA, 1236 bp, Brassica napus; identical to SEQ ID NO: 974
  CDS (1)..(1236)

SEQ ID NO: 22080 - protein, 411 aa, Brassica napus; identical to SEQ ID NO: 975

SEQ ID NO: 22081 - DNA, 1191 bp, Zea mays; identical to SEQ ID NO: 976
  CDS (1)..(1191)

SEQ ID NO: 22082 - protein, 396 aa, Zea mays; identical to SEQ ID NO: 977

SEQ ID NO: 22083 - DNA, 873 bp, Zea mays; identical to SEQ ID NO: 1456
  CDS (1)..(873)

SEQ ID NO: 22084 - protein, 290 aa, Zea mays; identical to SEQ ID NO: 1457

SEQ ID NO: 22085 - DNA, 1203 bp, Glycine max; identical to SEQ ID NO: 1458
  CDS (1)..(1203)

SEQ ID NO: 22086 - protein, 400 aa, Glycine max; identical to SEQ ID NO: 1459

SEQ ID NO: 22087 - DNA, 1167 bp, Zea mays; identical to SEQ ID NO: 984
  CDS (1)..(1167)

SEQ ID NO: 22088 - protein, 388 aa, Zea mays; identical to SEQ ID NO: 985

SEQ ID NO: 22089 - DNA, 1083 bp, Zea mays; identical to SEQ ID NO: 986
  CDS (1)..(1083)

SEQ ID NO: 22090 - protein, 360 aa, Zea mays; identical to SEQ ID NO: 987

SEQ ID NO: 22091 - DNA, 1314 bp, Zea mays; identical to SEQ ID NO: 1470
  CDS (1)..(1314)

SEQ ID NO: 22092 - protein, 437 aa, Zea mays; identical to SEQ ID NO: 1471

SEQ ID NO: 22093 - DNA, 1068 bp, Helianthus annuus
  CDS (1)..(1068)
atgggtcgatttgcatcgatgtttaatgggctagcgaagtcgttttcgcctgcaaagagatcgaagagttctgcgggggatagtgggaaagagacggcagaagccatggcaaaagatgcaaagaagaatgatatgatgctaaggtcttcaggcactattaatgtcaacaatgtcgtctcggtttgttcaaaacggggcgaaaagggggtgaatcaagattgttgcattgtgtgggaggaatttggatgccaaaaggacatgatgttctgtgggattttcgacggtcatggtccatggggacattatgttgcaaagcgcgtatgcgactcgatgccctcatctttgctatgcaattggcaagagatgttacttgaagcttcacttgacccgaaaaaggttgatagattccatctatggaagaactctgtcataaagacttgtgctgctgttgatcaggatctccaacattcacgcaaatttgattcctttcatagtggaaccactgccttgacggtcatcagacagggtgaacttttagtgatagcaaatgttggagattcacgggcgatactagctacgactagtgaagatgggtgcttggtacctgtccaacttacagttgattttaagcccaatctacctaatgaggcgaaacgcatagttgagtgtaaagggcgagttttctgcatggaggatgagccaggtgtgcaccgcatgtggctgccgcacgaggactcacctggtctagctatgtcgagagcctttggtgattattgtgttaaagattttggacttatatctgtgcctgaagtaacccaaagagttatcacctgcaaagaccagtttctggtgctagcttctgatggggtgtgggatgttatttctaacgaagatgcggtggagattgtgtcgtcaacggttgacaagtcaaagtctgcaaaacgactggtggagtgtgcagcacatgcctggaaacgcaagaggaaaggaatagcgaccgacgatatctctgctgtctgtctcttctttcatagtggttccccctcatcgtgcaaggtcaccttgtag

SEQ ID NO: 22094 - protein, 355 aa, Helianthus annuus
MGRFASMFNGLAKSFSPAKRSKSSAGDSGKETAEAMAKDAKKNDMMLRSSGTINVNNVVSVCSKRGEKGVNQDCCIVWEEFGCQKDMMFCGIFDGHGPWGHYVAKRVCDSMPSSLLCNWQEMLLEASLDPKKVDRFHLWKNSVIKTCAAVDQDLQHSRKFDSFHSGTTALTVIRQGELLVIANVGDSRAILATTSEDGCLVPVQLTVDFKPNLPNEAKRIVECKGRVFCMEDEPGVHRMWLPHEDSPGLAMSRAFGDYCVKDFGLISVPEVTQRVITCKDQFLVLASDGVWDVISNEDAVEIVSSTVDKSKSAKRLVECAAHAWKRKRKGIATDDISAVCLFFHSGSPSSCKVTL

SEQ ID NO: 22095 - DNA, 1119 bp, Zea mays; identical to SEQ ID NO: 988
  CDS (1)..(1119)

SEQ ID NO: 22096 - protein, 372 aa, Zea mays; identical to SEQ ID NO: 989

SEQ ID NO: 22097 - DNA, 897 bp, Brassica napus; identical to SEQ ID NO: 1474
  CDS (1)..(897)

SEQ ID NO: 22098 - protein, 298 aa, Brassica napus; identical to SEQ ID NO: 1475

SEQ ID NO: 22099 - DNA, 1131 bp, Brassica napus; identical to SEQ ID NO: 990
  CDS (1)..(1131)

SEQ ID NO: 22100 - protein, 376 aa, Brassica napus; identical to SEQ ID NO: 991

SEQ ID NO: 22101 - DNA, 846 bp, Brassica napus; identical to SEQ ID NO: 1484
  CDS (1)..(846)

SEQ ID NO: 22102 - protein, 281 aa, Brassica napus; identical to SEQ ID NO: 1485

SEQ ID NO: 22103 - DNA, 1128 bp, Brassica napus
  CDS (1)..(1128)
atggggcatttttcgtccatgttcagtggattagctcgatccttttcgatcaagaaagtgaagaacaacaatggaacttgcgacgctaaggaagctgctgatgagatggtgaaagatgcaaaaaagaaggagatgattctgaaatcatgtggttacgtttatgcagaaggttctaataactcggcctctgttttctctaaacgcggtgaaaaaggcgttaaccaggactgtgccatcgtttgggagggatttgggtgccaagaagacatgatattctgcggaatattcgatggacatggaccatggggtcactatgtagccaaacatgtaagaaactcaatgccttcgtcgcttctttgcaactggcaaaagactcttgctcaaaccacactactagaccccgagatagacctagaaggatccaataaaaaactctcaagattcgacatatggaaacattcatatctcaagacatgcgcatcagttgatcaagagcttgaacatcaccgcaagatagattcttacaacagcggcacaaccgctataaccattgtcagacagggtgaagttatttatatatcaaacgtaggcgattcacgagcagtactagccacgagttcggatgaaggaagcatggttgctattcagctcacactcgatttcaaaccgaatctgcctcaggagaaggagagaataatcggatgcaaagggagggttttctgtatgaaagatgagccaggagtccaccgtgtatggcaaccagacacagaaacaccggggctggcaatgtcaagagcgttcggagactattgtatcaaagactatggattggtctcagtccctgaagtcactcaaagacatatctctgctaaagaccacttcatcatcttggctagtgatgggatatgggatgtgatcacaaaccaagaagctatagagatcgtttcttcgacccctgagcggcctaaggcggctaagagattagtggagcaagcggtccaggcttggaagaagaagagacgaggaatcgcaatggacgatatgtccgtggtctgcctcttcctccattcctcttcatcatcgccatctctctcacaacatgttcaacatgccacgacttttaagtaa

SEQ ID NO: 22104 - protein, 375 aa, Brassica napus
MGHFSSMFSGLARSFSIKKVKNNNGTCDAKEAADEMVKDAKKKEMILKSCGYVYAEGSNNSASVFSKRGEKGVNQDCAIVWEGFGCQEDMIFCGIFDGHGPWGHYVAKHVRNSMPSSLLCNWQKTLAQTTLLDPEIDLEGSNKKLSRFDIWKHSYLKTCASVDQELEHHRKIDSYNSGTTAITIVRQGEVIYISNVGDSRAVLATSSDEGSMVAIQLTLDFKPNLPQEKERIIGCKGRVFCMKDEPGVHRVWQPDTETPGLAMSRAFGDYCIKDYGLVSVPEVTQRHISAKDHFIILASDGIWDVITNQEAIEIVSSTPERPKAAKRLVEQAVQAWKKKRRGIAMDDMSVVCLFLHSSSSSPSLSQHVQHATTFK

SEQ ID NO: 22105 - DNA, 1149 bp, Brassica napus; identical to SEQ ID NO: 998
  CDS (1)..(1149)

SEQ ID NO: 22106 - protein, 382 aa, Brassica napus; identical to SEQ ID NO: 999

SEQ ID NO: 22107 - DNA, 981 bp, Brassica napus
  CDS (1)..(981)
atgggattttgtttttgtttatcctcaggaggatcaacagatagaaaccagatttacgagataaatgattatggacaagaaaatgcagttctatactctgaacaacttgaagttcctcaagactttggctcggtctcgtctttagctggaggcaagggcttcaatcaagatgctgccatactccacctgggatatggaactgaagaaggagcgttatgtggagtgtttgatgggcatggagagaagggtgaattggtgagcaagatcgtaagaaaccagttgccatctttattgttaggtcatatgaataatcattcagtgactcgagactggaaactcatctgcgaaactacttgtttggccatggataaaagaattctcaaacttaagaacactattgattgctcttcttccggaactgctgctgttttcgccgttaaacatggaaaccaagtgatggtggcaaacctaggagattcaagggctattatgattggaacaagtgagaatggagaaacggaggtggttcagttgaccagtgacctaaagccaagtgtcctaagcgaagcggataggataaggaaacgcaacggaagagtcttagctttagaggcagagcctcatattctacgagtatggcttccacatgaaaaccgaccaggcctagccatgtctagggcttttggtgactttgtccttaaaagctacggtgtcattgcgactcctgaagtctctacgcatcaaatcacttctcgcgaccagtttctgctccttgcttccgatggggtgtgggacgtgcttagtaacgaagaagtggctaaggtggtgatgaagtcggcgaacgagacaggagcggccaacgcggtgacagaggcggcggctaacgcgtggagacagaaatatccaacggctaaggttgatgatatatctgtcgtgtgtctctctatcaacaagagacatgttccacagcctcgtatatga

SEQ ID NO: 22108 - protein, 326 aa, Brassica napus
MGFCFCLSSGGSTDRNQIYEINDYGQENAVLYSEQLEVPQDFGSVSSLAGGKGFNQDAAILHLGYGTEEGALCGVFDGHGEKGELVSKIVRNQLPSLLLGHMNNHSVTRDWKLICETTCLAMDKRILKLKNTIDCSSSGTAAVFAVKHGNQVMVANLGDSRAIMIGTSENGETEVVQLTSDLKPSVLSEADRIRKRNGRVLALEAEPHILRVWLPHENRPGLAMSRAFGDFVLKSYGVIATPEVSTHQITSRDQFLLLASDGVWDVLSNEEVAKVVMKSANETGAANAVTEAAANAWRQKYPTAKVDDISVVCLSINKRHVPQPRI

SEQ ID NO: 22109 - DNA, 894 bp, Brassica napus; identical to SEQ ID NO: 1490
  CDS (1)..(894)

SEQ ID NO: 22110 - protein, 297 aa, Brassica napus; identical to SEQ ID NO: 1491

SEQ ID NO: 22111 - DNA, 924 bp, Brassica napus; identical to SEQ ID NO: 1492
  CDS (1)..(924)

SEQ ID NO: 22112 - protein, 307 aa, Brassica napus; identical to SEQ ID NO: 1493

SEQ ID NO: 22113 - DNA, 1122 bp, Brassica napus
  CDS (1)..(1122)
atggggcatttttcgtccatgttcagtggattagctcgatccttttcgatcaagaaagtgaagaacaacaatggaacttgcgacgctaaggaagctgctgatgagatggtgaaagatgcaaaaaagaaggagatgattctgaaatcatgtggttacgtttatgcagaaggttctaataactcggcctctgttttctctaaacgcggtgaaaaaggcgttaaccaggactgtgccatcgtttgggagggatttgggtgccaagaagacatgatattctgcggaatattcgatggacatggaccatggggtcactatgtagccaaacatgtaagaaactcaatgccttcgtcgcttctttgcaactggcaaaagagtcttgctcaagccacactactagaccccgagatagacctagaaggatccaataaaaagctctcaagatttgacatatggaaacattcttatctcaagacatgtgcatcagttgatcaagagcttgaacatcaccgcaagatagattcttacaacagtggcacaaccgctctaactattgtcagacagggtgaagttatttatatatcaaatgtaggcgattcgcgagcggtactagccacggtttctgatgaaggaagcttggttgctgttcagctcacactcgatttcaaacctaatctgcctcaggagaaggagcggatactcggatgcaaagggagggttttctgtctgaaagatgagcctggagtccaccgtgtgtggcaaccagatgcagaaacacctgggcttgcaatgtcgagagcgttcggagactattgtatcaaagactatggattggtctcagtccctgaagttactcaaagacatatctctgctaaagatcacttcattatcttggctagtgatgggatatgggatgtgatctcaaaccaagaagctatagagatcgtttctttgacccctgagcggcctaaggcggctaagaggttagttgagcaagcggtccaggcttggaagaagaagagacgaggaatcgccatggacgatatgtccgtggtctgcctctttctccattcgtcatcgtcatctctctcccaacatgttcatcatgccaagtcttttaagtaa

SEQ ID NO: 22114 - protein, 373 aa, Brassica napus
MGHFSSMFSGLARSFSIKKVKNNNGTCDAKEAADEMVKDAKKKEMILKSCGYVYAEGSNNSASVFSKRGEKGVNQDCAIVWEGFGCQEDMIFCGIFDGHGPWGHYVAKHVRNSMPSSLLCNWQKSLAQATLLDPEIDLEGSNKKLSRFDIWKHSYLKTCASVDQELEHHRKIDSYNSGTTALTIVRQGEVIYISNVGDSRAVLATVSDEGSLVAVQLTLDFKPNLPQEKERILGCKGRVFCLKDEPGVHRVWQPDAETPGLAMSRAFGDYCIKDYGLVSVPEVTQRHISAKDHFIILASDGIWDVISNQEAIEIVSLTPERPKAAKRLVEQAVQAWKKKRRGIAMDDMSVVCLFLHSSSSSLSQHVHHAKSFK

SEQ ID NO: 22115 - DNA, 1167 bp, Brassica napus; identical to SEQ ID NO: 1494
  CDS (1)..(1167)

SEQ ID NO: 22116 - protein, 388 aa, Brassica napus; identical to SEQ ID NO: 1495

SEQ ID NO: 22117 - DNA, 1056 bp, Brassica napus
  CDS (1)..(1056)
atggggcatttctcttccatattcaacagcttagctagatccttctcgaacaagaaagacaataacaacaacaacaatggtaaaagctacgcgaaggaagccgcagatgaaatggcgagagaggcgaagaagaaggcgatgattctgaagtcctctggttgtgttaatgcagatggatccaataacttggcctctgttttctccagacgcggtgagaaaggtgtcaatcaggactgtgctatcgtctgggagggatttggatgccaagaagagatgatcttctgtgggatattcgatggacacggtccctggggtcattttgtgtccaaacaagtcagaaactcaatgcctatatctctgctctgcaactggcaagagactctatctcagactacattagtagaacccgaaacggaccagcggttcgccatctggaaacacttgtacctcaaaacatgtgcagatgtcgatcaagagcttcagcatcaccgaaagatcgacactttcaatagcggtacaaccgctctaaccgttgtgagacagggtgaagttatttacgtagcaaatgttggagattcacgtgccgtactggccacggtatcagaagaaggaagtttaagcgcagttcagctcacagttgatttcaaaccaaacatacctcaggaggaggaacgtataatcggatgcaacgggagagtattctgccttgaagacgagccaggggtccaccgtgtgtggcaaccagaagaggaatctccggggctggcaatgtctagagcatttggagactattgtattaaagagtacggattggtctcagttcctgaagtgactcagagacatatctccaatagggaccagtttgtaatcttggccactgatggggtatgggatgtgatatcaaatgaagaggccatagacattgttgcctcaaccgcagagcggccaaaggcggccaagcggctggtggagcaagcggttaaggcttggaataagaagagacgtggaatagcaatggatgatatctcagccgtttgcctcttcttccattcttag

SEQ ID NO: 22118 - protein, 351 aa, Brassica napus
MGHFSSIFNSLARSFSNKKDNNNNNNGKSYAKEAADEMAREAKKKAMILKSSGCVNADGSNNLASVFSRRGEKGVNQDCAIVWEGFGCQEEMIFCGIFDGHGPWGHFVSKQVRNSMPISLLCNWQETLSQTTLVEPETDQRFAIWKHLYLKTCADVDQELQHHRKIDTFNSGTTALTVVRQGEVIYVANVGDSRAVLATVSEEGSLSAVQLTVDFKPNIPQEEERIIGCNGRVFCLEDEPGVHRVWQPEEESPGLAMSRAFGDYCIKEYGLVSVPEVTQRHISNRDQFVILATDGVWDVISNEEAIDIVASTAERPKAAKRLVEQAVKAWNKKRRGIAMDDISAVCLFFHS

SEQ ID NO: 22119 - DNA, 852 bp, Glycine max
  CDS (1)..(852)
atgactaccagagaaatccttcaaaagatgaaggtaaaagttggtttgggttcatcagaccctgattcagggaaaggaaagagcaagatgtcaaagaacataactcatggctttcatttggtgaaaggaaaatcatatcatgacatggaggattacgttgtggctcaatttaagcaaatagataacaatgaattgggtttgtttgcaatattcgacggccatgcgggtcacaacgtacctaattacttgcggtcccatttgtttgataatatcttacaagagcctgacttctggaaagaacctgcagatgctgtcaagagagcatacagtaaaactgattctagtattttagagatgtcgggtgaattaggtagagggggttcaactgcagttacagcaatattagtcaattgtcagaagttaatagtagccaacattggggattctagggccgtcttatgcaagaagggtgtggccaagcaactatcagtggatcatgagccaaccgcagaacatgaggatataaaaaatagaggtggttttgtatcaaactttccaggggatgttcctcgtgttgatggacggctggcagtgtcaagggcatttggtgacaaaagcttgaagaaacacttgagttcagagccatttgtgactgtggagattatagaggatgatgcagagtttgttatattagccagtgatggattatggaaggtaatgtcaaatcaagaagcagttaattgtatcagaaatataaaggatgcacggtcttcagcaaagcgccttaccgaagaagcagttaacaggaaaagcaccgatgatatctcctgcattgttgtaaaatttcagtga

SEQ ID NO: 22120 - protein, 283 aa, Glycine max
MTTREILQKMKVKVGLGSSDPDSGKGKSKMSKNITHGFHLVKGKSYHDMEDYVVAQFKQIDNNELGLFAIFDGHAGHNVPNYLRSHLFDNILQEPDFWKEPADAVKRAYSKTDSSILEMSGELGRGGSTAVTAILVNCQKLIVANIGDSRAVLCKKGVAKQLSVDHEPTAEHEDIKNRGGFVSNFPGDVPRVDGRLAVSRAFGDKSLKKHLSSEPFVTVEIIEDDAEFVILASDGLWKVMSNQEAVNCIRNIKDARSSAKRLTEEAVNRKSTDDISCIVVKFQ

SEQ ID NO: 22121 - DNA, 849 bp, Glycine max
  CDS (1)..(849)
atgacgggcaaagaaatttttcataagatgaaggaaaaagttttgggatcatctgatcccgattcaggtaaaggaaagagcaagatgaagaagcacataactcatggctttcacttggtaaagggaagatcaggtcatgccatggaagactatcttgttgctcaatttaagcaagttgacaacaaagagttgggtttatttgcaatatttgatggccactctggtcacagtgtacctgattacttgaagtctcatttgtttgataatatcttgaaagagcctaacttctggacagaacctgctgaggctgttaagagagcatatagtataactgattctactattttagacaaatcaggtgaattgggtagagggggttcaactgcggttacagcaatattgatcaactgttacaagctactagtggccaatattggggattcccgggctgtcttatgtaagaatggcgtagccaaacaactatcggtggatcatgaaccaagcatagaaagtgaagatataaaaaacagaggtggttttgtgtcaaacttcccaggggatgtgccacgtgtcgatggtcagttggcagtgtcaagggcatttggtgacaaaagcctgaagatacatttgagctcagaaccatatgtaactgtggagatgatagaagatgatgcagagtttcttatactagccagtgatgggttatggaaggtaatgtcaaatcaagaagcagttagtgctatcagagatgttaaggatgctagatctgcagcaaaggtgcttactgaagaagcaaagaacaggaaaagctcagatgatatctcttgcgttgttgtgaaatttcagtga

SEQ ID NO: 22122 - protein, 282 aa, Glycine max
MTGKEIFHKMKEKVLGSSDPDSGKGKSKMKKHITHGFHLVKGRSGHAMEDYLVAQFKQVDNKELGLFAIFDGHSGHSVPDYLKSHLFDNILKEPNFWTEPAEAVKRAYSITDSTILDKSGELGRGGSTAVTAILINCYKLLVANIGDSRAVLCKNGVAKQLSVDHEPSIESEDIKNRGGFVSNFPGDVPRVDGQLAVSRAFGDKSLKIHLSSEPYVTVEMIEDDAEFLILASDGLWKVMSNQEAVSAIRDVKDARSAAKVLTEEAKNRKSSDDISCVVVKFQ

SEQ ID NO: 22123 - DNA, 1206 bp, Glycine max; identical to SEQ ID NO: 1496
  CDS (1)..(1206)

SEQ ID NO: 22124 - protein, 401 aa, Glycine max; identical to SEQ ID NO: 1497

SEQ ID NO: 22125 - DNA, 849 bp, Glycine max
  CDS (1)..(849)
atgacgggcagggaaatttttcataagatgaaggaaaaagttttgggctcatctgatcctgattctggtaaaggaaagagcaagatgaagaagaacataactcatggctttcacttggtaaaggggagatcaggtcatgccatggaagactatcttgttgctcaattcaagcaagttgacgacaatgaattgggtttatttgcaatatttgatggccactcaggtcacagtgtacctgattacttgaagtctcatgtgtgtgataatatcttgaaagagcctaacttctggacagaacctgctgaggctgttaagagagcatatggtataactgattctactattttagacaaatcaggtgaattgggtagagggggttcaactgcggttactgcaatattgatcaactgtcaggagctgctagtggccaatattggggattcccgggctgtcttatgcaagaatggcgtggccaaacaactatcagtggatcatgaaccaagcatagaaagtgaagatataagaaacagaggtggttttgtgtcaaacttcccaggggatgttccacgtgtcgatggtcagttggcggtgtcaagggcatttggtgacaaaagcctgaagatacatttgagctcagaaccatatgtaactttggagatgatagaagatgatgcagagtttcttatactagccagtgatgggttatggaaggtaatgtcaaatcaagaagcagttagtgctatcaaagatgttaaggatgccaggtccgcagctaaggtgcttaccgaagaagcaaagatcaggaaaagttctgatgatatctcttgcgttgttgtgaaatttcagtga

SEQ ID NO: 22126 - protein, 282 aa, Glycine max
MTGREIFHKMKEKVLGSSDPDSGKGKSKMKKNITHGFHLVKGRSGHAMEDYLVAQFKQVDDNELGLFAIFDGHSGHSVPDYLKSHVCDNILKEPNFWTEPAEAVKRAYGITDSTILDKSGELGRGGSTAVTAILINCQELLVANIGDSRAVLCKNGVAKQLSVDHEPSIESEDIRNRGGFVSNFPGDVPRVDGQLAVSRAFGDKSLKIHLSSEPYVTLEMIEDDAEFLILASDGLWKVMSNQEAVSAIKDVKDARSAAKVLTEEAKIRKSSDDISCVVVKFQ

SEQ ID NO: 22127 - DNA, 1203 bp, Glycine max; identical to SEQ ID NO: 1498
  CDS (1)..(1203)

SEQ ID NO: 22128 - protein, 400 aa, Glycine max; identical to SEQ ID NO: 1499

SEQ ID NO: 22129 - DNA, 1071 bp, Glycine max; identical to SEQ ID NO: 1004
  CDS (1)..(1071)

SEQ ID NO: 22130 - protein, 356 aa, Glycine max; identical to SEQ ID NO: 1005

SEQ ID NO: 22131 - DNA, 1017 bp, Glycine max; identical to SEQ ID NO: 1502
  CDS (1)..(1017)

SEQ ID NO: 22132 - protein, 338 aa, Glycine max; identical to SEQ ID NO: 1503

SEQ ID NO: 22133 - DNA, 1017 bp, Glycine max; identical to SEQ ID NO: 1510
  CDS (1)..(1017)

SEQ ID NO: 22134 - protein, 338 aa, Glycine max; identical to SEQ ID NO: 1511

SEQ ID NO: 22135 - DNA, 1428 bp, Glycine max; identical to SEQ ID NO: 1512
  CDS (1)..(1428)

SEQ ID NO: 22136 - protein, 475 aa, Glycine max; identical to SEQ ID NO: 1513

SEQ ID NO: 22137 - DNA, 1116 bp, Glycine max
  CDS (1)..(1116)
atggggcatttttcctcaatgttcaatgggttggcacggtctttttcaatgaagaaaggaagaaggaatgggaaatgtggggggagggaagctgctgaagcaatggcaaaggaagctaagaagaatgacatgatgttgtgtagctctggcattgttcatgtcgatggttcaaacaactttgcctccgttttctccaaaagaggccagaaaggagtgaaccaagattgctgcatggtgtgggaggaatttggatgccaagaggacatgatattttgtgggatatttgatgggcatggaccatggggtcactttgtggccaaaagaataagagagtcaatgccaccatctttgctatgcaactggcaggagacattagcccaaacttcaattgatcatccggctattgatgtagaggaagagaaaagtaaacattacagattcaacatatggaagcattcttacttgaagacttgtgctgccattgatcaagaactagagcaatatcgcaagatagactcgttttacagcggaacaactgccctatcaattgttagacagggtgaactcattgtcatagcaaatgttggcgactctcgtgctgtattggctacaacatcagatgatggaagtctggtaccagttcaactaacaatcgatttcaagccaaatttaccacaggaggcagagagaataattcagtgccaggggcgtgtgttctgcttagaggacgagccaggggtgcatagggtgtggttaccggatgaagagtctccgggactagccatgtctagggcctttggtgactactgcatcaaagggcatggtcttatttctgtgcctgaggtaacacacagaaatataactagtagagaccagtttgttgtgctagccactgatggggtttgggatgtaatctctaataaagaagcagtggatattgtatcttcagcagcagataaagctaaggcagctaaacgtttggtggagtgtgcggtgcatgcatggaaacgcaagagacggggcattgccgtggatgacatttcagctatttgtctcttctttcactcttcttccctttcaacagggcaagttagccaggttgccacattaaaatag

SEQ ID NO: 22138 - protein, 371 aa, Glycine max
MGHFSSMFNGLARSFSMKKGRRNGKCGGREAAEAMAKEAKKNDMMLCSSGIVHVDGSNNFASVFSKRGQKGVNQDCCMVWEEFGCQEDMIFCGIFDGHGPWGHFVAKRIRESMPPSLLCNWQETLAQTSIDHPAIDVEEEKSKHYRFNIWKHSYLKTCAAIDQELEQYRKIDSFYSGTTALSIVRQGELIVIANVGDSRAVLATTSDDGSLVPVQLTIDFKPNLPQEAERIIQCQGRVFCLEDEPGVHRVWLPDEESPGLAMSRAFGDYCIKGHGLISVPEVTHRNITSRDQFVVLATDGVWDVISNKEAVDIVSSAADKAKAAKRLVECAVHAWKRKRRGIAVDDISAICLFFHSSSLSTGQVSQVATLK

SEQ ID NO: 22139 - DNA, 1281 bp, Glycine max; identical to SEQ ID NO: 18194
  CDS (1)..(1281)

SEQ ID NO: 22140 - protein, 426 aa, Glycine max; identical to SEQ ID NO: 18195

SEQ ID NO: 22141 - DNA, 1287 bp, Glycine max
  CDS (1)..(1287)
atggctgccaggagtgatcaccaaacggttcctctttcggtgctcctgaggcgcgaattggcgaacgagaaaattgagaagcctgagattgctcatggtcaagcgtgccagagcaagaaaggcgaggatttgacgctgctcaagacggaatgccagagggtggtgggcgatggggtctctacatactcagtttttgggctatttgatggacacaatggatctgctgctgctatttattctaaggagaatcttctaaataatgttttaagcgcgattcctccagatcttaacagagatgagtggatagcagccttgcccagggctttggttgctggttttgtaaaaactgataaagattttcaagagaaaggccaaaaatctggaacaactgtcacctttgtcattatagaaggatgggttgtaacagttgcatcagttggtgattcccgttgcgtccttgaatcttctgatggtgagctttattacttgtccgcagatcacaggctagaaacgaatgaagaagagagggtgcggatcacctctagcggtggtgaagttggtcggctaaatacagggggaggtgcagaggttggtcctttgagatgttggcctggtggtttgtgtctctcacgatctattggagatatggatattggtgaatttattgtacctgtcccgtatgtaaagcaagtgaagatgtccactgctggaggccggcttgttatctgcagtgatggtgtttgggattctctacctgcagaagtagcccttgattgttgtcgtggaatgccagccgatgctgctgcaccacatattgttaaagaagctgtacaagcaaagggacttagagatgatacaacctgcattgtagttgatatattacctcaggagaaaccacctgtttctgcgccacaaacaaagaggccagtaaagggaatgctcaagtccatgtttcgtaaaaaatcttctgaatcatcttcttatattgacaaagagtacatggagccagatgtagtagaagaattgtacgaggaaggatctgccatgctttcagagaggttagatactaaatatccagtctgcaacatgttcaagttgtttatgtgtgcagtatgtcaagtagagataaaacctggagagggtatttcaatacacgagggtgcacccgactctcgaaaatttcgtccctgggacggacctttcctgtgctcaagttgccaagagaagaaagaagccatggaagggaaaagatcatcaggtagaattagcagtggaagtgatgaatga

SEQ ID NO: 22142 - protein, 428 aa, Glycine max; identical to SEQ ID NO: 18125

SEQ ID NO: 22143 - DNA, 1152 bp, Glycine max; identical to SEQ ID NO: 1012
  CDS (1)..(1152)

SEQ ID NO: 22144 - protein, 383 aa, Glycine max; identical to SEQ ID NO: 1013

SEQ ID NO: 22145 - DNA, 1569 bp, Glycine max; identical to SEQ ID NO: 1524
  CDS (1)..(1569)

SEQ ID NO: 22146 - protein, 522 aa, Glycine max; identical to SEQ ID NO: 1525

SEQ ID NO: 22147 - DNA, 1464 bp, Glycine max; identical to SEQ ID NO: 1526
  CDS (1)..(1464)

SEQ ID NO: 22148 - protein, 487 aa, Glycine max; identical to SEQ ID NO: 1527

SEQ ID NO: 22149 - DNA, 1272 bp, Glycine max
  CDS (1)..(1272)
atgggttgtgtccatggcaagtgttgctgtggtgacagttcttcatcagatgatggttctagggattaccgagaacttgacttcattaatggccaccccacgcgtccgctcgctcagagatcattgaagcatgttcctgttccttcccacaacttcattttggagtacactttcctcagtcagcgggggtactaccctgattcacctgataaagaaaaccaagatagtttctgcatcactacacaactccaaggtaaccccaatgtccatttctttggtgtctatgatgggcatggccaatttggtagccagtgttcgaattttgttaagcataggctggttgagaagttgtcaaatgaccctgcattgttggaggaccctgttcaggcttacaattctgcattcttggcaacaaatcaagaattgcgtagtactagtgagattgatgattctatgagtggcaccaccgcgattacggtgcttgttattggtgacactctttatgttgctaatcgagctgattctagagccgtgctggctgttaaggatggaaaccacattgttgccgaggacttgtcctctgatcagacgccatttcggagggatgaatatgagagagtgaaactttgtggggcaagggtgttgagtgttgatcaagtggaagggctaaaggatccagatatccagcattggggtgatgaagagagtcggggtggcgatcctccaagattgtgggttcctaatgggatgtatcctggaactgcatttacaaggagtataggggatagtttggcagagacaattggtgtcattgctattccggaggtgaaaacggttcagcttacacctaatcatcttttctttgttgtggcaagtgatggcatatttgaattcctgacaagccaaactgttgttgatatggcagcaagctatatggatcctcgtgatgcatgttcagctattgcagagaagtcgtataaactatggttggaacttgagaacagaacagatgatataacaatcatcattgttcagatcaaaggtctctctaattcaggtacatctggagttggatccgatgagatcaatggtgggggtactgtaatgaattccaggacaggaactcatgagatatctgctacccctggatctaatgtttatcgttctgtcagaaacagtttatccgatttgcactcctgtcagcatgtggcttcagtgacgagcgcagcgatagaggttcactctccagcatgtccaagaccaattgaatga

SEQ ID NO: 22150 - protein, 423 aa, Glycine max
MGCVHGKCCCGDSSSSDDGSRDYRELDFINGHPTRPLAQRSLKHVPVPSHNFILEYTFLSQRGYYPDSPDKENQDSFCITTQLQGNPNVHFFGVYDGHGQFGSQCSNFVKHRLVEKLSNDPALLEDPVQAYNSAFLATNQELRSTSEIDDSMSGTTAITVLVIGDTLYVANRADSRAVLAVKDGNHIVAEDLSSDQTPFRRDEYERVKLCGARVLSVDQVEGLKDPDIQHWGDEESRGGDPPRLWVPNGMYPGTAFTRSIGDSLAETIGVIAIPEVKTVQLTPNHLFFVVASDGIFEFLTSQTVVDMAASYMDPRDACSAIAEKSYKLWLELENRTDDITIIIVQIKGLSNSGTSGVGSDEINGGGTVMNSRTGTHEISATPGSNVYRSVRNSLSDLHSCQHVASVTSAAIEVHSPACPRPIE

SEQ ID NO: 22151 - DNA, 1416 bp, Glycine max; identical to SEQ ID NO: 1530
  CDS (1)..(1416)

SEQ ID NO: 22152 - protein, 471 aa, Glycine max; identical to SEQ ID NO: 1531

SEQ ID NO: 22153 - DNA, 1296 bp, Glycine max; identical to SEQ ID NO: 1016
  CDS (1)..(1296)

SEQ ID NO: 22154 - protein, 431 aa, Glycine max; identical to SEQ ID NO: 1017

SEQ ID NO: 22155 - DNA, 852 bp, Glycine max
  CDS (1)..(852)
atgactaccagagaaatccttcaaaagatgaaggtaaaagttggtttgggttcatcagaccctgattcagggaaaggaaagagcaagatgtcaaagaacataactcatggctttcatttggtgaaaggaaaatcatatcatgacatggaggattacgttgtggctcaatttaggcaaatagataacaatgaattgggtttgtttgcaatatttgacggccatgcgggtcacaacgtacctaattacttacgatcccatttgtttgataatatcttacaagagcctgacttctggaaagaacctgcagatgctgtcaagagagcatacagtaaaactgattctagtattttagagatgtcgggtgaattaggtagagggggttcaactgcagttacagcaatattagtcaattgtcagaagttaatagtagccaacattggggattctagggccgtcttatgcaagaagggtgtggccaagcaactatcagtggatcatgagccaaccgcagaacatgaggatattaaaaatagaggtggttttgtatcaaactttccaggggatgttcctcgtgttgatggacggctggcagtgtcaagggcatttggtgacaaaagcttgaagaaacacttgagttcagagccatttgtgactgtggagattatagaggatgatgcagagtttgttatattagccagtgatggattatggaaggtaatgtcaaatcaagaagcagttaattgtatcagaaatataaaggatgcacggtcttcagcaaagcgccttaccgaagaagcagttaacaggaaaagcaccgatgatatctcctgcattgttgtaaaatttcagtga

SEQ ID NO: 22156 - protein, 283 aa, Glycine max
MTTREILQKMKVKVGLGSSDPDSGKGKSKMSKNITHGFHLVKGKSYHDMEDYVVAQFRQIDNNELGLFAIFDGHAGHNVPNYLRSHLFDNILQEPDFWKEPADAVKRAYSKTDSSILEMSGELGRGGSTAVTAILVNCQKLIVANIGDSRAVLCKKGVAKQLSVDHEPTAEHEDIKNRGGFVSNFPGDVPRVDGRLAVSRAFGDKSLKKHLSSEPFVTVEIIEDDAEFVILASDGLWKVMSNQEAVNCIRNIKDARSSAKRLTEEAVNRKSTDDISCIVVKFQ

SEQ ID NO: 22157 - DNA, 1191 bp, Glycine max; identical to SEQ ID NO: 1020
  CDS (1)..(1191)

SEQ ID NO: 22158 - protein, 396 aa, Glycine max; identical to SEQ ID NO: 1021

SEQ ID NO: 22159 - DNA, 849 bp, Glycine max; identical to SEQ ID NO: 1536
  CDS (1)..(849)

SEQ ID NO: 22160 - protein, 282 aa, Glycine max; identical to SEQ ID NO: 1537

SEQ ID NO: 22161 - DNA, 1290 bp, Glycine max; identical to SEQ ID NO: 18198
  CDS (1)..(1290)

SEQ ID NO: 22162 - protein, 429 aa, Glycine max; identical to SEQ ID NO: 18199

SEQ ID NO: 22163 - DNA, 945 bp, Glycine max; identical to SEQ ID NO: 1540
  CDS (1)..(945)

SEQ ID NO: 22164 - protein, 314 aa, Glycine max; identical to SEQ ID NO: 1541

SEQ ID NO: 22165 - DNA, 1044 bp, Glycine max; identical to SEQ ID NO: 1024
  CDS (1)..(1044)

SEQ ID NO: 22166 - protein, 347 aa, Glycine max; identical to SEQ ID NO: 1025

SEQ ID NO: 22167 - DNA, 1083 bp, Glycine max; identical to SEQ ID NO: 1544
  CDS (1)..(1083)

SEQ ID NO: 22168 - protein, 360 aa, Glycine max; identical to SEQ ID NO: 1545

SEQ ID NO: 22169 - DNA, 1191 bp, Glycine max; identical to SEQ ID NO: 1026
  CDS (1)..(1191)

SEQ ID NO: 22170 - protein, 396 aa, Glycine max; identical to SEQ ID NO: 1027

SEQ ID NO: 22171 - DNA, 1107 bp, Glycine max
  CDS (1)..(1107)
atggggcatttttcatctgcgttcaataggttggcaaagtcttttgcaacgaagaaagggaggagttctgatgaatgtaatggaagagaagcggcggtagcaatggcaaaggaagccaaaagaaatcacttcatgttgcatagctccggcacagttaatgttgatggttctaacaactttgcctcagttttctccaaaaaaggccagaaaggagtcaatcaggattgctgcattgtgtgggaagaatttggatgccaagaggacatgatcttctgcgggatttttgatgggcatgggccatggggtcactttgtggccaaaagagtacgaaagtcaatgccaacatctttgctatgcaactggcaggagacactttcccaatctccacttgattcagatgttgattttgatgtagagacagagaaaaaacaacaccggtttaacatgtggaagcattcatacttgaagacttgtgctgccattgatcgcgaactagagcagaatcgcaagatagattcattttacagtggaacaactgccttgtcaattgttagacagggtgaactcattatcattgcaaacgttggtgactctcgtgctgtgttagctacaacatcagatgatggaagtttggtaccagttcagctgacagtagatttcaagcccaatttacctcaggaagcagagagaatacttgagtccaatggacgagttttctgcttagacgacgagcccggggtgcacagggtgtggttgccggatgaggagtttccaggacttgccatgtcaagggcttttggtgactactgcgtcaaaaagtatggtcttatttcagtgcctgaggtaacacaaaggaacataaccagcaaagaccagtttgttgtgcttgccactgatggggtgtgggatgtaatctccaatcaagaagcggtggatattgtatcttcaacaccagacagaacagactcgtccaaacgtttggtggagtgtgcaatgcgtgcatggaaacgcaagaggaggggcattgcaatggatgatatttcagctatttgtctcttctttcactcttcaccttcccttgaccaagttgcccccctagaagaatag

SEQ ID NO: 22172 - protein, 368 aa, Glycine max
MGHFSSAFNRLAKSFATKKGRSSDECNGREAAVAMAKEAKRNHFMLHSSGTVNVDGSNNFASVFSKKGQKGVNQDCCIVWEEFGCQEDMIFCGIFDGHGPWGHFVAKRVRKSMPTSLLCNWQETLSQSPLDSDVDFDVETEKKQHRFNMWKHSYLKTCAAIDRELEQNRKIDSFYSGTTALSIVRQGELIIIANVGDSRAVLATTSDDGSLVPVQLTVDFKPNLPQEAERILESNGRVFCLDDEPGVHRVWLPDEEFPGLAMSRAFGDYCVKKYGLISVPEVTQRNITSKDQFVVLATDGVWDVISNQEAVDIVSSTPDRTDSSKRLVECAMRAWKRKRRGIAMDDISAICLFFHSSPSLDQVAPLEE

SEQ ID NO: 22173 - DNA, 1104 bp, Glycine max
  CDS (1)..(1104)
atggtcctttttccatcttttgtgaatggattggtaagaactgtgtcaatcaagaaggagaagaattgtcaaagggaggacggaagaaaagctgtggaagaattggcaaaggaagcaaggaagaatgaattgctattgagttcatctggagttgtgaagtcaaccaaggccaacaattttgtttctgtgttcactaataggggccagaaaggagtcaatcaggatcgtcttcttgtttgggaggaatttggttgccaacaagacatgatgttctgtggagtttttgatgggcatggtccatggggacactttgtagccaaaagggtcaggaaactagtaccagcctttttgctctgcaattggcaggaaaatctggctacaacatcacttgacctggattttaagatggaagcagacaaaaatatccatggatttgacatatggaaacaatcttacataaagacttgtgctgccgttgatcaggatttgaaacagcacactgggattgattcctacctaagtggcactacagcattgacaattatcaaacagggagaatatcttactatagcaaacataggtgattctagggctgtcttggcagctacttcagatgatggcacattaactccacatcagcttaccactgacttcaagccaaatttaccacaggaggcagaacgcataacacaatccagagggcaggtattttgtatggaagatgaaccaggagtgtacagggtctggatgccaaatggtaaaacaccaggactagcaatatctagagcttttggagaccactgcatgaaggactttggactaatctccgtgccagatgtgacacacagaaaaattacccccagggatcaatttgtcatcttggcaacagatggggtatgggatgttatatccaaccaggaagcagtgaagattgtttctgcaacgtcacataaagaaaaagcagctcaaaggctggtgaaatgtgccatacatgaatggaaacggaaaaaaagtggcattgctatggatgatatgtcagttatttgcctcttctttcactcttccccctcccatcaactcccagccatcaaaattgttgattaa

SEQ ID NO: 22174 - protein, 367 aa, Glycine max
MVLFPSFVNGLVRTVSIKKEKNCQREDGRKAVEELAKEARKNELLLSSSGVVKSTKANNFVSVFTNRGQKGVNQDRLLVWEEFGCQQDMMFCGVFDGHGPWGHFVAKRVRKLVPAFLLCNWQENLATTSLDLDFKMEADKNIHGFDIWKQSYIKTCAAVDQDLKQHTGIDSYLSGTTALTIIKQGEYLTIANIGDSRAVLAATSDDGTLTPHQLTTDFKPNLPQEAERITQSRGQVFCMEDEPGVYRVWMPNGKTPGLAISRAFGDHCMKDFGLISVPDVTHRKITPRDQFVILATDGVWDVISNQEAVKIVSATSHKEKAAQRLVKCAIHEWKRKKSGIAMDDMSVICLFFHSSPSHQLPAIKIVD

SEQ ID NO: 22175 - DNA, 1107 bp, Glycine max
  CDS (1)..(1107)
atggggcgtttttcatctgcgtgcaataggtgggggaaggcgttttcaatgaataaagggaggagttctgatgaatgtaatggaagagaagcggcggtagcaatggcaaaggaagccaaaagaaatcacttcatgttgcatagctccggcacagttaatgttgatggttctaacaactttgcctcagttttctccaaaaaaggccagaaaggagtcaatcaggattgctgcatagtgtgggaagaatttggatgccaagaggacatgatcttctgcgggatttttgatgggcatgggccatggggtcactttgtggccaaaagagtacgaaaatcaatgccaacatctttgctatgcaactggcaggagacactttcccaatctccacttgattcagatgttgattttgatgtagagacagagaaaaaacaacaccggtttaacatgtggaagcattcatacttgaagacttgtgctgccattgatcgcgaactagagcagaatcgcaagatagattcattttacagtggaacaactgccttgtcaattgttagacagggtgaactcattatcattgcaaacgttggtgactctcgtgctgtgttagctacaacatcagatgatggaagtttggtaccagttcagctgacagtagatttcaagcccaatttacctcaggaagcagagagaatacttgagtccaatggacgagttttctgcttagacgacgagcccggggtgcacagggtgtggttgccggatgaggagtttccaggacttgccatgtcaagggcttttggtgactactgcgtcaaaaagtatggtcttatttcagtgcctgaggtaacacaaaggaacataaccagcaaagaccagtttgttgtgcttgccactgatggggtgtgggatgtaatctccaatcaagaagcggtggatattgtatcttcaacaccagacagaaccgactcgtccaaacgtttggtggagtgtgcaatgcgtgcatggaaacgcaagaggaggggcattgcaatggatgatatttcagctatttgtctcttctttcactcttcaccttcacttgaccaagttgccaccctagaagaatag

SEQ ID NO: 22176 - protein, 368 aa, Glycine max
MGRFSSACNRWGKAFSMNKGRSSDECNGREAAVAMAKEAKRNHFMLHSSGTVNVDGSNNFASVFSKKGQKGVNQDCCIVWEEFGCQEDMIFCGIFDGHGPWGHFVAKRVRKSMPTSLLCNWQETLSQSPLDSDVDFDVETEKKQHRFNMWKHSYLKTCAAIDRELEQNRKIDSFYSGTTALSIVRQGELIIIANVGDSRAVLATTSDDGSLVPVQLTVDFKPNLPQEAERILESNGRVFCLDDEPGVHRVWLPDEEFPGLAMSRAFGDYCVKKYGLISVPEVTQRNITSKDQFVVLATDGVWDVISNQEAVDIVSSTPDRTDSSKRLVECAMRAWKRKRRGIAMDDISAICLFFHSSPSLDQVATLEE

SEQ ID NO: 22177 - DNA, 945 bp, Glycine max; identical to SEQ ID NO: 1554
  CDS (1)..(945)

SEQ ID NO: 22178 - protein, 314 aa, Glycine max; identical to SEQ ID NO: 1555

SEQ ID NO: 22179 - DNA, 1128 bp, Brassica napus; identical to SEQ ID NO: 1556
  CDS (1)..(1128)

SEQ ID NO: 22180 - protein, 375 aa, Brassica napus; identical to SEQ ID NO: 1557

SEQ ID NO: 22181 - DNA, 1284 bp, Brassica napus; identical to SEQ ID NO: 18200
  CDS (1)..(1284)

SEQ ID NO: 22182 - protein, 427 aa, Brassica napus; identical to SEQ ID NO: 18201

SEQ ID NO: 22183 - DNA, 1674 bp, Glycine max; identical to SEQ ID NO: 1558
  CDS (1)..(1674)

SEQ ID NO: 22184 - protein, 557 aa, Glycine max; identical to SEQ ID NO: 1559

SEQ ID NO: 22185 - DNA, 1113 bp, Zea mays; identical to SEQ ID NO: 1034
  CDS (1)..(1113)

SEQ ID NO: 22186 - protein, 370 aa, Zea mays; identical to SEQ ID NO: 1035

SEQ ID NO: 22187 - DNA, 1098 bp, Zea mays; identical to SEQ ID NO: 1564
  CDS (1)..(1098)

SEQ ID NO: 22188 - protein, 365 aa, Zea mays; identical to SEQ ID NO: 1565

SEQ ID NO: 22189 - DNA, 1074 bp, Zea mays; identical to SEQ ID NO: 1566
  CDS (1)..(1074)

SEQ ID NO: 22190 - protein, 357 aa, Zea mays; identical to SEQ ID NO: 1567

SEQ ID NO: 22191 - DNA, 1134 bp, Zea mays
  CDS (1)..(1134)
atggggatctgcgcctcgtccaagcgcgtgcggcaggaggagcaggactccgacgagaacgtggtgtacgtgatggacgagcagggcggcgggggagaaggcgaggacggccgtggcgcccgcgcggcggcatcccgcaaggtggcctccctcttctcgcagaagggcaagaaggggcccaaccaggacgccgtcatactctgccagggattcggcatggaggacggcgtgttctgcggcgtgttcgacgggcacggccggtgcgggcagttcatcagcaagctggtgagggactacctcccgttcatgatcctgagccaccggaacgcgctcctcatgggctccgacgacgacgacgatgatccggccttcagcgacgcgtcggcgtcggcgtcggcgtcgtccacggacggcagcgggcagtcgtcgccggcgccggcgcagctgctggaggagtggcgggaggcctgcgccaacgcgttcgaggccatggacaaggagctcaagctccaggccaacgtggactgcaacttcagcggcaccaccgccgtgtgcgccatcaagcaggggaaggacctcatcgtcgccaacctcggcgactccagggccgtgctggcgaccatgtcggacacgggctacctcaaggccgtgcagctcaccaccgaccagaagcccaacgtgccccaggaggctgagcgtatcaagcgctgcaacggccgcgtgttcgcgctcaaggacgagccgtcggtgctgcgcgtgtggcttcccgacgaggactgcccgggcctcgccatggcgcgctctctgggcgactaccgcctcaagcgccacggcgtggtgtcggagccggaggtgacgcaccgccgcgtcgcgccgggggacctgttcatcatcctggccacggacggcgtgtgggacgtgctcagcaacgaggaggtcgtgtccatcgtctgcgccacgccgcggaagcagcacgcgtccaaggccgtcgccgaggccgcggcgcagcgctggcggaccaggtacccgacgtcccgcgtcgacgactgctccgccgtctgcctcttcctgcgggaccaggactgggccagcagcgtcgccgcggccagggccaaggcggccgctagccgctag

SEQ ID NO: 22192 - protein, 377 aa, Zea mays
MGICASSKRVRQEEQDSDENVVYVMDEQGGGGEGEDGRGARAAASRKVASLFSQKGKKGPNQDAVILCQGFGMEDGVFCGVFDGHGRCGQFISKLVRDYLPFMILSHRNALLMGSDDDDDDPAFSDASASASASSTDGSGQSSPAPAQLLEEWREACANAFEAMDKELKLQANVDCNFSGTTAVCAIKQGKDLIVANLGDSRAVLATMSDTGYLKAVQLTTDQKPNVPQEAERIKRCNGRVFALKDEPSVLRVWLPDEDCPGLAMARSLGDYRLKRHGVVSEPEVTHRRVAPGDLFIILATDGVWDVLSNEEVVSIVCATPRKQHASKAVAEAAAQRWRTRYPTSRVDDCSAVCLFLRDQDWASSVAAARAKAAASR

SEQ ID NO: 22193 - DNA, 1065 bp, Zea mays; identical to SEQ ID NO: 1036
  CDS (1)..(1065)

SEQ ID NO: 22194 - protein, 354 aa, Zea mays; identical to SEQ ID NO: 1037

SEQ ID NO: 22195 - DNA, 855 bp, Zea mays; identical to SEQ ID NO: 1572
  CDS (1)..(855)

SEQ ID NO: 22196 - protein, 284 aa, Zea mays; identical to SEQ ID NO: 1573

SEQ ID NO: 22197 - DNA, 873 bp, Zea mays; identical to SEQ ID NO: 1574
  CDS (1)..(873)

SEQ ID NO: 22198 - protein, 290 aa, Zea mays; identical to SEQ ID NO: 1575

SEQ ID NO: 22199 - DNA, 1335 bp, Zea mays; identical to SEQ ID NO: 18208
  CDS (1)..(1335)

SEQ ID NO: 22200 - protein, 444 aa, Zea mays; identical to SEQ ID NO: 18209

SEQ ID NO: 22201 - DNA, 1290 bp, Zea mays; identical to SEQ ID NO: 18210
  CDS (1)..(1290)

SEQ ID NO: 22202 - protein, 429 aa, Zea mays; identical to SEQ ID NO: 18211

SEQ ID NO: 22203 - DNA, 873 bp, Zea mays; identical to SEQ ID NO: 1584
  CDS (1)..(873)

SEQ ID NO: 22204 - protein, 290 aa, Zea mays; identical to SEQ ID NO: 1585

SEQ ID NO: 22205 - DNA, 1503 bp, Zea mays
  CDS (1)..(1503)
atggtggaagccgccgccgggcgccggtcaggcaccagccgtcggcggcctagcggcagcggaggggagcaccagcgcctggttgcgctcgccgtcgccgcgcgcttcgccatggtcagcacccggtctgcgggtccagcagtggcgggaggagatggagcgggagctgctggaacaggcgccggccccgctgccggtagcggacgatgcatggaggacttcttcgactgcctcctcggcttgctcggcgcgttaggcatgacatgggctacggcgcggccccagcggcagccgctcccgccgctgcctcgcggggttggggcggggcctgagccaaccgacgcccggcgtttcgcagcggcgctcagggccacccccggccggatcgctggcaatggcgcctgcgccgtcgcgtcactgtacacgctgcagggcaagaagggcgtcaaccaggatgctatgatcttctgggagaacttctgttctagagatgataccatcttttgtggtgtgtttgatggtcatggaccttatggccatttggttgccaagagagtaagagatctcctgcctctaaagttaggagcagatttggggatggaagatggtagagcagcatccactggcaacattaagctcaatacaaatgatgtagcttcatctgaacacatagtcagaggaggtactgccatttcctctgaagctcagcagaatggagattatccagagatcttcccagcattgagaacttcattcttgaaggcattccatgtaatggatagggatctcaaattacataaaaatattgattgctttttcagtgggactacagcagtggcagtgatcaagcagggacacattcttataattggcaatttgggggattcaagagctgtcttaggcaccagagatgaaaataaccagcttgttgctgttcaattgacagttgatctcaaacctgacattccaagtgaagcacagagaatcaggcaacacaggggcagaatatttgcacttcctgaggagccggaggttgctcgtgtttggcttccaaggtataactcgcctggattggccatggctagggcatttggggacttttgtctgaaggatcatggtgtaatttctatgcctgatgtttcctatcaccacataacggaaaaggatgaatttgttgtgctggctaccgatggggtttgggacgtgctatcaaatgatgaagttgttaatactgtcagccgagtcacatctcgggcctctgcagcacgatttttagtcgaatcagctcaccgtgcttggcgaactcggttccccacttctaaagtcgatgattgtgctgctgtctgcctattcctgaacacaaatgaagcaagtgaatcttcgagttccttggccaacaatttggcagatgctgtacaagttagcactgctcagtgctccaaaactatccaggtgagcgcacctatagacggaaacgaggtgtctgttgttgaaacgaggtga

SEQ ID NO: 22206 - protein, 500 aa, Zea mays
MVEAAAGRRSGTSRRRPSGSGGEHQRLVALAVAARFAMVSTRSAGPAVAGGDGAGAAGTGAGPAAGSGRCMEDFFDCLLGLLGALGMTWATARPQRQPLPPLPRGVGAGPEPTDARRFAAALRATPGRIAGNGACAVASLYTLQGKKGVNQDAMIFWENFCSRDDTIFCGVFDGHGPYGHLVAKRVRDLLPLKLGADLGMEDGRAASTGNIKLNTNDVASSEHIVRGGTAISSEAQQNGDYPEIFPALRTSFLKAFHVMDRDLKLHKNIDCFFSGTTAVAVIKQGHILIIGNLGDSRAVLGTRDENNQLVAVQLTVDLKPDIPSEAQRIRQHRGRIFALPEEPEVARVWLPRYNSPGLAMARAFGDFCLKDHGVISMPDVSYHHITEKDEFVVLATDGVWDVLSNDEVVNTVSRVTSRASAARFLVESAHRAWRTRFPTSKVDDCAAVCLFLNTNEASESSSSLANNLADAVQVSTAQCSKTIQVSAPIDGNEVSVVETR

SEQ ID NO: 22207 - DNA, 1065 bp, Zea mays; identical to SEQ ID NO: 1042
  CDS (1)..(1065)

SEQ ID NO: 22208 - protein, 354 aa, Zea mays; identical to SEQ ID NO: 1043

SEQ ID NO: 22209 - DNA, 1536 bp, Zea mays
  CDS (1)..(1536)
atggtggccgttgcggcgggaaggcgggccggcggcgttggtggccgccggcgctcgggctgcggcccggggcaggcacagcagaagctactagcgatcgccgtcgccgcgcgcttcgctgaggccgtggcgccgccgtctgcggaggcctcccgtgccggctccggcggctgttgcgtagagctcctcgagtgcctcctcggggctctgagcgtcaacgcggccccgccgcccgcgcagcacaggcgggccgtgcactcgatccgccgccgccgcccccgtggcggggggtccgcggacgaccgccacgccgacgctccctcgggccgcatcgcgggcaacggcgcatccgcatcagcagccgcgtcgctctacaccatgcagggcaggaagggtgtcaatcaggacgccatggtggtctgggagaattttggttcaaaggatgataccattttttgtggagtttttgatggccatggaccaaacggccatttggttgccaagagggtcagagatcttctccctgtaaagttgagtgcaaatttagggaagggtgaatgcaaagagatttctactagcgatgtcaagagtgggactactaaaggagttgcaaccgaacacagggttgaagatactgatgcttcccctggaaatgaagagaatggcgagtacccagaatttttcacagcactgagggcttcattcttgcaggcgttttatgtcatggacagggatctgaaggcacatagaaatattgattgtgaattcagtggtacaacagcagtcacagtaatcaagcagggacaaaatcttataattggcaacttgggagattctagagctgtcttgggcacaagaggtgaacataatcagctagttgctcttcagctgacagtggacctcaaacctagtatcccgagtgaagcagaacgaattaggcaacaaagtggcagagtattttctcttccagatgaaccagacgttgttcgtgtgtggcttccaactttcaactcgccagggttggccatggcaagatcatttggagacttctgtctgaagaaatatggaataatttctatgcctgatgttttctaccatcgcatcacggataaggatgaattcgttgtgctggcaactgacggggtgtgggatgtgctttccaatgctgaagctgttagcatcatcagcaatgctccttcacaggcctcagcagctcgatttctggttgaaaaggctcacagggcatggaggacacggtaccccacatcaaaaactgatgattgtgctgttgtctgcctctttctgaaaacagtagcagcaagtacatcctccagtgctgtaacaaaagattcggtgaagaacagagaaatgagcaatggtaagcattcattggctgttaaaacaagcaccaaggttcctgcaaatcttgttactgcaaaagatgagtggtcttttgttgatggttcctctgggtgtgtcgcgctgccaactttaccagagcccacttcagttgtgaaggatagctcaaaagattga

SEQ ID NO: 22210 - protein, 511 aa, Zea mays
MVAVAAGRRAGGVGGRRRSGCGPGQAQQKLLAIAVAARFAEAVAPPSAEASRAGSGGCCVELLECLLGALSVNAAPPPAQHRRAVHSIRRRRPRGGGSADDRHADAPSGRIAGNGASASAAASLYTMQGRKGVNQDAMVVWENFGSKDDTIFCGVFDGHGPNGHLVAKRVRDLLPVKLSANLGKGECKEISTSDVKSGTTKGVATEHRVEDTDASPGNEENGEYPEFFTALRASFLQAFYVMDRDLKAHRNIDCEFSGTTAVTVIKQGQNLIIGNLGDSRAVLGTRGEHNQLVALQLTVDLKPSIPSEAERIRQQSGRVFSLPDEPDVVRVWLPTFNSPGLAMARSFGDFCLKKYGIISMPDVFYHRITDKDEFVVLATDGVWDVLSNAEAVSIISNAPSQASAARFLVEKAHRAWRTRYPTSKTDDCAVVCLFLKTVAASTSSSAVTKDSVKNREMSNGKHSLAVKTSTKVPANLVTAKDEWSFVDGSSGCVALPTLPEPTSVVKDSSKD

SEQ ID NO: 22211 - DNA, 948 bp, Zea mays
  CDS (1)..(948)
atggtcggccggatggagcggcagaccgcgtcgtcgtcagcttcgtgctcctcctcctcctcttcctcctcggtctgcggcggcaagaagcgccctgatatcctcaacatgatccggaatgcagcctgtcttaattcgtcatctactgataccggcaagggaaggagtaaattgtcaaccaacaaagttacacatggattccacctggtggaaggcaagtccggccatggcatggaagactaccatgtggcagagtacaaatatgtgaagaaccatgagcttggtctcttcgccatctttgatggccatttaggagataaggtgccaagttacctgaaagctaaccttttcagcaacataatgaaagagcctctcttctggtctagtcctgaagaagcaataaagaatgcatactgctctacaaacaaatatatcctggaaaatggcaaacaacttggaccaggtggttcaacagcagttacagctattgtagtcgatggtaaggacatgttgatcgcaaatgtaggcgactctcgagctgttgtgtgtgaaatgggctctgctaatcagctcactgttgaccatgagcccgatacaactgaggaaaggcagaggattgaaaagcacggtggctttgtaacgacatttcctggtgatgttcctcgggtgaatggccagcttgctgttgctagagcatttggtgaccaaagcctcaaggcccacttgagctctaaacctgatactagacatgtaccaatagactcaagtatagagttcgtcatacttgccagtgatggattgtggaaggtaatgaagaaccaggaagccgtggatctcgtgaagtcaatcaaggatcccaaggcagcagcgaagcgattgaccactgaagcgttggcaaggaagagcaaagatgacatctcttgcattgtcatccgtttccgctgctga

SEQ ID NO: 22212 - protein, 315 aa, Zea mays
MVGRMERQTASSSASCSSSSSSSSVCGGKKRPDILNMIRNAACLNSSSTDTGKGRSKLSTNKVTHGFHLVEGKSGHGMEDYHVAEYKYVKNHELGLFAIFDGHLGDKVPSYLKANLFSNIMKEPLFWSSPEEAIKNAYCSTNKYILENGKQLGPGGSTAVTAIVVDGKDMLIANVGDSRAVVCEMGSANQLTVDHEPDTTEERQRIEKHGGFVTTFPGDVPRVNGQLAVARAFGDQSLKAHLSSKPDTRHVPIDSSIEFVILASDGLWKVMKNQEAVDLVKSIKDPKAAAKRLTTEALARKSKDDISCIVIRFRC

SEQ ID NO: 22213 - DNA, 1083 bp, Zea mays; identical to SEQ ID NO: 1044
  CDS (1)..(1083)

SEQ ID NO: 22214 - protein, 360 aa, Zea mays; identical to SEQ ID NO: 1045

SEQ ID NO: 22215 - DNA, 1290 bp, Zea mays; identical to SEQ ID NO: 18212
  CDS (1)..(1290)

SEQ ID NO: 22216 - protein, 429 aa, Zea mays; identical to SEQ ID NO: 18213

SEQ ID NO: 22217 - DNA, 1455 bp, Zea mays; identical to SEQ ID NO: 1594
  CDS (1)..(1455)

SEQ ID NO: 22218 - protein, 484 aa, Zea mays; identical to SEQ ID NO: 1595

SEQ ID NO: 22219 - DNA, 1047 bp, Zea mays; identical to SEQ ID NO: 1596
  CDS (1)..(1047)

SEQ ID NO: 22220 - protein, 348 aa, Zea mays; identical to SEQ ID NO: 1597

SEQ ID NO: 22221 - DNA, 1119 bp, Zea mays; identical to SEQ ID NO: 1046
  CDS (1)..(1119)

SEQ ID NO: 22222 - protein, 372 aa, Zea mays; identical to SEQ ID NO: 1047

SEQ ID NO: 22223 - DNA, 1074 bp, Zea mays; identical to SEQ ID NO: 1602
  CDS (1)..(1074)

SEQ ID NO: 22224 - protein, 357 aa, Zea mays; identical to SEQ ID NO: 1603

SEQ ID NO: 22225 - DNA, 1341 bp, Zea mays; identical to SEQ ID NO: 18216
  CDS (1)..(1341)

SEQ ID NO: 22226 - protein, 446 aa, Zea mays; identical to SEQ ID NO: 18217

SEQ ID NO: 22227 - DNA, 1341 bp, Zea mays; identical to SEQ ID NO: 1604
  CDS (1)..(1341)

SEQ ID NO: 22228 - protein, 446 aa, Zea mays; identical to SEQ ID NO: 1605

SEQ ID NO: 22229 - DNA, 1218 bp, Zea mays; identical to SEQ ID NO: 1606
  CDS (1)..(1218)

SEQ ID NO: 22230 - protein, 405 aa, Zea mays; identical to SEQ ID NO: 817

SEQ ID NO: 22231 - DNA, 1065 bp, Zea mays; identical to SEQ ID NO: 1048
  CDS (1)..(1065)

SEQ ID NO: 22232 - protein, 354 aa, Zea mays; identical to SEQ ID NO: 1049

SEQ ID NO: 22233 - DNA, 1167 bp, Zea mays; identical to SEQ ID NO: 1050
  CDS (1)..(1167)

SEQ ID NO: 22234 - protein, 388 aa, Zea mays; identical to SEQ ID NO: 1051

SEQ ID NO: 22235 - DNA, 1332 bp, Zea mays; identical to SEQ ID NO: 18220
  CDS (1)..(1332)

SEQ ID NO: 22236 - protein, 443 aa, Zea mays; identical to SEQ ID NO: 18221

SEQ ID NO: 22237 - DNA, 1314 bp, Zea mays; identical to SEQ ID NO: 1612
  CDS (1)..(1314)

SEQ ID NO: 22238 - protein, 437 aa, Zea mays; identical to SEQ ID NO: 1613

SEQ ID NO: 22239 - DNA, 1518 bp, Zea mays; identical to SEQ ID NO: 1052
  CDS (1)..(1518)

SEQ ID NO: 22240 - protein, 505 aa, Zea mays; identical to SEQ ID NO: 1053

SEQ ID NO: 22241 - DNA, 1290 bp, Zea mays
  CDS (1)..(1290)
atgacgaccgccgcgagggagaggcgcctgccgccgacgctgcccctggccacgcttatcggtcgcgagctccgtgcggggggctccgagcgcccggccctgcgctacggccacgccggcttcgccaagcgcggcgaggactacttcctcgtcaagcccgactgcgtccgcgtccccggggaccccgcatcggcgttctcagttttcgccgtgttcgacggccacaacggcgtgtcggcggcggtctatagcaaagagcatctgctcgagcacgtcatgagcgcgctgccgccggacatcgggcgcgacgactggctgcaggcgctgccgcgcgctctcgtcgccggctttgtcaaggccgacattgatttccagcgcaagggggaggtgtcaggaaccacggcgacactggtggtcatcgatgggttcacggtcacagtggcgtcggtgggagactcgcgctgcatcctggacacgcagggcggcgagttgcagctgctaaccgtggaccaccgcctggaggagaatgcagaggagcgggagcgcgtcacggccagcggtggggaagtaggccggctcaatctcttcggtggtcaggaggttggtcctctccggtgctggcctggtggcttgtgcctttcaagatccattggggacatggatgttggggagtacattgtgcccattccacatgtcaagcaagtcaagctatcaaacgctggaggaaggctgataatagcatccgatggcatatgggatgcattatccaatgaagcagctgcaaaagcatgcagaggattgcctgcagaactggcagcgaagcttgtcgttaagcaagctctgaaaacaagcgggctaaaggatgacaccacctgtgttgtagttgacattatcccatccgatcatttgacatcaccacaattgtctccaaagaaaaatcataacaagttgaagtcactttttcgtagaaggtcgcatagttctgttggaaagctcgggggcaagtctgcctccattggttctgtggaggagttatttgaagaaggctctgcaatgttagaagaaaggttgggcaggaatttgtctttgaaagcagtttcagcaccttttcgctgtgcaatctgccaagtggaccaagagcccttcgaagatttgatgagagataatggaggtggttactgctcttccccatgcgctccatggggtggtccatatctctgtttggactgtcggaaaaagaaagatgcaatggaaggtaaaagatctagctgctccacagcatgcaggtga

SEQ ID NO: 22242 - protein, 429 aa, Zea mays; identical to SEQ ID NO: 18137

SEQ ID NO: 22243 - DNA, 1293 bp, Zea mays
  CDS (1)..(1293)
atggcgttcgccgccagcgagggaaatctttccccggcgctgcccctggccactctgatcggccgcgagctccgcggcgacggtaccgagcgcccgcacgtgcgctacggccactctggcttcgccaagcgcggcgaggactacttcctcgtcaagcccgactgcctccgcgtccccggagacccttcctcctctttctccgtcttcgctgtattcgacggccacaatggcgtgtcggcggcggtgttcagcaaggagaaattgctggagcacgtgatgagcgcggtgcccgagggcatcagtcgcgaggactggctacaggcgctgccgcgcgcgctcgtcgcaggattcgtcaagacagacattgacttccagcgcaagggtgagacgtcaggaacgacggcgacacttgttgtggttgatgggttcacggtcactgtggcgtcggtgggagattctaggtgcattctggatacacagggaggcgaggtctcattgctgactgtggatcaccggctagaggagaatgcagaggagcgtgagcgcgtcacagcgagtggaggagaggtcagccggcttaatctctgtggtggacaggaggtgggtcctctccgatgctggccaggtggattgtgcctttcaaggtcaattggggatactgatgtcggcgagttcattgtaccgattccacatgtcaagcaagtgaagctcccaaatactggtggaagactaataattgcatcagatggaatatgggacgctctgtcctcagagagtgctgctcaggcgtgccggggattacgtgcagaactggctgcaaaacttgttgttaagcaagctctgaagacaagtgggctgaaagatgacaccacatgtgtggttgtcgacatcatcccatctgatcattgttcaacaccaccagcattgtctccaaagaaaaatcagaacaagttgaagcatcttatttttggtaaaaggtctcatagttctgttggaaagctcagcaaatctgcttcattgggttcagtggaagaaatattcgaggagggatctgcaatgttggaagaaaggttgggaagtaattttccaccaaaagcaaatctgcctccatttcgctgtgcaatctgccaagtggaccaagagccattcgaaggtttaatgacggacaatgtaggtggctgctgctcaaccccatcaacaccatggggtggtccttatctttgctcaggctgtaggaaaaagaaggacgcgatggaaggtaaacgatcgaatcgttcaacgacgtgcaggtga

SEQ ID NO: 22244 - protein, 430 aa, Zea mays; identical to SEQ ID NO: 18129

SEQ ID NO: 22245 - DNA, 23 bp, Artificial sequence
  primer
atgggttgtgttcaatgcaaatg

SEQ ID NO: 22246 - DNA, 25 bp, Artificial sequence
  primer
tcattcattagacagctttttaatc

SEQ ID NO: 22247 - protein, 447 aa, Artificial sequence
  consensus sequence
  Variant (2)..(18): Xaa in position 2 to 18 is any amino acid
  Variant (19)..(42): Xaa in position 19 to 42 is any or no amino acid
  Variant (47)..(47): Xaa in position 47 is any amino acid
  Variant (48)..(49): Xaa in position 48 to 49 is any or no amino acid
  Variant (51)..(97): Xaa in position 51 to 97 is any amino acid
  Variant (98)..(149): Xaa in position 98 to 149 is any or no amino acid
  Variant (151)..(151): Xaa in position 151 is any amino acid
  Variant (154)..(164): Xaa in position 154 to 164 is any amino acid
  Variant (165)..(168): Xaa in position 165 to 168 is any or no amino acid
  Variant (172)..(172): Xaa in position 172 is any amino acid
  Variant (179)..(190): Xaa in position 179 to 190 is any amino acid
  Variant (191)..(204): Xaa in position 191 to 204 is any or no amino acid
  Variant (206)..(210): Xaa in position 206 to 210 is any amino acid
  Variant (211)..(252): Xaa in position 211 to 252 is any or no amino acid
  Variant (254)..(255): Xaa in position 254 to 255 is any amino acid
  Variant (257)..(261): Xaa in position 257 to 261 is any amino acid
  Variant (263)..(263): Xaa in position 263 is any amino acid
  Variant (265)..(272): Xaa in position 265 to 272 is any amino acid
  Variant (273)..(311): Xaa in position 273 to 311 is any or no amino acid
  Variant (313)..(315): Xaa in position 313 to 315 is any amino acid
  Variant (317)..(318): Xaa in position 317 to 318 is any amino acid
  Variant (320)..(330): Xaa in position 320 to 330 is any amino acid
  Variant (331)..(351): Xaa in position 331 to 351 is any or no amino acid
  Variant (353)..(368): Xaa in position 353 to 368 is any amino acid
  Variant (369)..(370): Xaa in position 369 to 370 is any or no amino acid
  Variant (372)..(372): Xaa in position 372 is any amino acid
  Variant (375)..(375): Xaa in position 375 is any amino acid
  Variant (378)..(411): Xaa in position 378 to 411 is any amino acid
  Variant (412)..(446): Xaa in position 412 to 446 is any or no amino acid
DXXXXXXXXXXXXXXXXXXXXXXXXXXXXXXXXXXXXXXXXXFDGHXXXGXXXXXXXXXXXXXXXXXXXXXXXXXXXXXXXXXXXXXXXXXXXXXXXXXXXXXXXXXXXXXXXXXXXXXXXXXXXXXXXXXXXXXXXXXXXXXXXXXXXGXTAXXXXXXXXXXXXXXXVANXGDSRAVXXXXXXXXXXXXXXXXXXXXXXXXXXDXXXXXXXXXXXXXXXXXXXXXXXXXXXXXXXXXXXXXXXXXXXXXXXEXXRXXXXXGXVXXXXXXXXXXXXXXXXXXXXXXXXXXXXXXXXXXXXXXXXXXXXXXXLXXXRXXGXXXXXXXXXXXXXXXXXXXXXXXXXXXXXXXXPXXXXXXXXXXXXXXXXXXAXDGXWDXXXXXXXXXXXXXXXXXXXXXXXXXXXXXXXXXXXXXXXXXXXXXXXXXXXXXXXXXXXXXXXXXXXXXD

SEQ ID NO: 22248 - protein, 10 aa, Artificial sequence
  protein pattern
  Variant (2)..(2): Xaa in position 2 is any amino acid
  Variant (5)..(5): Xaa in position 5 is Cys or Ser
  Variant (8)..(8): Xaa in position 8 is Ile or Val
  Variant (9)..(9): Xaa in position 9 is any amino acid
  Variant (10)..(10): Xaa in position 10 is Ala, Cys, Gly or Ser
NXGDXRAXXX

SEQ ID NO: 22249 - DNA, 423 bp, Arabidopsis thaliana
  CDS (1)..(423)
atgggtagctgcgtctctaagggtaaaggagacgatgattccgtccataacgtcgagttttccggtggcaatgttcatctgattacaacaaaagagagttgggatgacaaattagctgaagctgatcgtgatggcaaaatcgtggttgcaaacttcagtgcgacatggtgtggtccgtgtaaaattgtggcaccatttttcatcgagctctcagagaaacattcttctcttatgttccttcttgtagatgttgatgaactcagcgattttagctcatcatgggacattaaggcgacaccaaccttcttcttcctaaagaatggacaacaaataggcaagcttgttggagcaaacaaaccggagctacagaagaaggttacttctatcattgattctgtgcctgaaagtcctcaacggccttga

SEQ ID NO: 22250 - protein, 140 aa, Arabidopsis thaliana
MGSCVSKGKGDDDSVHNVEFSGGNVHLITTKESWDDKLAEADRDGKIVVANFSATWCGPCKIVAPFFIELSEKHSSLMFLLVDVDELSDFSSSWDIKATPTFFFLKNGQQIGKLVGANKPELQKKVTSIIDSVPESPQRP

SEQ ID NO: 22251 - DNA, 414 bp, Glycine max
  CDS (1)..(414)
atggggaattgtttgcgcaaggctcatgcggatgatgattctgatcatattgtggagcttgcttctgggaatgtgcaacttattactaccaaagaatcttgggaccaaaagttggatcaagcgaggaaggagagtaaaattgtaattgcaaatttcagtgcaacatggtgtggtccttgtaaggtgattgcaccacattattgcgagttgtccgtgaaatacccgtctatcatcttcttattagtcgatgtggatgaactagctgacttcagcacttcgtgggacatcaaagccacaccaactttcttctttcttaaagatggaaaagaagttgacaaacttgtaggagccaacaagccagagctggagaagaagattgttgtggttaatgatgtagtgcctcataagcaatag

SEQ ID NO: 22252 - protein, 137 aa, Glycine max
MGNCLRKAHADDDSDHIVELASGNVQLITTKESWDQKLDQARKESKIVIANFSATWCGPCKVIAPHYCELSVKYPSIIFLLVDVDELADFSTSWDIKATPTFFFLKDGKEVDKLVGANKPELEKKIVVVNDVVPHKQ

SEQ ID NO: 22253 - DNA, 744 bp, Glycine max
  CDS (194)..(613)
ccacgaaaccgcgatagctctttccttatcttctccgaatccgaggagtggtagtaatttgtggtttttcacaatcactacctcgtttcatcttaattctgttaattgggtactaattaagctatctcaaacctcaatttttttgaggcttccattcattaaagtataaagtttgtggctttcaaacaattatatggggagttgtgtgtctaagaataaagctagggataatgattctgatcataatgtggattttgctgctgggaatgtgaaacttattaccaccaaagaagcgtgggaccaatatttggaagaagcaaggagggatggcaaaattgtgattgcaaatttcagtgcagcatggtgtggtccttgtaagatgattgcaccatattactgtgagttatctgagaaatacacttctatgatgttcttggtagttgatgtggatgaactaactgactttagcacttcatgggacatcaaagccacaccaactttcttctttcttaaagatggacaacaacttgacaaacttgtaggagccaacaagccagaactgcagaagaagattgttgccattaatgattcgcttcccgaatataagcagtgactgttttcttattcatgttgctgtgccctttgtcctttcacaagtcataactagtgttctacatttttttttcccgtgagtgtcgttgtattcttcctcggatgtaaatataagacatggcacatgaattt

SEQ ID NO: 22254 - protein, 139 aa, Glycine max
MGSCVSKNKARDNDSDHNVDFAAGNVKLITTKEAWDQYLEEARRDGKIVIANFSAAWCGPCKMIAPYYCELSEKYTSMMFLVVDVDELTDFSTSWDIKATPTFFFLKDGQQLDKLVGANKPELQKKIVAINDSLPEYKQ

SEQ ID NO: 22255 - DNA, 414 bp, Glycine max
  CDS (1)..(414)
atggggaattgtttgcgtaaggctcaagcggatgatgattctgatcataatgtggagtttgcttctgggaatgtgcaagttattactaccaaagaatcttgggaccaaaagttggaacaagcgaggagggacagtaaaattgttattgcaaatttcagtgccacatggtgtggtccttgtaagatgattgcaccatattattgcgagttgtccgagaaatacccatctatcatgttcttattagtcgatgtggatgaactagctgacttcagcactttatgggacatcaaagccacaccaactttcttctttcttaaagatggaaaagaggttgacaaacttgtaggagccaacaagccagagctggagaagaagattgttgtgattaatgatgcagtgcctcataagcaatag

SEQ ID NO: 22256 - protein, 137 aa, Glycine max
MGNCLRKAQADDDSDHNVEFASGNVQVITTKESWDQKLEQARRDSKIVIANFSATWCGPCKMIAPYYCELSEKYPSIMFLLVDVDELADFSTLWDIKATPTFFFLKDGKEVDKLVGANKPELEKKIVVINDAVPHKQ

SEQ ID NO: 22257 - DNA, 851 bp, Sorghum bicolor
  CDS (203)..(655)
gcacgagggcgggctctgctcgctgatccgatgattcatgataacttgacggatcgcacggccctcgtgcgtccgccacaaccccggcggcgcacggctccccgtctcccctccactctctccacccactccttccctttggcgccaagtccacccgcccctccgattccggccgtcgtccaggtgccgacagttgagcaggatgggactgaagcgcctgatgacatgctgctgctgcattgcaaagcagcacgctgatgacgaggacaagattgattttggaggtggcaatgttcatgttgttacaagcaaagaggactgggaccaaaaaattgccgaggcaaacaaggatgggaaaattgtggttgcaaacttcagtgcttcctggtgcggcccatgccgtgtcatttcacctgtttatgctgaaatgtcacagacataccctcagctcatgttcttgacgattgatgttgatgagttaatggagttcagctcgtcgtgggacatccgtgcgaccccgacgttcttcttcctcaagaacgggcagcaggtggacaagctggtcggcgccaacaagcctgagctggagaagaaagtcgccgccatcgctggggcgtcgtcacaggctgacgctgccagcagcaagacagtgtagtgtagtgtagtgtagtgtaggcaaggacccgccctgttgaccttgccccctgtatatggctgttccgatcctgtgtgtttcttgacagttgtcaccgcgcgcattgcgtctgccggcggcggttctgtctgtctctgtgtgatgtctcttcgtgccatgtgctgactgctgattgtacagttctccggtaatggta

SEQ ID NO: 22258 - protein, 150 aa, Sorghum bicolor
MGLKRLMTCCCCIAKQHADDEDKIDFGGGNVHVVTSKEDWDQKIAEANKDGKIVVANFSASWCGPCRVISPVYAEMSQTYPQLMFLTIDVDELMEFSSSWDIRATPTFFFLKNGQQVDKLVGANKPELEKKVAAIAGASSQADAASSKTV

SEQ ID NO: 22259 - DNA, 414 bp, Zea mays
  CDS (1)..(414)
ttggagtgcgcaatgggaggctgtgcgggaaaggtacgtcgtgatgacgaagaaaagcttgattttaaaggtggaaatgttcatattataacaagcaatgagggctgggaccagaagattgcagaagcaaacagagatgggaaaactgttgttgcaaatttcagcgcttcctggtgtgggccatgccgtgtcattgctcctgtctatgctgaaatgtcaaagacttatcctcaactcatgttcttgacaatagacgttgatgacctgatggacttcagctcttcatgggacatccgtgcaaccccgacattcttcttcctcaagaacgggcagcagatcgacaagctcgtgggcgcgaacaaacctgagctcgagaagaaagtgctagcagccgctgatgccagtacgtcctag

SEQ ID NO: 22260 - protein, 137 aa, Zea mays
LECAMGGCAGKVRRDDEEKLDFKGGNVHIITSNEGWDQKIAEANRDGKTVVANFSASWCGPCRVIAPVYAEMSKTYPQLMFLTIDVDDLMDFSSSWDIRATPTFFFLKNGQQIDKLVGANKPELEKKVLAAADASTS

SEQ ID NO: 22261 - DNA, 814 bp, Zea mays subsp. mays
  CDS (191)..(625)
actagaacctgctgattcctggtcgccagcttctctttcccacacccacaccacaaccccccgccggcacggctcccggtgtcccttccactctccaccctctccttcccttcggcgccaagtccatccgcccctccgaatctccgattgccgccgtccagttttggcaggtgccggccgacagttgagaatgggactgaggcgcctgatgagatgctgctgctgctgcattgcaaagcacgcggacgacggcgacaagatcgatttcggaggtggcaatgttcacgttgtcacaagcaaagaggactgggaccaaagaattgcggaggcaaacaaggatgggaaaaccgtggttgcaaacttcagcgcttcctggtgtgggccgtgccgtgtcatcgcacctgtctacgccgaaatgtcgcagacgtaccctcagctcatgttcctgacgatcgatgttgatgacttgatggagttcagctcgtcgtgggacatccgcgcgaccccgaccttcttcttcctcaagaacgagcagcaggtggacaagctggtcggcgccaacaagcctgagctggagaagaaagtggccgccgtcgccgacgccgccggcagcaagacagtgtagtgtaggcaaagacccgcctagcttgttgacctggccctgtacatcgttatatcctattgttgctgtgtgtttctttcttggcaccgtgcgcatgcgtcgatctgtcggcggtaatgtcttccgccatgtgctgattgtaagagttgcccggtaatggtaatggtaatggtaatggtgtcttacagtttc

SEQ ID NO: 22262 - protein, 144 aa, Zea mays subsp. mays
MGLRRLMRCCCCCIAKHADDGDKIDFGGGNVHVVTSKEDWDQRIAEANKDGKTVVANFSASWCGPCRVIAPVYAEMSQTYPQLMFLTIDVDDLMEFSSSWDIRATPTFFFLKNEQQVDKLVGANKPELEKKVAAVADAAGSKTV

SEQ ID NO: 22263 - DNA, 814 bp, Zea mays subsp. mays; identical to SEQ ID NO: 22261
  CDS (209)..(625)

SEQ ID NO: 22264 - protein, 138 aa, Zea mays subsp. mays
MRCCCCCIAKHADDGDKIDFGGGNVHVVTSKEDWDQRIAEANKDGKTVVANFSASWCGPCRVIAPVYAEMSQTYPQLMFLTIDVDDLMEFSSSWDIRATPTFFFLKNEQQVDKLVGANKPELEKKVAAVADAAGSKTV

SEQ ID NO: 22265 - DNA, 402 bp, Oryza sativa (japonica cultivar-group)
  CDS (1)..(402)
atggagatccagcagcagaagggggttggcaattccaaagttgtgaaggttgagaaggaggagtcatgggatctgttcgtcaatcaagcaagcaacgaaggccaccctgttgttgcccactttggggcttcatggtgtgtgacttcgctgtccatgaactacaagtttgaggagctagctcagacacaccctgagatactgttcctctatgtggatgttgatgatgtccagagtgtttcgtccaagcttggagtgaaggccatgccgacattttttctcatcaaggacaaggaggtggtgaacaagattgttggtgccaacccagatgaggtcaagaagatggtggacgcttctgctgagtcctttggagttactgctcctcctgatatagtggtggaatag

SEQ ID NO: 22266 - protein, 133 aa, Oryza sativa (japonica cultivar-group)
MEIQQQKGVGNSKVVKVEKEESWDLFVNQASNEGHPVVAHFGASWCVTSLSMNYKFEELAQTHPEILFLYVDVDDVQSVSSKLGVKAMPTFFLIKDKEVVNKIVGANPDEVKKMVDASAESFGVTAPPDIVVE

SEQ ID NO: 22267 - DNA, 366 bp, Oryza sativa (japonica cultivar-group)
  CDS (1)..(366)
atggcggcggcctcagcggcggcgcaggcggagggaacggtgatcgcgatccacagcctcgacgagtggaccatccagatcgaggaggccaacagcgccaagaagctggttgtgattgacttcactgcatcatggtgcggaccatgccgcatcattgctccagtttttgccgatctagcaaagaagcacacaaatgctgtttttctgaaggttgacgtcgatgaactgaagcctattgctgagcaattcagtgttgaggctatgccaacattcctgtttatgaaggagggagatgttaaagacagggttgtcggtgctatgaaggatgaactggcgagcaagcttgagctacatatggccatgtag

SEQ ID NO: 22268 - protein, 121 aa, Oryza sativa (japonica cultivar-group)
MAAASAAAQAEGTVIAIHSLDEWTIQIEEANSAKKLVVIDFTASWCGPCRIIAPVFADLAKKHTNAVFLKVDVDELKPIAEQFSVEAMPTFLFMKEGDVKDRVVGAMKDELASKLELHMAM

SEQ ID NO: 22269 - DNA, 321 bp, Bombyx mori
  CDS (1)..(321)
atgtccattcacatcaaggattccgacgacctgaagacaaggctggcggaggccggcgacaagctcgtcgtgatcgacttcatggcgacctggtgcggaccgtgcaagatgatcgggcctaaactggacgagatcgccgccgaaatgtcagattccatcgtcgttgtgaaggtggacgttgatgagtgcgaggacatcgccagcgagtacaacatcaactcgatgccgacgttcgtcttcgttaagaatggcaagaaactggacgaattctctggcgctaacgtcgacaaactcaaaacaactatccttaaacacaagtaa

SEQ ID NO: 22270 - protein, 106 aa, Bombyx mori
MSIHIKDSDDLKTRLAEAGDKLVVIDFMATWCGPCKMIGPKLDEIAAEMSDSIVVVKVDVDECEDIASEYNINSMPTFVFVKNGKKLDEFSGANVDKLKTTILKHK

SEQ ID NO: 22271 - DNA, 390 bp, Arabidopsis thaliana
  CDS (1)..(390)
atgggttccaatgtttcatctgtgcatgatgttcattcatcaatggaaattaccagtaatggatttgttgtggaaatcgaatcaagaagacaatggaaatctctctttgattccatgaaaggctcaaacaaattgctagtaattgatttcacagctgtatggtgtggaccttgtaaagcaatggaacctagagttagggagattgcttcaaagtactcagaagctgtgtttgctagggttgatgtggataggctaatggatgtggctgggacatatagagctattacacttccagcttttgtttttgtgaagagaggagaagagattgatagggttgttggagccaaacctgatgagctcgtgaagaagattgaacaacatagggtttaa

SEQ ID NO: 22272 - protein, 129 aa, Arabidopsis thaliana
MGSNVSSVHDVHSSMEITSNGFVVEIESRRQWKSLFDSMKGSNKLLVIDFTAVWCGPCKAMEPRVREIASKYSEAVFARVDVDRLMDVAGTYRAITLPAFVFVKRGEEIDRVVGAKPDELVKKIEQHRV

SEQ ID NO: 22273 - DNA, 465 bp, Arabidopsis thaliana
  CDS (1)..(465)
atggggaatcattgtacaagaattccttgttgtaaaaaggtgtgttcatgtatctgctgttgcaacagaaggaacaagactcaagctaggagccagaaagggtcctactttataaaagggaaggtccatccggtaagtagaatggagaagtgggaggagaagatcacagaagctaatagtcatggcaaaattcttgtagtgaatttcaaggcttcgtggtgtttacctagtaaaacaatattaccaatataccaggagcttgcatccacatacacctcaatgatatttgtcactatagacgtcgaagagctcgctgagtttagtcatgaatggaacgtggatgcaactccaacagtagtgttccttaaagatgggaggcaaatggataaacttgtaggtggagatgctgcagagcttcagaagaaaactgcagcagctgcaaatctccttcttagacaatcttaa

SEQ ID NO: 22274 - protein, 154 aa, Arabidopsis thaliana
MGNHCTRIPCCKKVCSCICCCNRRNKTQARSQKGSYFIKGKVHPVSRMEKWEEKITEANSHGKILVVNFKASWCLPSKTILPIYQELASTYTSMIFVTIDVEELAEFSHEWNVDATPTVVFLKDGRQMDKLVGGDAAELQKKTAAAANLLLRQS

SEQ ID NO: 22275 - DNA, 381 bp, Arabidopsis thaliana
  CDS (1)..(381)
atgagaaagcaagaatcagagggagcgaatcttgaattcgaatccaaatcaaatgacaatggaaatgtgaaaatcgcaccaaacgaccaaagtttcctcacaattcttgacgacataaagtcttccaaatctccggctgttattaactatggagcttcttggtgtggagtttgtagccagattcttcctgcattccgaaagctcagcaacagtttctcgaagctcaagtttgtttatgcagatatcgacgagtgccctgaaaccactcgtcacatccgttacacacccacgtttcagttttacagagacggcgagaaagtcgatgagatgtttggagctggtgaacagaggctccatgatcgtctttggcttcactcttga

SEQ ID NO: 22276 - protein, 126 aa, Arabidopsis thaliana
MRKQESEGANLEFESKSNDNGNVKIAPNDQSFLTILDDIKSSKSPAVINYGASWCGVCSQILPAFRKLSNSFSKLKFVYADIDECPETTRHIRYTPTFQFYRDGEKVDEMFGAGEQRLHDRLWLHS

SEQ ID NO: 22277 - DNA, 321 bp, Drosophila melanogaster
  CDS (1)..(321)
atggtgtaccaggtgaaagataaggccgatctcgatggacagctgaccaaggcatccggcaagctggtggtgctggatttcttcgccacttggtgcggaccctgcaagatgatctcgcccaaactggttgagctttccacgcagttcgccgacaacgtcgtcgtcctgaaggtcgatgtggacgaatgcgaagacattgcaatggaatacaacatctccagcatgcccaccttcgtgttcctcaagaacggcgtcaaggtcgaagagttcgccggagccaacgccaagcgtctggaggatgtcatcaaggccaatatctaa

SEQ ID NO: 22278 - protein, 106 aa, Drosophila melanogaster
MVYQVKDKADLDGQLTKASGKLVVLDFFATWCGPCKMISPKLVELSTQFADNVVVLKVDVDECEDIAMEYNISSMPTFVFLKNGVKVEEFAGANAKRLEDVIKANI

SEQ ID NO: 22279 - DNA, 315 bp, Bacteroides thetaiotaomicron VPI-5482
  CDS (1)..(315): transl_table=11
atggctttagaaattacagacagcaactataaggaaatccttgcagaaggaaagcctgttgtggtggatttttgggctccctggtgtggcccttgtaaaatggtggctcctattattgaagaattggccgcggagtttgaaggacaagtcatcatcggtaaatgcgatgtggatgataacagcgatgtggctgccgaatacggtatccgcaacattcctactgttttgttcttcaagaatggtgagattgtagacaagcaggtaggcgcagtcgccaaaccggtattcgtggaaaaagtgaagaaccttctctag

SEQ ID NO: 22280 - protein, 104 aa, Bacteroides thetaiotaomicron VPI-5482
MALEITDSNYKEILAEGKPVVVDFWAPWCGPCKMVAPIIEELAAEFEGQVIIGKCDVDDNSDVAAEYGIRNIPTVLFFKNGEIVDKQVGAVAKPVFVEKVKNLL

SEQ ID NO: 22281 - DNA, 315 bp, Porphyromonas gingivalis W83
  CDS (1)..(315): transl_table=11
atggcactgcaaattacagatgcaacatttgacggcttggtagctgaaggcaagccgatggtagtggatttctgggctacatggtgcggtccttgccgcatggtaggtccgatcatcgacgagctggctgcggaatatgaaggacgcgctatcataggaaaagtggatgtggatgcaaatacggaattgcccatgaagtatggcgtgcgtaatatccccaccattttgttcatcaagaacggcgaagtggtaaagaagctcgtgggtgctcagtccaaagacgtattcaagaaagaattggatgccttgttttaa

SEQ ID NO: 22282 - protein, 104 aa, Porphyromonas gingivalis W83
MALQITDATFDGLVAEGKPMVVDFWATWCGPCRMVGPIIDELAAEYEGRAIIGKVDVDANTELPMKYGVRNIPTILFIKNGEVVKKLVGAQSKDVFKKELDALF

SEQ ID NO: 22283 - DNA, 309 bp, Mycoplasma mycoides subsp. mycoides SC str. PG1
  CDS (1)..(309): transl_table=4
atggcagatataattaaaatcacttcaaaagaacaatttgacaaggaaattaaagagggaaaagtacttgtagattttaatgctacttgatgtggaccttgcaaaatgttagcaccaattcttcatgactttgctaaaaaagttgatggtgttaaattcttagatgtagatgttgatttaaatcgtcaagttgctgaaaaatttagaataatgtcaattcctacactaataacttttgaaaatgggaatcaagtaaataaacatataggatttgctactcctgaccaattaaaaaagctaattgattaa

SEQ ID NO: 22284 - protein, 102 aa, Mycoplasma mycoides subsp. mycoides SC str. PG1
MADIIKITSKEQFDKEIKEGKVLVDFNATWCGPCKMLAPILHDFAKKVDGVKFLDVDVDLNRQVAEKFRIMSIPTLITFENGNQVNKHIGFATPDQLKKLID

SEQ ID NO: 22285 - DNA, 324 bp, Magnaporthe grisea 70-15
  CDS (1)..(324)
atgactgtccacaaccttaccaacgcccaggatttcaaggacgccctcaagtcccacaagttcgtcctcgtcgactttttcgccacatggtgtggaccttgcagggccatcgcccccaagatcgccgagtggtccgatgcgttccccaacatccactacgtcaaggtcgacgtcgacgaggtccctgatgtcgcccaggagtacaacgtccgcgccatgccgacattcctgctcttcaaggatggagagaaggtggacgaggttgttggcgccaacccacccaagctgcaggccctcatcagcgcaaaccacccgtcgtcatag

SEQ ID NO: 22286 - protein, 107 aa, Magnaporthe grisea 70-15
MTVHNLTNAQDFKDALKSHKFVLVDFFATWCGPCRAIAPKIAEWSDAFPNIHYVKVDVDEVPDVAQEYNVRAMPTFLLFKDGEKVDEVVGANPPKLQALISANHPSS

SEQ ID NO: 22287 - DNA, 636 bp, Gibberella zeae PH-1
  CDS (1)..(636)
atgtccattgtccagatcgataccaaggctcagtttgatgatcttatcaagagccaccaactagtcatcctcgatgcctctgcagaatggtgtggtccctgcaaagccatggccccaattttcgaaaagctcagccacgaaaaccccgacagtgaaaaggtcgtatttgccaagttcgacacggatgatgtttctgatcttgctcaagagctcgggattcgctcaattccagctttcttcattttccgcgacggcgagcgggttgacaacttgaacggagctaatcctcctgcgctgacgaagcttgtcaaaggggcaattgaggattcaagcaggctagttgagtgctgttacaacaatttggatgatgggacactgcaaataatcagtcagttccatatctcccacaagcaactacaggccttgactaacccgatgtctatcaactcaagtataaatgcagatatgagacgtagggtagtggttgatcgtggtccacgtcatgccacagcggggtatacaaagacaattgatatgatgacctgcctcgagcatgacgtggacctcgatcagtttggtggaaatgtacggcatgtgggagagatacgacccatttgtgaagggggtaaaagttaa

SEQ ID NO: 22288 - protein, 211 aa, Gibberella zeae PH-1
MSIVQIDTKAQFDDLIKSHQLVILDASAEWCGPCKAMAPIFEKLSHENPDSEKVVFAKFDTDDVSDLAQELGIRSIPAFFIFRDGERVDNLNGANPPALTKLVKGAIEDSSRLVECCYNNLDDGTLQIISQFHISHKQLQALTNPMSINSSINADMRRRVVVDRGPRHATAGYTKTIDMMTCLEHDVDLDQFGGNVRHVGEIRPICEGGKS

SEQ ID NO: 22289 - DNA, 420 bp, Kluyveromyces lactis NRRL Y-1140
  CDS (1)..(420)
atgatctccagaactgcattgagaactgctacagcttcccgtgcaaccttcgtgagaccattggctttttcccaagttagattccaatctactgctggcgggaataccatcaaacatctaacgaatttgcatgaattcgaggtcgcaatgaaagctgacaatttgtcattagtcgatttctttgctacttggtgtggcccttgtaaagccgttgcccctcatgtacaaaagctaagtgaaaaatacaataacgtcaagttctacaaagtcgatgtcgatgaatcccctgatattgcgggtgctttgggtatctcttctatgccaacttttgtattattcaagaatgggaaaggattggggaaggtagtcggtgctgacccaagaggagtggaagaagcgattaaacacttcaacaaataa

SEQ ID NO: 22290 - protein, 139 aa, Kluyveromyces lactis NRRL Y-1140
MISRTALRTATASRATFVRPLAFSQVRFQSTAGGNTIKHLTNLHEFEVAMKADNLSLVDFFATWCGPCKAVAPHVQKLSEKYNNVKFYKVDVDESPDIAGALGISSMPTFVLFKNGKGLGKVVGADPRGVEEAIKHFNK

SEQ ID NO: 22291 - DNA, 312 bp, Debaryomyces hansenii CBS767
  CDS (1)..(312)
atggttgctgctatcacttctaaacaagaatttaccgatgctttatctcacgatggattagtcgttgttgactttttcgctacatggtgtggaccatgtaagatgattgctccattattggacaagttctcagccgaatacaaccaagctaagtttataaaggttgacgttgatgaatttggtgaaattgctcaagaatatgaagtcagttctatgccaactgttatcttcttcaagggaggtgaagtcgtcaacaaggtcatcggtgccaacccaggtgctttgaagcaagtcatttcggccaatgcttaa

SEQ ID NO: 22292 - protein, 103 aa, Debaryomyces hansenii CBS767
MVAAITSKQEFTDALSHDGLVVVDFFATWCGPCKMIAPLLDKFSAEYNQAKFIKVDVDEFGEIAQEYEVSSMPTVIFFKGGEVVNKVIGANPGALKQVISANA

SEQ ID NO: 22293 - DNA, 483 bp, Ustilago maydis 521
  CDS (1)..(483)
atggtcgtcaagactatcgagtcctacgaagaattccagacgctcatcaacggcgacaagccggtcgtcattgacttctgggctacctggtgcggtccctgcaaggtcatcggtcccattttcgaaaagatctccgacacccctgctggtgaaaagcttggcttctacaaggttgacgtcgacgctcaggacaagatcgccgccgaggtcggtatcaaggccatgccgacttttgtcttcttcaagggcggtcaagtcgttaagcaggttgtcggcgctaatccccaggctctccaggagcgacagagttgtagcgatcaaggtcgtgttcctggtctcgatgcctttttcagcagcttcgcactagagtattgccatcaaagccgcaaattggagaacgttctgaaaatatggtctacaccagtaaaagaagttgtgtgtcaaagtgggcatcgcagatacgctactgtcaggatgccttga

SEQ ID NO: 22294 - protein, 160 aa, Ustilago maydis 521
MVVKTIESYEEFQTLINGDKPVVIDFWATWCGPCKVIGPIFEKISDTPAGEKLGFYKVDVDAQDKIAAEVGIKAMPTFVFFKGGQVVKQVVGANPQALQERQSCSDQGRVPGLDAFFSSFALEYCHQSRKLENVLKIWSTPVKEVVCQSGHRRYATVRMP

SEQ ID NO: 22295 - DNA, 315 bp, Cryptococcus neoformans var. neoformans B-3501A
  CDS (1)..(315)
atggtcaaggctattgaatcttacgacgagtggaagactctcacttctggctccgatgtcgtcgtcgtcgactactgggcgacttggtgcggtccttgcaagatgatctctccccactttgccaagcttgagggcaagtttcccaatgtcaagtttgccaaggtcgatgttgaggagcaagaggacattgccaaggaggctcaaatcaaggccatgcctacttttgtcgcctacaaagacggcaaggtgattgagactgttactggtgctgtccccgcaaagatcaatgctttgctcgacaaggtcgcggcttaa

SEQ ID NO: 22296 - protein, 104 aa, Cryptococcus neoformans var. neoformans B-3501A
MVKAIESYDEWKTLTSGSDVVVVDYWATWCGPCKMISPHFAKLEGKFPNVKFAKVDVEEQEDIAKEAQIKAMPTFVAYKDGKVIETVTGAVPAKINALLDKVAA

SEQ ID NO: 22297 - DNA, 315 bp, Bacteroides fragilis NCTC 9343
  CDS (1)..(315): transl_table=11
atggctttagagattactgacaacaactttaaggaaatcctcgcagaaggatcaccggttgttattgacttttgggctccttggtgtggtccttgtaagatggtaggtcctatcatcgatgaactggctaaagaatatgaaggaaaagtgatcatgggtaaatgtgatgtagacgaaaacagtgatctacctgcagaatttggtatccgcaatattcctactgttctattttttaagaatggagaattggtagacaaacaagtcggtgccgtaggtaaacctgcatttgtagagaaagttgagaaattattataa

SEQ ID NO: 22298 - protein, 104 aa, Bacteroides fragilis NCTC 9343
MALEITDNNFKEILAEGSPVVIDFWAPWCGPCKMVGPIIDELAKEYEGKVIMGKCDVDENSDLPAEFGIRNIPTVLFFKNGELVDKQVGAVGKPAFVEKVEKLL

SEQ ID NO: 22299 - DNA, 327 bp, Alkalilimnicola ehrlichei MLHE-1
  CDS (1)..(327): transl_table=11
gtgagcggacagatcgtgcacgccaccgatcagaatttcgaagacgaagtgatcaaggccggcgagccggtactcgtggactactgggccgactggtgcggtccgtgcaagatgatcaccccgatcctggacgaggtcgcctccgaatacgcgggcaagctcaaggtggtcaagctgaacatcgacgagaacccggaaaccccgccgaagtacggcatccgtggtatccccacgctgatgctgttcaagaacggcggtgtggaggccaccaaggtgggtgccctgtccaagtcgcagctgacggcttttatcgacagcaacctgtaa

SEQ ID NO: 22300 - protein, 108 aa, Alkalilimnicola ehrlichei MLHE-1
MSGQIVHATDQNFEDEVIKAGEPVLVDYWADWCGPCKMITPILDEVASEYAGKLKVVKLNIDENPETPPKYGIRGIPTLMLFKNGGVEATKVGALSKSQLTAFIDSNL

SEQ ID NO: 22301 - DNA, 315 bp, Oenococcus oeni PSU-1
  CDS (1)..(315): transl_table=11
atggcaatctcagtattaaattctgattcgtttgaagaagcaaccaaatccggcgtgactgtgactgatttttgggccacttggtgtaccccttgtaaaatccaggcacctatcttggaaaaactttctaatgaaatgtcgagtgttaaattcggcaagattgatgtcgatcaaaaccaggaaacggcaaatggacttggaattaaagcgatccctaccttgatcgttaaaaaagacggtgaagtcgttgatcggatcgttggcgtacacaaccaaaaacagttgactgatattattgataaatacacaaaataa

SEQ ID NO: 22302 - protein, 104 aa, Oenococcus oeni PSU-1
MAISVLNSDSFEEATKSGVTVTDFWATWCTPCKIQAPILEKLSNEMSSVKFGKIDVDQNQETANGLGIKAIPTLIVKKDGEVVDRIVGVHNQKQLTDIIDKYTK

SEQ ID NO: 22303 - DNA, 330 bp, Desulfitobacterium hafniense DCB-2
  CDS (1)..(330): transl_table=11
atggcaggcgaaaatgttaagacctttacaacagcaaattggaatgaagaagttttgggttccgacaaagccgtattagtagatttctgggcggcttggtgcggaccctgccgtatggttgctcctatcattgaggagctggcagatgaaatggcaggaagagtcatcatcggcaagcttaatgtggatgaggaaccggcaattgccggacaataccaagtgatgagcattcccactttagctgtttttaaaaacggccaagtggtggataagagtgtagggttccgcggtaaggctgacctcgtcaaaatgattgaaaaacatgcctaa

SEQ ID NO: 22304 - protein, 109 aa, Desulfitobacterium hafniense DCB-2
MAGENVKTFTTANWNEEVLGSDKAVLVDFWAAWCGPCRMVAPIIEELADEMAGRVIIGKLNVDEEPAIAGQYQVMSIPTLAVFKNGQVVDKSVGFRGKADLVKMIEKHA

SEQ ID NO: 22305 - DNA, 333 bp, Cenarchaeum symbiosum
  CDS (1)..(333): transl_table=11
atgggaatcacacagatatccgatacaaagtcgtgggagagcgacgtgatgaactcgccgacacccgtctttgtggacttttgggccgaatggtgcgggccctgcaggatggtgacccctgtcgtagaggagctggcgtccgattacgagggcaaggtcagctttgtcaaggtcaatgtagacgaggcaaacgagcttgcctccagatacaacgtattcagcataccgaccctggcactcttcagcaagggcaagatcataggccagcaggtgggcgcagcatccaaggaagcctacaaaaagatgatcgactcggccctcgaaaaggcctag

SEQ ID NO: 22306 - protein, 110 aa, Cenarchaeum symbiosum
MGITQISDTKSWESDVMNSPTPVFVDFWAEWCGPCRMVTPVVEELASDYEGKVSFVKVNVDEANELASRYNVFSIPTLALFSKGKIIGQQVGAASKEAYKKMIDSALEKA

SEQ ID NO: 22307 - DNA, 354 bp, Medicago truncatula
  CDS (1)..(354)
atggcagcagaagagggacacgtgatcggagttcacactgtggaggcttggaaggaacacctcgagaagggaaatggatccaagaaactgattgtagttgatttcactgcttcttggtgtggcccgtgccgtttcattgccccaattttggcagagattgctaaaaagctgccaaatgtcaccttcctcaaggttgatgttgatgaattgaagactgttgctgaggagtgggcagttgatgctatgccaacattcctgttcttgaaagaaggaaaacttgtggacaaggttgttggtgctcagaaggatcagctgcaagcagcaataaccaagcatgcaactactgatgcttga

SEQ ID NO: 22308 - protein, 117 aa, Medicago truncatula
MAAEEGHVIGVHTVEAWKEHLEKGNGSKKLIVVDFTASWCGPCRFIAPILAEIAKKLPNVTFLKVDVDELKTVAEEWAVDAMPTFLFLKEGKLVDKVVGAQKDQLQAAITKHATTDA

SEQ ID NO: 22309 - DNA, 363 bp, Medicago truncatula
  CDS (1)..(363)
atggcagctgaagaaggacaggtgatcggtgttcataccgttgaacagtggaaggaggagatccagaagggaaatgactccaaaaaactgattgtggtggattttactgcttcatggtgtggtccatgccgttttattgctccaattctagctgagattgctaagaagatacctgaagtcatcttcctcaaggtggatattgatgaagtaaagagtgttgctaaggaatggtctgttgaggctatgccaacattcttgttcttgaaagaaggtaaggaagtggataaggtagttggtgctaggaaggaagagctggaaaatgcaatcaccaagcataaggatgcaactgttgctactgcttga

SEQ ID NO: 22310 - protein, 120 aa, Medicago truncatula
MAAEEGQVIGVHTVEQWKEEIQKGNDSKKLIVVDFTASWCGPCRFIAPILAEIAKKIPEVIFLKVDIDEVKSVAKEWSVEAMPTFLFLKEGKEVDKVVGARKEELENAITKHKDATVATA

SEQ ID NO: 22311 - DNA, 405 bp, Medicago truncatula
  CDS (1)..(405)
atgggatcatttctctcttccttagtcggcggcgactccgccaccgcctcacagtcatcagaatcatcggagaactcttccgtcaagactttccactcatctgctcgctggcaacttcacttcaacgaactcaaagattctcctcgtcttgtggtgattgatttctctgctacatggtgtggaccttgtaaaatgatggaaccgattcttcaagctatggctaatgaattcactgatgttgaattcatcaaaattgatgttgatgaattatcggatgtggcgcaggagtttaaggtgcaggctatgccaacgtttctgttgttgaagaatgggaaagaggttgacaaggttgttggagcaaagaaggatgaacttaaaaacaaggttcaaaagcacaaagcttag

SEQ ID NO: 22312 - protein, 134 aa, Medicago truncatula
MGSFLSSLVGGDSATASQSSESSENSSVKTFHSSARWQLHFNELKDSPRLVVIDFSATWCGPCKMMEPILQAMANEFTDVEFIKIDVDELSDVAQEFKVQAMPTFLLLKNGKEVDKVVGAKKDELKNKVQKHKA

SEQ ID NO: 22313 - DNA, 627 bp, Oryza sativa subsp
  CDS (1)..(627)
atgccggtccttgccttccccaatcccacctatggtgacgagcagaaggccgcgcgtgtcgaggcaggccaggcgactgcggctcgacaaggggacgagaggacgatgggctcttgtccaggcggtggcggcttatctggagcagaggacacttgcatcttgacgaattttctcaagtcgatgggttgctgtggcagcagcactgtagacgccgaggagcacctggactacagtggcggaaatgtgactttggtaactgatcaaaagaattgggacaatacaatggaagaagtagctgagcatggcaaaacagttgtgctaaaattcagtgcaatttggtgcactccgtgtaggaatgctgcccctctattcgctgaactttcactgaagtatcctgacattgttttcgtgtccgtggatgtagacgaaatgccgataacaaagatgaatggcatttttactttgattcgtcaggagctggtgacgcaatacgatgtgcgtgcaaccccaacgttcatcttcatgaaaaacaatgaggagattgataagcttgttggaggcaaccatgaagatcttcaggaaaagttcgaacagcttaaccggccaaagttatatgatgatgtataa

SEQ ID NO: 22314 - protein, 208 aa, Oryza sativa subsp
MPVLAFPNPTYGDEQKAARVEAGQATAARQGDERTMGSCPGGGGLSGAEDTCILTNFLKSMGCCGSSTVDAEEHLDYSGGNVTLVTDQKNWDNTMEEVAEHGKTVVLKFSAIWCTPCRNAAPLFAELSLKYPDIVFVSVDVDEMPITKMNGIFTLIRQELVTQYDVRATPTFIFMKNNEEIDKLVGGNHEDLQEKFEQLNRPKLYDDV

SEQ ID NO: 22315 - DNA, 381 bp, Oryza sativa subsp
  CDS (1)..(381)
atggcggcggcctcagcggcggcgcaggcggagggaacggtgatcgcgatccacagcctcgacgagtggaccatccagatcgaggaggccaacagcgccaagaagctgacttgcagtcctaaggttgtgattgacttcactgcatcatggtgcggaccatgccgcatcattgctccagtttttgccgatctagcaaagaagcacacaaatgctgtttttctgaaggttgacgtcgatgaactgaagcctattgctgagcaattcagtgttgaggctatgccaacattcctgtttatgaaggagggagatgttaaagacagggttgtcggtgctatgaaggatgaactggcgagcaagcttgagctacatatggccatgtag

SEQ ID NO: 22316 - protein, 126 aa, Oryza sativa subsp
MAAASAAAQAEGTVIAIHSLDEWTIQIEEANSAKKLTCSPKVVIDFTASWCGPCRIIAPVFADLAKKHTNAVFLKVDVDELKPIAEQFSVEAMPTFLFMKEGDVKDRVVGAMKDELASKLELHMAM

SEQ ID NO: 22317 - DNA, 345 bp, Vitis vinifera
  CDS (1)..(345)
atggcggaagagggacaagttgtcggttgccacagtgtggaatcgtggaaggagcaattccagcatggaatagagtccaagaaactggtggtggtggatttcactgcttcatggtgtgggccatgtcgtgtcattagcccatttctggcagagcttgccaagaagatgcctaatgtcatatttctcaaggtggatgtggatgaattggagactgttgctaaggagtgggaagtggaggccatgccaacctttctgttcctgaaagaaggaaacgtagtggacaaggttgtgggtgcaaaaagagaagaactggtgcagaagacagagaagcatgcaactgcttga

SEQ ID NO: 22318 - protein, 114 aa, Vitis vinifera
MAEEGQVVGCHSVESWKEQFQHGIESKKLVVVDFTASWCGPCRVISPFLAELAKKMPNVIFLKVDVDELETVAKEWEVEAMPTFLFLKEGNVVDKVVGAKREELVQKTEKHATA

SEQ ID NO: 22319 - DNA, 681 bp, Vitis vinifera
  CDS (1)..(681)
  misc_feature (477)..(477): y is t or c
atggacgaaacgcggagggaatttggggagtatagcaggggtattttgataatccgacacaggaaattggccactttgtcttcgtcttcgatctcctcaaagcggcaacgttccgtttctagggtttctccttccggcgatcgttctggtcttgggtcttgtggtggtgcattcaccttcggattgatcaaatccctccccaccaaagctattggctttattgaggtgaacaatggcaaccggatggaacaattgtataattttgtttttgaagctctggaacatcacaatgatgatgatgattccgatcacaatgctgcatttgctagtggaaatgtacaccttatcactaccaaagaaaattgggaggagaagttggcagaagcaagcaaagatggaaagattgtgattgcaaattttagtgcaacatggtgtggtccttgtaaaatgattgcaccattctactgcgaactatcygaggcacacccttctctgatgtttctaactgttgatgttgatgaactaagtgaattcagttcttcatgggatatcaaagccactccaacctttttcttcctcagagatgggcaacaggtagacaagcttgtgggggcgaacaaacctgagctacagaagaagataactgctattttagattccatgacccagtgtaataaatga

SEQ ID NO: 22320 - protein, 226 aa, Vitis vinifera
MDETRREFGEYSRGILIIRHRKLATLSSSSISSKRQRSVSRVSPSGDRSGLGSCGGAFTFGLIKSLPTKAIGFIEVNNGNRMEQLYNFVFEALEHHNDDDDSDHNAAFASGNVHLITTKENWEEKLAEASKDGKIVIANFSATWCGPCKMIAPFYCELSEAHPSLMFLTVDVDELSEFSSSWDIKATPTFFFLRDGQQVDKLVGANKPELQKKITAILDSMTQCNK

SEQ ID NO: 22321 - DNA, 411 bp, Vitis vinifera
  CDS (1)..(411)
atgggatctgttgtgtcgggtttgttgggaggaggagctgcagacgcatcagattcgactttggagggatctggagtcaatgtatttcactcatctgagagatggttgctccacttcaatgcttctaaagaatccaaccaattgatggtgattgacttcgctgcgacctggtgtgggccttgcaaattcatggagcctgcagtgaagtccatggcttccaagtacactgacgtcgacttcgtcaagatcgatgttgatgagttgcctgatgtggcgcaggagtttactgtgcaggccatgccgacgtttgtgttgttgaaaaaagggaaggaattggaaagggtgatcggggccaagaaggatgagctggagaagaagattcagaaacacagggcagtttccaatgcttaa

SEQ ID NO: 22322 - protein, 136 aa, Vitis vinifera
MGSVVSGLLGGGAADASDSTLEGSGVNVFHSSERWLLHFNASKESNQLMVIDFAATWCGPCKFMEPAVKSMASKYTDVDFVKIDVDELPDVAQEFTVQAMPTFVLLKKGKELERVIGAKKDELEKKIQKHRAVSNA

SEQ ID NO: 22323 - DNA, 366 bp, Vitis vinifera
  CDS (1)..(366)
  misc_feature (130)..(130): r is g or a
  misc_feature (260)..(260): s is g or c
  misc_feature (346)..(346): s is g or c
atgggagccagccactcgtcttcttcaaagtcatctcgtgtcctcaccttcaattcctcagcatcatggaagatacattttgaagaagccaaaagcactggcaaactgatggttatcgatttctcggctrcatggtgtggaccttgccgattcatggaacccgtcattaatgagtttgctgagaaatatacagacgtggagttcgtcaagattgatgtggacgagttgtcggatgtggctcaagaatttggagtgcaggsaatgccaacattcttactgatcaagagaggaacagaagttgataaagtggtgggagccaagaaggaagaactccagaagaagatcsaggctcacaggaaaaattga

SEQ ID NO: 22324 - protein, 121 aa, Vitis vinifera
  misc_feature (44)..(44): The Xaa at location 44 stands for Ala, or Thr.
  misc_feature (87)..(87): The Xaa at location 87 stands for Ala, or Gly.
MGASHSSSSKSSRVLTFNSSASWKIHFEEAKSTGKLMVIDFSAXWCGPCRFMEPVINEFAEKYTDVEFVKIDVDELSDVAQEFGVQXMPTFLLIKRGTEVDKVVGAKKEELQKKIZAHRKN

SEQ ID NO: 22325 - DNA, 312 bp, Pichia guilliermondii
  CDS (1)..(312)
atgatagtcgaggttaaatccaagcaacagctaatagatgctatacaataccatggcttagtggtggtagatttctatgcgcaatggtgtggtccttgtaaaaccgtctcacctattttggaaaaattatctgacgagtatgatgaagtgaaatttttaaaagttgatgttgatgcattgagcgagttgacactggaatatgaagtcactagtatgcctacaattttatttttcaaggaaggaaataaagaaggaagggtagttggtgccaatattcctgcgttgagacaagtaattgctgcacttgcttaa

SEQ ID NO: 22326 - protein, 103 aa, Pichia guilliermondii
MIVEVKSKQQLIDAIQYHGLVVVDFYAQWCGPCKTVSPILEKLSDEYDEVKFLKVDVDALSELTLEYEVTSMPTILFFKEGNKEGRVVGANIPALRQVIAALA

SEQ ID NO: 22327 - DNA, 393 bp, Triticum turgidum subsp
  CDS (1)..(393)
atggcggcggcggcgacggcgacgactacagcggcggcgacggcggcggcggtggggccgggggaggtgatctccgtccacagcctggagcagtggaccatgcagatcgaggaggccaacgccgccaagaagctggtggtgattgacttcactgcatcatggtgcggaccatgccgcatcatggctccaatttttgctgatctcgccaagaagttcccagctgctgttttcctcaaggtcgacgttgatgaactgaagcccattgctgagcaattcagcgtcgaggccatgccaaccttcctgttcatgaaggaaggagacgtcaaggacagggttgtcggagctatcaaggaggagctgacgaccaaggttgggctccacgcggctgcctag

SEQ ID NO: 22328 - protein, 130 aa, Triticum turgidum subsp
MAAAATATTTAAATAAAVGPGEVISVHSLEQWTMQIEEANAAKKLVVIDFTASWCGPCRIMAPIFADLAKKFPAAVFLKVDVDELKPIAEQFSVEAMPTFLFMKEGDVKDRVVGAIKEELTTKVGLHAAA

SEQ ID NO: 22329 - DNA, 354 bp, Eucalyptus grandis
  CDS (1)..(354)
atggcggaagagggccaggtgatcagttgccacagcgccgagtcgtggagcgagcagatcgccaagagcaacgaatccgacaagctggtggttgtcgatttcactgcttcatggtgcggaccatgccgtttcattgcaccattcctagctgagctggccaagagattccctaatgttctgtttctgaaagttgatgttgatgagctgaagacggtcgctcaagagtgggccgtggaggcgatgccgactttcatgtttgtgaagggaggaaagattgttgacagggtggtaggagcccagaaggatcagctgcagatgaccttagctaagcacatggcaaccgcttcggcttaa

SEQ ID NO: 22330 - protein, 117 aa, Eucalyptus grandis
MAEEGQVISCHSAESWSEQIAKSNESDKLVVVDFTASWCGPCRFIAPFLAELAKRFPNVLFLKVDVDELKTVAQEWAVEAMPTFMFVKGGKIVDRVVGAQKDQLQMTLAKHMATASA

SEQ ID NO: 22331 - DNA, 480 bp, Phaeosphaeria nodorum
  CDS (1)..(480)
atgcttgcgccttcatcagcccggctcactagatccatacttacaactacgcgcgtgcgaacagctgctaccaaccccacttcgaccgcaaacctctaccgatcgctcctcaccccaaagtttttcaccaccaccagcaaaatgagtgagagcaagcaaggcgttcacaacctccagacggtcgacgactacaggaaggccctggaggacaaggaccatttcatagtccttgactgcttcgccacatggtgcggaccctgcaaaatgattgcacccactattgtcaaattctccgagaagtaccctgagacgcgcttctacaagctcgacatcgacgaggtgcccgatattgcgcaggaactcggcatccgcgctatgcccaccttcgtcttcttcaagaacggcgagaaggttggcgaggtcgttggcgcaaaccccaaggccatcgaggccggcattcaggagcacgccagcgcatag

SEQ ID NO: 22332 - protein, 159 aa, Phaeosphaeria nodorum
MLAPSSARLTRSILTTTRVRTAATNPTSTANLYRSLLTPKFFTTTSKMSESKQGVHNLQTVDDYRKALEDKDHFIVLDCFATWCGPCKMIAPTIVKFSEKYPETRFYKLDIDEVPDIAQELGIRAMPTFVFFKNGEKVGEVVGANPKAIEAGIQEHASA

SEQ ID NO: 22333 - DNA, 381 bp, Medicago truncatula
  CDS (1)..(381)
atgggtggtcaacaacagcacaaaaagtctaaagttgtgaaaattgactcaaggaaatcatgggaacaccacatctttgaagctaccaataaaggttaccctgttatggttcatttttctgcttattggtgcgtgccttctatagctatggaccctttctttgaagaattggcatcgacctatcaagatgtcctctttctgaaggtggatgtggacgaagttaaggaagtagcctccaagttggaaatcaatgccatgcctacctttttattgatgagtggaggaactccagtggagaaagctgttggtgcaaatcctgatgaaattaggaaaaggatggaccattttattaaccaaactcattcctccaaatcactctga

SEQ ID NO: 22334 - protein, 126 aa, Medicago truncatula
MGGQQQHKKSKVVKIDSRKSWEHHIFEATNKGYPVMVHFSAYWCVPSIAMDPFFEELASTYQDVLFLKVDVDEVKEVASKLEINAMPTFLLMSGGTPVEKAVGANPDEIRKRMDHFINQTHSSKSL

SEQ ID NO: 22335 - DNA, 318 bp, Graphocephala atropunctata
  CDS (1)..(318)
atggttcatcacgtaaaggacgagaaagacctcgaagccaagctgaaggaggctggtaacaacttggttgttatcgatttcttcgccacctggtgcggaccctgcaagctgatcgctccccacattgagacgatggatgaagagttcccggatgtgatgttcctgaaagtggacgtagatgagtgtgagggcatcgctgcccaatatgagatctcctcaatgccaacctttgtattcataaagaatagcaaacaattggaaaactttgccggagcaaacgctgagaagctgaaagaaaccgtcaacaagcataaatga

SEQ ID NO: 22336 - protein, 105 aa, Graphocephala atropunctata
MVHHVKDEKDLEAKLKEAGNNLVVIDFFATWCGPCKLIAPHIETMDEEFPDVMFLKVDVDECEGIAAQYEISSMPTFVFIKNSKQLENFAGANAEKLKETVNKHK

SEQ ID NO: 22337 - DNA, 372 bp, Solanum berthaultii
  CDS (1)..(372)
atggctacttcatctgaggaaggacaagtgatcggctgccacaaggttgaggactgggaggtgcagccccagaagggcgtggagaccaaaaaactggtggtggtggattttactgcttcctggtgcggcccttgccgttttattgccccaattcttgctgacattgctaagaagatgcaccatgttatattcctcaaggttgatgttgatgaactgaagaaagttgcagaggattggaatgtggaggcaatgcctacctttgtcttcattaaagaggggaaagaagtggatagggtggttggtgccaataaagacggattgcttcagaccatagagaagcatggtgctgctcctgctattgtgactgcttga

SEQ ID NO: 22338 - protein, 123 aa, Solanum berthaultii
MATSSEEGQVIGCHKVEDWEVQPQKGVETKKLVVVDFTASWCGPCRFIAPILADIAKKMHHVIFLKVDVDELKKVAEDWNVEAMPTFVFIKEGKEVDRVVGANKDGLLQTIEKHGAAPAIVTA

SEQ ID NO: 22339 - DNA, 333 bp, Aspergillus oryzae
  CDS (1)..(333)
atgtctgagggcaatgttgtgaagatcgaatccaaaaaggattttcaggagaaggttatcgaatccaaggaccttgtcgttctcgactgcttcgctgagtggtgtggtccttgtaaggcaattgcccctcagcttgctaggctcagcgaggagtatactggcgccaaattctacaagatcgatgtcgacgatctctccgaagtcgctggcgagcttggtgtccgcgccatgcccacttttctcttcttcaaggatggtaagaaggtgaatgaagttgttggcgccaaccctcctgccctcgtggccggcgtccagtctctggtcaagcaataa

SEQ ID NO: 22340 - protein, 110 aa, Aspergillus oryzae
MSEGNVVKIESKKDFQEKVIESKDLVVLDCFAEWCGPCKAIAPQLARLSEEYTGAKFYKIDVDDLSEVAGELGVRAMPTFLFFKDGKKVNEVVGANPPALVAGVQSLVKQ

SEQ ID NO: 22341 - DNA, 327 bp, Aspergillus oryzae
  CDS (1)..(327)
atgggtgtcactgagatcaagactcctgctgaattccaggaaaaggtcatcgactccaacgagcctgtcgttgtcgatttcttcgctacctggtgcggtccttgcaggatgattaccccagccatcgaaaggctcagtaatgagaaccagggcgtcaagttctacaaggtagacgttgatgggcttaacacggtcgcggccgacttgggtattgccgccatgcctaccttcgtgttctttaaggacggccagcaaatcaaagagttaaccatccgcggtgccaaccctggtggtgttcagaacagtgtgaaagccctgctggcataa

SEQ ID NO: 22342 - protein, 108 aa, Aspergillus oryzae
MGVTEIKTPAEFQEKVIDSNEPVVVDFFATWCGPCRMITPAIERLSNENQGVKFYKVDVDGLNTVAADLGIAAMPTFVFFKDGQQIKELTIRGANPGGVQNSVKALLA

SEQ ID NO: 22343 - DNA, 330 bp, Aspergillus oryzae
  CDS (1)..(330)
atgcctgttacagctatcgaatcataccaacagttccaggagcttatcaccggtgataagcctgttttaattgatttctgggcaacatggtgtggaccttgcagagcaatctcccctgtttttgaggaaatgtcaaacgccgagggctttgataatgtcgggttttataaagttgatgtcgatgcacaagaacaaattgcccaagaagttggtattagagcaatgcctactttcatgctctttcgcaatggtgccaaagttggcgatctggttggagctaatagccaaggattgacagagcttgttaaaaaggcaactgctctcccctaa

SEQ ID NO: 22344 - protein, 109 aa, Aspergillus oryzae
MPVTAIESYQQFQELITGDKPVLIDFWATWCGPCRAISPVFEEMSNAEGFDNVGFYKVDVDAQEQIAQEVGIRAMPTFMLFRNGAKVGDLVGANSQGLTELVKKATALP

SEQ ID NO: 22345 - DNA, 624 bp, Arabidopsis thaliana
  CDS (1)..(624)
atggagaacatgtcgaatctaactagcaaatttttattaaacccgttgaatgttcataagcattgtgcagtttcagatgaaaatggtgatagaaaatctcatgttctgaaacaggtgtgttcatgtatctgctgttgcaacagaaggaacaagactcaagctaggagccagaaagggtcctactttataaaagggaaggtccatccggtaagtagaatggagaagtgggaggagaagatcacagaagctaatagtcatggcaaaattatagctcgacatgatctgattctttgtaacatggaacagcttgtagtgaatttcaaggcttcgtggtgtttacctagtaaaacaatattaccaatataccaggagcttgcatccacatacacctcaatgatatttgtcactatagacgtcgaagagctcgctatctcgaaactgagcgatttgggtgttaaaatatgtttgatacaggagtttagtcatgaatggaacgtggatgcaactccaacagtagtgttccttaaagatgggaggcaaatggataaacttgtaggtggagatgctgcagagcttcagaagaaaactgcagcagctgcaaatctccttcttagacaatcttaa

SEQ ID NO: 22346 - protein, 207 aa, Arabidopsis thaliana
MENMSNLTSKFLLNPLNVHKHCAVSDENGDRKSHVLKQVCSCICCCNRRNKTQARSQKGSYFIKGKVHPVSRMEKWEEKITEANSHGKIIARHDLILCNMEQLVVNFKASWCLPSKTILPIYQELASTYTSMIFVTIDVEELAISKLSDLGVKICLIQEFSHEWNVDATPTVVFLKDGRQMDKLVGGDAAELQKKTAAAANLLLRQS

SEQ ID NO: 22347 - DNA, 354 bp, Medicago sativa
  CDS (1)..(354)
atggccgcagaagagggacaagtgatcggagttcacactgtggaggcttggaaggaacacctcgagaagggaaatggatccaagaaactgattgtagttgatttcaccgcttcttggtgtggcccgtgccgtttcattgccccaattttggcagagattgctaaaaagctgcccaatgtcaccttcctcaaggttgatgttgatgaattgaagactgttgctgaggagtgggcagttgatgctatgccaacattcctgttcttgaaagaaggaaaactggtggacaaggttgttggtgctcagaaggagcagctgcaagcagcaataaccaagcatgcaactactgatgcttga

SEQ ID NO: 22348 - protein, 117 aa, Medicago sativa
MAAEEGQVIGVHTVEAWKEHLEKGNGSKKLIVVDFTASWCGPCRFIAPILAEIAKKLPNVTFLKVDVDELKTVAEEWAVDAMPTFLFLKEGKLVDKVVGAQKEQLQAAITKHATTDA

SEQ ID NO: 22349 - DNA, 375 bp, Codonopsis lanceolata
  CDS (1)..(375)
atggaacatcatcaaattagcatatcgaaagtagtgaaggtggactcaaagcaaacttgggattctcttgtaattcaagccattaatcaaagctcccctattgtggcacattttacagcatcatggtgcattccatcggttgtgatgaaccccttcttcgaagagttggcctcgacttacaaagacacaatgtttctcttggtggatgtggatgatgttcaggaggtcgcgagcaagtatgaagtcaaggcaatgccaacatttgtgctgatgaaggaaggagctcaggttgacaagctaattggtgcaaatccagatgagataaggaaaaggattgagtctcttatacagtccaatcccatttgtgtggcctaa

SEQ ID NO: 22350 - protein, 124 aa, Codonopsis lanceolata
MEHHQISISKVVKVDSKQTWDSLVIQAINQSSPIVAHFTASWCIPSVVMNPFFEELASTYKDTMFLLVDVDDVQEVASKYEVKAMPTFVLMKEGAQVDKLIGANPDEIRKRIESLIQSNPICVA

SEQ ID NO: 22351 - DNA, 459 bp, Nicotiana alata
  CDS (1)..(459)
atgggatcgtatctttcaagtttgctcggtggaggcgcggcggaagcggcagaggcagaatcaggatcgtcgtcagaaccgtcgcgtgtgattgcttttcattcttccaatcggtggcaacttcacttcaattcctccaagcaattaaataaactgatagttgtggattttgcggctacatggtgtgggccctgcaaaatgatggagccggttattaacgccatgtctgccaagtataccgacgttgacttcgtcaaaatcgacgtcgatgagctctcagatgtagcacaagagtttggagtacaagctatgccaacatttttgctgctgaagcaaggaaaggaagtagagagagtggttggggctaagaaagatgagctcgagaaaaagattctcaagcacagggaagctcctaaatttgctgctagtaattatcgaactaaatttcatgtccaataa

SEQ ID NO: 22352 - protein, 152 aa, Nicotiana alata
MGSYLSSLLGGGAAEAAEAESGSSSEPSRVIAFHSSNRWQLHFNSSKQLNKLIVVDFAATWCGPCKMMEPVINAMSAKYTDVDFVKIDVDELSDVAQEFGVQAMPTFLLLKQGKEVERVVGAKKDELEKKILKHREAPKFAASNYRTKFHVQ

SEQ ID NO: 22353 - DNA, 369 bp, Zea mays
  CDS (1)..(369)
atggcgtccgagcagggagtcgtgatcgcgtgccacagcaaggctgagtttgacgcccacatgaccaaggcccaggaagccggcaagctggtggtcatcgacttcactgccgcctggtgcggtccatgccgcgccatcgccccactgttcgtcgaacacgccaagaagttcactcaggtcgtgttcctgaaggtggacgtggacgaagtgaaggaagtcaccgcggcctacgaggtcgaggcgatgccgaccttccacttcgtcaagaacggcaagacggtcgcgaccatcgtgggtgccaagaaggacgagctcctggccctgatcgagaagcatgccgcgcctgcgcctgcgtctgcgtctgcctaa

SEQ ID NO: 22354 - protein, 122 aa, Zea mays
MASEQGVVIACHSKAEFDAHMTKAQEAGKLVVIDFTAAWCGPCRAIAPLFVEHAKKFTQVVFLKVDVDEVKEVTAAYEVEAMPTFHFVKNGKTVATIVGAKKDELLALIEKHAAPAPASASA

SEQ ID NO: 22355 - DNA, 387 bp, Zea mays
  CDS (1)..(387)
atggcggcttcggaggcggcggcggcggcggcgacaccggtggcgccgacagaggggacggtgatcgcgatccacagcctggaggagtggagcatccagatcgaggaggccaacagcgccaagaagctggtggtgattgacttcactgcaacatggtgtcctccgtgccgcgccatggctccaatttttgctgatatggccaagaagtccccaaatgttgttttcctgaaagttgatgtcgatgaaatgaagaccattgctgagcaattcagcgtagaggccatgccaacattcctgttcatgagggagggcgacgtcaaggacagggtcgttggcgcagcaaaggaagagctagcaaggaagcttgaactacacatggcctcgtag

SEQ ID NO: 22356 - protein, 128 aa, Zea mays
MAASEAAAAAATPVAPTEGTVIAIHSLEEWSIQIEEANSAKKLVVIDFTATWCPPCRAMAPIFADMAKKSPNVVFLKVDVDEMKTIAEQFSVEAMPTFLFMREGDVKDRVVGAAKEELARKLELHMAS

SEQ ID NO: 22357 - DNA, 429 bp, Plantago major
  CDS (1)..(429)
atgggctcgtttctctcttccgtgatcggaatcggaccggccgatgcggcggagacacctgccggagactcatcggagccttcgcgcgtcatggcgttccactcgtcgcaacgctggcagctccacttcaactcctccaagcagttaaacaaactgatggttgtggatttcacggcgacttggtgtggaccttgcaagttcatggcgcctgttttcgctgaactttctaccaagtacagtgatgttgattttgtcaaaatcgacgtcgatgagctcgctgatgtggcgcgggagtttggtgtgcaggcgatgccaacattcatgttactaaagcaaggaaaacaagttggtaccgttgtgggagctaagaaagatgaactggagaagaagatcctcgaacacagggaagcccctagatttgctgcatag

SEQ ID NO: 22358 - protein, 142 aa, Plantago major
MGSFLSSVIGIGPADAAETPAGDSSEPSRVMAFHSSQRWQLHFNSSKQLNKLMVVDFTATWCGPCKFMAPVFAELSTKYSDVDFVKIDVDELADVAREFGVQAMPTFMLLKQGKQVGTVVGAKKDELEKKILEHREAPRFAA

SEQ ID NO: 22359 - DNA, 408 bp, Glycine max
  CDS (1)..(408)
atgggcgctatactttctgccttaactggcggtgccgcaacggcggcgacgtcttcgccggagagttctgcttctagggtccagtctttccactcttcggcgcgctggcagctccacttcaacgagctcaaagaaaccaataagctcgttgtgatagatttctcggcgtcgtggtgcggcccttgcaaattcatagagccagcgattcacgccatgtccgaaaagttcaccgacgttgacttcgtcaagatcgacgtcgacgaattgccggatgtggcgaaggagtttaatgtggaggcgatgccgacgttcgtgttgtgtaagaaagggaaggaagtcgacaaggttgtgggcgcaaagaaggacgagctcgaaaagaagattgagaaacatcgatcgcaatcttag

SEQ ID NO: 22360 - protein, 135 aa, Glycine max
MGAILSALTGGAATAATSSPESSASRVQSFHSSARWQLHFNELKETNKLVVIDFSASWCGPCKFIEPAIHAMSEKFTDVDFVKIDVDELPDVAKEFNVEAMPTFVLCKKGKEVDKVVGAKKDELEKKIEKHRSQS

SEQ ID NO: 22361 - DNA, 375 bp, Capsicum annuum
  CDS (1)..(375)
atggctgctacttcatctgaagaaggacaagtttttggttgccacaacgttgaggagtgggatcagcacttcaagaagggtgtcgagactaagaaattggtggtggtggattttaccgcatcctggtgcggtccttgccgttttattgccccaattcttgctgacattgctaagaagatgccccatgtcatattcctcaaggttgatgttgatgaactaaagactgttgcagaggaatggaatgtggatgctatgccaacatttgtcttctttaaagatggcgaagaagtggatagggttgttggtgcccagaaagaggagttgcaggcggccatacttaagcatgttggtgctcctgctactgtgacagcttga

SEQ ID NO: 22362 - protein, 124 aa, Capsicum annuum
MAATSSEEGQVFGCHNVEEWDQHFKKGVETKKLVVVDFTASWCGPCRFIAPILADIAKKMPHVIFLKVDVDELKTVAEEWNVDAMPTFVFFKDGEEVDRVVGAQKEELQAAILKHVGAPATVTA

SEQ ID NO: 22363 - DNA, 351 bp, Paracoccidioides brasiliensis
  CDS (1)..(351)
atggttgtccacaatctgcaaaaccgcgcctccttcgtctccgccatctccaccacctccaccgccgacacctccaccgacaaaaagacatccctagtcgtcatagactgctatgcaacctggtgcggcccctgcaaagtgatcgcgcccaaactcgtcgagttttccgaaacctacccgaacgtcactttctacaaggtcgacgtcgacgagtgcccggacatcgcgcaggagctgggcgtcagggccatgccgactttcatcttctttaaggatgggcagaaggttgatgaggtgatgggcgcggtgccgcaagcggttgaggcggcgattaagaagcatgcgtcgtag

SEQ ID NO: 22364 - protein, 116 aa, Paracoccidioides brasiliensis
MVVHNLQNRASFVSAISTTSTADTSTDKKTSLVVIDCYATWCGPCKVIAPKLVEFSETYPNVTFYKVDVDECPDIAQELGVRAMPTFIFFKDGQKVDEVMGAVPQAVEAAIKKHAS

SEQ ID NO: 22365 - DNA, 372 bp, Ipomoea batatas
  CDS (1)..(372)
atggccgccgcgacttcttcggaggagggacaggtgatcgcctgccacaccgtggatcactggaaggagcagttcgctaagggcgttgagaccaaaagactggtggtggttgatttcactgcttcctggtgcggtccttgccgcatgattgctccaatactggctgaaattgcaaagaaaatggctcatgtgatattcgtcaaggttgatgttgatgaactgcaggctgtggctgcggaatacaaggtggaggcgatgccgactttcgtgttcctcaaggatggcaaggaagtggataggatggtgggtgcaaagaaggatgatctgcagaactgcataactaagcatgctgcagcagtcatgactgcttag

SEQ ID NO: 22366 - protein, 123 aa, Ipomoea batatas
MAAATSSEEGQVIACHTVDHWKEQFAKGVETKRLVVVDFTASWCGPCRMIAPILAEIAKKMAHVIFVKVDVDELQAVAAEYKVEAMPTFVFLKDGKEVDRMVGAKKDDLQNCITKHAAAVMTA

SEQ ID NO: 22367 - DNA, 432 bp, Ipomoea batatas
  CDS (1)..(432)
atgggaggggctctgtcgagtgtgctgggtggcgatgcggcggcggcggcggcatcagccgatgactcatcatcgtccgaaccctctcgggtcactgtatttcattcatctcaacgatggcagctgcacttcaacgcctccaaacaactcaataaattgatggtggtggattttgcggcagcatggtgtgggccctgcaagatgatggagccgatggtcaaacaaatggctaccaagttcaccgacgttgatttcataaagatagacgtcgatgagctctcggatgtggcccaggagttttcagtgcaggctatgccgacgttcttactgctgaagcaaggcaaggaggtgggtagggtagtgggagccaagaaagatgagcttgaaaggaagatcgtccagcataaggaagtccccaaatttgctgcttga

SEQ ID NO: 22368 - protein, 143 aa, Ipomoea batatas
MGGALSSVLGGDAAAAAASADDSSSSEPSRVTVFHSSQRWQLHFNASKQLNKLMVVDFAAAWCGPCKMMEPMVKQMATKFTDVDFIKIDVDELSDVAQEFSVQAMPTFLLLKQGKEVGRVVGAKKDELERKIVQHKEVPKFAA

SEQ ID NO: 22369 - DNA, 372 bp, Arabidopsis thaliana
  CDS (1)..(372)
atgcaggagcgagaagctcaggctgcactcaatgacggagaagtgattagcatccactcaacaagcgagctagaagcaaagacaaaggctgctaagaaggcatcacgtctgctcatcctttacttcacagccacatggtgtgggccatgccgatatatgtctcctctgtactcaaacctggccacacagcactcgagagtcgttttcttgaaagttgatatagacaaggccaatgacgtggctgcttcttggaacattagcagcgtcccgaccttttgcttcatcagagatggcaaagaggtggacaaagttgtcggagctgataaaggttcgcttgagcagaagattgcacagcactcttcttctaagtaa

SEQ ID NO: 22370 - protein, 123 aa, Arabidopsis thaliana
MQEREAQAALNDGEVISIHSTSELEAKTKAAKKASRLLILYFTATWCGPCRYMSPLYSNLATQHSRVVFLKVDIDKANDVAASWNISSVPTFCFIRDGKEVDKVVGADKGSLEQKIAQHSSSK

SEQ ID NO: 22371 - DNA, 369 bp, Hordeum vulgare var
  CDS (1)..(369)
atggcggcgtcggcaacggcggcggcagtggcggcggaggtgatctcggtccacagcctggagcagtggaccatgcagatcgaggaggccaacaccgccaagaagctggtggtgattgacttcactgcatcatggtgcggaccatgccgcatcatggctccagttttcgctgatctcgccaagaagttcccaaatgctgttttcctcaaggtcgacgtggatgaactgaagcccattgctgagcaattcagtgtcgaggccatgccaacgttcctgttcatgaaggaaggagacgtcaaggacagggttgtcggagctatcaaggaggaactgaccgccaaggttgggcttcacgcggcggcccagtaa

SEQ ID NO: 22372 - protein, 122 aa, Hordeum vulgare var
MAASATAAAVAAEVISVHSLEQWTMQIEEANTAKKLVVIDFTASWCGPCRIMAPVFADLAKKFPNAVFLKVDVDELKPIAEQFSVEAMPTFLFMKEGDVKDRVVGAIKEELTAKVGLHAAAQ

SEQ ID NO: 22373 - DNA, 357 bp, Hordeum vulgare var
  CDS (1)..(357)
atggccgccgaggagggagccgttatcgcgtgccacaccaagcaagagttcgatacccacatggccaatggcaaggacaccggcaagctggtgatcattgatttcactgcttcctggtgcggtccatgtcgtgtcatagccccagtctttgctgagtacgccaagaagttccctggggccatcttcctgaaggtggatgttgatgagctgaaggacgtcgctgaagcatacaatgttgaggcaatgccgaccttcctgtttatcaaggacggtgagaaggtggacagtgttgtcggtggcaggaaggatgacatccataccaagatagtggccctcatgggttctgcatccacctaa

SEQ ID NO: 22374 - protein, 118 aa, Hordeum vulgare var
MAAEEGAVIACHTKQEFDTHMANGKDTGKLVIIDFTASWCGPCRVIAPVFAEYAKKFPGAIFLKVDVDELKDVAEAYNVEAMPTFLFIKDGEKVDSVVGGRKDDIHTKIVALMGSAST

SEQ ID NO: 22375 - DNA, 372 bp, Citrus paradisi
  CDS (1)..(372)
atggccgaggagggacaagtgatcagctgccacactgttgaatcctggaacgagcagctccaaaagggcattgcggcaaagaaactgatagtggtggattttacggcttcatggtgcccgccatgcaagttgatgtctccaattttgagtgaattggcgaagaagctgcccgctgtcatattcttgaaggtggatgttgatgaattgcagtccgtcgctgaggaatgggctgtggaagccatgccgacctttgtactgacgaaagacggcaaagtcctggagaggattgtgggagcgaagaaagatgagctgcagctggctgtcgaaaagcacgcaacaactgttgagaatgcaactactgctaatgcttga

SEQ ID NO: 22376 - protein, 123 aa, Citrus paradisi
MAEEGQVISCHTVESWNEQLQKGIAAKKLIVVDFTASWCPPCKLMSPILSELAKKLPAVIFLKVDVDELQSVAEEWAVEAMPTFVLTKDGKVLERIVGAKKDELQLAVEKHATTVENATTANA

SEQ ID NO: 22377 - DNA, 396 bp, Leymus chinensis
  CDS (1)..(396)
atggggggctgtgtgggaaagggtcgtagcattgtggaagaaaagcttgatttcaaaggtggaaatgtgcatgtcataacaaccaaagaggactgggaccagaagattgaagaagcaaacaaggatgggaaaattgttgtagcaaacttcagtgcttcgtggtgtgggccatgccgtgtcattgcacctgtttatgctgagatgtccaagacttatcctcagctcatgttcttgacaattgatgttgatgacctaatggatttcagctcaacatgggacatccgtgcaaccccaacgttcttcttccttaaaaacggccagcagatcgacaagctcgtcggcgccaacaaacctgagctcgagaagaaagtacaagctcttggcgatggcagctga

SEQ ID NO: 22378 - protein, 131 aa, Leymus chinensis
MGGCVGKGRSIVEEKLDFKGGNVHVITTKEDWDQKIEEANKDGKIVVANFSASWCGPCRVIAPVYAEMSKTYPQLMFLTIDVDDLMDFSSTWDIRATPTFFFLKNGQQIDKLVGANKPELEKKVQALGDGS

SEQ ID NO: 22379 - DNA, 393 bp, Pisum sativum
  CDS (1)..(393)
atgggctcaattctctcttccctcatcggcggcgaaccagctgccgccttagaatcctccgatcacgccgtcaaaacattccactcatccgcacgctggcagctccacttcaacgaaatcaaagactcgcctcgtctcgttgtgattgatttctctgctacgtggtgtggaccgtgtaaaatgatggaaccgattgtttatgccatggctaacgaattcacggacgttgaattcatcaagatcgacgttgacgaattatcggatgtggcgcaggagtttaaggtgcaggctatgccgacgtttttgttgttgaagaatggggaagaggtggataagattgttggtgccaaaaaagatgaactcaaaaacaagattaaaaaatacagagcttag

SEQ ID NO: 22380 - protein, 130 aa, Pisum sativum
MGSILSSLIGGEPAAALESSDHAVKTFHSSARWQLHFNEIKDSPRLVVIDFSATWCGPCKMMEPIVYAMANEFTDVEFIKIDVDELSDVAQEFKVQAMPTFLLLKNGEEVDKIVGAKKDELKNKIKKYRA

SEQ ID NO: 22381 - DNA, 342 bp, Pisum sativum
  CDS (1)..(342)
atggcggaagagggacaagtgatcggtgttcacaccgtggatgcttggaaggaacagttagagaagggaaaagcctcaaagaaactgattgtagttgatttcactgcttcttggtgcggtccatgccgttttattgccccaattttggcagagattgctaaaaagcttacacatgtcactttccttaaggttgacgtggatgaattgaagactgtttccgaggagtggggaattgaagctatgccaacattcttgttcttgaaagatggtgaacttgtggacaaagttgtgggtgccaagaaggaggagctgcaattgaaaattgacaagcatgcagcttga

SEQ ID NO: 22382 - protein, 113 aa, Pisum sativum
MAEEGQVIGVHTVDAWKEQLEKGKASKKLIVVDFTASWCGPCRFIAPILAEIAKKLTHVTFLKVDVDELKTVSEEWGIEAMPTFLFLKDGELVDKVVGAKKEELQLKIDKHAA

SEQ ID NO: 22383 - DNA, 357 bp, Triticum aestivum
  CDS (1)..(357)
atggccgccgaggagggagccgtgatagcgtgccacaccaagcaagagttcgacacccacatggctaatggcaaggagaccggcaagctggtgatcattgacttcactgcttcctggtgcggtccttgtcgtgtcatagccccagtctttgctgagtacgccaagaagttccctggcgccattttcctgaaggtggacgttgacgagctgaaggacgtcgctgaagcatacaacgttgaggcaatgccgaccttcctgtttatcaaggatggtgcgaaggtggacactgttgtcggtggcaggaaggatgatatccataccaagatagtggccctcatgggttctgcatctgcctaa

SEQ ID NO: 22384 - protein, 118 aa, Triticum aestivum
MAAEEGAVIACHTKQEFDTHMANGKETGKLVIIDFTASWCGPCRVIAPVFAEYAKKFPGAIFLKVDVDELKDVAEAYNVEAMPTFLFIKDGAKVDTVVGGRKDDIHTKIVALMGSASA

SEQ ID NO: 22385 - DNA, 396 bp, Hordeum vulgare var
  CDS (1)..(396)
atgggaggctgtgtgggcaagggtcgtggcgttgtggaagaaaagcttgatttcaaaggtggaaatgtgcatgtcataacaaccaaagaggactgggaccagaagattgaagaagcaaacaaggatgggaaaattgttgtagcaaacttcagtgcttcgtggtgtgggccatgccgtgtcattgcacctgtttatgctgagatgtccaagacttatcctcaactcatgttcttgacaattgatgttgatgacctaatggatttcagctcaacatgggacatccgcgcaaccccgacgttcttcttcctcaaaaacggccagcagatcgacaagctcgtcggcgccaacaaacccgagctggagaagaaagtgcaagctcttggtgatggcagttga

SEQ ID NO: 22386 - protein, 131 aa, Hordeum vulgare var
MGGCVGKGRGVVEEKLDFKGGNVHVITTKEDWDQKIEEANKDGKIVVANFSASWCGPCRVIAPVYAEMSKTYPQLMFLTIDVDDLMDFSSTWDIRATPTFFFLKNGQQIDKLVGANKPELEKKVQALGDGS

SEQ ID NO: 22387 - DNA, 402 bp, Brassica campestris
  CDS (1)..(402)
atgggaggtgtattatcatctgtgttaggaggtggtggtggagatgaaccactcgcggggaatgaatccgaaagtcgcgtcatgaagtttagctcatcggctcggtggcagcttcacttcaacgagatcaaagaatcctcgaaactgctggtggttgacttctcagcatcctggtgtggaccttgcaggatgatagagcctgcgttcatcgccatgtctgccaagttcagtgatgttgaattcctcaaattggatgtcgatgaacttcccgatgtggctaaagagttcaatgtgacggggatgccaacttttgtgctggtgaaaaatggtaaagagattgaaaggatcgttggagcaaggaaagatgaacttgagaagaaagttctcaaacacagggcatag

SEQ ID NO: 22388 - protein, 133 aa, Brassica campestris
MGGVLSSVLGGGGGDEPLAGNESESRVMKFSSSARWQLHFNEIKESSKLLVVDFSASWCGPCRMIEPAFIAMSAKFSDVEFLKLDVDELPDVAKEFNVTGMPTFVLVKNGKEIERIVGARKDELEKKVLKHRA

SEQ ID NO: 22389 - DNA, 396 bp, Triticum aestivum
  CDS (1)..(396)
atggggggctgtgtgggcaaggatcgtagcattgtggaagaaaagcttgatttcaaaggtggaaatgtgcatgtcataacaaccaaagaggactgggaccagaagattgaagaagcaaacaaggatgggaaaattgttgtagcaaacttaagtgcttcgtggtgtgggccatgccgtgtcattgcacctgtttatgccgagatgtccaagacttatcctcaactcatgttcttgacaattgatgttgatgacctaatggatttcagctctacatgggacatccgtgcaaccccgacgttcttcttcctcaaaaacggccagcagatcgaaaagctcgtcggcgccaacaaacctgagctcgaaaagaaagtacaagctcttggcgatggcagttga

SEQ ID NO: 22390 - protein, 131 aa, Triticum aestivum
MGGCVGKDRSIVEEKLDFKGGNVHVITTKEDWDQKIEEANKDGKIVVANLSASWCGPCRVIAPVYAEMSKTYPQLMFLTIDVDDLMDFSSTWDIRATPTFFFLKNGQQIEKLVGANKPELEKKVQALGDGS

SEQ ID NO: 22391 - DNA, 459 bp, Nicotiana tabacum
  CDS (1)..(459)
atggggattactgatatggtacatagccttttctcttgtttcaagacacggtccacaaacaatgatgatgattcatcccataatgtcgagtttgctggtggaaatgtgtgccttattactacgaaagaaagttgggatcagaagttggcagaagcaaataaagagggcaaaattgttattgcgaatttcagtgcttcatggtgtggtccatgtagaatgattgccccattctactgtgagctgtctgagaaatatctttctctgatgtttctaacagtcgatgttgatgagcttacagaatttagttcatcctgggatatcaaagcaactccaactttctttttcctcaaggacagccagcagattgacaaacttgtaggggccaataaaccagagctgcagaagaaaataaccgcgattgcagacacacaggtagtatgtgagacgcaaccgcagtaa

SEQ ID NO: 22392 - protein, 152 aa, Nicotiana tabacum
MGITDMVHSLFSCFKTRSTNNDDDSSHNVEFAGGNVCLITTKESWDQKLAEANKEGKIVIANFSASWCGPCRMIAPFYCELSEKYLSLMFLTVDVDELTEFSSSWDIKATPTFFFLKDSQQIDKLVGANKPELQKKITAIADTQVVCETQPQ

SEQ ID NO: 22393 - DNA, 399 bp, Oryza sativa
  CDS (1)..(399)
atgggaggttgtgtgggcaagggacgacgacatattgaggaagacaagcttgatttcaaaggtggaaatgttcatgtcataacaagcaaagaggactgggataggaagattgaagaagcaaacaaggatgggaaaattgttgtggcaaatttcagtgcttcctggtgtggaccatgtcgtgttattgcacctatttatgctgagatgtcaaagacttatcctcaactcatgttcttgacaatagatgttgatgacctaatggatttcagctcatcatgggatatccgcgcaaagccgacctttttcttcataaaaaacgagaagcaggtcgacaagcttgtgggcgccaacaaacctgagctcgaaaagaaggttcaggcacttgctgatggcagctga

SEQ ID NO: 22394 - protein, 132 aa, Oryza sativa
MGGCVGKGRRHIEEDKLDFKGGNVHVITSKEDWDRKIEEANKDGKIVVANFSASWCGPCRVIAPIYAEMSKTYPQLMFLTIDVDDLMDFSSSWDIRAKPTFFFIKNEKQVDKLVGANKPELEKKVQALADGS

SEQ ID NO: 22395 - DNA, 402 bp, Zea mays
  CDS (1)..(402)
atgggaggctgtgcgggaaaggtacgtcgtgatgacgaagaaaagcttgattttaaaggtggaaatgttcatattataacaagcaatgagggctgggaccagaagattgcagaagcaaacagagatgggaaaactgttgttgcaaatttcagcgcttcctggtgtgggccatgccgtgtcattgctcctgtctatgctgaaatgtcaaagacttatcctcaactcatgttcttgacaatagacgttgatgacctgatggacttcagctcttcatgggacatccgtgcaaccccgacattcttcttcctcaagaacgggcagcagatcgacaagctcgtgggcgcgaacaaacctgagctcgagaagaaagtgctagcagccgctgatgccagtacgtcctag

SEQ ID NO: 22396 - protein, 133 aa, Zea mays
MGGCAGKVRRDDEEKLDFKGGNVHIITSNEGWDQKIAEANRDGKTVVANFSASWCGPCRVIAPVYAEMSKTYPQLMFLTIDVDDLMDFSSSWDIRATPTFFFLKNGQQIDKLVGANKPELEKKVLAAADASTS

SEQ ID NO: 22397 - DNA, 363 bp, Cucurbita maxima
  CDS (1)..(363)
atggctgttgaaggtcaagtgattccacttcgcgatgctgaagaattcgatgcgataatcgataaagagaaggaatctggcagactgattgtgatcgattttactgcttcctggtgcccgccatgccgtttcattgctccagtattcgcagagttggctaaggcgcacgtccatgtcactttcttgaaagtggacgtcgataatgtcaaggaaattgctaagaggttcgaggtgacagcgatgccgacctttgttttcctgaaaggaggaaacgaagttcacaggattgttggtgcggacaaggtggagctaggggttaaagtactggagttaagcgctgcacctgctacttgtgcttcttag

SEQ ID NO: 22398 - protein, 120 aa, Cucurbita maxima
MAVEGQVIPLRDAEEFDAIIDKEKESGRLIVIDFTASWCPPCRFIAPVFAELAKAHVHVTFLKVDVDNVKEIAKRFEVTAMPTFVFLKGGNEVHRIVGADKVELGVKVLELSAAPATCAS

SEQ ID NO: 22399 - DNA, 360 bp, Arabidopsis thaliana
  CDS (1)..(360)
atggcggcagaagagggtcaagtgattagttgtcacacgaacgatgtatggactgtgcaacttgataaagccaaagaatccaacaagctgattgtgattgatttcactgcttcatggtgtccaccatgccgcatgattgctccaattttcaacgatttggccaagaagttcatgtcaagtgccatcttcttcaaggtggatgttgatgaacttcagagtgttgctaaagagtttggtgtggaggcaatgccaacctttgtgttcattaaagccggcgaagttgtggataagctcgttggtgcgaataaagaagatcttcaggcgaaaatagtgaagcatactggtgttacaactgcgtaa

SEQ ID NO: 22400 - protein, 119 aa, Arabidopsis thaliana
MAAEEGQVISCHTNDVWTVQLDKAKESNKLIVIDFTASWCPPCRMIAPIFNDLAKKFMSSAIFFKVDVDELQSVAKEFGVEAMPTFVFIKAGEVVDKLVGANKEDLQAKIVKHTGVTTA

SEQ ID NO: 22401 - DNA, 405 bp, Arabidopsis thaliana
  CDS (1)..(405)
atgggaggagctttatcaactgtgtttggaagtggagaagatgcagcagctgcagggactgagtcttccgagccaagtcgcgtcctcaagtttagctcttccgctcggtggcaacttcatttcaacgagatcaaagaatcaaacaaactgctggtggttgatttctcggcttcatggtgtggaccatgtaggatgattgagcctgcgatccatgccatggctgataagttcaatgatgttgatttcgtcaaattagatgttgatgaacttcctgatgtggctaaagagtttaatgtgacggcaatgcctacctttgtgctggtgaaaaggggtaaagaaattgaaaggatcattggtgccaaaaaggacgaacttgagaagaaagttagcaaactcagagcataa

SEQ ID NO: 22402 - protein, 134 aa, Arabidopsis thaliana
MGGALSTVFGSGEDAAAAGTESSEPSRVLKFSSSARWQLHFNEIKESNKLLVVDFSASWCGPCRMIEPAIHAMADKFNDVDFVKLDVDELPDVAKEFNVTAMPTFVLVKRGKEIERIIGAKKDELEKKVSKLRA

SEQ ID NO: 22403 - DNA, 411 bp, Prunus persica
  CDS (1)..(411)
atggcggaggaaaatcaagtcatcggctgccacactactcaagcctgggaagagcagctccataagggaaacgagaacaagaaactggtggtggtggatttcacggcttcgtggtgtggaccgtgccggttgatcgccccaatcttggcggagttggctaagaagaccccagaagtgacgttcctaaaggtggacgtggatgaactgaggactgtttccgaggagtggggtgtggaggcaatgcctaccttcctcttcctcaaggaaggcaagatagtggacaaggttgtgggtgccaagaaagacgagttacagatcaaagttgccaagcatgtcgccgctgccgccgctgcctccgccacctctgcctctgccaccgctgctacagctactgctactgcatctgcttaa

SEQ ID NO: 22404 - protein, 136 aa, Prunus persica
MAEENQVIGCHTTQAWEEQLHKGNENKKLVVVDFTASWCGPCRLIAPILAELAKKTPEVTFLKVDVDELRTVSEEWGVEAMPTFLFLKEGKIVDKVVGAKKDELQIKVAKHVAAAAAASATSASATAATATATASA

SEQ ID NO: 22405 - DNA, 357 bp, Pisum sativum
  CDS (1)..(357)
atggcagcagaaaatgaggtgatcgctgttcattccgatgaatcatggaaggaacagatccagaaaggaaccgaatccaaaaaactgattgtggtggattttactgcttcgtggtgcggtccatgccgttttattgctccaattctagcagagattgctaagaagacacctcaagtcatcttcctcaaggtggacattgacgaattagagagtgttgccgaggaatggtctatcgaggctatgccaaccttcttgctcttgaaagaaggcatggaagtggataaggtagttggtgctaagaaggaagaactgcagctggcaataaccaagcatgcaacaactgttgctactgcttga

SEQ ID NO: 22406 - protein, 118 aa, Pisum sativum
MAAENEVIAVHSDESWKEQIQKGTESKKLIVVDFTASWCGPCRFIAPILAEIAKKTPQVIFLKVDIDELESVAEEWSIEAMPTFLLLKEGMEVDKVVGAKKEELQLAITKHATTVATA

SEQ ID NO: 22407 - DNA, 363 bp, Pisum sativum
  CDS (1)..(363)
atggcaggttcatcagaagagggacaagttatcagctgtcacagcgttgatgcatggaacgatatccttcacagaggcaatgaatccaagaaactgattgttgtggactttactgcttcttggtgtggaccatgccgtttcattgcaccattccttggtgaattggctaagaagtttacaaatgtcatattccttaaggtggacgtggacgaactaaagtctgttgctcaagattgggctgttgaggctatgccaacatttgtgtttgtgaaagaaggaacgattttgggcaaagtggttggagcaaagaaagaagaactgcagcagacaattgaaagacatgtggcttcatctaatgcttag

SEQ ID NO: 22408 - protein, 120 aa, Pisum sativum
MAGSSEEGQVISCHSVDAWNDILHRGNESKKLIVVDFTASWCGPCRFIAPFLGELAKKFTNVIFLKVDVDELKSVAQDWAVEAMPTFVFVKEGTILGKVVGAKKEELQQTIERHVASSNA

SEQ ID NO: 22409 - DNA, 324 bp, Neurospora crassa
  CDS (1)..(324)
atgactgtccacaacattgctaccgtcgccgagttcaaggaggccattgccaagcaccccatcgttgtccttgacgctttcgctacctggtgcggtccttgcaaggccatcgctcccactgtcgccaagtggtccgaggagcctcagttcaaggacaccgtctacttcgccaagttcgacgtcgacgcccttcccgacctcgcccaggagctcggcatccgcgccatgcccactttcgtcatcttcaagaacggcgacaaggctgacgagttcgtcggtgccaacccccctgctctcctggccaccatcaccaagcaactttga

SEQ ID NO: 22410 - protein, 107 aa, Neurospora crassa
MTVHNIATVAEFKEAIAKHPIVVLDAFATWCGPCKAIAPTVAKWSEEPQFKDTVYFAKFDVDALPDLAQELGIRAMPTFVIFKNGDKADEFVGANPPALLATITKQL

SEQ ID NO: 22411 - DNA, 366 bp, Oryza sativa subsp
  CDS (1)..(366)
atggcggcggcctcagcgacggcgcaggcggagggaacggtgatcgcgatccacagcctcgacgagtggaccatccagatcgaggaggccaacagcgccaagaagctggttgtgattgacttcactgcatcatggtgcggaccatgccgcatcattgctccagtttttgccgatctagcaaagaagcacacaaatgctgtttttctgaaggttgacgtcgatgaactgaagcctattgctgagcaattcagtgttgaggctatgccaacattcctgtttatgaaggagggagatgttaaagacagggttgtcggtgctatgaaggatgaactggcgagcaagcttgagctacatatggccatgtag

SEQ ID NO: 22412 - protein, 121 aa, Oryza sativa subsp
MAAASATAQAEGTVIAIHSLDEWTIQIEEANSAKKLVVIDFTASWCGPCRIIAPVFADLAKKHTNAVFLKVDVDELKPIAEQFSVEAMPTFLFMKEGDVKDRVVGAMKDELASKLELHMAM

SEQ ID NO: 22413 - DNA, 378 bp, Triticum aestivum
  CDS (1)..(378)
atggcggcgtcggcggcgacggcaacggcggcggcggtgggggcgggggaggtgatctccgtccacagcctggagcagtggaccatgcagatcgaggaggccaacgccgccaagaagctggtggtcattgacttcactgcatcgtggtgtggaccctgccgcattatggctccaattttcgctgatctcgccaagaagttcccagctgctgttttcctcaaggtcgatgttgatgaactgaagtccattgctgagcaattcagcgtggaggccatgccaaccttcctgttcatgaaggaaggagacgtcaaggacagggttgtcggagctatcaaggaggaactgacgaacaaggttgggctacacgcggcccagtaa

SEQ ID NO: 22414 - protein, 125 aa, Triticum aestivum
MAASAATATAAAVGAGEVISVHSLEQWTMQIEEANAAKKLVVIDFTASWCGPCRIMAPIFADLAKKFPAAVFLKVDVDELKSIAEQFSVEAMPTFLFMKEGDVKDRVVGAIKEELTNKVGLHAAQ

SEQ ID NO: 22415 - DNA, 396 bp, Phalaris coerulescens
  CDS (1)..(396)
atgggaggctgtgtgggcaaggatcgtggcattgtggaagacaagcttgatttcaaaggtgggaatgtgcatgtcataactaccaaagaggactgggaccagaaaattgcagaagcaaacaaggatgggaaaattgttgtggcaaatttcagtgcttcctggtgtgggccatgccgtgtcattgcacctgtttatgctgagatgtcaaagacgtatcctcaactcatgttcttgacaattgatgttgatgacctagtggatttcagctcaacatgggacatccgtgcaaccccaacgttcttcttcctcaagaatggccagcagatcgacaagctcgttggcgccaacaagcctgagctcgaaaagaaagtacaagctcttggcgatggcagttga

SEQ ID NO: 22416 - protein, 131 aa, Phalaris coerulescens
MGGCVGKDRGIVEDKLDFKGGNVHVITTKEDWDQKIAEANKDGKIVVANFSASWCGPCRVIAPVYAEMSKTYPQLMFLTIDVDDLVDFSSTWDIRATPTFFFLKNGQQIDKLVGANKPELEKKVQALGDGS

SEQ ID NO: 22417 - DNA, 396 bp, Lolium perenne
  CDS (1)..(396)
atgggaggctgtgtgggcaaggaccgtagcattgtggaagataagcttgatttcaaaggtggaaatgtgcatgtcatcacaaccaaagaggactgggaccaaaaggttgcagaagctaacaaagatgggaaaattgttgtggcgaatttcagcgcttcctggtgtggcccatgccgtgtcattgcacctgtttatgctgagatgtcaaagacttatccccaactcatgttcttgacaattgacgttgatgacctaatggatttcagctcaacatgggacatccgtgcaaccccgacgttcttcttcctcaagaacggccagctgattgacaagctcgtcggcgccaacagacctgagctcgaaaagaaagtacaagctattggcgatggcagctga

SEQ ID NO: 22418 - protein, 131 aa, Lolium perenne
MGGCVGKDRSIVEDKLDFKGGNVHVITTKEDWDQKVAEANKDGKIVVANFSASWCGPCRVIAPVYAEMSKTYPQLMFLTIDVDDLMDFSSTWDIRATPTFFFLKNGQLIDKLVGANRPELEKKVQAIGDGS

SEQ ID NO: 22419 - DNA, 396 bp, Secale cereale
  CDS (1)..(396)
atggggggctgtgtggggaagggtcgtagcattgtggaagaaaagcttgatttcaaaggtggaaatgtgcatgtcataacaaccaaagaggactgggaccagaagattgaagaagcaaacaaggatgggaaaattgttgtagcaaacttcagtgcttcgtggtgtgggccatgccgtgtcgttgcacctgtttatgctgggatgtccaagacttatcctcaactcatgttcttgacaattgatgttgatgacctaatggatttcagctcaacatgggacatccgtgcaaccccgacgttcttcttcctgaaaaacggccagcagatcgacaagctcgtcggcgccaacaaacctgagctcgagaagaaagtacaagctcttggtgatggcagttga

SEQ ID NO: 22420 - protein, 131 aa, Secale cereale
MGGCVGKGRSIVEEKLDFKGGNVHVITTKEDWDQKIEEANKDGKIVVANFSASWCGPCRVVAPVYAGMSKTYPQLMFLTIDVDDLMDFSSTWDIRATPTFFFLKNGQQIDKLVGANKPELEKKVQALGDGS

SEQ ID NO: 22421 - DNA, 396 bp, Hordeum bulbosum
  CDS (1)..(396)
atgggaggctgtgtgggcaaggaccgtagcattgtagaagataagcttgatttcaaaggtggaaatgtgcatgtcatcacaaccaaagaggactgggaccaaaaggttgcagaagcaaacaaggatgggaaaattgttgttgcaaacttcagtgcttcgtggtgtgggccatgccgcgtcattgcacctgtttatgctgagatgtccaagacttatcctcaactcatgttcttgacaattgatgttgatgacctaatggatttcggctcaacatgggacatccgcgcaacgccgacgtttttcttcctcaaaaacggccagcagatcgacaagctcgtcggcgccaacaaacctgagctcgagaagaaagtgcaagctcttggtgatggcagttga

SEQ ID NO: 22422 - protein, 131 aa, Hordeum bulbosum
MGGCVGKDRSIVEDKLDFKGGNVHVITTKEDWDQKVAEANKDGKIVVANFSASWCGPCRVIAPVYAEMSKTYPQLMFLTIDVDDLMDFGSTWDIRATPTFFFLKNGQQIDKLVGANKPELEKKVQALGDGS

SEQ ID NO: 22423 - DNA, 378 bp, Hevea brasiliensis
  CDS (1)..(378)
atggagacccaagagcagcaagctaagtcaagagtggtgaaggtggattcggtggagtcttgggacttctatgttacccaagccaataatcaaggctgccctattgttgtacactttactgcttcatggtgtatcccctctgtggccatgaacccttttttcgaggaattagcctcggcttatccagatgtcctgtttctagctgttgatgtcgatgaagtcaaggaggtggcttctaaactggaggtaaaggccatgcctacatttgtgctgatgaaggatggtgcacaaattgacaggctggtgggtgccaatccagaggagataaggaaaaggattggtgggtttgctcagtccattcgtgtggctgtagcctag

SEQ ID NO: 22424 - protein, 125 aa, Hevea brasiliensis
METQEQQAKSRVVKVDSVESWDFYVTQANNQGCPIVVHFTASWCIPSVAMNPFFEELASAYPDVLFLAVDVDEVKEVASKLEVKAMPTFVLMKDGAQIDRLVGANPEEIRKRIGGFAQSIRVAVA

SEQ ID NO: 22425 - DNA, 345 bp, Drosophila melanogaster
  CDS (1)..(345)
atgatgatattactcagagatagtactaatttacattttcatttgcaggccgatctcgatggacagctgaccaaggcatccggcaagctggtggtgctggatttcttcgccacttggtgtggaccctgcaagatgatctcgcccaaactggttgaactctccacgcagttcgccgacaacgtcgttgtcctgaaggtcgatgtggacgaatgcgaagacattgcaatggaatacaacatctccagcatgcccaccttcgtgttcctcaagaacggcgtcaaggtcgaagagttcgccggagccaacgccaagcgtctggaggatgtcatcaaggccaatatctaa

SEQ ID NO: 22426 - protein, 114 aa, Drosophila melanogaster
MMILLRDSTNLHFHLQADLDGQLTKASGKLVVLDFFATWCGPCKMISPKLVELSTQFADNVVVLKVDVDECEDIAMEYNISSMPTFVFLKNGVKVEEFAGANAKRLEDVIKANI

SEQ ID NO: 22427 - DNA, 321 bp, Coprinus comatus
  CDS (1)..(321)
atggtccaagttatatccaacctcgatgagttcaacaagctcaccaacagcgggaagatcatcatcattgatttctgggctacatggtgtggtccttgccgtgtcattagtcccatcttcgagaagttctcagaaaaatacggtgccaataacatcgtcttcgcaaaggtggatgtagacactgcctccgatatctctgaggaagcaaaaatccgtgctatgcccactttccaggtttataaggatggtcagaagatcgatgagctcgttggtgctaacccaactgcacttgagtcccttgtccagaagtctttagcgtga

SEQ ID NO: 22428 - protein, 106 aa, Coprinus comatus
MVQVISNLDEFNKLTNSGKIIIIDFWATWCGPCRVISPIFEKFSEKYGANNIVFAKVDVDTASDISEEAKIRAMPTFQVYKDGQKIDELVGANPTALESLVQKSLA

SEQ ID NO: 22429 - DNA, 333 bp, Emericella nidulans
  CDS (1)..(333)
atgggtgcctctgaacacgtcccccccattacctctaaggccgaattccaggagaaggtcctgaacgccaagggcttcgtcgtcgtcgactgcttcgcgacatggtgcggtccctgcaaggccattgcgcccaccgttgagaaattcgcccagacctacaccgacgcttcattctaccagattgatgttgacgagctctccgaggttgccgctgagctcggtattcgcgccatgcctactttccttctgttcaaggatggccagaaggttagcgatgtggttggtgccaaccccggtgcgctcgaggccggtatcaaggctctgcttgcttag

SEQ ID NO: 22430 - protein, 110 aa, Emericella nidulans
MGASEHVPPITSKAEFQEKVLNAKGFVVVDCFATWCGPCKAIAPTVEKFAQTYTDASFYQIDVDELSEVAAELGIRAMPTFLLFKDGQKVSDVVGANPGALEAGIKALLA

SEQ ID NO: 22431 - DNA, 312 bp, Saccharomyces cerevisiae
  CDS (1)..(312)
atggttactcaattcaaaactgccagcgaattcgactctgcaattgctcaagacaagctagttgtcgtagatttctacgccacttggtgcggtccatgtaaaatgattgctccaatgattgaaaaattctctgaacaatacccacaagctgatttctataaattggatgtcgatgaattgggtgatgttgcacaaaagaatgaagtttccgctatgccaactttgcttctattcaagaacggtaaggaagttgcaaaggttgttggtgccaacccagcggctattaagcaagccattgctgctaatgcttaa

SEQ ID NO: 22432 - protein, 103 aa, Saccharomyces cerevisiae
MVTQFKTASEFDSAIAQDKLVVVDFYATWCGPCKMIAPMIEKFSEQYPQADFYKLDVDELGDVAQKNEVSAMPTLLLFKNGKEVAKVVGANPAAIKQAIAANA

SEQ ID NO: 22433 - DNA, 315 bp, Saccharomyces cerevisiae
  CDS (1)..(315)
atggtcactcaattaaaatccgcttctgaatacgacagtgctttagcatctggcgacaagttagtcgttgttgacttttttgccacatggtgtgggccatgtaaaatgattgcaccaatgattgaaaagtttgcagaacaatattctgacgctgctttttacaagttggatgttgatgaagtctcagatgttgctcaaaaagctgaagtttcttccatgcctaccctaatcttctacaagggcggtaaggaggttaccagagtcgtcggtgccaacccagctgctatcaagcaagctattgcttccaacgtatag

SEQ ID NO: 22434 - protein, 104 aa, Saccharomyces cerevisiae
MVTQLKSASEYDSALASGDKLVVVDFFATWCGPCKMIAPMIEKFAEQYSDAAFYKLDVDEVSDVAQKAEVSSMPTLIFYKGGKEVTRVVGANPAAIKQAIASNV

SEQ ID NO: 22435 - DNA, 558 bp, Arabidopsis thaliana
  CDS (1)..(558)
atgcctctctctctccgacttgctccatctccgacgtctttccgttattctccgattacatctaccggcgccggaggattttcccccgtgaagcagcactgccggatcccgaattcgggcgtcgcgacgaaaattggattctgttctggtggtggtggtgttttagattccggtagaaggattggttcctgtgtggtgaggtgtagcttagaaacagtgaatgtcactgttggccaggtgacggaggttgataaggacacgttctggccaattgttaaagccgccggtgataagattgttgtcctcgacatgtacactcagtggtgtggtccttgcaaagtgattgctcccaaatacaaagagctatcggagaagtaccaggacatggtgtttcttaagcttgattgtaaccaagacaacaagccattggcgaaagagctaggaattagagtggttccaacttttaaaatcttgaaagacaacaaggtagtaaaggaagtgaccggggcaaaatatgaagacttacttgcagccattgaagcagcaaggtcaggctga

SEQ ID NO: 22436 - protein, 185 aa, Arabidopsis thaliana
MPLSLRLAPSPTSFRYSPITSTGAGGFSPVKQHCRIPNSGVATKIGFCSGGGGVLDSGRRIGSCVVRCSLETVNVTVGQVTEVDKDTFWPIVKAAGDKIVVLDMYTQWCGPCKVIAPKYKELSEKYQDMVFLKLDCNQDNKPLAKELGIRVVPTFKILKDNKVVKEVTGAKYEDLLAAIEAARSG

SEQ ID NO: 22437 - DNA, 549 bp, Brassica napus
  CDS (1)..(549)
atgcctctgtctctgcgtctcgctccatctcctacggctttatctccgaccaccggcggatttagtcctgcgaaaaagcagtgtcgtatcccttcttactccggcgtggcgacgacgacgaggaggattggtttgtgctcattggattatgtgaaaaggggagactcctctgtggtgaggtgtagcttacagaccgtgaatgtcagtgttggtcaagtgacggaagtggataaggataccttctggcccatcgttaaagccgccggtgaaaagattgtggtacttgacatgtacactcaatggtgtggtccatgtaaagtgattgctcccaagtacaaagctttatcagagaagtatgaggacgttgtgtttcttaagcttgactgcaaccctgaaaacaggccattggcaaaggagctagggataagagtggttccaacttttaaaatattgaaggataaccaagtggtgaaggaagttacgggtgccaaatatgatgatctggttgcagccattgaaacagctaggtctgctagttcttcgggatga

SEQ ID NO: 22438 - protein, 182 aa, Brassica napus
MPLSLRLAPSPTALSPTTGGFSPAKKQCRIPSYSGVATTTRRIGLCSLDYVKRGDSSVVRCSLQTVNVSVGQVTEVDKDTFWPIVKAAGEKIVVLDMYTQWCGPCKVIAPKYKALSEKYEDVVFLKLDCNPENRPLAKELGIRVVPTFKILKDNQVVKEVTGAKYDDLVAAIETARSASSSG

SEQ ID NO: 22439 - DNA, 345 bp, Arabidopsis thaliana
  CDS (1)..(345)
atggcttcggaagaaggacaagtgatcgcctgccacaccgttgagacatggaacgagcagcttcagaaggctaatgaatccaaaactcttgtggtggttgatttcacggcttcttggtgtggaccatgtcgtttcatcgctccattctttgctgatttggctaagaaacttcctaacgtgcttttcctcaaggttgatactgatgaattgaagtcggtggcaagtgattgggcgatacaggcgatgccaaccttcatgtttttgaaggaagggaagattttggacaaagttgttggagccaagaaagatgagcttcagtctaccattgccaaacacttggcttaa

SEQ ID NO: 22440 - protein, 114 aa, Arabidopsis thaliana
MASEEGQVIACHTVETWNEQLQKANESKTLVVVDFTASWCGPCRFIAPFFADLAKKLPNVLFLKVDTDELKSVASDWAIQAMPTFMFLKEGKILDKVVGAKKDELQSTIAKHLA

SEQ ID NO: 22441 - DNA, 372 bp, Brassica napus
  CDS (1)..(372)
atggccgcaacagcagaagtgatcccagcaggagaagtgatcgcttgccacaccgtcgaggactggaacaacaagttgaaggcagccaaagaatccaacaaactgattgtgatagacttcacagcagtgtggtgcccaccttgccgtttcattgcacctatctttgtcgagctcgctaagaagcaccttgatgttgtcttcttcaaggtcgacgtcgatgaattggctactgttgctcaggagttcgatgttcaggccatgccaacctttgtctacatgaaaggcgaagagaagctcgacaaggttgttggtgctgccaaggaggaaatcgaagccaagcttttgaagcactctcaagttgctgccgcttga

SEQ ID NO: 22442 - protein, 123 aa, Brassica napus
MAATAEVIPAGEVIACHTVEDWNNKLKAAKESNKLIVIDFTAVWCPPCRFIAPIFVELAKKHLDVVFFKVDVDELATVAQEFDVQAMPTFVYMKGEEKLDKVVGAAKEEIEAKLLKHSQVAAA

SEQ ID NO: 22443 - DNA, 381 bp, Nicotiana tabacum
  CDS (1)..(381)
atggctgctaacgatgctacttcatccgaggagggacaagtgttcggctgccacaaggttgaggaatggaacgagtacttcaagaaaggcgttgagactaagaaactggtggtggtcgattttactgcttcatggtgcggcccttgccgttttattgccccaattcttgctgacattgctaagaagatgccccatgttatattcctcaaggttgatgttgatgaactgaagactgtttcagcggaatggagtgtggaggcaatgccaacttttgtcttcattaaagatggaaaagaagtggacagagttgttggtgccaagaaagaggagttgcagcagaccatagtgaagcatgctgctcctgctactgtcactgcttga

SEQ ID NO: 22444 - protein, 126 aa, Nicotiana tabacum
MAANDATSSEEGQVFGCHKVEEWNEYFKKGVETKKLVVVDFTASWCGPCRFIAPILADIAKKMPHVIFLKVDVDELKTVSAEWSVEAMPTFVFIKDGKEVDRVVGAKKEELQQTIVKHAAPATVTA

SEQ ID NO: 22445 - DNA, 402 bp, Arabidopsis thaliana
  CDS (1)..(402)
atgggaggagctttatcaactgtgtttggaagtggagaagatgcaacagctgcagggaccgaatctgagccaagtcgcgtcctaaagtttagctcttccgctcggtggcaacttcatttcaacgagatcaaagaatcaaacaaactgctggtggttgatttctcggcctcatggtgcggaccatgtaggatgattgagcctgcgattcatgccatggctgataagttcaatgatgttgatttcgtcaaattagatgttgatgaacttcctgatgtggctaaagagtttaatgtgacggcaatgcctacctttgtgctggtgaaaaggggtaaagaaattgaaagaatcattggtgccaaaaaggacgaacttgagaagaaagttagcaaactcagagcataa

SEQ ID NO: 22446 - protein, 133 aa, Arabidopsis thaliana
MGGALSTVFGSGEDATAAGTESEPSRVLKFSSSARWQLHFNEIKESNKLLVVDFSASWCGPCRMIEPAIHAMADKFNDVDFVKLDVDELPDVAKEFNVTAMPTFVLVKRGKEIERIIGAKKDELEKKVSKLRA

SEQ ID NO: 22447 - DNA, 360 bp, Brassica napus
  CDS (1)..(360)
atggctgcagaagagggacaagtgatcggttgccacgagattgatgtatgggccgtgcagctcgacacagccaaacaatccaacaagctgattgtgatagatttcactgcttcatggtgcccaccatgccgcatgattgctccagttttcgcagatctggccaagaagttcatgtcaagtgccatcttcttcaaggtggacgtcgatgaactgcagaatgtagctcaagagtttggtgtggaggcaatgccgacctttgttctcatcaaagacggaaatgttgttgataaggtcgttggtgcaaggaaggaagatcttcatgccacaatagccaagcatactggtgttgctactgcttaa

SEQ ID NO: 22448 - protein, 119 aa, Brassica napus
MAAEEGQVIGCHEIDVWAVQLDTAKQSNKLIVIDFTASWCPPCRMIAPVFADLAKKFMSSAIFFKVDVDELQNVAQEFGVEAMPTFVLIKDGNVVDKVVGARKEDLHATIAKHTGVATA

SEQ ID NO: 22449 - DNA, 357 bp, Nicotiana tabacum
  CDS (1)..(357)
atggcagaggaaggacaagtcatcggcgtccacacggttgatgcatggaacgagcatctccaaaagggaattgatgacaaaaaactgatagttgtggacttcactgcttcttggtgcggtccctgtaagttcattgcctcattctatgcagagttggccaagaagatgcccactgttaccttcctgaaagtggatgtggatgaattgaagtcggtagctactgactgggctgtggaggcaatgccaactttcatgttcctcaaggagggaaagattgttgataaggtggtaggagccaaaaaagatgagctgcagcagaccattgccaagcacatcagtagtacctcaacagcctaa

SEQ ID NO: 22450 - protein, 118 aa, Nicotiana tabacum
MAEEGQVIGVHTVDAWNEHLQKGIDDKKLIVVDFTASWCGPCKFIASFYAELAKKMPTVTFLKVDVDELKSVATDWAVEAMPTFMFLKEGKIVDKVVGAKKDELQQTIAKHISSTSTA

SEQ ID NO: 22451 - DNA, 357 bp, Arabidopsis thaliana
  CDS (1)..(357)
atggccgcagaaggagaagttatcgcttgccacaccgttgaagattggaccgagaagctcaaagccgccaacgaatccaagaaactgattgtgatagacttcactgcaacatggtgcccaccttgccgtttcattgcacccgtctttgctgacttagccaagaagcacctcgacgtagtcttcttcaaggtcgatgttgacgaattgaacactgttgctgaggagtttaaagttcaggcaatgccaacgtttatcttcatgaaagaaggagagatcaaggagactgtggttggtgctgctaaagaagaaatcattgccaatctcgagaagcacaagacagttgttgctgctgcttga

SEQ ID NO: 22452 - protein, 118 aa, Arabidopsis thaliana
MAAEGEVIACHTVEDWTEKLKAANESKKLIVIDFTATWCPPCRFIAPVFADLAKKHLDVVFFKVDVDELNTVAEEFKVQAMPTFIFMKEGEIKETVVGAAKEEIIANLEKHKTVVAAA

SEQ ID NO: 22453 - DNA, 360 bp, Arabidopsis thaliana
  CDS (1)..(360)
atggcggcagaagagggtcaagtgattggttgtcacacgaacgatgtatggactgtgcaacttgataaagccaaagaatccaacaagctgattgtgattgatttcactgcttcatggtgtccaccatgccgcatgattgctccaattttcaacgatttggccaagaagttcatgtcaagtgccatcttcttcaaggtggatgttgatgaacttcagagtgttgctaaagagtttggtgtggaggcaatgccaacctttgtgttcattaaagccggcgaagttgtggataagctcgttggtgcgaataaagaagatcttcaggcgaaaatagtgaagcatactggtgttacaactgcgtaa

SEQ ID NO: 22454 - protein, 119 aa, Arabidopsis thaliana
MAAEEGQVIGCHTNDVWTVQLDKAKESNKLIVIDFTASWCPPCRMIAPIFNDLAKKFMSSAIFFKVDVDELQSVAKEFGVEAMPTFVFIKAGEVVDKLVGANKEDLQAKIVKHTGVTTA

SEQ ID NO: 22455 - DNA, 357 bp, Arabidopsis thaliana
  CDS (1)..(357)
atggccggtgaaggagaagtgattgcttgccataccctcgaagtttggaacgagaaggtcaaagacgccaatgaatccaagaaactgattgtgatagacttcacagcatcatggtgtccaccttgccgtttcattgcaccagtgtttgcagagatggctaagaagttcactaatgttgtcttcttcaagatcgatgttgatgaattgcaagctgttgctcaggaattcaaagttgaggcaatgcctacttttgttttcatgaaagaaggcaacatcattgatcgtgttgtcggtgctgcgaaagatgagatcaatgagaagctgatgaagcatggtggtcttgtagcttctgcttga

SEQ ID NO: 22456 - protein, 118 aa, Arabidopsis thaliana
MAGEGEVIACHTLEVWNEKVKDANESKKLIVIDFTASWCPPCRFIAPVFAEMAKKFTNVVFFKIDVDELQAVAQEFKVEAMPTFVFMKEGNIIDRVVGAAKDEINEKLMKHGGLVASA

SEQ ID NO: 22457 - DNA, 372 bp, Brassica rapa
  CDS (1)..(372)
atggccgcaacagcagaattgatcccagcaggagaagtgatcgcttgccacaccgtcgaggactggaacaacaagctcaaggcagccaaagaatccaacaaactgattgtgatagacttcacagcagtgtggtgcccaccttgccgtttcattgcacccatctttgtcgagctcgctaagaagcaccttgatgttgtcttcttcaaggtcgacgtcgatgaattggccactgttgctaaggagttcgatgttcaggccatgccgacctttgtctacatgaaaggcgaagagaagctcgacaaggttgttggtgctgcgaaggaggaaatcgaagccaagcttttgaagcactctcaagttgctgccgcttga

SEQ ID NO: 22458 - protein, 123 aa, Brassica rapa
MAATAELIPAGEVIACHTVEDWNNKLKAAKESNKLIVIDFTAVWCPPCRFIAPIFVELAKKHLDVVFFKVDVDELATVAKEFDVQAMPTFVYMKGEEKLDKVVGAAKEEIEAKLLKHSQVAAA

SEQ ID NO: 22459 - DNA, 342 bp, Chlamydomonas reinhardtii
  CDS (1)..(342)
atgggcggttctgttattgtgatcgactccaaggcggcttgggacgctcagctggccaagggcaaggaggagcacaagccgattgttgtcgacttcactgctacgtggtgcggtccttgcaagatgattgcgccgctgtttgagacgctgagcaacgactatgctggcaaggtcatcttcctgaaggtcgatgttgacgccgtcgcggctgttgccgaggctgccggcatcaccgccatgcccaccttccatgtgtacaaggatggcgtgaaggcggacgacctagtgggcgccagccaggacaagctcaaggccctggtcgccaagcacgccgccgcgtaa

SEQ ID NO: 22460 - protein, 113 aa, Chlamydomonas reinhardtii
MGGSVIVIDSKAAWDAQLAKGKEEHKPIVVDFTATWCGPCKMIAPLFETLSNDYAGKVIFLKVDVDAVAAVAEAAGITAMPTFHVYKDGVKADDLVGASQDKLKALVAKHAAA

SEQ ID NO: 22461 - DNA, 351 bp, Fagopyrum esculentum
  CDS (1)..(351)
atggcggaagaagcacaagttatcgcatgccacacggtccaggagtggaacgagaagttccagaaagccaaggattccggcaaattgattgtgatcgatttcaccgcatcatggtgcggtccctgccgcgtcataactccgtacgtgtctgagcttgccaagaagtttcctcatgtggccttcttcaaagtggatgttgatgatttgaaggatgtcgctgaggaatacaaggtggaggcaatgccgagctttgttatactgaaagaggggcaggaggttgaaaggattgtgggtgccaggaaggacgaactccttcataagatagcagttcatgccccaatcactgcttga

SEQ ID NO: 22462 - protein, 116 aa, Fagopyrum esculentum
MAEEAQVIACHTVQEWNEKFQKAKDSGKLIVIDFTASWCGPCRVITPYVSELAKKFPHVAFFKVDVDDLKDVAEEYKVEAMPSFVILKEGQEVERIVGARKDELLHKIAVHAPITA

SEQ ID NO: 22463 - DNA, 369 bp, Oryza sativa
  CDS (1)..(369)
atggccgccgaggagggagtcgtgatcgcctgccacaacaaggacgagttcgacgcccagatgaccaaggccaaggaggccggcaaagtggtcataattgacttcactgcttcctggtgtggcccttgccgcttcatcgccccagtgttcgctgaatacgccaaaaagttccctggtgctgtcttcctgaaggttgatgttgatgagctgaaggaagttgctgaaaagtacaatgtcgaggcaatgccgaccttcctattcatcaaggatggtgctgaggctgacaaggtcgttggcgccaggaaggatgacctccagaacaccatcgtgaagcacgtcggtgccactgctgcatctgcttctgcctaa

SEQ ID NO: 22464 - protein, 122 aa, Oryza sativa
MAAEEGVVIACHNKDEFDAQMTKAKEAGKVVIIDFTASWCGPCRFIAPVFAEYAKKFPGAVFLKVDVDELKEVAEKYNVEAMPTFLFIKDGAEADKVVGARKDDLQNTIVKHVGATAASASA

SEQ ID NO: 22465 - DNA, 357 bp, Ricinus communis
  CDS (1)..(357)
atggcagcagaagaagggcaagtgatcgggtgccacactgttgaggcatggaatgagcaattgcagaagggaaatgataccaagggactgatcgttgttgattttactgcttcatggtgtggaccatgccgtttcattgctcccttcttggctgagctggccaagaaactgccaaatgttaccttcctgaaggtggatgtggatgaactgaagactgttgctcacgagtgggctgtggagtcaatgccaacctttatgttcctgaaggaggggaagattatggacaaggtggttggagcaaagaaagacgaactgcagcaaactatagcgaaacacatggctactgcttccacttaa

SEQ ID NO: 22466 - protein, 118 aa, Ricinus communis
MAAEEGQVIGCHTVEAWNEQLQKGNDTKGLIVVDFTASWCGPCRFIAPFLAELAKKLPNVTFLKVDVDELKTVAHEWAVESMPTFMFLKEGKIMDKVVGAKKDELQQTIAKHMATAST

SEQ ID NO: 22467 - DNA, 384 bp, Triticum aestivum
  CDS (1)..(384)
atggcggcgtcggcggcgacggcgacggcgacggcggcggcggtaggggcgggggaggtgatctccgtccacagcctggagcagtggaccatgcagatcgaggaggccaacgccgccaagaagctggtggtgattgacttcactgcatcatggtgcggaccatgccgcattatggctccaattttcgctgatctcgccaagaagttcccagctgctgttttcctcaaggtcgacgttgatgaactgaagcccattgctgagcaattcagcgtggaggccatgccaaccttcctgttcatgaaggaaggagatgtcaaggacagggttgtcggagctatcaaggaggaactgacgaccaaggttgggctacacgcggcccagtaa

SEQ ID NO: 22468 - protein, 127 aa, Triticum aestivum
MAASAATATATAAAVGAGEVISVHSLEQWTMQIEEANAAKKLVVIDFTASWCGPCRIMAPIFADLAKKFPAAVFLKVDVDELKPIAEQFSVEAMPTFLFMKEGDVKDRVVGAIKEELTTKVGLHAAQ

SEQ ID NO: 22469 - DNA, 357 bp, Arabidopsis thaliana
  CDS (1)..(357)
atggcaagagttgttaaaatcgattctgcagagtcatggaatttctatgtgagtcaagccaagaatcagaattgtcccattgtggctcatttcactgcattatggtgtattccttctgtgtttatgaactccttcttcgaagagcttgcgtttaactataaggatgctctgtttctaatagttgatgttgatgaagttaaggaagtggcaagtcaactagaggtaaaggcgatgccaactttcttgttcttgaaggatggtaatgcgatggacaaactcgtgggcgccaaccctgatgagattaagaaacgggtcgatggtttcgttcagtcctcacgtgttgttcatattgcttaa

SEQ ID NO: 22470 - protein, 118 aa, Arabidopsis thaliana
MARVVKIDSAESWNFYVSQAKNQNCPIVAHFTALWCIPSVFMNSFFEELAFNYKDALFLIVDVDEVKEVASQLEVKAMPTFLFLKDGNAMDKLVGANPDEIKKRVDGFVQSSRVVHIA

SEQ ID NO: 22471 - DNA, 396 bp, Oryza sativa
  CDS (1)..(396)
atggggtcctgtgtgggaaaggaacgcagtgatgaagaagacaagattgacttcaaaggtggcaatgtgcatgtgattagtaacaaagagaattgggaccacaaaattgcagaggcaaacaaggatgggaaaattgtgattgcaaatttcagtgctgcatggtgtggaccatgccgtgtcattgcacctgtatatgctgagatgtcacagacatacccccagttcatgttcttgactatagatgtcgacgagttaatggacttcagctcatcatgggacatccgagcgacaccgacgttcttcttcctaaagaacggggagcaggtggacaagctcgtcggcgccaacaagccggagctggagaagaaagtggccgcgcttgctgacagcgcctga

SEQ ID NO: 22472 - protein, 131 aa, Oryza sativa
MGSCVGKERSDEEDKIDFKGGNVHVISNKENWDHKIAEANKDGKIVIANFSAAWCGPCRVIAPVYAEMSQTYPQFMFLTIDVDELMDFSSSWDIRATPTFFFLKNGEQVDKLVGANKPELEKKVAALADSA

SEQ ID NO: 22473 - DNA, 405 bp, Oryza sativa
  CDS (1)..(405)
atgggctccttcttctcgacgatgttcacgccgccgcccgccgccgacgacggcggcgactcgcgcgtggtggccgtccactccacggccacctgggacgagcagtggggcgcccacaagagcaaccccaacaagctgatcgtgatcgacttctccgccacctggtgcgggccctgccgcttcatcgagccggccttcaaggacatggccggacgcttcgccgacgccgtcttcttcaagatcgatgtcgacgaactttcggaagtggcgaggcaatggaaagtggaggccatgccgacctttgtgttaatcaagggcgggaaggaggttagtcgcgtggttggtgctaagaaggatgaactggagaggaaagtcaacatgttcatttcatcctcctcatcctaa

SEQ ID NO: 22474 - protein, 134 aa, Oryza sativa
MGSFFSTMFTPPPAADDGGDSRVVAVHSTATWDEQWGAHKSNPNKLIVIDFSATWCGPCRFIEPAFKDMAGRFADAVFFKIDVDELSEVARQWKVEAMPTFVLIKGGKEVSRVVGAKKDELERKVNMFISSSSS

SEQ ID NO: 22475 - DNA, 399 bp, Oryza sativa
  CDS (1)..(399)
atgggaggttgtgtgggcaagggacgacgacatattgaggaagacaagcttgatttcaaaggtggaaatgttcatgtcataacaagcaaagaggactgggataggaagattgaagaagcaaacaaggatgggaaaattgttgtggcaaatttcagtgcttcctggtgtggaccatgtcgtgttattgcacctatttatgctgagatgtcaaagacttatcctcaactcatgttcttgacaatagatgttgatgacctaatggatttcagctcatcatgggatatccgcgcaacgccgacctttttcttcataaaaaacgagaagcaggtcgacaagcttgtgggcgccaacaaacctgagctcgaaaagaaggttcaggcacttgctgatggcagctga

SEQ ID NO: 22476 - protein, 132 aa, Oryza sativa
MGGCVGKGRRHIEEDKLDFKGGNVHVITSKEDWDRKIEEANKDGKIVVANFSASWCGPCRVIAPIYAEMSKTYPQLMFLTIDVDDLMDFSSSWDIRATPTFFFIKNEKQVDKLVGANKPELEKKVQALADGS

SEQ ID NO: 22477 - DNA, 408 bp, Oryza sativa
  CDS (1)..(408)
atgggttgctgtggcagcagcactgtagacgccgaggagcacctggactacagtggcggaaatgtgactttggtaactgatcaaaagaattgggacaatacaatggaagaagtagctgagcatggcaaaacagttgtgctaaaattcagtgcaatttggtgcactccgtgtaggaatgctgcccctctattcgctgaactttcactgaagtatcctgacattgttttcgtgtccgtggatgtagacgaaatgccggagctggtgacgcaatacgatgtgcgtgcaaccccaacgttcatcttcatgaaaaacaatgaggagattgataagcttgttggaggcaaccatgaagatcttcaggaaaagttcgaacagcttaaccggccaaagttatatgatgatgtataa

SEQ ID NO: 22478 - protein, 135 aa, Oryza sativa
MGCCGSSTVDAEEHLDYSGGNVTLVTDQKNWDNTMEEVAEHGKTVVLKFSAIWCTPCRNAAPLFAELSLKYPDIVFVSVDVDEMPELVTQYDVRATPTFIFMKNNEEIDKLVGGNHEDLQEKFEQLNRPKLYDDV

SEQ ID NO: 22479 - DNA, 417 bp, Oryza sativa
  CDS (1)..(417)
atgggcggcgccttctcgacgtcgaagccgaagcccgccgccggcgaggagggcggcgagtccgccgtggtggccgtccactccaaggccaagtgggacgagctgtgggacgcccacaagaacaccacaaagctggtggtgatagacttctcggcgtcgtggtgtgggccgtgcaagatgatggagccggtgttcaaggagatggccggccgcttcaccgacgtcgccttcctcaaggtcgacgtcgacgagctcgcggaggtggcgcggacctggcgggtggaggcgatgccgacgttcgtgctggcgaggggcggcgaggaggtcggccgcatcgtcggcgccgacaaggacgagctcgagaagaccatcaacacgctcaggtcatcgtcgtcgtcgacggcgacgacgacgtga

SEQ ID NO: 22480 - protein, 138 aa, Oryza sativa
MGGAFSTSKPKPAAGEEGGESAVVAVHSKAKWDELWDAHKNTTKLVVIDFSASWCGPCKMMEPVFKEMAGRFTDVAFLKVDVDELAEVARTWRVEAMPTFVLARGGEEVGRIVGADKDELEKTINTLRSSSSSTATTT

SEQ ID NO: 22481 - DNA, 423 bp, Brassica napus
  CDS (1)..(423)
atgggaagctgtgtctctaagggcaaagaagacgatgattcaatccataacgttgatttttccggtggcaacgttcatctcatcacaactaaagaaagctgggatgagaaactagccgaagctggccgtgatggcaaaattgtgattgcaaacttcagcgcgacatggtgtgggccttgtaaggtcgtggcaccgttcttcatcgagctctcagagaaacatccttctatcatgttccttcttgtagatgttgatgaactcagcgattttagctcatcatgggacataaaggcaacaccaaccttcttctttcttaaaaacggtcagcaaataggcaagcttgttggtgctaacaagcctgagctacagaagaaggttacttccatccttgactctgtacctgagagtccacaacggccttga

SEQ ID NO: 22482 - protein, 140 aa, Brassica napus
MGSCVSKGKEDDDSIHNVDFSGGNVHLITTKESWDEKLAEAGRDGKIVIANFSATWCGPCKVVAPFFIELSEKHPSIMFLLVDVDELSDFSSSWDIKATPTFFFLKNGQQIGKLVGANKPELQKKVTSILDSVPESPQRP

SEQ ID NO: 22483 - DNA, 381 bp, Brassica napus
  CDS (1)..(381)
atggaagatcaagaactgcagaagagttcaagagttgttaaagtcgattctcctgagtcatggaacttttatgtgagtcaagccaagagtcaggcttgtcctattgtggctcatttcacagcatcttggtgtattccttctgtgtttatgaactcgttctttgaagatcttgcctctagctataaggatgctctgtttcttatagttgatgttgatgaagtcaaggaagtggcgagacggctaaaggtaaaggctatgcctacttttatgttcttgaaggatggtaatacgatggacaaactggtgggcgcaaatcctgatgagatcaagaaaagggtcgatggtttcgttcagtcctcacgccttgttcatattgcttag

SEQ ID NO: 22484 - protein, 126 aa, Brassica napus
MEDQELQKSSRVVKVDSPESWNFYVSQAKSQACPIVAHFTASWCIPSVFMNSFFEDLASSYKDALFLIVDVDEVKEVARRLKVKAMPTFMFLKDGNTMDKLVGANPDEIKKRVDGFVQSSRLVHIA

SEQ ID NO: 22485 - DNA, 456 bp, Brassica napus
  CDS (1)..(456)
atgggtgctaatgtttcttcgccagaccagaggtattcagtgacggccgacctcccttccaggaggccatggacacctcgcttcgagtcccatatttctccttacaaagtcaacatcccccttattgtggaaatcaagaacaagaatcagtggaaatctcggctcaacagtctcaaggacaccaacaagctgcttgtgatcgagttcacggccaaatggtgtggaccttgtaaatcccttgagccgaaggttgaagagttggcggctaagtacacagatgttgaattcgtgaagattgatgtcgatgtgttaatgagtgtgtggatggagtacaaccttcatactttgcctgcgattgtattcatgaagagaggccaagaagtagacagagttgtgggtgtgaagtttgatgaattagagaggaaactccacaaatacgcacaatccttcttttga

SEQ ID NO: 22486 - protein, 151 aa, Brassica napus
MGANVSSPDQRYSVTADLPSRRPWTPRFESHISPYKVNIPLIVEIKNKNQWKSRLNSLKDTNKLLVIEFTAKWCGPCKSLEPKVEELAAKYTDVEFVKIDVDVLMSVWMEYNLHTLPAIVFMKRGQEVDRVVGVKFDELERKLHKYAQSFF

SEQ ID NO: 22487 - DNA, 402 bp, Brassica napus
  CDS (1)..(402)
atgggaggtgtattatcatctgtgttaggaggtggtggtggagatgaagcagtcgcggggaatgattccgaaagccgcgtcatgaagtttagctcatcggctcggtggcagcttcacttcaacgagatcaaagaatcctcgaaactgctggtggttgacttctcagcatcctggtgtggaccttgtaggatgatcgagcctgcgttcatcgccatggctgccaagttcactgatgttgaattcgtcaaattggatgtcgatgaacttcccgatgtggctaaagagttcaatgtgacggggatgccaacttttgtgctggtgaaaaatggtaaagagattgaaaggatcgttggagcaaggaaagatgaactcgagaagaaagttctcaaacacagggcatag

SEQ ID NO: 22488 - protein, 133 aa, Brassica napus
MGGVLSSVLGGGGGDEAVAGNDSESRVMKFSSSARWQLHFNEIKESSKLLVVDFSASWCGPCRMIEPAFIAMAAKFTDVEFVKLDVDELPDVAKEFNVTGMPTFVLVKNGKEIERIVGARKDELEKKVLKHRA

SEQ ID NO: 22489 - DNA, 360 bp, Triticum aestivum
  CDS (1)..(360)
atggcggaggaggggaaggtgatcgcgatccacagccaggagcagtgggccgccaagatcgaggaggctggcagcagcacgaagctggtggtgatcgacttcactgcaacatggtgcggaccatgccgcttcatttctccaatcttagatgagattgccaagaagcttccaaatgttcttttcctcaaggtggatgttgatgaaatgaagtcaattgccgaggagttcagtgtcgaggccatgccgacgtttgtgcttatgaaggaaggaaaggtcgtggacaaggttgtgggagctgccaaggaggagctgattgggaagattgcgaagcacagtgcaactgcatgcatagtggagtag

SEQ ID NO: 22490 - protein, 119 aa, Triticum aestivum
MAEEGKVIAIHSQEQWAAKIEEAGSSTKLVVIDFTATWCGPCRFISPILDEIAKKLPNVLFLKVDVDEMKSIAEEFSVEAMPTFVLMKEGKVVDKVVGAAKEELIGKIAKHSATACIVE

SEQ ID NO: 22491 - DNA, 432 bp, Zea mays
  CDS (1)..(432)
atgggactgaggcgtctgatgagatgctgctgctgcattgcaaagcacgcggacgacggcgacaagatcgatttcggaggtggcaatgttcacgttgtcacaagcaaagaggactgggaccaaagaattgcggaggcaaacaaggatgggaaaaccgtggttgcaaacttcagcgcttcctggtgtgggccgtgccgtgtcatcgcacctgtctacgccgaaatgtcgcagacgtacccccagctcatgttcctgacgatcgatgttgatgacttgatggagttcagctcgtcgtgggacatccgcgcgacaccgacgttcttcttcctcaagaacgagcagcaggtggacaagctggtcggcgccaacaagcctgagctggagaagaaagtggccgccgtcgccgacgcggccggcagcaaggcagtgtag

SEQ ID NO: 22492 - protein, 143 aa, Zea mays
MGLRRLMRCCCCIAKHADDGDKIDFGGGNVHVVTSKEDWDQRIAEANKDGKTVVANFSASWCGPCRVIAPVYAEMSQTYPQLMFLTIDVDDLMEFSSSWDIRATPTFFFLKNEQQVDKLVGANKPELEKKVAAVADAAGSKAV

SEQ ID NO: 22493 - DNA, 372 bp, Brassica napus
  CDS (1)..(372)
atggccgcaacagcagaagtgatcccagcaggagaagtgatcgcttgccacaccgtcgatgactggaacaacaagttcaaggccgccaaagaatccaacaagctgattgtgatagacttcacagcaacatggtgcccaccttgccgtttcattgcacccatcttcgtcgagttggctaagaagcaccttgatgtcgttttcttcaaggtcgatgtcgatgaattgaattctgttgctaaggatttcgaagttgaggccatgccgacctttgtctacatgaagggtgaagagaaggtcgacaaggtggtcggtgctgcgaaagatgaaatcgtagccaagcttgagaagcactctcaagttgcttcggcttga

SEQ ID NO: 22494 - protein, 123 aa, Brassica napus
MAATAEVIPAGEVIACHTVDDWNNKFKAAKESNKLIVIDFTATWCPPCRFIAPIFVELAKKHLDVVFFKVDVDELNSVAKDFEVEAMPTFVYMKGEEKVDKVVGAAKDEIVAKLEKHSQVASA

SEQ ID NO: 22495 - DNA, 456 bp, Brassica napus
  CDS (1)..(456)
atgatgactcaaagtgaaagtgtcaataagaaagcaattattcaattaaaagtatcaaaatcaaagagagagagagagaaaacaatggccgcaacagcagaagtgatcccagcaggagaagtgatcgcttgccacaccgtcgaggactggaacaacaagttgaaggcagccaaagaatccaacaaactgattgtgatagacttcacagcagtgtggtgcccaccttgccgtttcattgcacccatctttgtcgagctcgctaagaagcaccttgatgttgtcttcttcaaggtcgacgtcgatgaattggctactgttgctcaggagttcgatgttcaggccatgccaacctttgtctacatgaaaggcgaagagaagctcgacaaggttgttggtgctgccaaggaggaaatcgaagccaagcttttgaagcactctcaagttgctgccgcttga

SEQ ID NO: 22496 - protein, 151 aa, Brassica napus
MMTQSESVNKKAIIQLKVSKSKREREKTMAATAEVIPAGEVIACHTVEDWNNKLKAAKESNKLIVIDFTAVWCPPCRFIAPIFVELAKKHLDVVFFKVDVDELATVAQEFDVQAMPTFVYMKGEEKLDKVVGAAKEEIEAKLLKHSQVAAA

SEQ ID NO: 22497 - DNA, 354 bp, Brassica napus
  CDS (1)..(354)
atggccggagaaggagaagtgatcgcttgccacaccatcgaagtctggaacgagaagatcaaagccgccaacgaatccaagaaactgatcgtgatagacttcactgctacatggtgcccaccttgccgcttcattgcaccagtcttcgtagacatggccaagaagttcctcaacgtcgtcttcttcaagatcgacgtggacgaactgcaatccgttgctaaagaattcaaagtcgaggcaatgcccacttttctcttcatgagagaaggtgagatcgtggaccgtgttgtcggtgcaaggaaggaggaaatccatcagacattgatgaagcacggtggtgttgcttctgcttaa

SEQ ID NO: 22498 - protein, 117 aa, Brassica napus
MAGEGEVIACHTIEVWNEKIKAANESKKLIVIDFTATWCPPCRFIAPVFVDMAKKFLNVVFFKIDVDELQSVAKEFKVEAMPTFLFMREGEIVDRVVGARKEEIHQTLMKHGGVASA

SEQ ID NO: 22499 - DNA, 546 bp, Brassica napus
  CDS (1)..(546)
atgcctctgtctctgcgtctcgctccatctccgactgctttagctccgacaaccggcggatttagtcctgcgagaaagcagtgtcgtatcccttactccggcgtggcgacgacaacgacgaggattggtttttgctcattggattatgtgaaaaggggagactcctctgtggtgaggtgtagcttagagaccgtgaatgtcagtgttggtcaagtgacggaagtggataaggataccttctggcccatcgttaaagccgccggtgaaaagattgtggtacttgacatgtacactcaatggtgtggtccatgcaaagtgattgctcctaaatacaaagctttatcggagaagtatgatgacgttgtgtttctaaagcttgactgcaacccagaaaacaggccattggcaaaggagctaggaataagagtggttccaacttttaaaatattgaaggataaccaagtggtgaaggaagttacgggtgccaaatatgatgatctggttgcagccattgaaacagcaaggtctgctagttcttcgggatga

SEQ ID NO: 22500 - protein, 181 aa, Brassica napus
MPLSLRLAPSPTALAPTTGGFSPARKQCRIPYSGVATTTTRIGFCSLDYVKRGDSSVVRCSLETVNVSVGQVTEVDKDTFWPIVKAAGEKIVVLDMYTQWCGPCKVIAPKYKALSEKYDDVVFLKLDCNPENRPLAKELGIRVVPTFKILKDNQVVKEVTGAKYDDLVAAIETARSASSSG

SEQ ID NO: 22501 - DNA, 540 bp, Brassica napus
  CDS (1)..(540)
atgcctctctctctccgtctcgctccatatcctacggctttagcttcaaccaccggtggatatggtcccgtgaagaagcagtgccgcatcccttactccggcgtcgccaccacgaggattggtttcttctcactggattatggaaaaagggtagaatcctctgtggtgaggtgtagcttagagacagtgaatgtaaatgttggtcaagtgaaggaagtggataaggacaccttctggcccatcgttaaagccgccggtgaaaagattattgtacttgacatgtacactcaatggtgtggaccatgtaaagtgattgctcccaagtacaaagctttatcagagaagtatgaggacgttgtgtttcttaagcttgactgcaaccctgaaaacaggccattggcaaaggagctaggaataagagtggttccaacttttaaaatattgaaggataaccaagtggtgaaggaagttacgggtgccaaatatgatgatctggttgcagccattgaaacagcgaggtctgctagttcttcgggatga

SEQ ID NO: 22502 - protein, 179 aa, Brassica napus
MPLSLRLAPYPTALASTTGGYGPVKKQCRIPYSGVATTRIGFFSLDYGKRVESSVVRCSLETVNVNVGQVKEVDKDTFWPIVKAAGEKIIVLDMYTQWCGPCKVIAPKYKALSEKYEDVVFLKLDCNPENRPLAKELGIRVVPTFKILKDNQVVKEVTGAKYDDLVAAIETARSASSSG

SEQ ID NO: 22503 - DNA, 423 bp, Brassica napus
  CDS (1)..(423)
atgggaagctgcgtctctaaggacacaggagacgatgattcggttcataacgttgatttctccggcggcaatgttcatctgatcacaacaaaagagagctgggatgagaaattagctgaagctggtcgcgatggcaaaatcgtgattgcaaacttcagcgcgacatggtgcggtccatgtaagattgtggcaccgttttacgtggagctctctgagaaacatccttctcttatgttccttctcgtagatgttgatgaacttagtgattttagctcaacatgggacataaaggcaacaccaaccttcttctttctaaagaacggggagcaaataggcaagcttgttggagctaacaagcctgagctacagaagaaggttacttctatcatcgactctgttcctgaaagtccacaacggccttga

SEQ ID NO: 22504 - protein, 140 aa, Brassica napus
MGSCVSKDTGDDDSVHNVDFSGGNVHLITTKESWDEKLAEAGRDGKIVIANFSATWCGPCKIVAPFYVELSEKHPSLMFLLVDVDELSDFSSTWDIKATPTFFFLKNGEQIGKLVGANKPELQKKVTSIIDSVPESPQRP

SEQ ID NO: 22505 - DNA, 564 bp, Brassica napus
  CDS (1)..(564)
atgactctctccctccgaatcgctccgtcaccggtatctctccgttactctccggctccgtccaccccctccggcggaggatttcgtccggcgaagcagcgctgccggatcccgaactcgggcgtcgcggcgaaaacaggatcctgttctggcgttggtggtgttttagatttaaggaagaggatcggcggttcctgtgtggcgaggtgtagcttacaaacggtgaatgtcagtgtcggcgaggtgactgaggttgacaaggacacgttttggccagttgtcaaagccgctggtgataagcttgttgtcctcgacatgtacactcagtggtgtggtccatgcaaagttatggctcctaaatacaaagagctatcagagaagtaccaggacatggtgtttcttaagcttgactgcaacgaagaaaacaagccagtggcacaggagctaggaattagagtggttccaacctttaagatcttgaaggacaacaaggtgataaaggaagtggtcggggcaaaatttgatgagttgcttgcagccattgaggcagcgaggtcaggctga

SEQ ID NO: 22506 - protein, 187 aa, Brassica napus
MTLSLRIAPSPVSLRYSPAPSTPSGGGFRPAKQRCRIPNSGVAAKTGSCSGVGGVLDLRKRIGGSCVARCSLQTVNVSVGEVTEVDKDTFWPVVKAAGDKLVVLDMYTQWCGPCKVMAPKYKELSEKYQDMVFLKLDCNEENKPVAQELGIRVVPTFKILKDNKVIKEVVGAKFDELLAAIEAARSG

SEQ ID NO: 22507 - DNA, 387 bp, Brassica napus
  CDS (1)..(387)
atgggttccaacgtttcatctgtgcatgatgttccttcatcagcggaaaccaagaatggtttggttgtggaaatggaatcaagaagacagtggagatctctctttgattccatgaaaggctcaaataaattgctagtgattgatttcactgctgcatggtgtggaccttgtaaagcaatggaacctagagttaaggagatcgtttctaggtatccagaagctgtttttgcgagggttgatgtggatagattcatagatgtggctggaacatatagagcaaatactcttccagcctttgtttttgtgaagagaggagaagagattgatagcgttgttggagccaaacctgatgaacttgtgtacaagattgaaaagcatacggcttaa

SEQ ID NO: 22508 - protein, 128 aa, Brassica napus
MGSNVSSVHDVPSSAETKNGLVVEMESRRQWRSLFDSMKGSNKLLVIDFTAAWCGPCKAMEPRVKEIVSRYPEAVFARVDVDRFIDVAGTYRANTLPAFVFVKRGEEIDSVVGAKPDELVYKIEKHTA

SEQ ID NO: 22509 - DNA, 456 bp, Brassica napus
  CDS (1)..(456)
atgatgactcaaagtgaaagtgtcaataaggcagcaattattcaattaaaagtatcaaaatcaaagagagagagagagaaaacaatggccgcaacagcagaattgatcccagcaggagaagtgatcgcttgccacaccgtcgaggactggaacaacaagctcaaggcagccaaagaatccaacaaactgattgtgatagacttcacagcagtgtggtgcccaccttgccgtttcattgcacccatctttgtcgagctcgctaagaagcaccttgatgttgtcttcttcaaggtcgacgtcgatgaattggctactgttgctcaggagttcgatgttcaggccatgccaacctttgtctacatgaaaggcgaagagaagctcgacaaggttgttggtgctgccaaggaggaaatcgaagccaagcttttgaagcactctcaagttgctgccgcttga

SEQ ID NO: 22510 - protein, 151 aa, Brassica napus
MMTQSESVNKAAIIQLKVSKSKREREKTMAATAELIPAGEVIACHTVEDWNNKLKAAKESNKLIVIDFTAVWCPPCRFIAPIFVELAKKHLDVVFFKVDVDELATVAQEFDVQAMPTFVYMKGEEKLDKVVGAAKEEIEAKLLKHSQVAAA

SEQ ID NO: 22511 - DNA, 564 bp, Brassica napus
  CDS (1)..(564)
atgactctctctctccgaatcgctccgccaccggtatctctccgttactctccggctccgtccaccccctccggcggaggattacgtccggcgaagcagcgctgccggatcccgaactcgggcgtcgcggcgaaaacaggatcctgttctggcgttggtggtgttttagatttaaggaagaggatcggcggttcctgtgtggcgaggtgtagcttagaaacggtgaatgtcagtgtcggcgaggtgactgaggttgacaaggacacgttttggccagttgtcaaagccgctggtgataagcttgttgtcctcgacatgtacactcagtggtgtggtccatgcaaagttatggctcctaaatacaaagagctatcagagaagtaccaggacatggtgtttcttaagcttgactgcaacgaagaaaacaagccagtggcacaggagctaggaattagagtggttccaacctttaagatcttgaaggacaacaaggtgataaaggaagtggtcggggctaaatttgatgagttgctttcagccattgaggcagcgaggtcaggctga

SEQ ID NO: 22512 - protein, 187 aa, Brassica napus
MTLSLRIAPPPVSLRYSPAPSTPSGGGLRPAKQRCRIPNSGVAAKTGSCSGVGGVLDLRKRIGGSCVARCSLETVNVSVGEVTEVDKDTFWPVVKAAGDKLVVLDMYTQWCGPCKVMAPKYKELSEKYQDMVFLKLDCNEENKPVAQELGIRVVPTFKILKDNKVIKEVVGAKFDELLSAIEAARSG

SEQ ID NO: 22513 - DNA, 354 bp, Brassica napus
  CDS (1)..(354)
atggccggagaaggagaagtgatcgcttgccacaccatcgaagtctggaacgagcagatcaaagccgccaacgactccaagaaactgatcgtgatagacttcactgctacatggtgcccaccttgccgtttcattgcaccagtcttcgtagagatggccaagaagttcctcaacgtcgtcttcttcaagatcgatgtggacgaattgcaatccgttgctaaagaattcaaagtggaggcaatgcccacttttctcttcatgagggaaggtgagatcgtggaccgtgttgtcggtgcaaggaaggaggaaatccatcagacattgatgaagcacggtggtgttgcttctgcttaa

SEQ ID NO: 22514 - protein, 117 aa, Brassica napus
MAGEGEVIACHTIEVWNEQIKAANDSKKLIVIDFTATWCPPCRFIAPVFVEMAKKFLNVVFFKIDVDELQSVAKEFKVEAMPTFLFMREGEIVDRVVGARKEEIHQTLMKHGGVASA

SEQ ID NO: 22515 - DNA, 546 bp, Brassica napus
  CDS (1)..(546)
atgcctctgtctctgcgtctcgctccatctccgactgctttagctccgacaaccggcggatttagtcctgcgaaaaagcagtgtcgtatcccttactccggcgtggcgacgacgacgacgaggattggtttctgctcattggattatgtgaaaaggggagactcctctgtggtgaggtgtagcttagagaccgtgaatgtcagtgttggtcaagtgacggaagtggataaggataccttctggcccatcgttaaagccgccggtgaaaagattgtggtacttgacatgtacactcaatggtgtggtccatgcaaagtgattgctcctaaatacaaagctttatcagagaagtatgaggacgttgtgtttctaaagcttgactgcaacccagagaacaggccattggcaaaggagctaggaataagagtggttccaacttttaaaatattgaaggataaccaagtggtgaaggaagttacgggtgccaaatatgatgatctggttgcagccattgaaacagcaaggtctgctagttcttcgggatga

SEQ ID NO: 22516 - protein, 181 aa, Brassica napus
MPLSLRLAPSPTALAPTTGGFSPAKKQCRIPYSGVATTTTRIGFCSLDYVKRGDSSVVRCSLETVNVSVGQVTEVDKDTFWPIVKAAGEKIVVLDMYTQWCGPCKVIAPKYKALSEKYEDVVFLKLDCNPENRPLAKELGIRVVPTFKILKDNQVVKEVTGAKYDDLVAAIETARSASSSG

SEQ ID NO: 22517 - DNA, 540 bp, Brassica napus
  CDS (1)..(540)
atgcctctctctctccgtctcgctccatctcctacggctttagcttcaaccaccggtggatatggtcctgttaagaagcagtgccgcatcccttactccggcgtcgccaccacgaggattggtttcttctcactggattatggaaaaagggtagaatcctctgtggtgaggtgtagcttagagacagtgaatgtaaatgttggtcaagtgaaggaagtggataaggacaccttctggcccatcgttaaagccgctggtgaaaagattattgtacttgacatgtacactcaatggtgtggaccatgtaaagtgattgcacctaagtacaaagctttatcagagaagtacgaggacgttgtgtttcttaagcttgactgcaaccctgaaaacaggccattggcaaaggagctaggaataagagtggttccaacttttaaaatattgaaggataatcaagtggtgaaggaagttacgggtgccaaatatgatgatctggttgcagccattgaaacagctaggtctgctagttcttcgggatga

SEQ ID NO: 22518 - protein, 179 aa, Brassica napus
MPLSLRLAPSPTALASTTGGYGPVKKQCRIPYSGVATTRIGFFSLDYGKRVESSVVRCSLETVNVNVGQVKEVDKDTFWPIVKAAGEKIIVLDMYTQWCGPCKVIAPKYKALSEKYEDVVFLKLDCNPENRPLAKELGIRVVPTFKILKDNQVVKEVTGAKYDDLVAAIETARSASSSG

SEQ ID NO: 22519 - DNA, 402 bp, Brassica napus
  CDS (1)..(402)
atgggaggtgtattatcatctgtgtttggaggtggtggagaagaagcagttgcagcgaatgaatccgagcaaagtcgcgtcatgaagtttagctcatcggctcggtggcagcttcacttcaacgagatcaaagaatcctcgaaactgctggtggttgacttctcagcatcctggtgtggaccttgtaggatgatcgagcctgcgttcatcgccatggctgccaagttcactgatgttgaattcgtcaaattggatgtcgatgaacttcccgatgtggctaaagagttcaatgtgacggggatgccaacttttgtgctggtgaaaaatggtaaagagattgaaaggatcgttggagcaaggaaagatgaacttgagaagaaagttctcaaacacagggcatag

SEQ ID NO: 22520 - protein, 133 aa, Brassica napus
MGGVLSSVFGGGGEEAVAANESEQSRVMKFSSSARWQLHFNEIKESSKLLVVDFSASWCGPCRMIEPAFIAMAAKFTDVEFVKLDVDELPDVAKEFNVTGMPTFVLVKNGKEIERIVGARKDELEKKVLKHRA

SEQ ID NO: 22521 - DNA, 561 bp, Brassica napus
  CDS (1)..(561)
atgactctctccctccgaatcgctccgtcaccggtatcgttccgttactctccggctccgtccaccccctccggcgtcggattacgtccggccaagcagcgctgccggatcccgaactcaggcgtcgcggcgaaaacaggatcatgttctagcggtggtgttttagatttaaggaagaggatcgccggttcctgtgtggcgaggtgtagcttagaaacggtgaatgtcagtgtcggcgaggtgacggaggttgacaaggacacgttttggccaatcgttaaagccgctggtgataagcttgttgtcctcgacatgtacactcagtggtgtggtccatgcaaagttatggctcctaaatacaaagagctatcagagaagtaccaggacatggtgtttcttaagcttgactgcaacgaagaaaacaagccagtggcacaggagctaggaattagagtggttccaacctttaagatcttgaaggacaacaaggtgataaaggaagtggtcggggcaaaatttgatgagttgcttgcagccattgaggcagcgaggtcaggctga

SEQ ID NO: 22522 - protein, 186 aa, Brassica napus
MTLSLRIAPSPVSFRYSPAPSTPSGVGLRPAKQRCRIPNSGVAAKTGSCSSGGVLDLRKRIAGSCVARCSLETVNVSVGEVTEVDKDTFWPIVKAAGDKLVVLDMYTQWCGPCKVMAPKYKELSEKYQDMVFLKLDCNEENKPVAQELGIRVVPTFKILKDNKVIKEVVGAKFDELLAAIEAARSG

SEQ ID NO: 22523 - DNA, 345 bp, Brassica napus
  CDS (1)..(345)
atggctggtgaagaaggacaagtgatcgcatgtcacaccgtggaggcatggaatgaacaactccaaaagggcaatgactctaaaactcttgtggtggttgatttcacggcgtcttggtgtgggccatgtcgtttcatagctccattctttgctgatttggctaagaaactccctaatgtgatgttcctcaaggttgatattgatgaactaaagtcagtggcgagtgactgggcgattgagtcgatgccaacattcatgttcatgaaagaagggaagattgtggacaaagttgttggagccaagaaagatgagcttcagtctactattgccaagcacttggcttaa

SEQ ID NO: 22524 - protein, 114 aa, Brassica napus
MAGEEGQVIACHTVEAWNEQLQKGNDSKTLVVVDFTASWCGPCRFIAPFFADLAKKLPNVMFLKVDIDELKSVASDWAIESMPTFMFMKEGKIVDKVVGAKKDELQSTIAKHLA

SEQ ID NO: 22525 - DNA, 360 bp, Glycine max
  CDS (1)..(360)
atggctgaagagggtcaggttgtcggcgtccacaccgttgatgcgtggaaccagcaactgcagaatggaaaagactcccaaaaattgattgtggtggattttactgcttcctggtgtggtccatgccgttttattgccccagttctggcagagattgctaggcatactcctcaagtgatcttcctcaaggtggatgtggatgaagtgaggcctgttgctgaggaatattccattgaggccatgccaaccttcctcttcttgaaagatggcaagatcgtggataaggttgttggtgctaagaaggaggagctgcaactcaccatagccaagcatgtatctgctgctgctgcttcttcttga

SEQ ID NO: 22526 - protein, 119 aa, Glycine max
MAEEGQVVGVHTVDAWNQQLQNGKDSQKLIVVDFTASWCGPCRFIAPVLAEIARHTPQVIFLKVDVDEVRPVAEEYSIEAMPTFLFLKDGKIVDKVVGAKKEELQLTIAKHVSAAAASS

SEQ ID NO: 22527 - DNA, 381 bp, Glycine max
  CDS (1)..(381)
atgaaaggtcaacaacagctaaaaaaatctaaggtggtgaaaattgactcaagaaaatcatgggaacaccacataactaatgcaaccaataaaggctaccctgttatggttcatttctctgcttattggtgcatgccttcaatagctatgaatcatttctttcaacaactggcctccacctatcaaaatgttctctttctgaatgttgatgttgatgaggtcaaggaagttgcttccaagttggaaattaaagcaattcctaccttttgtttgatgaatggaggagctccagtggataaaattgtgggtgcaaaccctgatgaattaaggaaaaggatcaattgttttattcaccagaaacattcacccaagtcagtgtga

SEQ ID NO: 22528 - protein, 126 aa, Glycine max
MKGQQQLKKSKVVKIDSRKSWEHHITNATNKGYPVMVHFSAYWCMPSIAMNHFFQQLASTYQNVLFLNVDVDEVKEVASKLEIKAIPTFCLMNGGAPVDKIVGANPDELRKRINCFIHQKHSPKSV

SEQ ID NO: 22529 - DNA, 402 bp, Glycine max
  CDS (1)..(402)
atgggcggtatactttctgggcttcttggcagcgacgcggcggcggcggcgtcttcgccggagagttctacttctagagtctcctccttccactcgtcgccgcgctggcagctctacttcaacgagatcaaagataccgataagctcgttgtgatagatttctcggcgtcgtggtgcggtccttgcaaattcatagagccagcgattcacgccatggccgacaagttcaacgacgttgacttcgtcaagatcgacgtcgacgaattacctgatgtggcgcaggagtttcaggtgcaggcgatgccgactttcgtgttgtggaagaaagggaaggaagtcgacaaggttgtgggcgcaaagaaggacgagctcgagaagaagattgagaaacatcgatcgtga

SEQ ID NO: 22530 - protein, 133 aa, Glycine max
MGGILSGLLGSDAAAAASSPESSTSRVSSFHSSPRWQLYFNEIKDTDKLVVIDFSASWCGPCKFIEPAIHAMADKFNDVDFVKIDVDELPDVAQEFQVQAMPTFVLWKKGKEVDKVVGAKKDELEKKIEKHRS

SEQ ID NO: 22531 - DNA, 354 bp, Glycine max
  CDS (1)..(354)
atggccgaagagggacaagtgattggtgtccacagcgtggaggagtgggaggaacatctcaagaagggacaagagtccaagaaattgattgtggtggattttactgcttcttggtgcggcccatgccgtttcattgccccaattcttgcggatatggctaaaaagttgccgaatgtcaccttcctcaaggtggatgtggatgaattggcgactgtttccagggagtgggaagttgaggctatgccaaccttcctattcttgaaagaaggcaagctggtgaagaagcttgtgggtgccaggaaagaggagctgcaagacataatagtcaaacttgctgcaattgatgctgcctga

SEQ ID NO: 22532 - protein, 117 aa, Glycine max
MAEEGQVIGVHSVEEWEEHLKKGQESKKLIVVDFTASWCGPCRFIAPILADMAKKLPNVTFLKVDVDELATVSREWEVEAMPTFLFLKEGKLVKKLVGARKEELQDIIVKLAAIDAA

SEQ ID NO: 22533 - DNA, 417 bp, Glycine max
  CDS (1)..(417)
atggctcccaccatctataatttttcgtattctaaaaggttttcagagtcattcaattcttcaaaatcaaaaagagagtcatccagttccaacatccttgctttccactccacagctcaatggaatgctcattataaagccaccaaagaaactaacaaactgatggtacttgatttcacagccacatggtgtggaccttgcaaactcatggacccagttatccaagagtttgctggaaattacacagatgttgacttcatcaagattgatgtggaggagttaacggaagtgtctcaagcactccaggtctaccaattgccaacattcatactcgttaagaaaggcaaagttgctgatagagtggtgggggtgaaaaaggaggagctgaaaaggtcgattgagaagcacagaaaataa

SEQ ID NO: 22534 - protein, 138 aa, Glycine max
MAPTIYNFSYSKRFSESFNSSKSKRESSSSNILAFHSTAQWNAHYKATKETNKLMVLDFTATWCGPCKLMDPVIQEFAGNYTDVDFIKIDVEELTEVSQALQVYQLPTFILVKKGKVADRVVGVKKEELKRSIEKHRK

SEQ ID NO: 22535 - DNA, 372 bp, Glycine max
  CDS (1)..(372)
atggctgaagtggaagagggacaggtcatcggcgtccacaccgttgatgagtggaagctgcaactccagaatgcaaaagactccaaaaaactgattgtggtggattttactgcttcctggtgtggtccatgccgttttatggccccagttcttgcagagattgcaaagaaaactcctgaattgatcttcctcaaagtggatgtggatgaagtgaggcctgttgctgaggaatattccattgaggccatgccaaccttcctcttcttgaaagatggcgagatcgtggacaaggtggttggtgctagtaaggatgaccttcaagccaccatagccaagcatgcatctgctgttgctgctgcttcttcttcttga

SEQ ID NO: 22536 - protein, 123 aa, Glycine max
MAEVEEGQVIGVHTVDEWKLQLQNAKDSKKLIVVDFTASWCGPCRFMAPVLAEIAKKTPELIFLKVDVDEVRPVAEEYSIEAMPTFLFLKDGEIVDKVVGASKDDLQATIAKHASAVAAASSS

SEQ ID NO: 22537 - DNA, 375 bp, Glycine max
  CDS (1)..(375)
atggaagcctcagagcagaacaattcaaaggtagtgttgattgattctttgcagtcatgggagttccacgtcaaccaagcctataatcagaatactcctgttgttgttcacttcactgcttcatggtgcatgccatcggtggctatgactcctgtttttgaagaactggcttcaagctatccggaagttctgtttctcactgttgatgttgatgaagtcaaggaggtagccaccaaaatggatgtaaaggcaatgccaacatttttgctgctgaaggacggtgctgcggtggacaaggtggttggtgccaatccagaagagataaagaaaaggatagatggggttgctgagtccactcgtgtctcactggcatag

SEQ ID NO: 22538 - protein, 124 aa, Glycine max
MEASEQNNSKVVLIDSLQSWEFHVNQAYNQNTPVVVHFTASWCMPSVAMTPVFEELASSYPEVLFLTVDVDEVKEVATKMDVKAMPTFLLLKDGAAVDKVVGANPEEIKKRIDGVAESTRVSLA

SEQ ID NO: 22539 - DNA, 423 bp, Glycine max
  CDS (1)..(423)
atgggctccttgttttcttcccccagcgccaccgaggcggagaatcctgacgtgaaagcggagaatcctgacgtgaaagcgaggagttctgatcacgtgaaagcgttcgactccgcggagagctggcagagctactggaaagagatcaaagactcccctaagccagttgtgatttttttcacggcgtcctggtgtggcccttgcaaattcatcactccactgtttcacgagatggccgcaaagtatccaaacgctgactacgtcaaaatcgacgtggaagaattatctggtgtggcgaaggagtataaggtgaaggcgatgccgacgttcgtggcgtggaaggaaggaaaggaagttgagagggttgtgggagccaataaggaagagctcgagaaaaagattaagcaactttctcaatcgtga

SEQ ID NO: 22540 - protein, 140 aa, Glycine max
MGSLFSSPSATEAENPDVKAENPDVKARSSDHVKAFDSAESWQSYWKEIKDSPKPVVIFFTASWCGPCKFITPLFHEMAAKYPNADYVKIDVEELSGVAKEYKVKAMPTFVAWKEGKEVERVVGANKEELEKKIKQLSQS

SEQ ID NO: 22541 - DNA, 414 bp, Glycine max
  CDS (1)..(414)
atggggaattgtttgcgcaaggctcatgcggatgatgattctgatcatattgtggagcttgcttctgggaatgtgcaacttattactaccaaagaatcttgggaccaaaagttggatcaagcgaggaaggagagtaaaattgtaattgcaaatttcagtgcaacatggtgtggtccttgtaaggtgattgcaccacattattgcgagttgtccgtgaaatacccgtctatcatgttcttattagtcgatgtggatgaactagctgacttcagcacttcgtgggacatcaaagccacaccaactttcttctttcttaaagatggaaaagaagttgacaaacttgtaggagccaacaagccagagctggagaagaagattgttgtggttaatgatgtagtgcctcataagcaatag

SEQ ID NO: 22542 - protein, 137 aa, Glycine max
MGNCLRKAHADDDSDHIVELASGNVQLITTKESWDQKLDQARKESKIVIANFSATWCGPCKVIAPHYCELSVKYPSIMFLLVDVDELADFSTSWDIKATPTFFFLKDGKEVDKLVGANKPELEKKIVVVNDVVPHKQ

SEQ ID NO: 22543 - DNA, 420 bp, Glycine max
  CDS (1)..(420)
atggggagttgtgtgtctaagaatcatgctaaggataatgattctgatcatgatgtggattttgctgctgggaatgtgaaacttattaccaccaaagaagcgtgggaccaatctttggaagaagcaaggaggggtggcaaaattgtgattgcaaatttcagtgcaacatggtgtggtccttgtaagatgattgcgccatattacagcgagttatctgagaaatacacatctatgatgttcttgttagttgatgtggatgatctaactgacttcagcacttcatgggacatcaaagccacaccaactttcttctttcttaaagatggacaacaacttgacaaacttgtaggagccaacaagccagaactgctgaagaagattgttgtcattaatgattcgcttcccgaatataagcagtga

SEQ ID NO: 22544 - protein, 139 aa, Glycine max
MGSCVSKNHAKDNDSDHDVDFAAGNVKLITTKEAWDQSLEEARRGGKIVIANFSATWCGPCKMIAPYYSELSEKYTSMMFLLVDVDDLTDFSTSWDIKATPTFFFLKDGQQLDKLVGANKPELLKKIVVINDSLPEYKQ

SEQ ID NO: 22545 - DNA, 423 bp, Glycine max
  CDS (1)..(423)
atgggctccttgttttcttcccccagcgccaccgaggcggagaatcctgacgtgaaagcggagaatcctgacgtgaaagcgaggagttctgatcacgtgaaagcgttcgactccgcggagagctggcagagctactggaaagagatcaaagactcccctaagccagttgtgatatttttcacggcgtcctggtgtggcccttgcaaattcatcactccagtgtttaaccagatagccgcagagtttgcaaacgctgacttcgtcaagatcgacgtggacgaattatctggtgtggcgaaggagtttaaggtggaggcgatgccgacgttcgtgttgtggaaggaaggaaaggaagttgagagggttgtgggagccaagaaggaagagctcgagaaaaagattaagcaactttctcaatcgtga

SEQ ID NO: 22546 - protein, 140 aa, Glycine max
MGSLFSSPSATEAENPDVKAENPDVKARSSDHVKAFDSAESWQSYWKEIKDSPKPVVIFFTASWCGPCKFITPVFNQIAAEFANADFVKIDVDELSGVAKEFKVEAMPTFVLWKEGKEVERVVGAKKEELEKKIKQLSQS

SEQ ID NO: 22547 - DNA, 363 bp, Glycine max
  CDS (1)..(363)
atggctggctcatcggaagagggacaagtcattagctgccacaccgttgaagaatggaacgatcaactccagaagggcaacgaatccaagaaactcattgttgtggattttactgcttcttggtgtggaccatgccgtttcattgcaccattcttggctgagctggctaagaagttcacaagtgtcatattcctaaaggtggatgtggacgaattaaagagtgtttctcaagattgggctattgaggctatgcccacttttgtgtttgtgaaagagggaacgcttctggacaaagtggtgggagcaaagaaggatgagctgcagcagaaaatacagaaacatgtggcttcagctagtgcttaa

SEQ ID NO: 22548 - protein, 120 aa, Glycine max
MAGSSEEGQVISCHTVEEWNDQLQKGNESKKLIVVDFTASWCGPCRFIAPFLAELAKKFTSVIFLKVDVDELKSVSQDWAIEAMPTFVFVKEGTLLDKVVGAKKDELQQKIQKHVASASA

SEQ ID NO: 22549 - DNA, 414 bp, Glycine max
  CDS (1)..(414)
atggggaattgtttgcgcaaggctcatgcggatgatgattctgatcatattgtggagtttgcttctgggaatgtgcaacttattactaccaaagaatcttgggaccaaaagttggatcaagcgaggaaggagagtaaaattgtaattgcaaatttcagtgcaacatggtgtggtccttgtaaggtgattgcaccacattattgcgagttgtccgtgaaatacccgtctatcatgttcttattagtcgatgtggatgaactagctgacttcagcacttcgtgggacatcaaagccacaccaactttcttctttcttaaagatggaaaagaagttgacaaacttgtaggagccaacaagccagagctggagaagaagattgttgtggttaatgatgtagtgcctcataagcaatag

SEQ ID NO: 22550 - protein, 137 aa, Glycine max
MGNCLRKAHADDDSDHIVEFASGNVQLITTKESWDQKLDQARKESKIVIANFSATWCGPCKVIAPHYCELSVKYPSIMFLLVDVDELADFSTSWDIKATPTFFFLKDGKEVDKLVGANKPELEKKIVVVNDVVPHKQ

SEQ ID NO: 22551 - DNA, 354 bp, Glycine max
  CDS (1)..(354)
atggcggaagagggacaagtgatcggtgtccacagcgtagaggagtggaaggaacatctcaagaagggagaagagtccaagaaattgattgtggtggattttactgcttcttggtgcggtccatgccgtttcattgccccaattcttgcagagtttgctaaaaagttgccgaatgtcaccttcctcaaggtggatgtggatgaattggagactgtttccaaggagtggggaattgaggctatgccaaccttcctgttcttgaaagaaggcaagctggtggacaaggttgtgggtgccaagaaagaggagctgcaattgacaatagccaaacatgccgcaattgctgctgcttga

SEQ ID NO: 22552 - protein, 117 aa, Glycine max
MAEEGQVIGVHSVEEWKEHLKKGEESKKLIVVDFTASWCGPCRFIAPILAEFAKKLPNVTFLKVDVDELETVSKEWGIEAMPTFLFLKEGKLVDKVVGAKKEELQLTIAKHAAIAAA

SEQ ID NO: 22553 - DNA, 363 bp, Glycine max
  CDS (1)..(363)
atggcaggctcctcggaggagggacaagtcattagctgtcacaccgttgacgcatggaacgatcaactccagaagggcaaccaatccaagaaactcattgttgtggattttactgcttcttggtgtggaccatgccgtttcattgcaccattcttggctgagctggctaagaagttcacaagtgtcgtattcctaaaggtggatgtggacgaattaaagagtgtttctcaagactgggctattgaggctatgcccacttttgtgtttgtgaaagagggaacacttctaagcaaagtggtgggagcaaagaaggatgagctgcagcagacaatagagaaatatgtggcttcagctagtgcttaa

SEQ ID NO: 22554 - protein, 120 aa, Glycine max
MAGSSEEGQVISCHTVDAWNDQLQKGNQSKKLIVVDFTASWCGPCRFIAPFLAELAKKFTSVVFLKVDVDELKSVSQDWAIEAMPTFVFVKEGTLLSKVVGAKKDELQQTIEKYVASASA

SEQ ID NO: 22555 - DNA, 417 bp, Glycine max
  CDS (1)..(417)
atggcacccacaatctataatttttcgtattctaaaaggttttcagagtcattcaattcttcaacatcaaaaaaggagtcatccagttccaacatccttgctttccactccatagctcaatggaatgctcattataaagccaccaaagaaactaacaagctgatggtacttgatttcacagccacatggtgtggaccttgcaaactcatggaccctgttatcctagagtttgctggaaattacacagatgttgagttcatcaagattgatgtggaggagttaacggaagtgtctcaagcactccaggtccaccaattgccaacattcatactcgttaagaaaggcaaagttgctgatagagtggtgggggtgaaaaaggaggagctgaaaaggtcgattgagaagcacagaaaataa

SEQ ID NO: 22556 - protein, 138 aa, Glycine max
MAPTIYNFSYSKRFSESFNSSTSKKESSSSNILAFHSIAQWNAHYKATKETNKLMVLDFTATWCGPCKLMDPVILEFAGNYTDVEFIKIDVEELTEVSQALQVHQLPTFILVKKGKVADRVVGVKKEELKRSIEKHRK

SEQ ID NO: 22557 - DNA, 420 bp, Glycine max
  CDS (1)..(420)
atggggagttgtgtgtctaagaatcatgctagggataatgattctgatcataatgtggattttgctgctgggaatgtgaaacttattaccaccaaagaagcgtgggaccaatatttggaagaagcaaggagggatggcaaaattgtgattgcaaatttcagtgcaacatggtgtggtccttgtaagatgattgcgccatattacagcgagttatctgagaaatacacatctatgatgttcttgttagttgatgtggatgatctaactgacttcagcacttcatgggacatcaaagccacaccaactttcttctttcttaaagatggacaacaacttgacaaacttgtaggagccaacaagccagaactgctgaagaagattgttgtcattaatgattcgcttcccgaatataagcagtga

SEQ ID NO: 22558 - protein, 139 aa, Glycine max
MGSCVSKNHARDNDSDHNVDFAAGNVKLITTKEAWDQYLEEARRDGKIVIANFSATWCGPCKMIAPYYSELSEKYTSMMFLLVDVDDLTDFSTSWDIKATPTFFFLKDGQQLDKLVGANKPELLKKIVVINDSLPEYKQ

SEQ ID NO: 22559 - DNA, 405 bp, Glycine max
  CDS (1)..(405)
atgggcgctatactttctgccttaactggcggtgccgcaacggcggcgacgtcttcgccggagagttctgcttctagggtccagtctttccactcttcggcgcgctggcagctccacttcaacgagctcaaagaaaccaataagctcgttgtgatagatttctcggcgtcgtggtgcggcccttgcaaattcatagagccagcgattcacgccatgtccgaaaagttcaccgacgttgacttcgtcaagatcgacgtcgacgaattgccggatgtggcgaaggagtttaatgtggaggcgatgccgacgttcgtgttgtgtaagaaagggaaggaagtcgacaagggagtgggcgcagagacggacgacctcgaaagaagattgaaaaatcggatcgaatcatag

SEQ ID NO: 22560 - protein, 134 aa, Glycine max
MGAILSALTGGAATAATSSPESSASRVQSFHSSARWQLHFNELKETNKLVVIDFSASWCGPCKFIEPAIHAMSEKFTDVDFVKIDVDELPDVAKEFNVEAMPTFVLCKKGKEVDKGVGAETDDLERRLKNRIES

SEQ ID NO: 22561 - DNA, 396 bp, Hordeum vulgare
  CDS (1)..(396)
atggggggctgtgtgggcaagggtcgtggcattgtggaagaaaagcttgatttcaaaggtggaaatgtgcatgtcataacaaccaaagaggactgggaccagaagattgaagaagcaaacaaggatgggaaaattgttgtagcaaacttcagtgcttcgtggtgtgggccatgccgtgtcattgcacctgtttatgctgagatgtccaagacttatcctcaactcatgttcttgacaattgatgttgatgacctaatggatttcagctcaacatgggacatccgcgcaaccccgacgttcttcttcctcaaaaacggccagcagatcgacaagctcgtcggcgccaacaaacccgagctggagaagaaagtgcaagctcttggtgatggcagttga

SEQ ID NO: 22562 - protein, 131 aa, Hordeum vulgare
MGGCVGKGRGIVEEKLDFKGGNVHVITTKEDWDQKIEEANKDGKIVVANFSASWCGPCRVIAPVYAEMSKTYPQLMFLTIDVDDLMDFSSTWDIRATPTFFFLKNGQQIDKLVGANKPELEKKVQALGDGS

SEQ ID NO: 22563 - DNA, 369 bp, Hordeum vulgare
  CDS (1)..(369)
atggccgccgaggagggagccgttatcgcgtgccacaccaagcaagagttcgatacccacatggccaatggcaaggacaccggcaagctggtgatcattgatttcactgcttcctggtgcggtccatgtcgtgtcatagccccagtctttgctgagtacgccaagaagttccctggggccatcttcctgaaggtggatgttgatgagctgaaggacgtcgctgaagcatacaatgttgaggcaatgccgaccttcctgtttatcaaggacggtgagaaggtggacagtgttgtcggtggcaggaaggatgacatccataccaaagataggggccctcatgggttctgcatccacctaacggaagagtga

SEQ ID NO: 22564 - protein, 122 aa, Hordeum vulgare
MAAEEGAVIACHTKQEFDTHMANGKDTGKLVIIDFTASWCGPCRVIAPVFAEYAKKFPGAIFLKVDVDELKDVAEAYNVEAMPTFLFIKDGEKVDSVVGGRKDDIHTKDRGPHGFCIHLTEE

SEQ ID NO: 22565 - DNA, 372 bp, Linum usitatissimum
  CDS (1)..(372)
atggcggaagaaggtcaggtgattagctgcactagcgttgaaatctggaaggagaagtttgatcatgcttccgagtcgaagaaactggctgtggtggatttcactgctacgtggtgcggaccgtgccgcttcatcgctccagtcctcgcagatttggccaagaagatgcctcatgtgattttcatgaaggtcgatgtggatgaattgaggactgttgctgcggagtatgaagtggaagctatgccgacattcatcttcttcaaggaggggaagattgtggacaaggtaattggtgcgaggaaggatgaattgactgctggcgttgagaagcacgcaataacagtaacccccccggttgtttctactgcttga

SEQ ID NO: 22566 - protein, 123 aa, Linum usitatissimum
MAEEGQVISCTSVEIWKEKFDHASESKKLAVVDFTATWCGPCRFIAPVLADLAKKMPHVIFMKVDVDELRTVAAEYEVEAMPTFIFFKEGKIVDKVIGARKDELTAGVEKHAITVTPPVVSTA

SEQ ID NO: 22567 - DNA, 363 bp, Linum usitatissimum
  CDS (1)..(363)
atggcagcggaggaaggattggtatttgcttgccacaccgttgaagagtgggaagctcagctacaaaaggccaacgaatctaagaagctggtggtggttgatttcacagccacatggtgcgggccatgccgcttcattacaccatacttggcagagctggctaagaagatgcctatggtaaccttcctgaaggttgatgtcgatgaaatgaaaaatgttgctcaagattgggctgtggaggcaatgccaacattcatgtttatgaaagagggcaagatcgtgggcaaagtcgttggagccaacaaggaagagctgctgcagactattaacaagaacttggacttggctaccacctctgcttaa

SEQ ID NO: 22568 - protein, 120 aa, Linum usitatissimum
MAAEEGLVFACHTVEEWEAQLQKANESKKLVVVDFTATWCGPCRFITPYLAELAKKMPMVTFLKVDVDEMKNVAQDWAVEAMPTFMFMKEGKIVGKVVGANKEELLQTINKNLDLATTSA

SEQ ID NO: 22569 - DNA, 357 bp, Zea mays
  CDS (1)..(357)
atggcggaggaggggaaggtgatcgcgatccacagccaggagcagtggagcaccaagatcgaggaggctggcagcagcacgaatctggtggtgatcgacttcactgcaacatggtgcggaccatgccgcttcatttctccaatcttagatgagattgccaagaagcttccaaatgttatgttcctgaaggtggatgttgatgaaatgaagtcaattgccgaggagttcagtgttgaggctatgccgacgtttgtgctcatgaaggaaggaaaggtggtggacaaggttgtgggagctgccaaggaggagctgagcgggaagattgccaagcacagtgcaactgcatgcgctaaataa

SEQ ID NO: 22570 - protein, 118 aa, Zea mays
MAEEGKVIAIHSQEQWSTKIEEAGSSTNLVVIDFTATWCGPCRFISPILDEIAKKLPNVMFLKVDVDEMKSIAEEFSVEAMPTFVLMKEGKVVDKVVGAAKEELSGKIAKHSATACAK

SEQ ID NO: 22571 - DNA, 396 bp, Zea mays
  CDS (1)..(396)
atgggctccttcctgtcgtcgttgtggacccctcccccgctcgccggcgacgaccccgactccgccgtcgtcgccgtccactccaagcccgcctgggacaagcactgggaggaacaccggaacgcgtccaagctgatggtgatcgacttctccgcctcctggtgcgggccctgccgcttcatcgagcccgccttcaaggagatggcctcccgcttcgccgacgcgctcttcgtcaagatcgacgtcgacgagctcgcggaggttgcaaagacattccgcgtagaggcgatgccgacctttgtactggtgaagggcgggcaggaggtgagtcgcgtggtcggggctaagaaggatgagcttgacaggaagatcaagacgttcatctcatctacctga

SEQ ID NO: 22572 - protein, 131 aa, Zea mays
MGSFLSSLWTPPPLAGDDPDSAVVAVHSKPAWDKHWEEHRNASKLMVIDFSASWCGPCRFIEPAFKEMASRFADALFVKIDVDELAEVAKTFRVEAMPTFVLVKGGQEVSRVVGAKKDELDRKIKTFISST

SEQ ID NO: 22573 - DNA, 405 bp, Zea mays
  CDS (1)..(405)
atgggctccttcttctcgaccttagtgacgccccctccgcccgccgccgacgacccgaactgcgccgtggtggccgcgcactccaaggccacctacgacgagcagtgggcggcccacaagagcagcagcaagctgatggtgatcgacttctcggcgtcctggtgcgggccctgccgcttcatcgagccggccttcaaggagctggcctcccgcttcaccgatgccatcttcatcaaggtcgacgtcgacgagctcgcggaggtcgcaaggacatggaaggtagaggcgatgccaacgttcgtgctggtcaaggatgggaaggaggtaggccgtgtgattggggctaagaaggacgagcttgagaggaagatcaggatgttcgtcacgtcatcttcctcgtcctaa

SEQ ID NO: 22574 - protein, 134 aa, Zea mays
MGSFFSTLVTPPPPAADDPNCAVVAAHSKATYDEQWAAHKSSSKLMVIDFSASWCGPCRFIEPAFKELASRFTDAIFIKVDVDELAEVARTWKVEAMPTFVLVKDGKEVGRVIGAKKDELERKIRMFVTSSSSS

SEQ ID NO: 22575 - DNA, 381 bp, Triticum aestivum
  CDS (1)..(381)
atggcggcgtcggcggcgacggcaacggcggcggcggtgggggcgggggaggtgatctccgtccacaccctggagcagtggaccatgcagatcgaggaggccaacgccgccaagaagctggtggtggttgacttcactgcatcatggtgtggaccatgccgcatcatggctccagttttcgctgatctcgccaagaagttcccaaatgctgttttcctcaaggtcgatgtcgatgaactgaagcccattgcggagcaattcagcgttgaggccatgccaaccttcctgttcattaaggaaggagatgtcaaggacagggttgtgggagctatcaaggaggaactgacgaacaaggttgggctacacgcggcggcccagtaa

SEQ ID NO: 22576 - protein, 126 aa, Triticum aestivum
MAASAATATAAAVGAGEVISVHTLEQWTMQIEEANAAKKLVVVDFTASWCGPCRIMAPVFADLAKKFPNAVFLKVDVDELKPIAEQFSVEAMPTFLFIKEGDVKDRVVGAIKEELTNKVGLHAAAQ

SEQ ID NO: 22577 - DNA, 357 bp, Triticum aestivum
  CDS (1)..(357)
atggcggaggaggggaaggtgatcgcgatccacagccaggagcagtggagcaccaagatcgaggaggctggcagcagcacgaatctggtggtgatcgacttcactgcaacatggtgcggaccatgccgcttcatttctccaatcttagatgagattgccaagaagcttccaagtgttactttcctgaaggtggatgttgatgaaatgaagtcaattgccgaggagttcagtgttgaggccatgccgacgtttgtgctcatgaaggaaggaaaggtggtggacaaggttgtgggagctgccaaggaggagctgagcgggaagattgccaagcacagtgcaactgcatgcgctaaataa

SEQ ID NO: 22578 - protein, 118 aa, Triticum aestivum
MAEEGKVIAIHSQEQWSTKIEEAGSSTNLVVIDFTATWCGPCRFISPILDEIAKKLPSVTFLKVDVDEMKSIAEEFSVEAMPTFVLMKEGKVVDKVVGAAKEELSGKIAKHSATACAK

SEQ ID NO: 22579 - DNA, 396 bp, Triticum aestivum
  CDS (1)..(396)
atgggctccttcctgtcgtccttgtggacccctcccccgctccccggcgacgaccccgactccgccgtcgtcgccgtccactccaagcccgcctgggacaagcactgggaggaacaccggaacgcgtccaagctgatggtgatcgacttctccgcctcctggtgcgggccctgccgcttcatcgagcccgccttcaaggagatggcctcccgcttcgccgacgcgctcttcgtcaagatcgacgtcgacgagctcgcggaggttgcaaagacattccgcgtagaggcgatgccgacctttgtactggtgaagggcgggcaggaggtgagtcgcgtggtcggggctaagaaggatgagcttgacaggaagatcaagacgttcatctcatctacctga

SEQ ID NO: 22580 - protein, 131 aa, Triticum aestivum
MGSFLSSLWTPPPLPGDDPDSAVVAVHSKPAWDKHWEEHRNASKLMVIDFSASWCGPCRFIEPAFKEMASRFADALFVKIDVDELAEVAKTFRVEAMPTFVLVKGGQEVSRVVGAKKDELDRKIKTFISST

SEQ ID NO: 22581 - DNA, 381 bp, Triticum aestivum
  CDS (1)..(381)
atggcggcgtcggcggcgacggcaacgccgacggcggtgggggcgggggaggtgatctccgtccacaccctggagcagtggaccatgcagatcgaggaggccaaccccgccaagaagctggtggtggttgacttcactgcatcatggtgtggaccatgccgcatcatggctccagttttcgctgatctcgccaagaagttcccaaatgctgttttcctcaaggtcgatgtcgatgaactgaagcccattgcggagcaattcagcgttgaggccatgccaaccttcctgttcattaaggaaggagatgtcaaggacagggttgtgggagctatcaaggaggaactgacgaacaaggttgggctacacgcggcggcccagtaa

SEQ ID NO: 22582 - protein, 126 aa, Triticum aestivum
MAASAATATPTAVGAGEVISVHTLEQWTMQIEEANPAKKLVVVDFTASWCGPCRIMAPVFADLAKKFPNAVFLKVDVDELKPIAEQFSVEAMPTFLFIKEGDVKDRVVGAIKEELTNKVGLHAAAQ

SEQ ID NO: 22583 - DNA, 357 bp, Triticum aestivum
  CDS (1)..(357)
atggccgccgaggagggagccgtgatagcgtgccacaccaagcaagagttcgacacccacatggctaatggcaaggagaccggcaagctggtgatcattgacttcactgcttcctggtgcggtccttgtcgtgtcatagccccagtctttgctgagtacgccaagaagttccctggcgccattttcctgaaggtggacgccgacgagctgaaggacgtcgctgaagcatacaacgttgaggcaatgccgaccttcctgtttatcaaggatggtgcgaaggtggacactgttgtcggtggcaggaaggatgatatccataccaagatagtggccctcatgggatctgcatctggctaa

SEQ ID NO: 22584 - protein, 118 aa, Triticum aestivum
MAAEEGAVIACHTKQEFDTHMANGKETGKLVIIDFTASWCGPCRVIAPVFAEYAKKFPGAIFLKVDADELKDVAEAYNVEAMPTFLFIKDGAKVDTVVGGRKDDIHTKIVALMGSASG

SEQ ID NO: 22585 - DNA, 369 bp, Zea mays
  CDS (1)..(369)
atggcgtccgagcagggagtcgtgatcgcgtgccacagcaaggctgagtttgacgcccacatgaccaaggcccaggaagccggcaagctggtggtcatcgacttcactgccgcctggtgcggtccatgccgcgccatcgccccactgttcgtcgaacacgccaagaagttcactcaggtcgtcttcctgaaggtggacgtggacgaagtgaaggaagtcaccgcggcctacgaggtcgaggcgatgccgaccttccacttcgtcaagaacggcaagacggtcgcgaccatcgtgggtgccaagaaggacgagctcctggcccagatcgagaagcatgccgcgcctgcgcctgcgtctgcgtctgcctaa

SEQ ID NO: 22586 - protein, 122 aa, Zea mays
MASEQGVVIACHSKAEFDAHMTKAQEAGKLVVIDFTAAWCGPCRAIAPLFVEHAKKFTQVVFLKVDVDEVKEVTAAYEVEAMPTFHFVKNGKTVATIVGAKKDELLAQIEKHAAPAPASASA

SEQ ID NO: 22587 - DNA, 432 bp, Zea mays
  CDS (1)..(432)
atgggactgaggcgcctgatgagatgctgctgctgcattgcaaagcacgcggacgacggcgacaagatcgatttcggaggtggcaatgttcatgttgtcacaagcaaagaggactgggaccaaagaattgccgaggcaaacaaggatgggaaaaccgtggttgcaaacttcagcgcttcctggtgtgggccgtgccgtgtcatcgcacttgtctacgccgaaatgtcgcagacgtaccctcagctcatgttcctgacgatcgatgttgatgacttgatggagttcagctcgtcgtgggacatccgcgcgaccccgaccttcttcttcctcaagaacgagcagcaggtggacaagctggtcggcgccaacaagcctgagctggagaagaaagtggccgccgtcgccgacgcggccggcagcaagacagtgtag

SEQ ID NO: 22588 - protein, 143 aa, Zea mays
MGLRRLMRCCCCIAKHADDGDKIDFGGGNVHVVTSKEDWDQRIAEANKDGKTVVANFSASWCGPCRVIALVYAEMSQTYPQLMFLTIDVDDLMEFSSSWDIRATPTFFFLKNEQQVDKLVGANKPELEKKVAAVADAAGSKTV

SEQ ID NO: 22589 - DNA, 384 bp, Zea mays
  CDS (1)..(384)
atggcggcttcggcggcagcggcggcggcaacaccggtgacgccgacagaggggacggtgatcgcgatccacagcctggaggagtggagcatccagatcgaggaggccaacagcgccaagaagctggtggtgattgacttcactgcaacatggtgtcctccgtgccgcgccatggctccaatttttgctgatatggccaagaagtccccaaatgttgttttcctgaaagttgatgtggatgaaatgaagaccattgctgagcaattcagcgtagaggccatgccaacattcctgttcatgagggagggcgacgtcaaggacagggtcgttggcgcagcaaaggaagagctagcaaggaagcttgaactacacatggcctcgtag

SEQ ID NO: 22590 - protein, 127 aa, Zea mays
MAASAAAAAATPVTPTEGTVIAIHSLEEWSIQIEEANSAKKLVVIDFTATWCPPCRAMAPIFADMAKKSPNVVFLKVDVDEMKTIAEQFSVEAMPTFLFMREGDVKDRVVGAAKEELARKLELHMAS

SEQ ID NO: 22591 - DNA, 399 bp, Zea mays
  CDS (1)..(399)
atgggctccttcctctcgagcttagtcacgccccctccggccgccgacgaccccaactgcgccgtggtggccgcccactccaaggccacctacgacgagcagtgggcggcccacaagagcagcagcaagctgatggtgatcgacttctcggcctcctggtgcgggccctgccgcttcatcgagccggccttcaaggagctggcctcccgcttctccgacgccatcttcgtcaaggtcgacgtcgacgagctcgcggaggtcgcaaggacatggaaggtagaggcgatgccaacgttcgtacttgtaaaggatgggaaggaggtaagccgtgtggttggggccaagaaggacgagcttgagaggaagatccggatgttcacgtcatcttcctcatcgtaa

SEQ ID NO: 22592 - protein, 132 aa, Zea mays
MGSFLSSLVTPPPAADDPNCAVVAAHSKATYDEQWAAHKSSSKLMVIDFSASWCGPCRFIEPAFKELASRFSDAIFVKVDVDELAEVARTWKVEAMPTFVLVKDGKEVSRVVGAKKDELERKIRMFTSSSSS

SEQ ID NO: 22593 - DNA, 402 bp, Zea mays
  CDS (1)..(402)
atgggctccttcttctcgaccttagtgacgccccctccggccgccgacgacccgaactgcgccgtggtggccgcgcactccaaggccacctacgacgagcagtgggcggcccacaagagcagcagcaagctgatggtgatcgacttctcggcgtcctggtgcgggccctgccgcttcatcgagccggccttcaaggagctggcctcccgcttcaccgatgccatcttcgtcaaggttgacgtcgacgagctcgcggaggtcgcaaggacatggaaggtagaggcgatgccaacgttcgtgctggtcaaggatgggaaggaggtaggccgtgtgattggggctaagaaggacgagcttgagaggaagatcaggatgttcgtcacgtcatcttcctcgtcctaa

SEQ ID NO: 22594 - protein, 133 aa, Zea mays
MGSFFSTLVTPPPAADDPNCAVVAAHSKATYDEQWAAHKSSSKLMVIDFSASWCGPCRFIEPAFKELASRFTDAIFVKVDVDELAEVARTWKVEAMPTFVLVKDGKEVGRVIGAKKDELERKIRMFVTSSSSS

SEQ ID NO: 22595 - DNA, 390 bp, Zea mays
  CDS (1)..(390)
atggagatccagcaccaccgggggctgggcaactccaaggttgtgaaggtgcagagcgaggaggcgtgggatctgttcactgatcaagcgagcaacgagggccggcccgttgttgcccatttcggggcgtcatggtgcgtgacgtccctgtccatgaactacaagtttgaggagctagcgcagacccaccccgaggtcttgttcctctacgtggacgtcgacgatgtccagagtgtttcatccaggtacggagtgaaggccatgccgacgttcttcctcatcaagagcaaggaggtggtggggaagatcgtcggggcgaacccagacgaggtgaagaagctggtggatgcttccgccgaacccttggagactcagatagtcgtggagtag

SEQ ID NO: 22596 - protein, 129 aa, Zea mays
MEIQHHRGLGNSKVVKVQSEEAWDLFTDQASNEGRPVVAHFGASWCVTSLSMNYKFEELAQTHPEVLFLYVDVDDVQSVSSRYGVKAMPTFFLIKSKEVVGKIVGANPDEVKKLVDASAEPLETQIVVE

SEQ ID NO: 22597 - DNA, 369 bp, Zea mays
  CDS (1)..(369)
atggcgtccgagcagggagtcgtgatcgcgtgccacagcaaggctgagttcgacgcccacatgaccaaggcccaggaagccggcaagctggtggtcatcgacttcactgccgcctggtgcggtccatgccgcgccatcgccccactgttcgtcgaacacgccaagaagttcactcaggtcgtcttcctgaaggtggacgtggacgaagtgaaggaagtcaccgcggcctacgaggtcgaggcgatgccgaccttccacttcgtcaagaacggcaagacggtcgcgaccatcgtgggtgccaggaaggacgagctcctggcccagatcgagaagcatgccgcgcctgcgcctgcgtctgcgtctgcctaa

SEQ ID NO: 22598 - protein, 122 aa, Zea mays
MASEQGVVIACHSKAEFDAHMTKAQEAGKLVVIDFTAAWCGPCRAIAPLFVEHAKKFTQVVFLKVDVDEVKEVTAAYEVEAMPTFHFVKNGKTVATIVGARKDELLAQIEKHAAPAPASASA

SEQ ID NO: 22599 - DNA, 369 bp, Zea mays
  CDS (1)..(369)
atggcgtcgaagcagggagtggtatgcgcgtgccacagcaagactgagttggacgcccacatgaccaaggcccaggaagccggcaagctggtggtcatcggcttcactgccgcctggtgcggtccatgccgcgccatcgccccactgttcgtcgaacacgccaagaagttcactcaggtcgtcttcctgaaggtgaacgtggacgaagtgaaggaagtcaccgcggcctacgaggtcgaggcgatgccgaccttccacttcgtcaagaacggcaagacggtcgcgaccatcgtgggtgccaggaaggacgagctcctggcccagatcgagaagcatgccgcgcctgcgcctgcgtctgcgtctgcctaa

SEQ ID NO: 22600 - protein, 122 aa, Zea mays
MASKQGVVCACHSKTELDAHMTKAQEAGKLVVIGFTAAWCGPCRAIAPLFVEHAKKFTQVVFLKVNVDEVKEVTAAYEVEAMPTFHFVKNGKTVATIVGARKDELLAQIEKHAAPAPASASA

SEQ ID NO: 22601 - DNA, 399 bp, Zea mays
  CDS (1)..(399)
atgggctccttcctctcgagcttagtcacgccccctccggccgccggcgaccccaaatgcaccgtggtggccgcccactccaaggccacctacgacgagcagtgggcggcccacaagagcagcagcaagctgatggtgatcgacttctcggcctcctggtgcgggccctgccgcttcatcgagccggccttcaaggagctggcctcccgcttctccgacgccatcttcgtcaaggtcgacgtcgacgagctcgcggaggtcgcaaggacatggaaggtagaggcgatgccaacgttcgtacttgtaaaggatgggaaggaggtaagccgtgtggttggggccaagaaggacgagcttgagaggaagatccggatgttcacgtcatcttcctcatcgtaa

SEQ ID NO: 22602 - protein, 132 aa, Zea mays
MGSFLSSLVTPPPAAGDPKCTVVAAHSKATYDEQWAAHKSSSKLMVIDFSASWCGPCRFIEPAFKELASRFSDAIFVKVDVDELAEVARTWKVEAMPTFVLVKDGKEVSRVVGAKKDELERKIRMFTSSSSS

SEQ ID NO: 22603 - DNA, 387 bp, Zea mays
  CDS (1)..(387)
atggcggcttcggaggcggcagcggcggcggcaacaccggtgacgccgacagaggggacggtgatcgcgatccacagcctggaggagtggagcatccagatcgaggaggccaacagcgccaagaagctggtggtgattgacttcactgcaacatggtgtcctccgtgccgcgccatggctccaatttttgctgatatggccaagaagtccccaaatgttgttttcctgaaagttgatgtggatgaaatgaagaccattgctgagcaattcagcgtagaggccatgccaacattcctgttcatgagggagggcgacgtcaaggacagggtcgttggcgcagcaaaggaagagctagcaaggaagcttgaactacacatggcctcgtag

SEQ ID NO: 22604 - protein, 128 aa, Zea mays
MAASEAAAAAATPVTPTEGTVIAIHSLEEWSIQIEEANSAKKLVVIDFTATWCPPCRAMAPIFADMAKKSPNVVFLKVDVDEMKTIAEQFSVEAMPTFLFMREGDVKDRVVGAAKEELARKLELHMAS

SEQ ID NO: 22605 - DNA, 387 bp, Zea mays
  CDS (1)..(387)
atggcggcttcgaaggcggcagcggcggcggcaacaccggtgacgccgacagaggggacggtgatcgcgatccacagcctggaggagtggagcatccagatcgaggaggccaacagcgccaagaagctggtggtgattgacttcactgcaacatggtgtcctccgtgccgcgccatggctccaatttttgctgatatggccaagaagtccccaaatgttgttttcctgaaagttgatgtggatgaaatgaagaccattgctgagcaattcagcgtagaggccatgccaacattcctgttcatgagggagggcgacgtcaaggacagggtcgttggcgcagcaaaggaagagctagcaaggaagcttgaactacacatggcctcgtag

SEQ ID NO: 22606 - protein, 128 aa, Zea mays
MAASKAAAAAATPVTPTEGTVIAIHSLEEWSIQIEEANSAKKLVVIDFTATWCPPCRAMAPIFADMAKKSPNVVFLKVDVDEMKTIAEQFSVEAMPTFLFMREGDVKDRVVGAAKEELARKLELHMAS

SEQ ID NO: 22607 - DNA, 21 bp, Artificial sequence
  primer
atgggtagctgcgtctctaag

SEQ ID NO: 22608 - DNA, 21 bp, Artificial sequence
  primer
tcaaggccgttgaggactttc

SEQ ID NO: 22609 - protein, 142 aa, Artificial sequence
  consensus sequence
  Variant (2)..(18): Xaa in position 2 to 18 is any amino acid
  Variant (19)..(53): Xaa in position 19 to 53 is any or no amino acid
  Variant (55)..(56): Xaa in position 55 to 56 is any amino acid
  Variant (58)..(58): Xaa in position 58 is any amino acid
  Variant (60)..(60): Xaa in position 60 is any amino acid
  Variant (66)..(69): Xaa in position 66 to 69 is any amino acid
  Variant (71)..(83): Xaa in position 71 to 83 is any amino acid
  Variant (84)..(86): Xaa in position 84 to 86 is any or no amino acid
  Variant (88)..(90): Xaa in position 88 to 90 is any amino acid
  Variant (94)..(105): Xaa in position 94 to 105 is any amino acid
  Variant (106)..(122): Xaa in position 106 to 122 is any or no amino acid
  Variant (126)..(128): Xaa in position 126 to 128 is any amino acid
  Variant (130)..(130): Xaa in position 130 is any amino acid
  Variant (132)..(137): Xaa in position 132 to 137 is any amino acid
  Variant (138)..(139): Xaa in position 138 to 139 is any or no amino acid
VXXXXXXXXXXXXXXXXXXXXXXXXXXXXXXXXXXXXXXXXXXXXXXXXXXXXVXXFXAXWCGPCXXXXPXXXXXXXXXXXXXXXXFXXXDVDXXXXXXXXXXXXXXXXXXXXXXXXXXXXXPTFXXXKXGXXXXXXXXVGA

SEQ ID NO: 22610 - protein, 24 aa, Artificial sequence
  protein pattern
  Variant (2)..(3): Xaa in position 2 to 3 is any amino acid
  Variant (4)..(4): Xaa in position 4 is any or no amino acid
  Variant (6)..(6): Xaa in position 6 is any amino acid
  Variant (8)..(8): Xaa in position 8 is any amino acid
  Variant (11)..(11): Xaa in position 11 is Gly, Pro or Thr
  Variant (14)..(14): Xaa in position 14 is Lys or Arg
  Variant (15)..(16): Xaa in position 15 to 16 is any amino acid
  Variant (17)..(17): Xaa in position 17 is Ala, Asp, Glu, Gly, Ser or Thr
  Variant (19)..(23): Xaa in position 19 to 23 is any amino acid
  Variant (24)..(24): Xaa in position 24 is Ala, Asp, Ser or Val
VXXXFXAXWCXPCXXXXPXXXXXX

SEQ ID NO: 22611 - DNA, 723 bp, Arabidopsis thaliana
  CDS (1)..(723)
atggggtccaaacaaccatacctaaacggcgcgtactacggaccatcaattccaccaccgcctaaggctcaccgcagctataactcacctggattcggatgctgttgcttcagctgcctcggaagctgtctacgttgctgcggttgctgcatcttaagcctgatctgcaacatcctcatagctgtagccgtaatcctcggagtcgccgctcttatcctctggctcatcttccgtccaaacgccgtcaaattctacgtcgccgacgctaatctgaaccgattcagcttcgatccaaacaacaacctccattacagtctcgatctcaatttcacaatccgtaaccctaatcaacgagtcggagtctactacgatgagttctcggttagtggctattacggagatcagagattcggatctgcgaacgtttcgtcgttttatcaagggcataagaatacgacggtgattttaaccaaaattgaaggacagaatctggtggtgctcggcgacggagcgagaacagatctaaaagatgatgagaaatctgggatttatcggattaatgcgaaattgaggctaagtgttaggtttaagttttggtttataaagtcgtggaagcttaaaccaaagattaagtgtgatgatcttaagattcctcttggttcctctaattctacaggagggtttaagtttcaaccggtgcagtgtgactttgacttatcttag

SEQ ID NO: 22612 - protein, 240 aa, Arabidopsis thaliana
MGSKQPYLNGAYYGPSIPPPPKAHRSYNSPGFGCCCFSCLGSCLRCCGCCILSLICNILIAVAVILGVAALILWLIFRPNAVKFYVADANLNRFSFDPNNNLHYSLDLNFTIRNPNQRVGVYYDEFSVSGYYGDQRFGSANVSSFYQGHKNTTVILTKIEGQNLVVLGDGARTDLKDDEKSGIYRINAKLRLSVRFKFWFIKSWKLKPKIKCDDLKIPLGSSNSTGGFKFQPVQCDFDLS

SEQ ID NO: 22613 - DNA, 1071 bp, Glycine max
  CDS (92)..(826)
acgaggaaacatcccttagaaaaaaataaaggttctctctcctttaataccctaacgttcccaagtttcagacttcaaggcagttcgcacaatgtcccatctaaacggcgcgtactacggcccctccgttccgccgccgaaatcctaccaccgcccctcccgcggcggccgcgacggctgctgctgcggctgcctgagctgcttctgcggctgcatcttcgactgcatcctgggcctcatctgcaagatcctcaccacaatcctcatcatcgtagcaatactcggctttctcttctggttcatcgtgcgccccaacgtgctcaaattccacgttaccgacgcgtccctcacgcgcttcgactacaccaccaacaacactctccactacgacctcgccctcaacgtctcgatccgcaacccgaaccgcagggtcggcgtctactacgaccacatcgaagcgcacgcgctgtaccaggatgttttgttcgggaaccagacattagggccgttcttccagcaccacaagaacaccaccttcgtgaatccccttttcaagggccagcgcgtgacgccactcgccgggaaccaggtcgaggtgtttgacaaggagaagggttcgggtgtttacaccatcgatttgaagctctttatggtggttcggttcaagttcttgctgttcaagagtgcgagcgtgaagcccaagattcggtgtgcgttgcacgtgccgctgaaatcgcgtaacgcaacaacaactatctcccccgatgctgcgtttcaacccacagagtgcggttgggattacgggaaaaaatggtggatccattagattaaaattccaccggtttttttttcccttagtatttcttgcgaaatttcttgttttgttctggctttattttaggtagtgtatattttcttgatgacattggttccctgactgaaacgtagccattctcctaggtggatcgatattacaaaaatattttttttttatatagccttatattcacttttgatacattttgatgtctattcgtattgttgaaattttatttttgtaaaacctcgtgc

SEQ ID NO: 22614 - protein, 244 aa, Glycine max
MSHLNGAYYGPSVPPPKSYHRPSRGGRDGCCCGCLSCFCGCIFDCILGLICKILTTILIIVAILGFLFWFIVRPNVLKFHVTDASLTRFDYTTNNTLHYDLALNVSIRNPNRRVGVYYDHIEAHALYQDVLFGNQTLGPFFQHHKNTTFVNPLFKGQRVTPLAGNQVEVFDKEKGSGVYTIDLKLFMVVRFKFLLFKSASVKPKIRCALHVPLKSRNATTTISPDAAFQPTECGWDYGKKWWIH

SEQ ID NO: 22615 - DNA, 726 bp, Oryza sativa (japonica cultivar-group)
  CDS (1)..(726)
atgggtgatcacgcaatggccaataatcacgagcacaaggtggaccacctcgaccagcccttctacggcccgcccgttctccctccggtcgagccgctgtccgccgccgccgcgcgccgccggtgcgtcgccgacccgtacgcgctctgctgcagggcgatccgcgtgctgacgatcgtggtcatcgccgtcggcgtggtggcgctggtgctctggctcgtgtccctgcccaacgccctcaaggcctacgtcgactccgccgagctcacccgcttcgagctcggcggcagcgacggcgccaagcggggccagctgctgcggtacaacctcaccgtggccgtgagcatccgcaacccgaaccgggaccaggccgtgctgtaccggcggctggaggcggtggtgctctacggcggcgagaggttcgggtacgtcgacttcccgcggacgcggcaggggcggaagagcacgatggtgatccggccgagcttcgtcgggcagggcgtcctcgccggcgcggcggcgttcggaagggagaaggaggaagggttcttcaacatcaacgtgaagctccacatgagggtgcgtctcaaggtgatggtcttcgtggacagcgtcgagtacaggccggacgtggactgctacatcagggtgcccgacccgagcaacgcgacggcggtggcgatggggttcacggcgacgcgctgccgtgtcgacgacttcatgtga

SEQ ID NO: 22616 - protein, 241 aa, Oryza sativa (japonica cultivar-group)
MGDHAMANNHEHKVDHLDQPFYGPPVLPPVEPLSAAAARRRCVADPYALCCRAIRVLTIVVIAVGVVALVLWLVSLPNALKAYVDSAELTRFELGGSDGAKRGQLLRYNLTVAVSIRNPNRDQAVLYRRLEAVVLYGGERFGYVDFPRTRQGRKSTMVIRPSFVGQGVLAGAAAFGREKEEGFFNINVKLHMRVRLKVMVFVDSVEYRPDVDCYIRVPDPSNATAVAMGFTATRCRVDDFM

SEQ ID NO: 22617 - DNA, 717 bp, Oryza sativa (japonica cultivar-group)
  CDS (1)..(717)
atggcagcctacgggaagccgcagccgccgctgaacgacgcgtactacggcccgccgatcccgccgccaccggcggcagcgtactacggcgcagcggcgcctccgcccgcgccacgccggagcggcgcgcaccgtctgttctgctgcctcttcagggtgctcgccgtcgccgtcatcgcgctcggcaccgccgtcctcgtcctctggctcatctaccgccccagcgtcgtcaaggcctacgccgacaccgctgcgctgtcccgcttcgacctcaccaacggcggcagcctcctcgtgtacaacctcaccgtgggcatgcgcgtgcgcaaccccaaccgcttcggcatcaacttcaggagcgtcgacgcgcaggcgtcctacgacggcgaccggttcgggtacgcgccgctgcagccgttatacgttggtcggaagagcgacgccaggttcgacgtgacgctgagcggctcggcggccatcgacgaccgcgacgtggagcgcacataccggagggagacggcgcaggggtcttacgaggttaaggtcagggtgtacgctagacaaggattcaaggtcaggggcttcaggctgaacaacaagagcaaattcacctgcacgctgaacctgccggcgcccaactccggcaacggcaccgcgagcgggacgccgacgacggtgttcacgaggaagcagccgaagtgcgacgtggactattga

SEQ ID NO: 22618 - protein, 238 aa, Oryza sativa (japonica cultivar-group)
MAAYGKPQPPLNDAYYGPPIPPPPAAAYYGAAAPPPAPRRSGAHRLFCCLFRVLAVAVIALGTAVLVLWLIYRPSVVKAYADTAALSRFDLTNGGSLLVYNLTVGMRVRNPNRFGINFRSVDAQASYDGDRFGYAPLQPLYVGRKSDARFDVTLSGSAAIDDRDVERTYRRETAQGSYEVKVRVYARQGFKVRGFRLNNKSKFTCTLNLPAPNSGNGTASGTPTTVFTRKQPKCDVDY

SEQ ID NO: 22619 - DNA, 618 bp, Oryza sativa (japonica cultivar-group)
  CDS (1)..(618)
atgggttcggcgagccgcgcggtgtcgtgcctgtgctgcccgtgcaagtgcctggcgtgcggcctcttcagctgcctctgcagcatcctcatctccctcctcgtcaccctcggcgtcctcgccctcatcttctacctcatcttccgcccccacatgatcgccgccaccgtcgactccgccgccctcacccagttcaccctctccaccaactccgccctcgcctacagcctcaccgtcgacctcaccgtccgcaaccccaacaagcgcgtcggcctctactacgacaacgtcgagtccctcgccctcttcgacggccagcgcttcggctacgcccccctcgactccttctaccagtccaccgaggcatccaccaagctctcccccgccttcaagggccagcagccgctccaaggcgacatcaccgccgccaacttcaggtcgcagcagaccgccggcaagttcgacatcgaggtcaagctcaacgccaagctcagggtcaaggtctgggccttcaaggttcccggacccaaggccaagatcagctgccccatcaccgtcccagcgtccgcccccaacgcccccgcattccagcgcaccgactgcaaagtctggttctga

SEQ ID NO: 22620 - protein, 205 aa, Oryza sativa (japonica cultivar-group)
MGSASRAVSCLCCPCKCLACGLFSCLCSILISLLVTLGVLALIFYLIFRPHMIAATVDSAALTQFTLSTNSALAYSLTVDLTVRNPNKRVGLYYDNVESLALFDGQRFGYAPLDSFYQSTEASTKLSPAFKGQQPLQGDITAANFRSQQTAGKFDIEVKLNAKLRVKVWAFKVPGPKAKISCPITVPASAPNAPAFQRTDCKVWF

SEQ ID NO: 22621 - DNA, 717 bp, Arabidopsis thaliana
  CDS (1)..(717)
atggcgaacggattaaacggcgccagttacggtccaccaatcaagccaccggtgaaaacttactacagtcatggccgacgcggctccgacgtaggttgcggtatctgtggttgtttctccagctgtctcctttgttgcggaggttgtctcgtaaacatcatctgcaacatcctcatcggtgtactcgtttgccttggagtcgttgctttaatcctctggtttatcctccgaccaaacgtcgtgaaattccaagttacggaagctgatttaacgcgatttgagttcgatccaagaagccataaccttcattacaatatctcgttgaacttttcgatacgtaatcctaatcaacgtcttgggatacactatgatcagttagaggtgagaggttactacggtgatcagcgtttttctgctgcgaatatgacgtcgttttatcagggacataagaacacgacggtggttggaacggagttaaacggacagaaactggttttgctcggtgccggtggacggagagattttagggaggatcggaggtctggggtttacaggatcgacgtgaagctcagatttaagttaaggtttaagtttgggtttttgaactcatgggccgttaggcccaagattaagtgtcatctcaaagtccccttgagcacctctagttcagatgaaagatttcagtttcatcccaccaagtgccacgttgacctctga

SEQ ID NO: 22622 - protein, 238 aa, Arabidopsis thaliana
MANGLNGASYGPPIKPPVKTYYSHGRRGSDVGCGICGCFSSCLLCCGGCLVNIICNILIGVLVCLGVVALILWFILRPNVVKFQVTEADLTRFEFDPRSHNLHYNISLNFSIRNPNQRLGIHYDQLEVRGYYGDQRFSAANMTSFYQGHKNTTVVGTELNGQKLVLLGAGGRRDFREDRRSGVYRIDVKLRFKLRFKFGFLNSWAVRPKIKCHLKVPLSTSSSDERFQFHPTKCHVDL

SEQ ID NO: 22623 - DNA, 684 bp, Arabidopsis thaliana
  CDS (1)..(684)
atggctgctgaacaacctctcaatggcgccttctacggtccatcagtcccaccaccagctcccaaaggctactaccgacgtgggcacggtcgtggctgtggctgctgcctcctcagcttattcgtcaaagtaatcatatcccttattgtcatcctcggcgtagccgctctcatcttctggctcatcgtccgacctcgtgccatcaagtttcacgtgaccgatgcgtcccttacccgctttgaccacacttccccggacaacattttaaggtataacctagccctcactgttcctgtccgtaacccaaacaagaggatcggactctactacgataggatcgaagctcatgcctactacgagggaaagcggtttagtaccatcacgttaactcctttctatcaaggacacaaaaacacaaccgttctcacaccaacgttccaaggccaaaaccttgttatttttaacgccggacagtctaggactttaaacgcggagaggatatccggtgtatacaatatagagatcaagttcaggcttagggttaggtttaagcttggggacttgaagtttaggaggattaagcctaaggttgattgcgatgatctaaggcttcctttaagtacctcaaacggaactacaactacctccactgttttcccgatcaagtgcgacttcgacttctga

SEQ ID NO: 22624 - protein, 227 aa, Arabidopsis thaliana
MAAEQPLNGAFYGPSVPPPAPKGYYRRGHGRGCGCCLLSLFVKVIISLIVILGVAALIFWLIVRPRAIKFHVTDASLTRFDHTSPDNILRYNLALTVPVRNPNKRIGLYYDRIEAHAYYEGKRFSTITLTPFYQGHKNTTVLTPTFQGQNLVIFNAGQSRTLNAERISGVYNIEIKFRLRVRFKLGDLKFRRIKPKVDCDDLRLPLSTSNGTTTTSTVFPIKCDFDF

SEQ ID NO: 22625 - DNA, 696 bp, Arabidopsis thaliana
  CDS (1)..(696)
atggcggacttaaacggtgcgtattacggaccatcgattccaccgccgaagaaagtctctcacagccacggcagacgcggcggtggatgcggttgtttaggtgactgtcttggctgctgcggctgctgtatcttaagcgtcatcttcaacatcctcataaccatagccgtcttattaggcatagctgctctaatcatctggctcattttcagacccaacgctatcaaattccacgtcaccgacgctaaactcaccgaattcacactcgacccaaccaacaacctccgatacaatctcgatctcaatttcacaatccgtaaccctaaccgccggatcggtgtttactatgatgaaatcgaagtcagaggatactacggtgatcagcgattcggtatgagtaacaacatctcgaagttttaccagggacataagaacacgacggtggttggaactaaactcgtgggacagcaattggtgctgcttgacggcggagagaggaaggatttgaacgaggatgtgaattctcagatctataggatcgatgccaagctgagacttaagattaggtttaagtttgggttgatcaagtcgtggaggttcaagcccaagatcaagtgcgatctcaaggttcctcttacctctaattcaaccagcgggtttgtttttcagccgaccaagtgtgacgttgacttttga

SEQ ID NO: 22626 - protein, 231 aa, Arabidopsis thaliana
MADLNGAYYGPSIPPPKKVSHSHGRRGGGCGCLGDCLGCCGCCILSVIFNILITIAVLLGIAALIIWLIFRPNAIKFHVTDAKLTEFTLDPTNNLRYNLDLNFTIRNPNRRIGVYYDEIEVRGYYGDQRFGMSNNISKFYQGHKNTTVVGTKLVGQQLVLLDGGERKDLNEDVNSQIYRIDAKLRLKIRFKFGLIKSWRFKPKIKCDLKVPLTSNSTSGFVFQPTKCDVDF

SEQ ID NO: 22627 - DNA, 711 bp, Oryza sativa subsp
  CDS (1)..(711)
atggccaataatcacgagcacaaggtggaccacctcgaccagcccttctacggcccgcccgttctccctccggtcgagccgctgtccgccgccgccgcgcgccgccggtgcgtcgccgacccgtacgcgctctgctgcagggcgatccgcgtgctgacgatcgtggtcatcgccgtcggcgtggtggcgctggtgctctggctcgtgtccctgcccaacgccctcaaggcctacgtcgactccgccgagctcacccgcttcgagctcggcggcagcgacggggccaagcggggccagctgctgcggtacaacctcaccgtggccgtgagcatccgcaacccgaaccgggaccaggccgtgctgtaccggcggctggaggcggtggtgctctacggcggcgagaggttcgggtacgtcgacttcccgcggacgcggcaggggcggaagagcacgatggtgatccggccgagcttcgtcgggcagggcgtcctcgccggcgcggcggcgttcggaagggagaaggaggaagggttcttcaacatcaacgtgaagctccacatgagggtgcgtctcaaggtgatggtcttcgtggacagcgtcgagtacaggccggacgtggactgctacatcagggtgcccgacccgagcaacgcgacggcggtggcgatggggttcacggcgacgcgctgccgtgtcgacgacttcatgtga

SEQ ID NO: 22628 - protein, 236 aa, Oryza sativa subsp
MANNHEHKVDHLDQPFYGPPVLPPVEPLSAAAARRRCVADPYALCCRAIRVLTIVVIAVGVVALVLWLVSLPNALKAYVDSAELTRFELGGSDGAKRGQLLRYNLTVAVSIRNPNRDQAVLYRRLEAVVLYGGERFGYVDFPRTRQGRKSTMVIRPSFVGQGVLAGAAAFGREKEEGFFNINVKLHMRVRLKVMVFVDSVEYRPDVDCYIRVPDPSNATAVAMGFTATRCRVDDFM

SEQ ID NO: 22629 - DNA, 717 bp, Oryza sativa subsp
  CDS (1)..(717)
atggcagcctacgggaagccgcagccgccgctgaacgacgcgtactacggcccgccgatcccgccgccaccggcggcagcgtactacggcgcagcggcgcctccgcccgcgccacgccggagcggcgcgcaccgtctgttctgctgcctcttcagggtgctcgccgtcgccgtcatcgcgctcggcaccgccgtcctcgtcctctggctcatctaccgccccagcggcgtcaaggcctacgccgacaccgctgcgctgtcccgcttcgacctcaccaacggcggcagcctcctcgtgtacaacctcaccgtgggcatgcgcgtgcgcaaccccaaccgcttcggcatcaacttcaggagcgtcgacgcgcaggcgtcctacgacggcgaccggttcgggtacgcgccgctgcagccgttctacgttggtcggaagagcgacgccaggttcgacgtgacgctgagcggctcggcggccatcgacgaccgcgacgtggagcgcacataccggagggagacggcgcaggggtcttacgaggttaaggtcagggtgtacgctagacaaggattcaaggtcaggggcttcaggctgaacaacaagagcaaattcacctgcacgctgaacctgccggcgcccagctccggcaacggcaccgcgagcgggacgccgacgacggtgttcacgaggaagcagccgaagtgcgacgtggactattga

SEQ ID NO: 22630 - protein, 238 aa, Oryza sativa subsp
MAAYGKPQPPLNDAYYGPPIPPPPAAAYYGAAAPPPAPRRSGAHRLFCCLFRVLAVAVIALGTAVLVLWLIYRPSGVKAYADTAALSRFDLTNGGSLLVYNLTVGMRVRNPNRFGINFRSVDAQASYDGDRFGYAPLQPFYVGRKSDARFDVTLSGSAAIDDRDVERTYRRETAQGSYEVKVRVYARQGFKVRGFRLNNKSKFTCTLNLPAPSSGNGTASGTPTTVFTRKQPKCDVDY

SEQ ID NO: 22631 - DNA, 618 bp, Oryza sativa
  CDS (1)..(618)
atgggttcggcgagccgcgcggtgtcgtgcctgtgctgcccgtgcaagtgcctggcgtgcggcctcttcagctgcctctgcagcatcctcatctccctcctcgtcaccctcggcgtcctcgccctcatcttctacctcatcttccgcccccacatgatcgccgccaccgtcgactccgccgccctcacccagttcaccctctccaccaactccgccctcgcctacagcctcaccgtcgacctcaccgtccgcaaccccaacaagcgcgtcggcctctactacgacaacgtcgagtccctcgccctcttcgacggccagcgcttcggctacgcccccctcgactccttctaccagtccaccgaggcatccaccaagctctcccccgccttcaagggccagcagccgctccaaggcgacatcaccgccgccaacttcaggtcgcaacagaccgccggcaagttcgacatcgaggtcaagctcaacgccaagctcagggtcaaggtctgggccttcaaggttcccggacccaagcccaagatcagctgccccatcaccgtcccagcgtccgcccccaacgcccccgcattccagcgcaccgactgcaaagtctggttctga

SEQ ID NO: 22632 - protein, 205 aa, Oryza sativa
MGSASRAVSCLCCPCKCLACGLFSCLCSILISLLVTLGVLALIFYLIFRPHMIAATVDSAALTQFTLSTNSALAYSLTVDLTVRNPNKRVGLYYDNVESLALFDGQRFGYAPLDSFYQSTEASTKLSPAFKGQQPLQGDITAANFRSQQTAGKFDIEVKLNAKLRVKVWAFKVPGPKPKISCPITVPASAPNAPAFQRTDCKVWF

SEQ ID NO: 22633 - DNA, 666 bp, Nicotiana tabacum
  CDS (1)..(666)
atggcccttccattccgccaccagcaaaatcctatcaccgccacggccgcggcagcagctgcaacccatgtagctgtctctttggctgcctctgcaattgttttttcaaaattatcttcacccttcacccttctaatcatcctcggagtgattgcattagttctatggctcgttcttcgacctaacaaagtcaagttctacgtgaccgatgctacgttgactcagttcgatttgtccaccacaaacaacactattttctatgatcttgctcttaatatgactattagaaaccccaacaaacgtattggaatttactacgattcaattgaagctagagctttgtatcaaggcgagaggtttgatagtacaaatttggaaccattttatcagggtcacaagaatactagcagcttgcgtccagtattcaaaggtcagagcttggttttattgggagatagagagaaatccaattacaataatgagaagaatttaggggtttatgagatggaagtgaagctttacatgcgtattaggcttaaggttggttggatcaaaacacataaaattaagccaaagattgagtgtgatttcaaggtacctctagggtctaatggcagatcatcatctgctaattttgaggaaaccagatgccatcttgattggtag

SEQ ID NO: 22634 - protein, 221 aa, Nicotiana tabacum
MALPFRHQQNPITATAAAAAATHVAVSLAASAIVFSKLSSPFTLLIILGVIALVLWLVLRPNKVKFYVTDATLTQFDLSTTNNTIFYDLALNMTIRNPNKRIGIYYDSIEARALYQGERFDSTNLEPFYQGHKNTSSLRPVFKGQSLVLLGDREKSNYNNEKNLGVYEMEVKLYMRIRLKVGWIKTHKIKPKIECDFKVPLGSNGRSSSANFEETRCHLDW

SEQ ID NO: 22635 - DNA, 744 bp, Medicago truncatula
  CDS (1)..(744)
atgatggccgatcatcaacttaatggcgctcactatggcccttccatcccaccgacgagaccacaaaggcgacgccacaatgccggctgcggcttctgcagttgcatcttgggctgctttagaagctgttgcggatgcatgttcaactgcattttaagcctaatttgcagaatcatagccacaatcatcatcttggtggcaatattcggtttcctcttctggcttatcgtgcgtcctaacgccctcaagttcaccgttatggaggcatcacttactcaattcaatttcacaaataacaacacacttcattatgatctttccgtcaatctcacaatcagaaaccctaatagaagagttagtgtctattacaatgacatcgaaacactttcattttataaagattttaggtttggttctcaaaccctaggaaaattctttcaacctcataagaatacaagccttttgaatcctgtttttaaaggtcaacaagtgattcctttgagttcaagtcagatttcggagttcaataaggagacgaacaatggggtttatggaattaatttgaaggttttgcttaatgttaggtttgccttgggtttgatcaagacagggaatctgaaacaaaaccatcattgtgatttgaaggttcctttcaagtcacacaatggaacttcttctttgggtaatggatttcaagccactcgttgtgaatgggattccaaatggtggttgttgttccgttag

SEQ ID NO: 22636 - protein, 247 aa, Medicago truncatula
MMADHQLNGAHYGPSIPPTRPQRRRHNAGCGFCSCILGCFRSCCGCMFNCILSLICRIIATIIILVAIFGFLFWLIVRPNALKFTVMEASLTQFNFTNNNTLHYDLSVNLTIRNPNRRVSVYYNDIETLSFYKDFRFGSQTLGKFFQPHKNTSLLNPVFKGQQVIPLSSSQISEFNKETNNGVYGINLKVLLNVRFALGLIKTGNLKQNHHCDLKVPFKSHNGTSSLGNGFQATRCEWDSKWWLLFR

SEQ ID NO: 22637 - DNA, 1013 bp, Nicotiana tabacum
  CDS (59)..(748)
cctatacatataccaaagaaacaaagtaatataatctgtactttatttttcttgagccatgccggaatccaacttgaacggagcatattatggcccttccattccgccaccagcaaaatcctatcaccgccacggccgcggcagcagctgcaacccatgtagctgtctctttggctgcctctgcaattgttttttcaaaattatcttcacccttctgatcatcctcggagtcattgcattagtactctggctcgttcttcgtcctaacaaagtcaaattctacgtgaccgatgccacgttgacacagttcgatttgtccaacacaaacaacactattttctatgatcttgctcttaatatgactattagaaaccccaacaagcgtattggaatttactatgattcaattgaagctagagctatgtatcaaggcgagaggtttcatagtacaaatttgaaaccattttatcagggtcacaagaatactagcagcttgcatccagtgttcaaaggtcaaagcttggttctattgggagacagagagaaatccaattacaataatgagaagaatttaggagtttatgagatggaagtgaagctttacatgcgtattaggctaaaggctggttggatcaaaacacacaaaattaagccaaagattgagtgtgatttcaaggttcctctggagtctaatggcagatcatcatctgctaatttcgaggaaactagatgccatcttgattggtagttttcttctatcatcgcaccattattgatcgtcttcacatttcgatggagtttgcttctgttttttcattatttttatatatttagatttgttctatttcctatattctttggatattagcagatattcttgattatgggatttctatcccttttgtttttccggcgtttagtgttcattgatatacatggtaccatcttgttatatttggatatggttgtatgtaaataaataatgagttcgtctaaaaaaaaaaaaaaaaaaa

SEQ ID NO: 22638 - protein, 229 aa, Nicotiana tabacum
MPESNLNGAYYGPSIPPPAKSYHRHGRGSSCNPCSCLFGCLCNCFFKIIFTLLIILGVIALVLWLVLRPNKVKFYVTDATLTQFDLSNTNNTIFYDLALNMTIRNPNKRIGIYYDSIEARAMYQGERFHSTNLKPFYQGHKNTSSLHPVFKGQSLVLLGDREKSNYNNEKNLGVYEMEVKLYMRIRLKAGWIKTHKIKPKIECDFKVPLESNGRSSSANFEETRCHLDW

SEQ ID NO: 22639 - DNA, 996 bp, Nicotiana tabacum
  CDS (82)..(771)
attgtaacctatagtacaccaaaggaacaaataaacagtataagttggtatttattttttcattcttgttttggttaagctatggcagaatcccacttgaacggagcatattatggcccttcaattccgccatcgtcgaaaacctatcaccaccatggccgcggcagcagctgcaacccatgtagctgtctctttggctgcctctgcaattgcattttccaaatattcttcaccattcttgtcatcattggagtcgctgcattagttctatggctcgttcttcgtcctaacaaagtcaaattctacgtgaccgatgcaacgttgacacagttcgatttgtccaccacaaacaacactataaactatgatcttgctcttaatatgactattagaaaccccaacaaacgtattggaatttactacgattcaattgaagctagagctatgtatcaaggtgaaagatttgctagtcaaaatttggaaccattttatcagggtcacaagaatactagtagcttacatccagtgttcaaaggtcagagcttggttctattgggagacagagagaaaaccaactacaataatgagaagaatgcaggggtttatgagatggaagtgaagctttccatgcgtataagactaaagtttggttggattaaaacacgcaaaattaagccaaagattgagtgtgatttcaaggttcctctggagtctaatggcagatcatcatctgctaatttcgaggaaactagatgccatcttgattggtagttttcttctatcatcgcaccattgttgatcatcttcacatttcgatggagtttatttttgttttttattatttattgtatttcctgtattctttggaatttcgatattagcggatattcttgattattggatttctatcacttttgattttccgtcattgacttagtgttcattaatgtaaataaataattacttttatttttgctgaaaaaaaaaaaaaaaaaa

SEQ ID NO: 22640 - protein, 229 aa, Nicotiana tabacum
MAESHLNGAYYGPSIPPSSKTYHHHGRGSSCNPCSCLFGCLCNCIFQIFFTILVIIGVAALVLWLVLRPNKVKFYVTDATLTQFDLSTTNNTINYDLALNMTIRNPNKRIGIYYDSIEARAMYQGERFASQNLEPFYQGHKNTSSLHPVFKGQSLVLLGDREKTNYNNEKNAGVYEMEVKLSMRIRLKFGWIKTRKIKPKIECDFKVPLESNGRSSSANFEETRCHLDW

SEQ ID NO: 22641 - DNA, 687 bp, Capsicum chinense
  CDS (1)..(687)
atgcctgaatcgaacttgaacggagcctattatggcccgtccatcccgcccccgtccaaatcttatcatcgtcacggacggggaagcagctgcaacccatgcagctgcctctttggttgcctatgcaattgcatcttccaaataatcttcactattctcatcgtccttggagtcattgcgttagtcctatggcttgtcctacgtcctaacaaggtcaaattctacgtgactgatgctacgttgacacaatttgatttgtccactgccaacaacaccctttactatgatcttgccctcaatatgactataaggaaccctaataaaagaatcgggatttactacgattcgattgaagctagaggtatgtataaaggtgagagatttgctagtcaaaatttggaaccgttttatcaaggtcacaagaatactagcagtttgcatccagtgcttaaaggacaaagtttggttctattgggggatagagagaaatcaaattacaataatgagaagaattctggagtttatgatattgaaatgaagctttatatgcgtataaggctaaagattggttggattaaaacacacaaaattaagcccaaaattgaatgtgacatcaaggttcctttggagtccaatggaagatcatctgctaattttgaggaaactagatgtcatcttgattggtag

SEQ ID NO: 22642 - protein, 228 aa, Capsicum chinense
MPESNLNGAYYGPSIPPPSKSYHRHGRGSSCNPCSCLFGCLCNCIFQIIFTILIVLGVIALVLWLVLRPNKVKFYVTDATLTQFDLSTANNTLYYDLALNMTIRNPNKRIGIYYDSIEARGMYKGERFASQNLEPFYQGHKNTSSLHPVLKGQSLVLLGDREKSNYNNEKNSGVYDIEMKLYMRIRLKIGWIKTHKIKPKIECDIKVPLESNGRSSANFEETRCHLDW

SEQ ID NO: 22643 - DNA, 889 bp, Solanum tuberosum
  CDS (36)..(713)
acttaattttgactttcttgtttttgttataagctatgtccaacttgaacggagcctattatggtccatccattccgcccccgtccaaatcctaccatcgacatggacggggaagcagctgcaacccttgcagctgcctcttcggttgcctatgcaactgcattttccaaatcatcttcaccatcctcatcgtcctcggagtcattgcattagtcctctggctagtccttcgtcctaacaaggtcaatttctacgtgacagatgccacattgacacaattcgattattccactacaaacaacaccctctactatgatcttgcactcaacatgactattaggaaccctaataaacgaatcgggatttactacgattcgatcgaagcaagaggtatgtatcaaggccagagatttgctagtcaaaatttggaacgattttatcaaggtcacaaaaatactagctatttgcatccagtatttaaaggacaaaatttggttctattgggagatagagagaaaacaaattataataatgagaagaatttagggatttatgagatggaaatgaagctttatatgcgtataaggctaaagattggttggattaaaactcacaaaattaagcccagaattgagtgtgattttaaggtacctttggagtccagtggcagatctgttaattttgaggaaactaggtgccatcttgattggtagattatttttttattattatttgtgatttgttgtatttcctttatttattggatcatattagtataatttcttgattaggggatttatctccttttttgttatttggatagatattatggttgttaataaataatgagtttgttttaaaaaaaaaaaaaaaaaaaaaaaaaaaaaaa

SEQ ID NO: 22644 - protein, 225 aa, Solanum tuberosum
MSNLNGAYYGPSIPPPSKSYHRHGRGSSCNPCSCLFGCLCNCIFQIIFTILIVLGVIALVLWLVLRPNKVNFYVTDATLTQFDYSTTNNTLYYDLALNMTIRNPNKRIGIYYDSIEARGMYQGQRFASQNLERFYQGHKNTSYLHPVFKGQNLVLLGDREKTNYNNEKNLGIYEMEMKLYMRIRLKIGWIKTHKIKPRIECDFKVPLESSGRSVNFEETRCHLDW

SEQ ID NO: 22645 - DNA, 612 bp, Glycine max
  CDS (1)..(612)
atggccgataagcacggaagaagctgctgttgctgcctctttggaatcttgtggaagattctggttgcactcatcgtcctcgttggcctcgtattcctcatattctggctggtggttcaaccccgctccttcaagttccaggtcacggaagcggacctaacccaatttgattactacaccaacaatcacactctccactacaacatggtgctcaacttcactgcacgcaaccccaacaagaagctcagcatatactacgacaaagttgaggcattagcattctacgaggatgccaggttcgccaattacgatgtcataactcacatgaactccttccgccagtacaagaagagcaccagccccatgagcgccgttttctcggggaagaaggtgttgatgctcaacagcgaacaagtctctaagttgaaccaagacaagagtgatggggtttatgacatctacgtgaagctcaacttcaggattcggttcaggctcggggactccatatccggtaacttgaagcccaaggtcaaatgtcacctcaaggttcccttcagtaaaagtggcacctttactctctttgagaccaccaaatgttctgtccatttctag

SEQ ID NO: 22646 - protein, 203 aa, Glycine max
MADKHGRSCCCCLFGILWKILVALIVLVGLVFLIFWLVVQPRSFKFQVTEADLTQFDYYTNNHTLHYNMVLNFTARNPNKKLSIYYDKVEALAFYEDARFANYDVITHMNSFRQYKKSTSPMSAVFSGKKVLMLNSEQVSKLNQDKSDGVYDIYVKLNFRIRFRLGDSISGNLKPKVKCHLKVPFSKSGTFTLFETTKCSVHF

SEQ ID NO: 22647 - DNA, 723 bp, Arabidopsis thaliana
  CDS (1)..(723)
atggggtccaaacaaccatacctaaacggcgcgtactacggaccatcaattccaccaccgcctaaggctcaccgcagctataactcacctggattcggatgctgttgcttcagctgcctcggaagctgtctacgttgctgcggttgctgcatcttaagcctgatctgcaacatcctcatagctgtagccgtaatcctcggagtcgccgctcttatcctctggctcatcttccgtccaaacgccgtcaaattctacgtcgccgacgctaatctgaaccgattcagcttcgatccaaacaacaacctccattacagtctcgatctcaatttcacaatccgtaaccctaatcaacgagtcggagtctactacgatgagttctcggttagtggctattacggagatcagagattcggatctgcgaacgtttcgtcgttttatcaagggcataagaatacgacggtgattttaaccaaaattgaaggacagaatctggtggtgctcggcgacggagcgagaacagatctaaaagatgatgagaaatctgggatatatcggattgatgcgaaattgaggctaagtgttaggtttaagttttggtttataaagtcgtggaagcttaaaccaaagattaagtgtgatgatcttaagattcctcttggttcctctaattctacaggagggtttaagtttcaaccggtgcagtgtgactttgacttatcttag

SEQ ID NO: 22648 - protein, 240 aa, Arabidopsis thaliana
MGSKQPYLNGAYYGPSIPPPPKAHRSYNSPGFGCCCFSCLGSCLRCCGCCILSLICNILIAVAVILGVAALILWLIFRPNAVKFYVADANLNRFSFDPNNNLHYSLDLNFTIRNPNQRVGVYYDEFSVSGYYGDQRFGSANVSSFYQGHKNTTVILTKIEGQNLVVLGDGARTDLKDDEKSGIYRIDAKLRLSVRFKFWFIKSWKLKPKIKCDDLKIPLGSSNSTGGFKFQPVQCDFDLS

SEQ ID NO: 22649 - DNA, 730 bp, Nicotiana tabacum
  CDS (22)..(711)
gaattcactagtgattgagccatgccggaatccaatttgaacggagcctattatggcccttccattccgccaccagcaaaatcctatcaccgccacggccgcggcagcagctgcaacccatgtagctgtctctttggctgcctctgcaattgttttttcaaaattatcttcacccttctaatcatcctcggagtcattgcattagttctatggctcgttcttcgtcctaacaaagtcaagttctacgtgaccgatgctacgttgactcagttcgatttgtccaccacaaacaacactattttctatgatcttgctcttaatatgactattagaaaccccaacaaacgtattggaatttactacgattcaattgaagctagagctttgtatcaaggcgagaggtttgatagtacaaatttggaaccattttatcagggtcacaagaatactagcagcttgcgtccagtattcaaaggtcagagcttggttttattgggagatagagagaaatccaattacaataatgagaagaatttaggggtttatgagatggaagtgaagctttacatgcgtattaggcttaaggttggttggatcaaaacacataaaattaagccaaagattgagtgtgatttcaaggtacctctagggtctaatggcagatcatcatctgctaattttgaggaaaccagatgccatcttgattggtagcaatcgaattcccgcggcc

SEQ ID NO: 22650 - protein, 229 aa, Nicotiana tabacum
MPESNLNGAYYGPSIPPPAKSYHRHGRGSSCNPCSCLFGCLCNCFFKIIFTLLIILGVIALVLWLVLRPNKVKFYVTDATLTQFDLSTTNNTIFYDLALNMTIRNPNKRIGIYYDSIEARALYQGERFDSTNLEPFYQGHKNTSSLRPVFKGQSLVLLGDREKSNYNNEKNLGVYEMEVKLYMRIRLKVGWIKTHKIKPKIECDFKVPLGSNGRSSSANFEETRCHLDW

SEQ ID NO: 22651 - DNA, 684 bp, Brassica napus
  CDS (1)..(684)
atggctgaacaacctctcaacggtgccttctacggtccatcagtcccgccaccggcccctaaaggctactttcgccgacgtgggcacagccgcggttgttgttgctgcctcctcagcttctttgtaaaagtcatcatagctcttattgtcatacttggcatagccgctcttatcttctggctcatcgtccgtcctcggtccatcaagtttcatgtgacccaagcaaccctttcccggtttgaacacacttcccccgacaaccttttaaggtataacctatcccttacggtccctgtccgtaaccctaacaagaggataggagtttactacgacaggatcgaagctcatgcatactacgatggaaagcggtttagttccaccaggttaactccgttctatcaaggacacaagaacactacggttctcagaccaatgttccaaggccaaaactttgttatctttaacgccggagagtcacggacttacaacgagcagacgatcgctggagtttacgatatagagatcaagtttaggcttagggttaggttcaagcttggggacttgaagactcggaggattaagcctaaggttaactgcgacgatctaaggcttcctttaagtaccttaaacggaactacaaccttctctaccattctccctctcaagtgcgacttcgatttttaa

SEQ ID NO: 22652 - protein, 227 aa, Brassica napus
MAEQPLNGAFYGPSVPPPAPKGYFRRRGHSRGCCCCLLSFFVKVIIALIVILGIAALIFWLIVRPRSIKFHVTQATLSRFEHTSPDNLLRYNLSLTVPVRNPNKRIGVYYDRIEAHAYYDGKRFSSTRLTPFYQGHKNTTVLRPMFQGQNFVIFNAGESRTYNEQTIAGVYDIEIKFRLRVRFKLGDLKTRRIKPKVNCDDLRLPLSTLNGTTTFSTILPLKCDFDF

SEQ ID NO: 22653 - DNA, 684 bp, Brassica napus
  CDS (1)..(684)
atggctgaacaacctctcaacggtgccttctacggtccatcagtcccaccaccggctcctaaaggctacttccgccgacccgggcacagccgcggttgtggctgctgcctcctcagcttcgttgtcaaagtcatcatagccattattgtcatccttggcatagccgctcttatcttctggctcatcgtccgtcctcgcgccatcaagtttcacgtgaccgaagcgtctcttacgcgctttgaacacacttccccggacaacattttaaggtataacctagccctcacagttcctgtccgcaaccctaacaagaggatcggagtctactacgacaggatcgacgctcatgcgtactacgatggaaagcggtttagttccaccacgttagctcctttctatcaaggacacaagaacacgaccgttctcagaccaatgttccaaggccaaaaccttgttatgttcaacgccggagagttacggacttacaacgaggagagtatcgccggagtttacaatattgagatcaaatttaggcttagggttaggtttaagcttggggacttgaagtctcggagggttaagcctaaggttaactgcgaggatataaggcttcctttaagtacgttcaacggaactacaacctccgctaccgttctccctctcaagtgcgacttcgatttttaa

SEQ ID NO: 22654 - protein, 227 aa, Brassica napus
MAEQPLNGAFYGPSVPPPAPKGYFRRPGHSRGCGCCLLSFVVKVIIAIIVILGIAALIFWLIVRPRAIKFHVTEASLTRFEHTSPDNILRYNLALTVPVRNPNKRIGVYYDRIDAHAYYDGKRFSSTTLAPFYQGHKNTTVLRPMFQGQNLVMFNAGELRTYNEESIAGVYNIEIKFRLRVRFKLGDLKSRRVKPKVNCEDIRLPLSTFNGTTTSATVLPLKCDFDF

SEQ ID NO: 22655 - DNA, 708 bp, Brassica napus
  CDS (1)..(708)
atgggggacagacaaccgcacttgaacggtgcctattacgggccatcgattcctccgccgacgaaaacctctcacagccacggcagacgcggcggtggatgctgctgtttaggcgactgtctcggctgttgcggctgctgcatcttaagcgtcatcttcaacatcctcataaccctagccatcgtcgtaggcatagccgctttgatcatctggctaattttccgaccaaacgccatcaagttccacgtcaccgacgccaaactcactcagttcacgctcggcacggacaacaaccttcgatacaatctcgacctaaacttcacgatccgaaaccctaatcgacgtatcggtgtttactatgatcagatcgaggtcagaggctactacggtgatcagcgttttggggtaagtaacgtctcgccgttctaccagggacacaagaacacgacggtggttggaactaatatagctggacagagcttggtggtgcttaacggcggagatatgagggatatggacgaggatgtgaagtcagggatctacaggatcgatgcgaagctgaggcttaagattaggtttaagtttgggttgatcaagtcgtggaagttcaagccgaagatcaggtgtgatctcaaagttcctctaagttcatctaacacaaccagcgggtttcagttccagcggaccaagtgtgacgttgacttttga

SEQ ID NO: 22656 - protein, 235 aa, Brassica napus
MGDRQPHLNGAYYGPSIPPPTKTSHSHGRRGGGCCCLGDCLGCCGCCILSVIFNILITLAIVVGIAALIIWLIFRPNAIKFHVTDAKLTQFTLGTDNNLRYNLDLNFTIRNPNRRIGVYYDQIEVRGYYGDQRFGVSNVSPFYQGHKNTTVVGTNIAGQSLVVLNGGDMRDMDEDVKSGIYRIDAKLRLKIRFKFGLIKSWKFKPKIRCDLKVPLSSSNTTSGFQFQRTKCDVDF

SEQ ID NO: 22657 - DNA, 921 bp, Brassica napus
  CDS (1)..(921)
atgggagacatgaaacaaccacgcctcaacgacggatacgacgagccacaacaaccacacctcaacggcggttacgacgggccacaacaaccacacctcaaccgcggattcgacgtgccaccacaaccacacctcaaccggggatacgacgggccaccaccaccacacctcaacggcggatactacggtccacaacaaccacacctcaacggcggatactacgggccaccgattcctccgccgccgcctaaacccaagcgccgatacaaagcccccggatgctgctgcttgagctgcatgtgcagctgcttcggaagctgcctacgctgctgcggctgctgcatcctcagcctggtctggaacatcctcatcgccgtcgccgtgatcctcggcgtaaccgccttgatcctctggctgatcttccgccccaacgccgtcaaattctacgtcgccgacgccaatctgaaccggttcagcctcgattcgagcgacaacagcaacctcctctacgacctcgacctcaatttcacgatccggaaccctaaccagcgtctcggaatctactacgacgtcgtccaggtcagtggatactacggggatcagcggttcggctccgtcgagatcgcgccgttctatcaggggcacaagaacacgacggtggtggtgacgaagatggaggggcagaacttggtggtgctcggggacggagcgaaggcggatctgaaggaggatgacttaaccggagtgtaccggatcaatgtgaggctggtgatgagtgttcggtttgagttttggattattaagtcgtggaaggttaaaccgaagattaggtgtgatgatctgaagatccctctcggttcctctagtttgaccagcgggtttaagtttcagactatgcagtgtaactttgacttccgttag

SEQ ID NO: 22658 - protein, 306 aa, Brassica napus
MGDMKQPRLNDGYDEPQQPHLNGGYDGPQQPHLNRGFDVPPQPHLNRGYDGPPPPHLNGGYYGPQQPHLNGGYYGPPIPPPPPKPKRRYKAPGCCCLSCMCSCFGSCLRCCGCCILSLVWNILIAVAVILGVTALILWLIFRPNAVKFYVADANLNRFSLDSSDNSNLLYDLDLNFTIRNPNQRLGIYYDVVQVSGYYGDQRFGSVEIAPFYQGHKNTTVVVTKMEGQNLVVLGDGAKADLKEDDLTGVYRINVRLVMSVRFEFWIIKSWKVKPKIRCDDLKIPLGSSSLTSGFKFQTMQCNFDFR

SEQ ID NO: 22659 - DNA, 714 bp, Brassica napus
  CDS (1)..(714)
atgggagacaggcaccaccaggacttaaacggcgcctactacggcccatcgatcccacctccaaggaaagtctctcacagccacggcagaggcggcggcggctgctgcggctgcataggcgactgcctcggctgctgcggatgctgcatcttgagcgtcatcttcaacatcctcatcaccatagccatcctcttaggcatagccgctctgatcatctggctaatcttccgaccaaacgccatcaagttccacgtcgccgacgccaagctcacgcagttcacgctcggcgcggacaacaacctccgctacaacctcgacctcaacttcacgatccggaaccctaaccgccgcatcggcgtctactacgaccagatcgaggtcagggggtactacggagatgaaagattcggtaacagtaacgtggcgccgttctaccaggggcacaagaacacgacggaggtggggagtaaactcgaggggcagggcttggtggtgcttaacggcggagatcggaaggatctggacgaggatttgaagtcgggggtatacaggatcgacgcgaagctgaggcttagggtgaggtttaagtttgggttgatcaagtcgtggaggttcaagcccaaggttaggtgtgatctcaaggttcctctcggttcctctaatgtaaccagcgggtttcagtttcagcggaccaagtgtgacattgacttttga

SEQ ID NO: 22660 - protein, 237 aa, Brassica napus
MGDRHHQDLNGAYYGPSIPPPRKVSHSHGRGGGGCCGCIGDCLGCCGCCILSVIFNILITIAILLGIAALIIWLIFRPNAIKFHVADAKLTQFTLGADNNLRYNLDLNFTIRNPNRRIGVYYDQIEVRGYYGDERFGNSNVAPFYQGHKNTTEVGSKLEGQGLVVLNGGDRKDLDEDLKSGVYRIDAKLRLRVRFKFGLIKSWRFKPKVRCDLKVPLGSSNVTSGFQFQRTKCDIDF

SEQ ID NO: 22661 - DNA, 690 bp, Glycine max
  CDS (1)..(690)
atggccgataagcaaccccacttgaacggcgcttattacggtcccgccattcctccggcggagcaaccacgctaccgccctcacagtcaccgcggaagaagctgctgttgctgcctcttcggaatcttgtggaagattctggttgcactcattgtcctcgttggcctcgcggtcctcatcttctggctggtggttcaaccccgttccttcaagttccacgtcacggaagccgacctaacacaatttgattactataccaacaacaacacccttcactacaacatggtcctcaacttcactgcacgcaaccccaacaagaagctcaacatatactacgacaaagttgaggcattagcattctacgaggatgtcaggttcgcaagttacgatgtcataacacacatgaactccttccgccagtacaagaagagctccagccccatgagcgccgttttcacagggcaacaattgctgatgctgaacaatgatcaagtctcagagttcaaccaagacaggaatactggtgtttatgacatctatgtgaagctctacttcaggatgaggttcaggctcggggactttatatccaatgactacaagcccaaggtcaaatgtcacctcaaggttcctttcagtaaaaatggcacctttactctgtttcagaccaccaaatgtgatgtcgatttctag

SEQ ID NO: 22662 - protein, 229 aa, Glycine max
MADKQPHLNGAYYGPAIPPAEQPRYRPHSHRGRSCCCCLFGILWKILVALIVLVGLAVLIFWLVVQPRSFKFHVTEADLTQFDYYTNNNTLHYNMVLNFTARNPNKKLNIYYDKVEALAFYEDVRFASYDVITHMNSFRQYKKSSSPMSAVFTGQQLLMLNNDQVSEFNQDRNTGVYDIYVKLYFRMRFRLGDFISNDYKPKVKCHLKVPFSKNGTFTLFQTTKCDVDF

SEQ ID NO: 22663 - DNA, 714 bp, Brassica napus
  CDS (1)..(714)
atgggagacaggcaccaccaagacttaaacggcgcctactacggcccatcgatcccacctccacggaaagtctctcacagccacggcagaggcggcggcggctgctgcggctgcataggcgactgcctcggctgctgcggatgctgcatcttgagcgtcatcttcaacatcctcataaccatagccatcctcttagccatagccgctctgatcatctggctaatcttccgaccaaacgccatcaagttccacgtcaccgacgccaagctcacgcagttcactctcggcgcggacaacaacctccgctacaacctcgacctcaacttcacgatccggaaccctaaccgccgcatcggcgtctactacgaccagatcgaggtcagaggatactacggagatgaaagattcggtagcagcaacgtggcgccgttctaccaggggcacaagaacacgacggaggtggggagtaagctcgagggacagggcttggtggtgcttaacggcggagatcggaaggatctggacgaggatttgaagtcggggatatacaggatcgacgcgaagctgaggcttagggtgaggtttaagtttgggttgatcaagtcgtggaggttcaagcctaaggttaggtgtgatctcaaggttcctctcggttcctctaatgtaaccagcgggtttcagtttcagcggaccaagtgtgacattgacttttga

SEQ ID NO: 22664 - protein, 237 aa, Brassica napus
MGDRHHQDLNGAYYGPSIPPPRKVSHSHGRGGGGCCGCIGDCLGCCGCCILSVIFNILITIAILLAIAALIIWLIFRPNAIKFHVTDAKLTQFTLGADNNLRYNLDLNFTIRNPNRRIGVYYDQIEVRGYYGDERFGSSNVAPFYQGHKNTTEVGSKLEGQGLVVLNGGDRKDLDEDLKSGIYRIDAKLRLRVRFKFGLIKSWRFKPKVRCDLKVPLGSSNVTSGFQFQRTKCDIDF

SEQ ID NO: 22665 - DNA, 612 bp, Glycine max
  CDS (1)..(612)
atggctcatcctccctcacaatcgaactctacagcagccaataagccaaaacgttccaaccttctccattacattgccatgtttatagtagccttgatcatccttgtaggcatagctgtgataataatttggctagttttgaagccaaaaaggttggagtacagtgtggagaatgctgcaatccacaacttcaacttaacggatgcaaatcacctctatgccaactttgatttcaccataagatcctacaatcccaactctagaatctccatatactatgacactgtggaggtgtcagtgcgttatgaggaccaaactctagccaccaatgctgttcagccattcttccagtcacataagaatgtgaccaggctgcacgtggccctcacggcgcaatccgtggccctgtatgagtctgtgcctaaggaccttaggcttgagagatcctctggggatattgagttggatgtgtgggtgagggcaaggataaggttcaaggttggtgcgtggaagtcaaggcatcgtgttttgaggattttttgttctcctgtgttggtgcacttttctaaaggaaagagtttcgaaagggcaccttgtgaagtagaactctaa

SEQ ID NO: 22666 - protein, 203 aa, Glycine max
MAHPPSQSNSTAANKPKRSNLLHYIAMFIVALIILVGIAVIIIWLVLKPKRLEYSVENAAIHNFNLTDANHLYANFDFTIRSYNPNSRISIYYDTVEVSVRYEDQTLATNAVQPFFQSHKNVTRLHVALTAQSVALYESVPKDLRLERSSGDIELDVWVRARIRFKVGAWKSRHRVLRIFCSPVLVHFSKGKSFERAPCEVEL

SEQ ID NO: 22667 - DNA, 621 bp, Triticum aestivum
  CDS (1)..(621)
atgggttcggggagccgcgcggcgtcgtgcctgtgctgcccgttcaagtgcctggcgtgcgggctcttcagctgcctctgcagcatcctcgtctccctcctcgtcaccgcgggggtcctcgccctcatcctctacttcgtcttccgcccgcagatgatcgccgccactgtcgactcggcctccctcgcccagttcgcgctcggcaccccggccagccccgcgctgctccagtacaacctcacgctcgccatgacggtgcgcaaccccaacaagcgggtgggcctctactacgacaacgtcgaggccctcgcgctctacgacggccagcgcttcgggttcgcgcccctcgaccccttcttccagggccaccaggcatccacggaggtgaagccggcgttcggcggccagcaggtgctggagggggacgtgacccagtccaacctcaggacgcagctggcgggaggcgcggtggaggtggaggtgaagctcaacgccaagctccgcgtcaaggtgtgggcgttcaaggtgcccgggccccgcgccaggatcagctgcccgctctccctccccgccgccggcgcccccgcattcaagcccaccgactgcaaagtctggttctga

SEQ ID NO: 22668 - protein, 206 aa, Triticum aestivum
MGSGSRAASCLCCPFKCLACGLFSCLCSILVSLLVTAGVLALILYFVFRPQMIAATVDSASLAQFALGTPASPALLQYNLTLAMTVRNPNKRVGLYYDNVEALALYDGQRFGFAPLDPFFQGHQASTEVKPAFGGQQVLEGDVTQSNLRTQLAGGAVEVEVKLNAKLRVKVWAFKVPGPRARISCPLSLPAAGAPAFKPTDCKVWF

SEQ ID NO: 22669 - DNA, 684 bp, Brassica napus
  CDS (1)..(684)
atggctgaacaacctctcaacggtgccttctacggtccatcagtcccaccaccggcccctaaaggctacttccgccgacccgggcacagccgcggttgtggctgctgcctcctcagcttcgttgtaaaagtcatcatagccattattgtcatacttggcatagccgctcttatcttctggctcatcgtccgtcctcgcgccatcaagtttcacgtgacccaagcaacccttacccgctttgaacacacttcccccgacaacattttaaggtataacctagccctcacagtccctgtccgcaaccctaacaagaggataggagtctactacgacaggatcgaagctcatgcatactacgatggaaagcggtttagttccaccacgttaactccgttctatcaaggacacaagaacacgaccgttctcagaccaatgttccaaggccaaaaccttgttatcttcaacgccggagagtcacggacttacaacgagcagacgatcgccggagtttacaatatagagatcaaatttaggcttagggttaggttcaagcttggggacttgaagactcggaggattaagcctaaggttaactgcgacgatataaggcttcctttaagtaccttaaacggaactacaacctccgctaccattctccctctcaagtgcgacttcgatttttaa

SEQ ID NO: 22670 - protein, 227 aa, Brassica napus
MAEQPLNGAFYGPSVPPPAPKGYFRRPGHSRGCGCCLLSFVVKVIIAIIVILGIAALIFWLIVRPRAIKFHVTQATLTRFEHTSPDNILRYNLALTVPVRNPNKRIGVYYDRIEAHAYYDGKRFSSTTLTPFYQGHKNTTVLRPMFQGQNLVIFNAGESRTYNEQTIAGVYNIEIKFRLRVRFKLGDLKTRRIKPKVNCDDIRLPLSTLNGTTTSATILPLKCDFDF

SEQ ID NO: 22671 - DNA, 708 bp, Brassica napus
  CDS (1)..(708)
atgggggacaggcaaccgcacttaaacggtgcgtattacgggccatcgattcctccgccgacgaaaacctctcacagccacggaagacgcggcggtggatgctgctgtttaggcgactgtctcggctgttgcggctgctgcatcttaagcgtcatcttcaacatcctcataaccctagccatcgtcgtaggcatagccgctctgatcatctggctaattttccgaccaaacgccatcaagttccacgtcaccgacgccaaactcactcagttcacactcggcacggacaacaaccttcgatacaacctcgacctcaacttcacgatccgaaaccctaaccgacgtatcggtgtttactatgatcagatcgaggtcagaggctactacggtgatcagcgttttggagcaagtaacatctcgccgttctaccagggacacaagaacacgacggtggttggaactaatatagttggacagagcttggtggtgcttaacggcggagataggggggattttgaggaggatgtgaagtcagggatctacaggatcgatgcgaagctgaggcttaagattaggtttaagtttgggttgatcaagtcgtggaagttcaagccgaagatcaggtgtgatctcaaagttcctctaagtacatctaacacaaccagcgggtttcagttccagcggaccaagtgtgacgttgacttttga

SEQ ID NO: 22672 - protein, 235 aa, Brassica napus
MGDRQPHLNGAYYGPSIPPPTKTSHSHGRRGGGCCCLGDCLGCCGCCILSVIFNILITLAIVVGIAALIIWLIFRPNAIKFHVTDAKLTQFTLGTDNNLRYNLDLNFTIRNPNRRIGVYYDQIEVRGYYGDQRFGASNISPFYQGHKNTTVVGTNIVGQSLVVLNGGDRGDFEEDVKSGIYRIDAKLRLKIRFKFGLIKSWKFKPKIRCDLKVPLSTSNTTSGFQFQRTKCDVDF

SEQ ID NO: 22673 - DNA, 714 bp, Brassica napus
  CDS (1)..(714)
atgggagacaggcaccaccaggacttaaacggcgcctactacggcccatcgatcccacctccaaggaaagtctctcacagccacggcagaggcggcggcggctgctgcggctgcataggcgactgcctcggctgctgcggatgctgcatcttgagcgtcatcttcaacatcctcatcaccatagccatcctcttaggcatagccgctctgatcatctggctaatcttccgaccaaacgccatcaagttccacgtcgccgacgccaagctcacgcagttcacgctcggcgcggacaacaacctccgctacaacctcgacctcaacttcacgatccggaaccctaaccgccgcatcggcgtctactacgaccagatcgaggtcagaggatactacggagatgaaagattcggtaacagtaacgtggcgccgttctaccaggggcacaagaacacgacggaggtggggagtaaactcgaggggcagggcttggtggtgcttaacggcggagatcggaaggatctggacgaggatttgaagtcggggatatacaggatcgacgcgaagctgaggcttagggtgaggtttaagtttgggctgatcaagtcgtggaggttcaagcctaaggttaggtgtgatctcaaggttcctctcggttcctctaatgtaaccagcgggtttcagtttcagcggaccaagtgtgacattgacttttga

SEQ ID NO: 22674 - protein, 237 aa, Brassica napus
MGDRHHQDLNGAYYGPSIPPPRKVSHSHGRGGGGCCGCIGDCLGCCGCCILSVIFNILITIAILLGIAALIIWLIFRPNAIKFHVADAKLTQFTLGADNNLRYNLDLNFTIRNPNRRIGVYYDQIEVRGYYGDERFGNSNVAPFYQGHKNTTEVGSKLEGQGLVVLNGGDRKDLDEDLKSGIYRIDAKLRLRVRFKFGLIKSWRFKPKVRCDLKVPLGSSNVTSGFQFQRTKCDIDF

SEQ ID NO: 22675 - DNA, 708 bp, Brassica napus
  CDS (1)..(708)
atgggggacagacaaccgcacttgaacggtgcctattacgggccatcgattcctccgccgacgaaaacctctcacagccacggcagacgcggcggtggatgctgctgtttaggcgactgtctcggctgttgcggctgctgcatcttaagcgtcatcttcaacatcctcataaccctagccatcgtcgtaggcatagccgctttgatcatctggctaattttccgaccaaacgccatcaagttccacgtcaccgacgccaaactcactcagttcacgctcggcacggacaacaaccttcgatacaatctcgacctcaacttcacgatccgaaaccctaaccgacgtatcggtgtttactatgatcagatcgaggtcagaggctactacggtgatcagcgttttggagcaagtaacgtctcgccgttctaccagggacacaagaacacgacggtggttggaactaatatagttggacagagcttggtggtgcttaacggcggagataggggggattttgaggaggatgtgaagtcagggatctacaggatcgatgcgaagctgaggcttaagattaggtttaagtttgggttgatcaagtcgtggaagttcaagccgaagatcaggtgtgatctcaaggttcctcttagtacttctaacacaaccagcgggtttcagttccagcggaccaagtgtgacgttgacttttga

SEQ ID NO: 22676 - protein, 235 aa, Brassica napus
MGDRQPHLNGAYYGPSIPPPTKTSHSHGRRGGGCCCLGDCLGCCGCCILSVIFNILITLAIVVGIAALIIWLIFRPNAIKFHVTDAKLTQFTLGTDNNLRYNLDLNFTIRNPNRRIGVYYDQIEVRGYYGDQRFGASNVSPFYQGHKNTTVVGTNIVGQSLVVLNGGDRGDFEEDVKSGIYRIDAKLRLKIRFKFGLIKSWKFKPKIRCDLKVPLSTSNTTSGFQFQRTKCDVDF

SEQ ID NO: 22677 - DNA, 621 bp, Zea mays
  CDS (1)..(621)
atgggctccgcgagccgtgccgtctcgtgcctgtgctgcccctgcaagtgcctggcgtgcgggctcctgagctgcctgtgcagcatcctcgtctcgctcgccgtcgtcctgggcgtcgtcgccctcatcctctacttcatcttcaagccgcacatgatcgcggccaccgtggactcggcctcgctctcccagttcgcgctgtcggcgtcctccacgctcgcctacgacctcaacgtcaccatgacggtgcgcaaccccaacacgcgggtggggctctactacgacgacgtccaggcgctggccctgttcagcgaccagcgcttcggctacgccccgctcgacgccttctaccagggcacccaggcgtccacccagctcagccccgggttccgcggcacgcagctcctccagggcgacgtcaccgccgccgagttcaggcaggagcagtccgcgggcaacttcgccgtcgacgtcgacctcaacgccaagctcagggtgaaggtctgggcgttcaaggtccgcgggcccaaggctaaggtcacctgcaagctctccgtccccgcacccggcgccgccaacgcctcgcccttccagcccaccgtttgcaaagtctggttctga

SEQ ID NO: 22678 - protein, 206 aa, Zea mays
MGSASRAVSCLCCPCKCLACGLLSCLCSILVSLAVVLGVVALILYFIFKPHMIAATVDSASLSQFALSASSTLAYDLNVTMTVRNPNTRVGLYYDDVQALALFSDQRFGYAPLDAFYQGTQASTQLSPGFRGTQLLQGDVTAAEFRQEQSAGNFAVDVDLNAKLRVKVWAFKVRGPKAKVTCKLSVPAPGAANASPFQPTVCKVWF

SEQ ID NO: 22679 - DNA, 690 bp, Glycine max
  CDS (1)..(690)
atggccgataagcaaccccacttgaacggcgcttattacggtcccgccattcctccggcggagcaaccacgctaccgccctcacagtcaccgcggaagaagctgctgttgctgcctcttcggaatcttgtggaagattctggttgcactcattgtcctcgttggcctcgcggtcctcatcttctggctggtggttcaaccccgttccttcaagttccacgtcacggaagccgacctaacacaatttgattactataccaacaacaacacccttcactacaacatggtcctcaacttcactgcacgcaaccccaacaagaagctcaacatatactacgacaaagttgaggcattagcattctacgaggatgtcaggttcgcaagttacgatgtcataacacacatgaactccttccgccagtacaagaagagcaccagccccatgagcgccgttttcacagggcaacaagtgctgatgctcaacaatgaacaagtctcagagttcaaccaagacaagaatactggggtttatgacatctatgtgaagctctacttcaggatgaggttcaggctcggggacgtcatatccaatgactacaagcccaaggtcaaatgtcacctcaaggtccctttcagtaaaaatggcacctttactctgtttcagaccaccaaatgtgatgtcgatttctag

SEQ ID NO: 22680 - protein, 229 aa, Glycine max
MADKQPHLNGAYYGPAIPPAEQPRYRPHSHRGRSCCCCLFGILWKILVALIVLVGLAVLIFWLVVQPRSFKFHVTEADLTQFDYYTNNNTLHYNMVLNFTARNPNKKLNIYYDKVEALAFYEDVRFASYDVITHMNSFRQYKKSTSPMSAVFTGQQVLMLNNEQVSEFNQDKNTGVYDIYVKLYFRMRFRLGDVISNDYKPKVKCHLKVPFSKNGTFTLFQTTKCDVDF

SEQ ID NO: 22681 - DNA, 738 bp, Glycine max
  CDS (1)..(738)
atgatggctgcagatcagcaaagaattcatcctgttcatgatgttgaggcaccacacagacctttggtgcctgaaaactatgcaaaatctgataagggtattcctcagcgcacttttcctgtgatgcattcaaagccacctaagagaagaagaagctgttgctgtaggttcatgtgttggacactaagcatattgctgattttgatcattgctattgccatcacaatagggatcctataccttgtgttcagaccaaagctccccaaatactcagtggaccaactgaggataagccagttcaatgtttcagacaacaacaccctctatgccaccttcaatgtggcaatcactgcaagaaaccctaacaagaagattggaatatactatgagggtggaagccacataagtgcttggtacatggaaacaaaattgtgtgaagggtccttgccaaaattctaccagggtcacaggaacaccacagtgcttgatctgcctctaactggtcaagcacatgatgcaaatggcttggtgaatagaattcaggagcagctgcaacagaccaacaatgttcctctcaatcttaaggtgaatcagcctgtgagggttaagcttggtaagttgaagctcttcaaagtcaagttcagggttaggtgcaagcttgaggtggataatattcttggggctagtaatgatattagaatttctagaagtagttgtaagttcaggcttaggctgtga

SEQ ID NO: 22682 - protein, 245 aa, Glycine max
MMAADQQRIHPVHDVEAPHRPLVPENYAKSDKGIPQRTFPVMHSKPPKRRRSCCCRFMCWTLSILLILIIAIAITIGILYLVFRPKLPKYSVDQLRISQFNVSDNNTLYATFNVAITARNPNKKIGIYYEGGSHISAWYMETKLCEGSLPKFYQGHRNTTVLDLPLTGQAHDANGLVNRIQEQLQQTNNVPLNLKVNQPVRVKLGKLKLFKVKFRVRCKLEVDNILGASNDIRISRSSCKFRLRL

SEQ ID NO: 22683 - DNA, 690 bp, Glycine max
  CDS (1)..(690)
atggccgataagcaaccccacttgaacggcgcttattacggtcccgccattcctccggcggagcaaccacgctaccgccctcacagtcaccgcggaagaagctgctgttgctgcctcttcggaatcttgtggaagattctggttgcactcattgtcctcgttggcctcgcggtcctcatcttctggctggtggttcaaccccgttccttcaagttccacgtcacggaagccgacctaacacaatttgattactataccaacaacaacacccttcactacaacatggtcctcaacttcactgcacgcaaccccaacaagaagctcagcatatactacgacaaagttgaggcattagcattctacgaggatgtcaggttcgcaagttacgatgtcataacacacatgaactccttccgccagtacaagaagagctccagccccatgagcgccgttttcacagggcaacaattgctgatgctgaacaatgatcaagtctcagagttcaaccaagacaggaatactggtgtttatgacatctatgtgaagctctacttcaggatgaggttcaggctcggggactttatatccaatgactacaagcccaaggtcaaatgtcacctcaaggttcctttcagtaaaaatggcacctttactctgtttcagaccaccaaatgtgatgtcgatttctag

SEQ ID NO: 22684 - protein, 229 aa, Glycine max
MADKQPHLNGAYYGPAIPPAEQPRYRPHSHRGRSCCCCLFGILWKILVALIVLVGLAVLIFWLVVQPRSFKFHVTEADLTQFDYYTNNNTLHYNMVLNFTARNPNKKLSIYYDKVEALAFYEDVRFASYDVITHMNSFRQYKKSSSPMSAVFTGQQLLMLNNDQVSEFNQDRNTGVYDIYVKLYFRMRFRLGDFISNDYKPKVKCHLKVPFSKNGTFTLFQTTKCDVDF

SEQ ID NO: 22685 - DNA, 666 bp, Glycine max
  CDS (1)..(666)
atgtcccagttgaacggagcctactacggcccctccatcccgccgccgaaaacttcctaccaccgtcctgggcgcggcggaggcctcggctgctgctgcgggtgcctcttcagcctcatcttcaagctcatcctaaccgtgatcatcatcattggcatcgccgtgttccttttctggctcatagtccgtcccaacgtggtgaaattccacgtcaccgaggccaccctgacgcagttcaactacacccccaacaacacgctccactacgacctcgccctcaacatcacggtccgaaaccccaacaagaggctcggaatctactacgaccgcatcgaggcgcgtgcaatgttccacgacgcgaggtttgattcccagttcccggaaccattctaccagggccacaagagcaccaacgtgctgaacccggtgtttaagggtcagcaattggtgccactcaacgctgaccaatccgcggaactgaagaaggagaacgccactggggtgtacgagatcgatgtgaagatgtaccttagggtcaggttcaagttgggtgtcttcaagaccaagacgcttaagcccaaagtatcatgcgacttacgtgttcctttgaaaggaagcgccggtgctggtgtctttcagaccaccaagtgcgactgggatcgctga

SEQ ID NO: 22686 - protein, 221 aa, Glycine max
MSQLNGAYYGPSIPPPKTSYHRPGRGGGLGCCCGCLFSLIFKLILTVIIIIGIAVFLFWLIVRPNVVKFHVTEATLTQFNYTPNNTLHYDLALNITVRNPNKRLGIYYDRIEARAMFHDARFDSQFPEPFYQGHKSTNVLNPVFKGQQLVPLNADQSAELKKENATGVYEIDVKMYLRVRFKLGVFKTKTLKPKVSCDLRVPLKGSAGAGVFQTTKCDWDR

SEQ ID NO: 22687 - DNA, 651 bp, Glycine max
  CDS (1)..(651)
atgtcccagttgaacggagcctactatggcccctccatcccgccgccgaaaacctcctaccaccgcccagggcgcggcggaggctgctgctgcggctgcctcttcagcctcatcttcaagctcatcttaaccgtgataatcatcgttggcatcgccgggttcgtgttctggctcatagtccgtccgaacgtggtgaaattccacgtgaccgacgccaccctgacgcagttcaactacaccgccaacaacactctccactacgacctcgccctaaacatcacggtccgaaaccccaacaagaggctcggaatctactacgaccgcatcgaggcgcgtgcaatgttccacgacgcaaggttcgattcacagttcccggagccgttctaccagggccacaagagcacgaaggtgctgaacccagtcttcaagggtcagcaagtggtgccactcaacgctgagcaaagcgcggaactgaagaaggagaacgccactggggtgtacgagatcgacgtgaagatgtaccttagggtgaggttcaagctgggggtgttgaagaccaagacgctcaagcccaaagtatcatgcgacttgcgtgttcctttcaaaggaagcgccgcctttgagaccaccaagtgccactgggatcgctga

SEQ ID NO: 22688 - protein, 216 aa, Glycine max
MSQLNGAYYGPSIPPPKTSYHRPGRGGGCCCGCLFSLIFKLILTVIIIVGIAGFVFWLIVRPNVVKFHVTDATLTQFNYTANNTLHYDLALNITVRNPNKRLGIYYDRIEARAMFHDARFDSQFPEPFYQGHKSTKVLNPVFKGQQVVPLNAEQSAELKKENATGVYEIDVKMYLRVRFKLGVLKTKTLKPKVSCDLRVPFKGSAAFETTKCHWDR

SEQ ID NO: 22689 - DNA, 651 bp, Glycine max
  CDS (1)..(651)
atgtcccagttgaacggagcctactatggcccctccatcccgccgccgaaaacctcctaccaccgcccagggcgcggcggaggctgctgctgcggctgcctcttcagcctcatcttcaagctcatcttaaccgtgataatcatcgttggcatcgccgggttcgtgttctggctcatagtccgtccgaacgtggtgaaattccacgtgaccgacgccaccctgacgcagttcaactacaccgtcaacaacactctccactacgacctcgccctaaacatcacggtccgaaaccccaacaagaggctcggaatctactacgaccgcatcgaggcgcgtgcaatgttccacgacgcaaggttcgattcacagttcccggagccgttctaccagggccacaagagcacgaaggtgctgaacccagtcttcaagggtcagcaagtggtgccactcaacgctgagcaaagcgcggaactgaagaaggagaacgccactggggtgtacgagatcgacgtgaagatgtaccttagggtgaggttcaagctgggggtgttgaagaccaagacgctcaagcccaaagtatcatgcgtcttgcgtgttcctttcaaaggaagcgccgcctttgagaccaccaagtgccactgggatcgctga

SEQ ID NO: 22690 - protein, 216 aa, Glycine max
MSQLNGAYYGPSIPPPKTSYHRPGRGGGCCCGCLFSLIFKLILTVIIIVGIAGFVFWLIVRPNVVKFHVTDATLTQFNYTVNNTLHYDLALNITVRNPNKRLGIYYDRIEARAMFHDARFDSQFPEPFYQGHKSTKVLNPVFKGQQVVPLNAEQSAELKKENATGVYEIDVKMYLRVRFKLGVLKTKTLKPKVSCVLRVPFKGSAAFETTKCHWDR

SEQ ID NO: 22691 - DNA, 621 bp, Zea mays
  CDS (1)..(621)
atgggctccgcgagccgtgccgtctcgtgcctgtgctgcccctgcaagtgcctggcgtgcgggctcctgagctgcctgtgcagcatcctcgtctcgctcgccgtcgtcctgggcgtcgtcgccctcatcctctacttcatcttcaagccgcacatgatcgcggccaccgtggactcggcctcgctctcccagttcgcgctgtcggcgtcctccacgctctcctacgacctcaacgtcaccatgacggtgcgcaaccccaacacgcgggtggggctctactacgacgacgtccaggcgctggccctgttcagcgaccagcgcttcggctacgccccgctcgacgccttctaccagggcacccaggcgtccacccagctcagccccgggttccgcggcacgcagctcctccagggcgacgtcaccgccgccgagttcaggcaggagcagtccgcgggcaacttcgccgtcgacgtcgacctcaacgccaagctcagggtcaaggtctgggcgttcaaggtccgcgggcccaaggctaaggtcacctgcaagctctccgtccccgcacccggcgccgccaacgcctcgcccttccagcccaccgtttgcaaagtctggttctga

SEQ ID NO: 22692 - protein, 206 aa, Zea mays
MGSASRAVSCLCCPCKCLACGLLSCLCSILVSLAVVLGVVALILYFIFKPHMIAATVDSASLSQFALSASSTLSYDLNVTMTVRNPNTRVGLYYDDVQALALFSDQRFGYAPLDAFYQGTQASTQLSPGFRGTQLLQGDVTAAEFRQEQSAGNFAVDVDLNAKLRVKVWAFKVRGPKAKVTCKLSVPAPGAANASPFQPTVCKVWF

SEQ ID NO: 22693 - DNA, 21 bp, Artificial sequence
  primer
atggggtccaaacaaccatac

SEQ ID NO: 22694 - DNA, 20 bp, Artificial sequence
  primer
ctaagataagtcaaagtcac

SEQ ID NO: 22695 - protein, 251 aa, Artificial sequence
  consensus sequence
  Variant (2)..(11): Xaa in position 2 to 11 is any amino acid
  Variant (13)..(35): Xaa in position 13 to 35 is any amino acid
  Variant (36)..(63): Xaa in position 36 to 63 is any or no amino acid
  Variant (65)..(67): Xaa in position 65 to 67 is any amino acid
  Variant (69)..(70): Xaa in position 69 to 70 is any amino acid
  Variant (73)..(75): Xaa in position 73 to 75 is any amino acid
  Variant (77)..(79): Xaa in position 77 to 79 is any amino acid
  Variant (81)..(82): Xaa in position 81 to 82 is any amino acid
  Variant (84)..(85): Xaa in position 84 to 85 is any amino acid
  Variant (87)..(87): Xaa in position 87 is any amino acid
  Variant (89)..(90): Xaa in position 89 to 90 is any amino acid
  Variant (92)..(98): Xaa in position 92 to 98 is any amino acid
  Variant (99)..(104): Xaa in position 99 to 104 is any or no amino acid
  Variant (106)..(106): Xaa in position 106 is any amino acid
  Variant (108)..(108): Xaa in position 108 is any amino acid
  Variant (110)..(115): Xaa in position 110 to 115 is any amino acid
  Variant (120)..(121): Xaa in position 120 to 121 is any amino acid
  Variant (122)..(122): Xaa in position 122 is any or no amino acid
  Variant (124)..(124): Xaa in position 124 is any amino acid
  Variant (128)..(134): Xaa in position 128 to 134 is any amino acid
  Variant (135)..(135): Xaa in position 135 is any or no amino acid
  Variant (137)..(139): Xaa in position 137 to 139 is any amino acid
  Variant (142)..(148): Xaa in position 142 to 148 is any amino acid
  Variant (149)..(152): Xaa in position 149 to 152 is any or no amino acid
  Variant (154)..(154): Xaa in position 154 is any amino acid
  Variant (156)..(157): Xaa in position 156 to 157 is any amino acid
  Variant (159)..(168): Xaa in position 159 to 168 is any amino acid
  Variant (171)..(185): Xaa in position 171 to 185 is any amino acid
  Variant (186)..(189): Xaa in position 186 to 189 is any or no amino acid
  Variant (191)..(195): Xaa in position 191 to 195 is any amino acid
  Variant (196)..(196): Xaa in position 196 is any or no amino acid
  Variant (198)..(202): Xaa in position 198 to 202 is any amino acid
  Variant (204)..(204): Xaa in position 204 is any amino acid
  Variant (206)..(213): Xaa in position 206 to 213 is any amino acid
  Variant (214)..(215): Xaa in position 214 to 215 is any or no amino acid
  Variant (217)..(217): Xaa in position 217 is any amino acid
  Variant (219)..(220): Xaa in position 219 to 220 is any amino acid
  Variant (222)..(225): Xaa in position 222 to 225 is any amino acid
  Variant (226)..(226): Xaa in position 226 is any or no amino acid
  Variant (228)..(238): Xaa in position 228 to 238 is any amino acid
  Variant (239)..(250): Xaa in position 239 to 250 is any or no amino acid
LXXXXXXXXXXPXXXXXXXXXXXXXXXXXXXXXXXXXXXXXXXXXXXXXXXXXXXXXXXXXXXGXXXLXXWLXXXPXXXKXXVXXAXLXXFXXXXXXXXXXXXXLXYXLXXXXXXRNPNXXXGXYYDXXXXXXXXYXXXRFXXXXXXXXXXXFXQXXKXXXXXXXXXXGQXXXXXXXXXXXXXXXXXXXGXXXXXXKXXXXXRXKXXXXXXXXXXKXKXXCXXXXXPXXXXXXXXXXXXXXXXXXXXXXXC

SEQ ID NO: 22696 - protein, 21 aa, Artificial sequence
  protein pattern
  Variant (2)..(2): Xaa in position 2 is Phe or Leu
  Variant (3)..(3): Xaa in position 3 is Ile or Val
  Variant (4)..(5): Xaa in position 4 to 5 is any amino acid
  Variant (7)..(7): Xaa in position 7 is Asn, Arg or Ser
  Variant (8)..(8): Xaa in position 8 is any amino acid
  Variant (9)..(9): Xaa in position 9 is Phe, Ile, Leu or Val
  Variant (11)..(12): Xaa in position 11 to 12 is any amino acid
  Variant (13)..(13): Xaa in position 13 is Ala or Val
  Variant (14)..(14): Xaa in position 14 is any amino acid
  Variant (15)..(15): Xaa in position 15 is Asp, Glu, Gln, Ser or Thr
  Variant (17)..(17): Xaa in position 17 is any amino acid
  Variant (19)..(19): Xaa in position 19 is Asn, Ser or Thr
  Variant (20)..(20): Xaa in position 20 is Glu, Gln or Arg
WXXXXPXXXKXXXXXAXLXXF

SEQ ID NO: 22697 - protein, 15 aa, Artificial sequence
  protein pattern
  Variant (3)..(3): Xaa in position 3 is any amino acid
  Variant (4)..(4): Xaa in position 4 is Phe, Ile, Leu or Val
  Variant (5)..(5): Xaa in position 5 is Asp, Glu, Gln or Ser
  Variant (6)..(6): Xaa in position 6 is Ala, Ser or Val
  Variant (7)..(7): Xaa in position 7 is any amino acid
  Variant (8)..(8): Xaa in position 8 is Ala or Gly
  Variant (9)..(9): Xaa in position 9 is any amino acid
  Variant (10)..(10): Xaa in position 10 is Phe or Tyr
  Variant (11)..(11): Xaa in position 11 is any amino acid
  Variant (12)..(12): Xaa in position 12 is Asp or Gly
  Variant (13)..(13): Xaa in position 13 is any amino acid
YDXXXXXXXXXXXRF

SEQ ID NO: 22698 - protein, 18 aa, Artificial sequence
  protein pattern
  Variant (2)..(2): Xaa in position 2 is any amino acid
  Variant (4)..(6): Xaa in position 4 to 6 is any amino acid
  Variant (7)..(7): Xaa in position 7 is Ala, Asn or Ser
  Variant (8)..(8): Xaa in position 8 is Ser or Thr
  Variant (9)..(10): Xaa in position 9 to 10 is any amino acid
  Variant (11)..(11): Xaa in position 11 is Ile, Leu, Met or Val
  Variant (12)..(14): Xaa in position 12 to 14 is any amino acid
  Variant (15)..(15): Xaa in position 15 is Phe, Ile, Leu or Met
  Variant (16)..(16): Xaa in position 16 is any amino acid
FXQXXXXXXXXXXXXXGQ

SEQ ID NO: 22699 - DNA, 1140 bp, Arabidopsis thaliana
  CDS (1)..(1140)
atgtgtggaggagctataatctccgatttcatacctccgccgaggtccctccgcgtcactaacgagtttatctggccggatctgaaaaacaaagtgaaagcttcaaagaagagatcgaataagcgatccgatttcttcgatcttgacgatgatttcgaagctgatttccaagggtttaaggatgactcggcttttgactgcgaagacgatgatgatgtcttcgtcaatgttaagcctttcgtcttcaccgcaactactaagcccgtagcttccgctttcgtctccactggtatatatttggtaggttcagcatatgccaagaaaactgtagagtccgctgagcaagctgagaaatcttctaagaggaagaggaagaatcaataccgagggattaggcagcgtccttggggaaaatgggctgcggagatccgtgatccgagaaaaggctcccgagaatggcttggaacattcgacactgctgaggaagcagcaagagcttatgatgctgcagcacgcagaatccgtggcacgaaagctaaggtgaattttcccgaggagaagaaccctagcgtcgtatcccagaaacgtcctagtgctaagactaataatcttcagaaatcagtggctaaaccaaacaaaagcgtaactttggttcagcagccaacacatctgagtcagcagtactgcaacaactcctttgacaactcttttggtgatatgagtttcatggaagagaagcctcagatgtacaacaatcagtttgggttaacaaactcgttcgatgctggaggtaacaatggataccagtatttcagttccgatcagggcagtaactccttcgactgttctgagttcgggtggagtgatcacggccctaaaacacccgagatctcttcaatgcttgtcaataacaacgaagcatcatttgttgaagaaaccaatgcagccaagaagctcaaaccaaactctgatgagtcagacgatctgatggcataccttgacaacgccttgtgggacaccccactagaagtggaagccatgcttggcgcagatgctggtgctgtgactcaggaagaggaaaacccagtggagctatggagcttagatgagatcaatttcatgctggaaggagacttttga

SEQ ID NO: 22700 - protein, 379 aa, Arabidopsis thaliana
MCGGAIISDFIPPPRSLRVTNEFIWPDLKNKVKASKKRSNKRSDFFDLDDDFEADFQGFKDDSAFDCEDDDDVFVNVKPFVFTATTKPVASAFVSTGIYLVGSAYAKKTVESAEQAEKSSKRKRKNQYRGIRQRPWGKWAAEIRDPRKGSREWLGTFDTAEEAARAYDAAARRIRGTKAKVNFPEEKNPSVVSQKRPSAKTNNLQKSVAKPNKSVTLVQQPTHLSQQYCNNSFDNSFGDMSFMEEKPQMYNNQFGLTNSFDAGGNNGYQYFSSDQGSNSFDCSEFGWSDHGPKTPEISSMLVNNNEASFVEETNAAKKLKPNSDESDDLMAYLDNALWDTPLEVEAMLGADAGAVTQEEENPVELWSLDEINFMLEGDF

SEQ ID NO: 22701 - DNA, 1677 bp, Eucalyptus grandis
  CDS (66)..(1229)
ccgttccttccccgttccttccctgatcttccgtcgtccggcggttccccgttccggctccagcaatgtgtgggggcgccatcatctccgacttcatccccaaccagagggcccgccgattgacctcggacttcctgtggcccgatctgaagagatcggccggcaagcagtcgaggcggccggccaggtcggaggtcgtcgatgtcgtggacgatgacttcgaggccgacttccagggcttcaaggacgagtccgacgtcgaggacgacttcgacgacgaggtcgaggtcgacgtcaagcccttcgctttctccgccgccgagcctcggtactccaaaggctcttcgaccaccaaatctgtggagtataatgggcaagctgagaaatctgccaagagaaagaggaagaaccaatataggggaatcaggcagcgtccatggggaaaatgggctgctgagatccgtgacccaaggaaaggggtccgagtttggcttgggacgtttaacacagcagaagaagctgcccgagcttatgatgctgaggctcggagaattcgtggcaagaaagctaaagtgaacttccctgatgattcttccagtgcatcatcaaaacgctctgtgaagtcaaatgttcagaaacttcccaagacaacaacaaacaacgtgcagcctaatctgaatcaaaatttcaattatgcaaacagctctgatgatgacatttacagttccatgggttttgttgaagaaaaaccacctactaaccagttttacatggatgctttgaatgcccaaggggtttctggaatgaattctctttcccctgctgacaatgcccccttgtacttcaattcagaccagggaagcaactcatttgagtgttctgactttggttggggtgaaaatgccccaagaactccagatgtctcatctgtactttcagctaccctggaagttgatgaatctcagtttgaggatgctaacccaaggaagaaaatcaggtctgcttctgatgatgtgtccgaggaagaaaacaccgctgcaaagacattctctgaggagctgtctgcttttgagtccgatatgaagttcttccagatgccatttgtggatggtggctgggatccgtcagtggaagccttacttggtggagaggcaactcaggatggtggaaatgcagtggatctctggagctttgatgacctcgctcccatgatggggggagtcttctaaaagagttaccgttggctggtttttttatgtaaataaggctacatgttagtgagtcctcgactgtctgcctgtcttattatattgagttgttttccgatgttaaaaagtcctagtcaatgagaaagagagattgcttcctaatatgctgcaatgctttcaggaatgatttgtctactgtggtggtggagtaccaaacgtttgaacatggttaagccttggatgaagtgtggtttcccagtcagatatgtggtatattggagtatgctgctgactaggttaagttttaaagtccagaccttcttattggaattttgaacttacgtctgtaatttgatgattatgtgtgataaatgctgaaactctgatgacagcaatagcttgttctgttggccagtgcttctctcaataattgccagggcctgtgataaattgtggcaaaaaaaaaaaa

SEQ ID NO: 22702 - protein, 387 aa, Eucalyptus grandis
MCGGAIISDFIPNQRARRLTSDFLWPDLKRSAGKQSRRPARSEVVDVVDDDFEADFQGFKDESDVEDDFDDEVEVDVKPFAFSAAEPRYSKGSSTTKSVEYNGQAEKSAKRKRKNQYRGIRQRPWGKWAAEIRDPRKGVRVWLGTFNTAEEAARAYDAEARRIRGKKAKVNFPDDSSSASSKRSVKSNVQKLPKTTTNNVQPNLNQNFNYANSSDDDIYSSMGFVEEKPPTNQFYMDALNAQGVSGMNSLSPADNAPLYFNSDQGSNSFECSDFGWGENAPRTPDVSSVLSATLEVDESQFEDANPRKKIRSASDDVSEEENTAAKTFSEELSAFESDMKFFQMPFVDGGWDPSVEALLGGEATQDGGNAVDLWSFDDLAPMMGGVF

SEQ ID NO: 22703 - DNA, 1589 bp, Brassica napus
  CDS (84)..(1226)
aaatatttcaaaagagaaccccaaagaagctaatacttaccgtttcgccgctaagtttacatttcagagcatttaacaccgccatgtgtggaggagctataatctccgatttcatacctccgtcgaggtcccgccgcgtcacgagcgagtacctctggccggatctgaaaaacaaagtgaaagcttcgaagaagaagaagcgatccgatttcctcgatctggacgacgagttcgaggctgactttcaagggtttaaggatggtgcatcgttcgattgcgaagatgaattcgatgtggatgatgaagtcttcgccgatgtcaaaccctttgtcttcgccgcaggtgccaagcccgtagcgtcccctcccgccgccttcgcctccgctggttcagtttctggcaagaaaaccatagagtctggtggacaagctgagaaatctgccaagagaaagaggaagaatcagtacagggggattaggcagcgcccttggggcaaatgggccgctgagatccgtgatcccagaaaaggctcccgggagtggcttggaacattcgacaccgccgaggaagcagcaagagcttatgatgcagctgcacgcaggatccgcggtaataaagctaaggtgaacttcccagaggagatggtccctagcgtctcccagaaacgccctgctgctaagaaggcagtggctaaaccaaaccaaagcccagcatccgttcagcagccaacacatgtgagtgagtactgcaacaactcctttgacaacatgggacatgacccctcttttggtgatgtgagtttcatggaagagaagcctcagatgtacaacaatcagttccttgatgtcggaggcaacaatggataccagtatttcagttctgaccagggcagtaactcactggactgctctgagtttgggtggagtgatcatacccccaagacacctgagatctcttcaatgctggtcaacagtaaccaagctcctttcattgaagaaaccaatccagccaagaagctcaaaaccaactctgaggacgggacaagcaacaatggtaattctgatgatctgatggcatatttgaacaacgccttgtgggagtctccattggaagtggaagctatgttcggtggtgatgctgctactatgactcaggaagagggaaccccaatggacctatggagcttcgatgatatcaactccatgctggatggtggagtcttctgaaagtgattgatgggttgcctagtttgtaaataaagctctttgtgtgttgggttttgctgttggccgggggaatggtacaagttcatacctggagcttattgcatcgttatcttatatgagtctctttctcacggagagcgtctctcttttaaattcctgaaataaaaggggtgatgaagtaaatagagttataatttctatctaatgagtctgtgagtttttttttttttgtttactaatgtttaaaactctctttttgatctttctttttatagcgtatcatcatcaccctcgaaagtgtttatgttttgtacccccaacactaatataaaaactgtctggaaccaggaaaaaaaaaaaaaa

SEQ ID NO: 22704 - protein, 380 aa, Brassica napus
MCGGAIISDFIPPSRSRRVTSEYLWPDLKNKVKASKKKKRSDFLDLDDEFEADFQGFKDGASFDCEDEFDVDDEVFADVKPFVFAAGAKPVASPPAAFASAGSVSGKKTIESGGQAEKSAKRKRKNQYRGIRQRPWGKWAAEIRDPRKGSREWLGTFDTAEEAARAYDAAARRIRGNKAKVNFPEEMVPSVSQKRPAAKKAVAKPNQSPASVQQPTHVSEYCNNSFDNMGHDPSFGDVSFMEEKPQMYNNQFLDVGGNNGYQYFSSDQGSNSLDCSEFGWSDHTPKTPEISSMLVNSNQAPFIEETNPAKKLKTNSEDGTSNNGNSDDLMAYLNNALWESPLEVEAMFGGDAATMTQEEGTPMDLWSFDDINSMLDGGVF

SEQ ID NO: 22705 - DNA, 1579 bp, Glycine max
  CDS (146)..(1324)
aaccctgaagaaagacacagccattgtttgtttactttccattgattgagcgaaagctttgttttttctgcgatcattttccattgggtggaagaaagtctcaacctttagtcgaaagagcaaggatctgagtgagtgagcgatcatgtgtggtggtgcgattatctccgacttcattccagcgggtcccgccggcggggcgcagcgcgtgaccaccgacatcctgtggccgaatttgaggaagcggttctcgaagtcgctgctggacgatgatttcgaggcagggttcagagaattcgaggatgactcggaaatcgaggatgtcgatgatgaggacgatgaagaggaggaggagttgaagaagaagaagccctttgggttctctcgctccaacaacaaggctgcttctaagcctctctctcgtggagcaacaactgtgaaatctgtggaatcaaaggggcaagctgagaagtgtgccaagagaaagaggaagaaccagtatcgcggaatccgccagcgtccatggggaaagtgggctgctgagattcgcgacccaagaaagggggttcgtgtttggcttggaactttcagcactgctgaagaagctgcaagagcttacgatgctgaagcaaggaggatccgtggcaagaaagccaaggtgaatttccctgatgagccttcaggcgctgcttcctcaaaacgtctcaaggcgaatccagaggctcagccaatgaagaaaaatctgaactctgtgaagccgaaaataaaccagatgttcaattttggtgacaatcttgagggctactacagccctatagatcaggtggaacagaaaccactggttaaccagtatgttaaccgtgccccgtttgctggaaatggagttcaagtctcacctgttactccatctgctgatgttactgcttacttcagctctgagcattcgagcagctcgtttgattattctgacctcggatggggtgaacaagtccccaagacacccgagatctcatccatgctttctgctgctcctttggacggtgaatctcagtttgtgcagggtgctgctgatcagaatcagaagaagaacaacctgctggatatggcatctgtgcaagatgattctgcaaaaactctttctgaggagcttgcagacattgaatcccagctgaagttctttgagaccccttcttttcttgatgaagcctgggctgatgctgcattggcgtctttgctcagtgaagatgcatctcaggatgctgctggaaaccctatgaacctttggagcttcgacgacctgccttccatggcaggagtcttctgaacaccttcatatccctttttatgtaaataaagctacaagaattgtgatcgtgatgttggtgatggaatccacagcaagaaaaccaacctgcttaaagcatatgtggagtttatttatcttgtagctaatgcagtataggactatatataggtttttatagggtatcctttgtgtgaaactcaagagacctcgttttcaggggattttctgtttgatgtccataaggattatcaattatgataaaaaaaaaaaaaa

SEQ ID NO: 22706 - protein, 392 aa, Glycine max
MCGGAIISDFIPAGPAGGAQRVTTDILWPNLRKRFSKSLLDDDFEAGFREFEDDSEIEDVDDEDDEEEEELKKKKPFGFSRSNNKAASKPLSRGATTVKSVESKGQAEKCAKRKRKNQYRGIRQRPWGKWAAEIRDPRKGVRVWLGTFSTAEEAARAYDAEARRIRGKKAKVNFPDEPSGAASSKRLKANPEAQPMKKNLNSVKPKINQMFNFGDNLEGYYSPIDQVEQKPLVNQYVNRAPFAGNGVQVSPVTPSADVTAYFSSEHSSSSFDYSDLGWGEQVPKTPEISSMLSAAPLDGESQFVQGAADQNQKKNNLLDMASVQDDSAKTLSEELADIESQLKFFETPSFLDEAWADAALASLLSEDASQDAAGNPMNLWSFDDLPSMAGVF

SEQ ID NO: 22707 - DNA, 1657 bp, Glycine max
  CDS (146)..(1294)
aaaaccctgaagaaagacacagccattgtttacttttcattgattgagccaaagctttgtattttctgcgataattttccattgggtggaagaaagtctcaacctttattcgaaagagcaaggatctgagttgagttgagtgatcatgtgtggtggtgcgattatctccgacttcataccggcaggtcccgccagcggggcgcggcgcgtgaccgccgacatcctgtggccgagtttgaggaagcgcttctcgaagccgctgctggacgatgatttcgaggctgggttcagagaattcaaggatgattcggaaatcgaggatgttgatgacgaggacgatgaagacgaggaggagttgaagaagaagccctttgggttctctcgctccagcaacaaggctgcttctaagcctctctctcgtggatcagcaactgtggaatcaaaggggcaagctgagaagtgtgccaagagaaagaggaagaaccagtatcgtggaatccgtcagcgtccatggggaaagtgggctgctgagatccgtgacccaagaaagggggttcgtgtttggcttggaactttcagcactgctgaagaagctgcaagagcttatgatgctgaagcaaggaggatccggggcaagaaagccaaggtgaatttcccggatgagccttcaggcgctgctgcttcctcaaaacgcctcaaggtgaatccagaggctcagccaatgaaggaaaatctgaacaccgtgaagccgaaaatgaaccagatgttcaattttggtcacaatctggagggctactacagcccaatagatcaggtggaacagaaaccactggttaaccagtatgttaaccctgccccgttccctggaaacggagttcaagtctcacctgttactccatctgctgatgttactgcttacttcagctctgagcattcgagcaactcgtttgattattctgaccttggatggggtgaacaagtccccaagacccccgagatctcatccttgctttctgctgctcctttggagggtgctgctgatcaggttcagaagaccaacaactcgcaggatgtggtggctgcacaagatgattctgcaaaaaccctttccgaagagcttgcagacattgaatcccagctcaagttctttgagaccccttcttttcttgatgaagcctgggctgatgctacattggcgtctttgctcggcggagacgcaactcatgacgccgccggaaaccctatgaacctttggagcttcgacgacctgccttccatggcaggagtcttctgaacaccctttatctccccttttatgtaaataaagctacaagaattgtgatcgtgatgttggtgatggagtccacagcaagaaacctgcttaaagcttatgtggagtttattttatcttgtagctaatgcagtagtataggactatatataggtttttattatagggtatccttttgtgaactcaaagacctcgttttcaggggattttctgtttgatgtccttaaggattatcaattatgttatatatggtcttggatacagtcttgactgctgatacagtttttttttaacttggttgttttcattttcattattattattatggcaatttgattatgattttgagaccaaaaaaaaaaaaaa

SEQ ID NO: 22708 - protein, 382 aa, Glycine max
MCGGAIISDFIPAGPASGARRVTADILWPSLRKRFSKPLLDDDFEAGFREFKDDSEIEDVDDEDDEDEEELKKKPFGFSRSSNKAASKPLSRGSATVESKGQAEKCAKRKRKNQYRGIRQRPWGKWAAEIRDPRKGVRVWLGTFSTAEEAARAYDAEARRIRGKKAKVNFPDEPSGAAASSKRLKVNPEAQPMKENLNTVKPKMNQMFNFGHNLEGYYSPIDQVEQKPLVNQYVNPAPFPGNGVQVSPVTPSADVTAYFSSEHSSNSFDYSDLGWGEQVPKTPEISSLLSAAPLEGAADQVQKTNNSQDVVAAQDDSAKTLSEELADIESQLKFFETPSFLDEAWADATLASLLGGDATHDAAGNPMNLWSFDDLPSMAGVF

SEQ ID NO: 22709 - DNA, 1602 bp, Brassica napus
  CDS (168)..(1259)
tggccacgcgtcgactagtacggggggggggcatcaaattatcaaaccacagcgagagagagagagagagaaaacaaaagagaaccccaaagaagctaatatttacagtttcgccgcaaagtttgtgtttctgaacatttaaccccctcgaatttgagttatacgccatgtgtggaggagctataatctccgatttcatccctccgccgagttcccgccgcgtcacgagcgagtttctctggccggatctgaagaagaacaaggggaaagcctcgaagaagcgatccgatttcttcgatctggacgacgagttcgaggctgattttcaagggtttgaggatgacgacgcgtcttttgactgcgaagacgatgatgatgatgtcttcgctaaagtgaagccctttgtcttcaccgcgaccaccaagcccgtagcttcccctcccaccgccactggttcagtgtctggcaagaagatcatagagtccggtggtcaagctgagaagtctgctaagagaaagagaaagaatcagtacagggggattaggcagcgaccttgggggaaatgggctgctgagatccgtgatcctagaaaaggctccagggaatggcttggaacattcgacaccgccgaggaagcagcaagagcctatgatgcagctgcacgcaggatccgtggtagtaaagctaaggtgaatttcccagaggagagcaacaacaaccgtagcgtctcccagaaacgaccttctgctaagaagctggtggctaaaccaaaccaaagcccagctttggttcagcagccaatgagtcagtactgcaacaactcctttggtgatgtgagtttcgtggaagagaagcctcagatgtacaacaatcagtttgggttagcaaactcgtacaacaaccactacttcagttctgatcaggggagtaactcatttgactgctctgagtttgggtggagcgaccacggccccaagacacctgagatctcttcgatgctagtcggtaataaccaagctccgttcactgaagaaaccaatgcagccaagaagctcaaacccagctctgatgacggaacaagcaaccagtctgatgatctgatggcataccttgacaatgccttgtgggaatctccatctccattagaagttgaagccatgcttggtgtagatgctgttgctgtgactcagggagaggagaacccgatggacctatggagcttagatgatatcaattacatgctggaaggagtcttctgaagtgagtgatggtttgcctaatttgtaaatagagctatgtgtgtgttggatttcgctgttgaagagggaacggtacaagtcacaacctggagcttattgcatcgtttttatcttatatatgagtctcttttaaattctctgaaataaatgggggtggtgattagtaaatagaggtataatctatctaatgagtcctcttccttcagttttttctttcttcttttctaagacagcttattaaatctattaagctctgtttttgatcttggtatcatcaccctcgcaagtgttttgttttgtcccatacttatttaacattatataatgaaaactatatggaagc

SEQ ID NO: 22710 - protein, 363 aa, Brassica napus
MCGGAIISDFIPPPSSRRVTSEFLWPDLKKNKGKASKKRSDFFDLDDEFEADFQGFEDDDASFDCEDDDDDVFAKVKPFVFTATTKPVASPPTATGSVSGKKIIESGGQAEKSAKRKRKNQYRGIRQRPWGKWAAEIRDPRKGSREWLGTFDTAEEAARAYDAAARRIRGSKAKVNFPEESNNNRSVSQKRPSAKKLVAKPNQSPALVQQPMSQYCNNSFGDVSFVEEKPQMYNNQFGLANSYNNHYFSSDQGSNSFDCSEFGWSDHGPKTPEISSMLVGNNQAPFTEETNAAKKLKPSSDDGTSNQSDDLMAYLDNALWESPSPLEVEAMLGVDAVAVTQGEENPMDLWSLDDINYMLEGVF

SEQ ID NO: 22711 - DNA, 1568 bp, Arabidopsis thaliana
  CDS (131)..(1207)
aaaaacaacaaagcaaagcgttgaagagagaagaagaagcaaagatataacccccaaaagtatcaattagtttccattttcgccgctaagattctgttttcgaacatttacaccctcaagaatcgccgccatgtgtggaggagctataatatccgatttcattccaccgccgaggtctcgccgtgttactagcgagtttatttggccggatctgaagaagaatttgaaaggatcgaagaaaagctcgaagaatcgttcgaatttcttcgattttgacgctgagttcgaagctgatttccaaggtttcaaagatgattcgtctatcgattgcgatgatgatttcgacgtcggtgatgttttcgccgatgtgaaaccattcgttttcacttcgactccaaaacccgccgtctccgccgctgcggaaggttcagtttttggtaagaaagttactggcttggatggggaagctgagaaatctgcaaataggaagaggaagaatcagtaccgagggattaggcaacgtccttggggaaaatgggctgctgagatacgtgatccaagggaaggtgctagaatctggcttggaacgttcaagacagctgaggaagctgctagagcttacgatgctgcagcgcggagaatccgtggatctaaagctaaggtgaatttccctgaagaaaacctgaaggctaattctcagaaacgctctgtgaaggctaatcttcagaaaccagtggctaaacctaaccctaacccaagtccagctttggttcagaactcgaacatctcctttgaaaatatgtgtttcatggaggagaaacaccaagtgagcaacaacaacaacaaccagtttgggatgacaaactccgttgatgctggatgtaatgggtatcagtatttcagctctgaccagggtagtaattctttcgattgttcggagtttggttggagcgatcaagctccgataactcccgacatctcttctgcggttatcaacaacaacaactcagctctgttctttgaggaagccaatccagctaagaagctcaagtctatggatttcgagacaccttacaacaacactgaatgggacgcttcactggatttcctcaacgaagatgctgtaacgactcaggacaatggtgcaaaccctatggacctatggagtattgatgaaattcattccatgattggaggagtcttctgaagagatccagtttcatgtaaataaggctgcatgtttgtgagtttcccgcatcgttcgtttatcaacctccaaaactttctaatgtctgttacttgcatcttcttctgctgtctctgtctgtctctctcaggagttcctgtttgcattgcgagaagccatgagcctctatcttgagggtagttgtgatgaagttaagtagaggcttatttttaggggttgtggtagtttttgttttagtgaatcttttgaattcgtttgtgttttgtttttgttactttatgccccaaaactcctttaacatttgtcataatgtgtttgaacctcctcatctgtttaatcaaataaatcttctttgtatgct

SEQ ID NO: 22712 - protein, 358 aa, Arabidopsis thaliana
MCGGAIISDFIPPPRSRRVTSEFIWPDLKKNLKGSKKSSKNRSNFFDFDAEFEADFQGFKDDSSIDCDDDFDVGDVFADVKPFVFTSTPKPAVSAAAEGSVFGKKVTGLDGEAEKSANRKRKNQYRGIRQRPWGKWAAEIRDPREGARIWLGTFKTAEEAARAYDAAARRIRGSKAKVNFPEENLKANSQKRSVKANLQKPVAKPNPNPSPALVQNSNISFENMCFMEEKHQVSNNNNNQFGMTNSVDAGCNGYQYFSSDQGSNSFDCSEFGWSDQAPITPDISSAVINNNNSALFFEEANPAKKLKSMDFETPYNNTEWDASLDFLNEDAVTTQDNGANPMDLWSIDEIHSMIGGVF

SEQ ID NO: 22713 - DNA, 1071 bp, Arabidopsis thaliana
  CDS (1)..(1071)
atgtgtggaggagctataatatccgatttcattccaccgccgaggtctcgccgtgttactagcgagtttatttggccggatctgaagaagaatttgaaaggatcgaagaaaagctcgaagaatcgttcgaatttcttcgattttgacgctgagttcgaagctgatttccaaggtttcaaagatgattcgtctatcgattgcgatgatgatttcgacgtcggtgatgttttcgccgatgtgaaaccattcgttttcacttcgactccaaaacccgccgtctccgccgctgcggaagtttttggtaagaaagttactggcttggatggggacgctgagaaatctgcaaataggaagaggaagaatcagtaccgagggattaggcaacgtccttggggaaaatgggctgctgagatacgtgatccaagggaaggtgctagaatctggcttggaacgttcaagacagctgaggaagctgctagagcttacgatgctgcagcgcggagaatccgtggatctaaagctaaggtgaatttccctgaagaaaacatgaaggctaattctcagaaacgctctgtgaaggctaatcttcagaaaccagtggctaaacctaaccctaacccaagtccagctttggttcagaactcgaacatctcctttgaaaatatgtgtttcatggaggagaaacaccaagtgagcaacaacaacaacaaccagtttgggatgacaaactccgttgatgctggatgtaatgggtatcagtatttcagctctgaccagggtagtaattctttcgattgttcggagtttggttggagcgatcaagctccgataactcccgacatctcttctgcggttatcaacaacaacaactcagctctgttctttgaggaagccaatccagctaagaagctcaagtctatggatttcgagacaccttacaacaacactgaatgggacgcttcactggatttcctcaacgaagatgctgtaacgactcaggacaatggtgcaaaccctatggacctatggagtattgatgaaattcattccatgattggaggagtcttctga

SEQ ID NO: 22714 - protein, 356 aa, Arabidopsis thaliana
MCGGAIISDFIPPPRSRRVTSEFIWPDLKKNLKGSKKSSKNRSNFFDFDAEFEADFQGFKDDSSIDCDDDFDVGDVFADVKPFVFTSTPKPAVSAAAEVFGKKVTGLDGDAEKSANRKRKNQYRGIRQRPWGKWAAEIRDPREGARIWLGTFKTAEEAARAYDAAARRIRGSKAKVNFPEENMKANSQKRSVKANLQKPVAKPNPNPSPALVQNSNISFENMCFMEEKHQVSNNNNNQFGMTNSVDAGCNGYQYFSSDQGSNSFDCSEFGWSDQAPITPDISSAVINNNNSALFFEEANPAKKLKSMDFETPYNNTEWDASLDFLNEDAVTTQDNGANPMDLWSIDEIHSMIGGVF

SEQ ID NO: 22715 - DNA, 1077 bp, Arabidopsis thaliana
  CDS (1)..(1077)
atgtgtggaggagctataatatccgatttcattccaccgccgaggtctcgccgtgttactagcgagtttatttggccggatctgaagaagaatttgaaaggatcgaagaaaagctcgaagaatcgttcgaatttcttcgattttgacgctgagttcgaagctgatttccaaggtttcaaagatgattcgtctatcgattgcgatgatgatttcgacgtcggtgatgttttcgccgatgtgaaaccattcgttttcacttcgactccaaaacccgccgtctccgccgctgcggaaggttcagtttttggtaagaaagttactggcttggatggggacgctgagaaatctgcaaataggaagaggaagaatcagtaccgagggattaggcaacgtccttggggaaaatgggctgctgagatacgtgatccaagggaaggtgctagaatctggcttggaacgttcaagacagctgaggaagctgctagagcttacgatgctgcagcgcggagaatccgtggatctaaagctaaggtgaatttccctgaagaaaacatgaaggctaattctcagaaacgctctgtgaaggctaatcttcagaaaccagtggctaaacctaaccctaacccaagtccagctttggttcagaactcgaacatctcctttgaaaatatgtgtttcatggaggagaaacaccaagtgagcaacaacaacaacaaccagtttgggatgacaaactccgttgatgctggatgtaatgggtatcagtatttcagctctgaccagggtagtaattctttcgattgttcggagtttggttggagcgatcaagctccgataactcccgacatctcttctgcggttatcaacaacaacaactcagctctgttctttgaggaagccaatccagctaagaagctcaagtctatggatttcgagacaccttacaacaacactgaatgggacgcttcactggatttcctcaacgaagatgctgtaacgactcaggacaatggtgcaaaccctatggacctatggagtattgatgaaattcattccatgattggaggagtcttctga

SEQ ID NO: 22716 - protein, 358 aa, Arabidopsis thaliana
MCGGAIISDFIPPPRSRRVTSEFIWPDLKKNLKGSKKSSKNRSNFFDFDAEFEADFQGFKDDSSIDCDDDFDVGDVFADVKPFVFTSTPKPAVSAAAEGSVFGKKVTGLDGDAEKSANRKRKNQYRGIRQRPWGKWAAEIRDPREGARIWLGTFKTAEEAARAYDAAARRIRGSKAKVNFPEENMKANSQKRSVKANLQKPVAKPNPNPSPALVQNSNISFENMCFMEEKHQVSNNNNNQFGMTNSVDAGCNGYQYFSSDQGSNSFDCSEFGWSDQAPITPDISSAVINNNNSALFFEEANPAKKLKSMDFETPYNNTEWDASLDFLNEDAVTTQDNGANPMDLWSIDEIHSMIGGVF

SEQ ID NO: 22717 - DNA, 1128 bp, Arabidopsis thaliana
  CDS (1)..(1128)
atgtgtggaggagctataatctccgatttcatacctccgccgaggtccctccgcgtcactaacgagtttatctggccggatctgaaaaacaaagtgaaagcttcaaagaagagatcgaataagcgatccgatttcttcgatcttgacgatgatttcgaagctgatttccaagggtttaaggatgactcggcttttgactgcgaagacgatgatgatgtcttcgtcaatgttaagcctttcgtcttcaccgcaactactaagcccgtagcttccgctttcgtctccactgtaggttcagcatatgccaagaaaactgtagagtccgctgagcaagctgagaaatcttctaagaggaagaggaagaatcaataccgagggattaggcagcgtccttggggaaaatgggctgcggagatccgtgatccgagaaaaggctcccgagaatggcttggaacattcgacactgctgaggaagcagcaagagcttatgatgctgcagcacgcagaatccgtggcacgaaagctaaggtgaattttcccgaggagaagaaccctagcgtcgtatcccagaaacgtcctagtgctaagactaataatcttcagaaatcagtggctaaaccaaacaaaagcgtaactttggttcagcagccaacacatctgagtcagcagtactgcaacaactcctttgacaactcttttggtgatatgagtttcatggaagagaagcctcagatgtacaacaatcagtttgggttaacaaactcgttcgatgctggaggtaacaatggataccagtatttcagttccgatcagggcagtaactccttcgactgttctgagttcgggtggagtgatcacggccctaaaacacccgagatctcttcaatgcttgtcaataacaacgaagcatcatttgttgaagaaaccaatgcagccaagaagctcaaaccaaactctgatgagtcagacgatctgatggcataccttgacaacgccttgtgggacaccccactagaagtggaagccatgcttggcgcagatgctggtgctgtgactcaggaagaggaaaacccagtggagctatggagcttagatgagatcaatttcatgctggaaggagacttttga

SEQ ID NO: 22718 - protein, 375 aa, Arabidopsis thaliana
MCGGAIISDFIPPPRSLRVTNEFIWPDLKNKVKASKKRSNKRSDFFDLDDDFEADFQGFKDDSAFDCEDDDDVFVNVKPFVFTATTKPVASAFVSTVGSAYAKKTVESAEQAEKSSKRKRKNQYRGIRQRPWGKWAAEIRDPRKGSREWLGTFDTAEEAARAYDAAARRIRGTKAKVNFPEEKNPSVVSQKRPSAKTNNLQKSVAKPNKSVTLVQQPTHLSQQYCNNSFDNSFGDMSFMEEKPQMYNNQFGLTNSFDAGGNNGYQYFSSDQGSNSFDCSEFGWSDHGPKTPEISSMLVNNNEASFVEETNAAKKLKPNSDESDDLMAYLDNALWDTPLEVEAMLGADAGAVTQEEENPVELWSLDEINFMLEGDF

SEQ ID NO: 22719 - DNA, 1125 bp, Arabidopsis thaliana
  CDS (1)..(1125)
atgtgtggaggagctataatctccgatttcatacctccgccgaggtccctccgcgtcactaacgagtttatctggccggatctgaaaaacaaagtgaaagcttcaaagaagagatcgaataagcgatccgatttcttcgatcttgacgatgatttcgaagctgatttccaagggtttaaggatgactcggcttttgactgcgaagacgatgatgatgtcttcgtcaatgttaagcctttcgtcttcaccgcaactactaagcccgtagcttccgctttcgtctccactggttcagcatatgccaagaaaactgtagagtccgctgagcaagctgagaaatcttctaagaggaagaggaagaatcaataccgagggattaggcagcgtccttggggaaaatgggctgcggagatccgtgatccgagaaaaggctcccgagaatggcttggaacattcgacactgctgaggaagcagcaagagcttatgatgctgcagcacgcagaatccgtggcacgaaagctaaggtgaattttcccgaggagaagaaccctagcgtcgtatcccagaaacgtcctagtgctaagactaataatcttcagaaatcagtggctaaaccaaacaaaagcgtaactttggttcagcagccaacacatctgagtcagcagtactgcaacaactcctttgacaactcttttggtgatatgagtttcatggaagagaagcctcagatgtacaacaatcagtttgggttaacaaactcgttcgatgctggaggtaacaatggataccagtatttcagttccgatcagggcagtaactccttcgactgttctgagttcgggtggagtgatcacggccctaaaacacccgagatctcttcaatgcttgtcaataacaacgaagcatcatttgttgaagaaaccaatgcagccaagaagctcaaaccaaactctgatgagtcagacgatctgatggcataccttgacaacgccttgtgggacaccccactagaagtggaagccatgcttggcgcagatgctggtgctgtgactcaggaagaggaaaacccagtggagctatggagcttagatgagatcaatttcatgctggaaggagacttttga

SEQ ID NO: 22720 - protein, 374 aa, Arabidopsis thaliana
MCGGAIISDFIPPPRSLRVTNEFIWPDLKNKVKASKKRSNKRSDFFDLDDDFEADFQGFKDDSAFDCEDDDDVFVNVKPFVFTATTKPVASAFVSTGSAYAKKTVESAEQAEKSSKRKRKNQYRGIRQRPWGKWAAEIRDPRKGSREWLGTFDTAEEAARAYDAAARRIRGTKAKVNFPEEKNPSVVSQKRPSAKTNNLQKSVAKPNKSVTLVQQPTHLSQQYCNNSFDNSFGDMSFMEEKPQMYNNQFGLTNSFDAGGNNGYQYFSSDQGSNSFDCSEFGWSDHGPKTPEISSMLVNNNEASFVEETNAAKKLKPNSDESDDLMAYLDNALWDTPLEVEAMLGADAGAVTQEEENPVELWSLDEINFMLEGDF

SEQ ID NO: 22721 - DNA, 1098 bp, Oryza sativa subsp
  CDS (1)..(1098)
atgtgcggcggcgccatcatccaccacctgaaggggcacccggaggggtcgcgccgggcgacggaggggctcctgtggcccgagaagaagaagcccaggtggggcggcggcgggaggcgccacttcggggggttcgtggaggaggacgacgaggacttcgaggccgacttcgaggagttcgaggtggactccggggactcggatttggagctcggggaggaggacgacgatgacgtcgtcgagatcaagccggccgccttcaagagggccctctccagagataacttgagcaccattaccactgccggatttgatggtcctgctgcaaagtctgccaaaagaaagagaaagaaccaattcaggggcatccgccagcgcccttggggtaagtgggctgctgaaatcagagatcctcgcaagggtgttcgtgtctggcttggcactttcaacagtgctgaagaagctgcaagagcttatgatgctgaagcacgcaggattcgtggcaagaaggccaaggtgaattttccagaggctccaacaactgctcagaagcgtcgtgctggctccaccactgctaaagcacccaagtcaagtgtggaacagaagcctactgtcaaaccagcattcaacaatcttgccaatgcaaatgcgtttgtctacccatctgctaacttcacttcaaacaagccgtttgttcagcctgataacatgccatttgttcctgcaaagaactctgctgctcctattgaggaccctatcatcaactctgaccagggaagcaactcatttggctgctctgactttggctgggagaatgataccaagacaccagatattacatcaattgctcccatttcaaccatagctgaagtcgatgaatctgcattcattaagagcagtaccaacccaatggtccctcctgttatggagaacagtgctgttgatctgcctgatttagaaccctacatgaggttccttctggatgatggtgctggtgactcaattgatagccttctcaacctggatggatcacaggatgttgtcagcaacatggacctctggagctttgatgacatgcccgttagcgatttctattga

SEQ ID NO: 22722 - protein, 365 aa, Oryza sativa subsp
MCGGAIIHHLKGHPEGSRRATEGLLWPEKKKPRWGGGGRRHFGGFVEEDDEDFEADFEEFEVDSGDSDLELGEEDDDDVVEIKPAAFKRALSRDNLSTITTAGFDGPAAKSAKRKRKNQFRGIRQRPWGKWAAEIRDPRKGVRVWLGTFNSAEEAARAYDAEARRIRGKKAKVNFPEAPTTAQKRRAGSTTAKAPKSSVEQKPTVKPAFNNLANANAFVYPSANFTSNKPFVQPDNMPFVPAKNSAAPIEDPIINSDQGSNSFGCSDFGWENDTKTPDITSIAPISTIAEVDESAFIKSSTNPMVPPVMENSAVDLPDLEPYMRFLLDDGAGDSIDSLLNLDGSQDVVSNMDLWSFDDMPVSDFY

SEQ ID NO: 22723 - DNA, 1089 bp, Oryza sativa subsp
  CDS (1)..(1089)
atgtgcggcggcgccatcctctccgacctcatcccgccgccgcggcgggtcaccgccggcgacctctggctggagaagaccaagaagcagcagcagcagaagaagaagaacaagggcgcgaggaggctgccactgcgccaagaggaggaggatgatttcgaggccgacttcgaggagttcgaggtggattccggcgagtgggaggtggagtccgacgccgacgaggccaagccgctcgccgcgccccggagcggcttcgctaaaggtggattgaaaaacactactgttgctggtgctgatgggcctgcagcaaggtctgctaaaaggaagagaaagaaccaattcaggggtatccgccagcggccatggggcaaatgggctgcggaaatcagagatcctcgcaaaggtgtccgcgtctggcttggcaccttcaactctcctgaggaagctgccagagcttatgatgctgaagcacgaaggattcgaggcaagaaggccaaggtcaatttcccagatggggctccagtggcttctcagaggagtcatgctgagccctcctccatgaacatgcctgctttcagcatcgaagagaagccggccgtcatgtcagcaggcaacaaaatcatgtacaacacaaatgcttatgcctaccctgctgttgagtacaccttacaggagccatttgtgcagattcagaatgtctcatttgttcctgcaatgaacgcgattgaggatactttcgtgaacctgtcctctgatcaagggagcaactcctttggttgctcggactttagccaggagaatgatatcaagacccctgacataacttccatgcttgcaccgaccattacaggtgttgatgactctgcattcctccagaacaatgccagtgatgcaatggtacctcctgtgatggggaatgctagcattgatcttgccgacctggagccgtacatgaaatttctgatcgatggtggttcagatgagtcgattgacacccttctgagctctgatggatctcaggatgtggccagtagcatggacctttggagcttcgatgacatgcccgtgtcggccgagttctactga

SEQ ID NO: 22724 - protein, 362 aa, Oryza sativa subsp
MCGGAILSDLIPPPRRVTAGDLWLEKTKKQQQQKKKNKGARRLPLRQEEEDDFEADFEEFEVDSGEWEVESDADEAKPLAAPRSGFAKGGLKNTTVAGADGPAARSAKRKRKNQFRGIRQRPWGKWAAEIRDPRKGVRVWLGTFNSPEEAARAYDAEARRIRGKKAKVNFPDGAPVASQRSHAEPSSMNMPAFSIEEKPAVMSAGNKIMYNTNAYAYPAVEYTLQEPFVQIQNVSFVPAMNAIEDTFVNLSSDQGSNSFGCSDFSQENDIKTPDITSMLAPTITGVDDSAFLQNNASDAMVPPVMGNASIDLADLEPYMKFLIDGGSDESIDTLLSSDGSQDVASSMDLWSFDDMPVSAEFY

SEQ ID NO: 22725 - DNA, 1200 bp, Oryza sativa subsp
  CDS (1)..(1200)
atgtgcggcggagcaatcatctccgggttcatcccgccgtcggccgctgcggcggcggcggcggcggcggcggcggccaagaagcagcagggcaggagggtcacggccgacgtgctgtggccggggatgctgcggaaggggaaggcggcggcggcggaggaggactttgaggccgacttccgcgagttcgagcgtggcatgagcgacgacgaggcggaggggggcggcggcgaggaggaggaggaggaggaggacgacgtggtcgtggaggtccccccgccggcgacggcgaggttcgtcgtccgtgccgcggccaaggcggcgcccccaactgcagatgggatgttgactacaaagcttgtccaacatgatggacctactgctagatcggcaaagcgcaagaggaagaatcagtacagggggatccgccagcgtccctggggcaaatgggcagctgaaatccgagaccccagcaagggtgtccgtgtttggcttggaacatataacactgctgaggaggcagctagggcatatgacgctgaagcccgcaagatccgtggcaagaaagccaaggtcaactttcctgatgaaccagctgttgctcagaagctctccctgaagcaaaacgctgccaagcaagagaaactagctccacctctgaagtcctgtggcgatgatgctttctttcagctaaacagttcagacaatgatttgtttgcaatgcttgcaaaggtgcctgcaaagccggcagagcctgttgatctcatgcctccagtcaaacctcttgcttccactgagacattcgagatgaacatgctctctgatacgagcagcaactcatttggctcttcagactttggttgggaggatgacaccctgaccccagactacacttcagtctttgttcctaatgctgccatgccagcatatggtgaacctgcttacctgacaggtggagcgccaaagagaatgaggaacaactatggtatcgccgtgccccagggaaatggcatgcctaatctcgcacaaaacatgcccaccttcgatcccgagatgaagtatttgccattaccttatgttgagagcagctcagatgaatcaatggacaaccttctgcaaaatgatgctacacaagacggggcaagcaacgagggcatctggagccttgatgagctgctcatggcagctggtgcctactga

SEQ ID NO: 22726 - protein, 399 aa, Oryza sativa subsp
MCGGAIISGFIPPSAAAAAAAAAAAAKKQQGRRVTADVLWPGMLRKGKAAAAEEDFEADFREFERGMSDDEAEGGGGEEEEEEEDDVVVEVPPPATARFVVRAAAKAAPPTADGMLTTKLVQHDGPTARSAKRKRKNQYRGIRQRPWGKWAAEIRDPSKGVRVWLGTYNTAEEAARAYDAEARKIRGKKAKVNFPDEPAVAQKLSLKQNAAKQEKLAPPLKSCGDDAFFQLNSSDNDLFAMLAKVPAKPAEPVDLMPPVKPLASTETFEMNMLSDTSSNSFGSSDFGWEDDTLTPDYTSVFVPNAAMPAYGEPAYLTGGAPKRMRNNYGIAVPQGNGMPNLAQNMPTFDPEMKYLPLPYVESSSDESMDNLLQNDATQDGASNEGIWSLDELLMAAGAY

SEQ ID NO: 22727 - DNA, 1152 bp, Saccharum arundinaceum
  CDS (1)..(1152)
atgtgcggcggcgccatcctctcgggtttcatcccaccgtccggggtggcagcggcggcggccgccaagaagaaacagcagcagcagcggcgtgtgacggcggacctgctgtggccagggcccggcaagaagggcgcgccccaggaggaggacttcgaggccgacttccgcgagttcgagcgcggcctcagcgaaggcggcgacgacgaggtccaggagcttcctgcgccgcagccggcgaggtttgccttcgccgccgcgcccaaggcgccgcgccctgaagttgatggtgtgatgactccaaaggatgcttatggagatagacctactgctaactcaataaagcgcaaccggaagaatcagtacaggggaatccgccagcgcccttggggcaaatgggcagctgaaatcagagaccctagcaagggtgtccgtgtttggcttggaacttacaacactgctgaggaggcagctagggcatatgatgctgaagctcgcaagatccgtggaaaaaaagcgaaggtcaattttcctgatgaagtgtcaggtgctcagaagtcaaccgcaaagccaactgctgcgaatgcaacaaagctagctcaacccccaaaggcctgtgctgatgaggttttcaataacctgaacaatgacaacaatgatttgttcgcaatgtttgcgttcaatgacaataaggttcctgtgaagccagctgagggtgccagattcctccctgcagtgaaacctctggtgcccagtaagagatctgcgacttacatgctctctgaccagagcagcaactcctatggctcttctgactttgggtgggacgatgacaccatgacctcagactacacctcagtcttcgctcccaataatgttataccagcaccttacatgcaaggtggagtgtcaaagagaatgaggaacaactatggtgtagccatgcttcagggaaatggcgtgcccagtctcacacaagtcatgccttgttttgatcctgagatgaactatcagccattgccttatgttgagagcagctcatcagatgcatcaatggacagccttctacaaactgatattccacaggatgtggcaagcaatggggatatctggagccttgatgagctgcttatggcagctggtgcttattga

SEQ ID NO: 22728 - protein, 383 aa, Saccharum arundinaceum
MCGGAILSGFIPPSGVAAAAAAKKKQQQQRRVTADLLWPGPGKKGAPQEEDFEADFREFERGLSEGGDDEVQELPAPQPARFAFAAAPKAPRPEVDGVMTPKDAYGDRPTANSIKRNRKNQYRGIRQRPWGKWAAEIRDPSKGVRVWLGTYNTAEEAARAYDAEARKIRGKKAKVNFPDEVSGAQKSTAKPTAANATKLAQPPKACADEVFNNLNNDNNDLFAMFAFNDNKVPVKPAEGARFLPAVKPLVPSKRSATYMLSDQSSNSYGSSDFGWDDDTMTSDYTSVFAPNNVIPAPYMQGGVSKRMRNNYGVAMLQGNGVPSLTQVMPCFDPEMNYQPLPYVESSSSDASMDSLLQTDIPQDVASNGDIWSLDELLMAAGAY

SEQ ID NO: 22729 - DNA, 1149 bp, Medicago truncatula
  CDS (1)..(1149)
atgtgtggtggagctattatctccgacttcattccagctgcggcggcggtgggtggttcccgccgtgtcacagcggatatcctctggccgaatttgaggaggaaaccaagttcaaggaaaccttttttgcttgacgatgatttcgaggctgggttcagagagtttaaggatgattctgattttgatgaagacgaggatgaagatgatgatgaagggttgttggtcggtgtcaaaggtttcacctttgcttccaataagaacaacaaatcttctaagtcctttgttcgtggatcaagtgctgcaaaatctgttgctttgaattcaaaccagcaagctgaaaaggattcgaagagaaagagaaagaatcagtataggggtatccgtcaacgtccatggggaaaatgggcagctgagatccgtgacccaaggaaaggagtccgtgtctggctcggaactttcaacactgctgaagaagctgcaagagcttatgatgctgaagctaggagaatccgtggcaataaagccaaggtgaatttccctgaagaggctccggttgcttcctcaaaacgtctcaagaaaaatcctgagatgcagctgttgaatgataatctaaactctttcaagccgaacggaaaccaaatgttcaatttcagtgaaaatatggagaactactattctcctatggatcaggtggaacagaaaccattggttaacaaccaatatgctgacatcggagccttctccggaaacggagtgcagcttacatctgctgatgttaatgcttatttcagttcagagcattcaagcaattcatttgattattctgatctatgttggggtgaacaaggcgcaaaaacacctgagatttcgtctgtgttttctgctgctgctcctatggaaggtgaatctcagaagaacatgctgtctgacaacactcaggatatgctgcctatgcaaaatgattctgcaaagaccctctctgaagagctcgcagatatcgaatcccagctgaagttcttcgagaacgataactggagtgatgcttcattggctgctttgcttagtggagatacaactcaggatggtggaaacacaatgaacctttggaacttcgatgacctgccttccatcgcaggcggagttttctaa

SEQ ID NO: 22730 - protein, 382 aa, Medicago truncatula
MCGGAIISDFIPAAAAVGGSRRVTADILWPNLRRKPSSRKPFLLDDDFEAGFREFKDDSDFDEDEDEDDDEGLLVGVKGFTFASNKNNKSSKSFVRGSSAAKSVALNSNQQAEKDSKRKRKNQYRGIRQRPWGKWAAEIRDPRKGVRVWLGTFNTAEEAARAYDAEARRIRGNKAKVNFPEEAPVASSKRLKKNPEMQLLNDNLNSFKPNGNQMFNFSENMENYYSPMDQVEQKPLVNNQYADIGAFSGNGVQLTSADVNAYFSSEHSSNSFDYSDLCWGEQGAKTPEISSVFSAAAPMEGESQKNMLSDNTQDMLPMQNDSAKTLSEELADIESQLKFFENDNWSDASLAALLSGDTTQDGGNTMNLWNFDDLPSIAGGVF

SEQ ID NO: 22731 - DNA, 1149 bp, Medicago falcata
  CDS (1)..(1149)
atgtgtggtggagctattatctccggcttcattccagctgcggcggcggtgggtggttcccgccgtgtcacggcggatatcctctggccgaatttgaggaggaaaccaagttcaaggaaaccttttttgcttgacgatgatttcgaggctgggttcagagagtttaaggatgattccgatttcgatgaagacgaggatgaagatgatgatgaagggttgttggtcggtgtcaaaggtttcacctttggttccaataagaacaacaaatcttctaagtcctttgttcgtggatcaagtgctgcaaaacctgttgctttgaattcaaacaagctagctgaaaaggattcgaagagaaagaggaagaatcagtataggggtatccgtcaacgtccatggggaaaatgggcagctgagatccgtgacccaaggaaaggagtccgtgtctggctcggaactttcaacactgctgaagaagctgcaagagcttatgatgctgaagctaggagaatccgtggcaagaaagccaaggtgaatttccctgaagaggctccagttgcttcctcaaaacgtctcaagaaaagtcctgagacgcagctgttgaatgaaaatctgaactctttaaagccaaacggaaaccaaatgttcaatttcggcgaaaatatggagaactacttttctcctatggatcaagtggaacagaaaccattggttaacaaccagtatgctgacatcggagccttctccggaaacggagtgcaacttacatctgctgatgttaatgcttatttcagttcagagcattcaagcaattcatttgattattctgatctatgctggggcgaacaaggtccaaaaacacctgagatttcgtctgtgttttctgctgctgctcctatggaaggcgaatctcagacgaatatgctgtctgacaacactcaggatatgctgcctatgcaaaatgattctgcaaagaccctctctgaggagctcgcagatatcgaatcccagctgaagttcttcgagaacgataactggagtgatgcttcattggctgctttgcttggtggagacacaactcaggatggtggaaacacaatgaacctctggaacttcgatgacctgccttccatcgcaggcgatgttttctaa

SEQ ID NO: 22732 - protein, 382 aa, Medicago falcata
MCGGAIISGFIPAAAAVGGSRRVTADILWPNLRRKPSSRKPFLLDDDFEAGFREFKDDSDFDEDEDEDDDEGLLVGVKGFTFGSNKNNKSSKSFVRGSSAAKPVALNSNKLAEKDSKRKRKNQYRGIRQRPWGKWAAEIRDPRKGVRVWLGTFNTAEEAARAYDAEARRIRGKKAKVNFPEEAPVASSKRLKKSPETQLLNENLNSLKPNGNQMFNFGENMENYFSPMDQVEQKPLVNNQYADIGAFSGNGVQLTSADVNAYFSSEHSSNSFDYSDLCWGEQGPKTPEISSVFSAAAPMEGESQTNMLSDNTQDMLPMQNDSAKTLSEELADIESQLKFFENDNWSDASLAALLGGDTTQDGGNTMNLWNFDDLPSIAGDVF

SEQ ID NO: 22733 - DNA, 1191 bp, Oryza sativa subsp
  CDS (1)..(1191)
atgtgcggcggagcaatcatctccgggttcatcccgccgtcggccgctgcggcggcggcggctgcggcggccaagaagcagcagggcaggagggtcacggccgacgtgctgtggccggggatgctgcggaaggggaaggcggcggcggcggaggaggactttgaggccgacttccgcgagttcgagcgtggcatgagcgacgacgaggcggaggggggcggcggcgaggaggaggaggacgacgacgacgtggtcgtggtggtccccccgccggcggcggcgaggttcgtcgtccgtgccgcggccaaggcggcgcccccaactgcagatgggatgttgactacaaagcttgtccaacatgatggacctactgctagatcagcaaagcacaagaggaagaatcagtacagggggatccgccagcgtccctggggcaaatgggcagctgaaatccgagaccccagcaagggtgtccgtgtttggcttggaacatataacactgctgaggaggcagctagggcatatgacgctgaagcccgcaagatccgtggcaagaaagccaaggtcaactttcctgatgaaccagctgttgctcagaagctctccctgaagcaaaacgctgccaagcaagagaaactagctccacctctgaagacctgtggcgatgatgctttctttcagctaaacagttcagacaatgatttgtttgcaatgcttgcaaaggtgcctgcaaagccggcagagcctgttgatctcatgcctccagtcaaacctcttgcttccactgagacattcgagatgaacatgctctctgatacgagcagcaactcatttggctcttcagactttggttgggaggatgacaccctgaccccagactacacttcagtcttcgttcctaatgctgccatgccagcatatggtgaacctgcttacctgacaggtggagcgccaaagagaatgaggaacaactatggtatcgccgtgccccagggaaatggcatgcctaatctcgcacaaaacatgcccaccttcgatcccgagatgaagtatttgccattaccttatgttgagagcagctcagatgaatcaatggacaaccttctgcaaaatgatgctacacaagacggggcaagcaacgagggcatctggagccttgatgagctgctcatggcagctggtgcctactga

SEQ ID NO: 22734 - protein, 396 aa, Oryza sativa subsp
MCGGAIISGFIPPSAAAAAAAAAAKKQQGRRVTADVLWPGMLRKGKAAAAEEDFEADFREFERGMSDDEAEGGGGEEEEDDDDVVVVVPPPAAARFVVRAAAKAAPPTADGMLTTKLVQHDGPTARSAKHKRKNQYRGIRQRPWGKWAAEIRDPSKGVRVWLGTYNTAEEAARAYDAEARKIRGKKAKVNFPDEPAVAQKLSLKQNAAKQEKLAPPLKTCGDDAFFQLNSSDNDLFAMLAKVPAKPAEPVDLMPPVKPLASTETFEMNMLSDTSSNSFGSSDFGWEDDTLTPDYTSVFVPNAAMPAYGEPAYLTGGAPKRMRNNYGIAVPQGNGMPNLAQNMPTFDPEMKYLPLPYVESSSDESMDNLLQNDATQDGASNEGIWSLDELLMAAGAY

SEQ ID NO: 22735 - DNA, 1128 bp, Capsicum annuum
  CDS (1)..(1128)
atgtgtggtggtgcaattatctccgatttggtacctcctagccggatttcccgccggctaaccgccgagttgctatggggtaactctgatctgagcaaaaagaagaaaaatccagggaattattactcaaagcctttgaacaggtctaagtttattgaccttgatgaggaatttgaagctgactttcaggacttcaaggactatgccgatgacgatgttgatgatgttaagcccttcggttccaaatctgtgaaatctggcgattcaagctgcgatactgaaaaatcttccaagagaaagaggaagaatcagtaccgggggatcagacagcgtccttggggtaagtgggcagctgaaattcgtgatccgaggaaagggattcgagtttggcttggaactttcaattctgcggaagaagcagctagagcttatgatgttgaggcacgaaggatcagaggcaagaaggctaaggtgaactttcctgatggatctccagcttctgcttcaagacgtgctgttaagccaaatcctcaggaggcacttcgcgaggaaatcttgaacacagttcagccgaacacaacttatatcaacaacttggacggcggatctgatgattcgtttggctttttcgaagagaaaccagcagcaaagcagtatggctatgagaatgtttcttttactgctggagatatgggactgggttcaatttccccttcaactggtacaacaaatgtttacttcagttctgatgaaggaagcaacacctttgactgctctgatttcggttggggtgaaccatgtccgaggactccagagatctcatctgttctgtcagaagttctagaatgtaatggtactcaatctgatgaagatgctagaccagagaaaaaactgaagtcgtgttccaacgcttccttgccagatgaggataacactgtgcacacgctatctgaagagctatcggcttttgaatcccagatgaagttcttgcagatcccatatcttgagggaaattgggatgcatcagttgatgcctttgtcaacacaggcgcaattcaggatggcggaaatgcgatggatctctggaccttcgatgatgttccttctttaatgggaggtgtctactaa

SEQ ID NO: 22736 - protein, 375 aa, Capsicum annuum
MCGGAIISDLVPPSRISRRLTAELLWGNSDLSKKKKNPGNYYSKPLNRSKFIDLDEEFEADFQDFKDYADDDVDDVKPFGSKSVKSGDSSCDTEKSSKRKRKNQYRGIRQRPWGKWAAEIRDPRKGIRVWLGTFNSAEEAARAYDVEARRIRGKKAKVNFPDGSPASASRRAVKPNPQEALREEILNTVQPNTTYINNLDGGSDDSFGFFEEKPAAKQYGYENVSFTAGDMGLGSISPSTGTTNVYFSSDEGSNTFDCSDFGWGEPCPRTPEISSVLSEVLECNGTQSDEDARPEKKLKSCSNASLPDEDNTVHTLSEELSAFESQMKFLQIPYLEGNWDASVDAFVNTGAIQDGGNAMDLWTFDDVPSLMGGVY

SEQ ID NO: 22737 - DNA, 1158 bp, Trifolium pratense
  CDS (1)..(1158)
atgtgtggtggtgctattatttccgacttcattccagctgcggcggcggtgggtggttcccgccgtgtcactgctgatatcttgtggccaaatttgaggaaaactggttccaaaaaatcatcttttttgcttgacgatgattttgaagctggtttcagacagtttaaggatgattctgatttcgatgaagacgaggatgaagatgacgatgaagggttgttggtcggtgtcaaaggttttacctttgctgcttctaacaacaaatcttcaaggaacttctctcgtggctcggctggtgcaaaatccgtggcatcgaaatcaaatgagcaagctgaaaaggaatcaaagagaaagaggaagaatcagtataggggtatccgccaacgtccatggggaaaatgggcagctgagatccgtgatccaaggaaaggagtccgtgtttggctcggaactttcaacactgctgaagaagctgcaagagcttacgatgctgaagctaggagaatccgtggcaagaaagccaaggtgaatttccccgatgaggctccaaatgcttcctcaaaacgtctgaagacaaatcctgataaccagctgttgaacaaaaatctgaactctttcaagccgaacggaaacaacaaaatgttcaatttcagcgagaatatggagaacttctattctcctatggatcaggttgaacagaaaccattggttaacaaccaatatggtgctgctgacattggagccttcactggaaacggagttcaccttgcacctgctgatgttaatgcttatttcagttctgagcattcaagcaactcgtttgattattctgatttatgttggggggaacaaggcccgaaaacccctgagatttcctcggtgttttctgctcctctcgaagctgaacctcagatgaacatgcagtctaacaactctcaggatatgctacctatgcaagctgaatctgcaaagacactctctgaggagcttgcagatatcgaatcccagctgaagttcttcgagaactcattcgatgataactggagtgatgcttcacttgcgtctttgctcggtgctgatgtaactcaggatgctggaaacacaatgaacctttggagctttgatgacctgccttccatcgcaggcggagttttctga

SEQ ID NO: 22738 - protein, 385 aa, Trifolium pratense
MCGGAIISDFIPAAAAVGGSRRVTADILWPNLRKTGSKKSSFLLDDDFEAGFRQFKDDSDFDEDEDEDDDEGLLVGVKGFTFAASNNKSSRNFSRGSAGAKSVASKSNEQAEKESKRKRKNQYRGIRQRPWGKWAAEIRDPRKGVRVWLGTFNTAEEAARAYDAEARRIRGKKAKVNFPDEAPNASSKRLKTNPDNQLLNKNLNSFKPNGNNKMFNFSENMENFYSPMDQVEQKPLVNNQYGAADIGAFTGNGVHLAPADVNAYFSSEHSSNSFDYSDLCWGEQGPKTPEISSVFSAPLEAEPQMNMQSNNSQDMLPMQAESAKTLSEELADIESQLKFFENSFDDNWSDASLASLLGADVTQDAGNTMNLWSFDDLPSIAGGVF

SEQ ID NO: 22739 - DNA, 1068 bp, Triticum aestivum
  CDS (1)..(1068)
atgtgcggcggcgccatcctctccgacatcatcccgccgccgcgccgggccaccggcggcaacgtctggcgggcggacaagaagaggagggccaggcccgacgccgccgcggggaggccccgccgcgtgcccgaggaggagttccaggaggaggagggcgacgcggagttcgaggccgacttcgaggggttcgtggaggcggaggaggagtccgacggcgaggccaagcccttccccgtccgcaggaccggcttctccggagatggactgaaggcaactgctgctggtgatgatgactgtgcctcagggtctgctaaaaggaagagaaagagccagttcaggggcatccgccgccgcccttggggtaaatgggctgctgaaataagagatcctcgcaagggtgtccgtgtctggcttggcacttacaactctgctgaggaagctgccagagcctatgatgttgaagcccgcagaattcgtggcaagaaggcaaaggtcaatttcccagaagaagctcccatggatcctcagcaacgctgcgctacctctgtgaaggtgcccgagttcaacaccgaacagaagccagtactcaacaccatgggcaacacagatgtgtattcctgccctgctgttgactacaccttaaatcagcaatttgtgcagcctcagaacatgtcgtttgtgcctacagtgaatgcagttgaggctcctttcatgaatttttcctctgaccaggggagcaactcctttagttgctcagacttcagctgggagaatgatatcaagacccctgacataacttctgtgcttgcatccattcccacctcaactgaggtcaatgaatctgcatttctccagaacaatggcattaattcaacggtacctcctgtgatgggtgatgctaatgttgatcttgccgacttggagccatacatgaagttcctgatggacgatggttcagatgagtcaattgacagcattctaagctgtgatgtaccgcaggacgttgtcggcaacatgggcctttggacctttgatgacatgcccttgtctgctggtttctactga

SEQ ID NO: 22740 - protein, 355 aa, Triticum aestivum
MCGGAILSDIIPPPRRATGGNVWRADKKRRARPDAAAGRPRRVPEEEFQEEEGDAEFEADFEGFVEAEEESDGEAKPFPVRRTGFSGDGLKATAAGDDDCASGSAKRKRKSQFRGIRRRPWGKWAAEIRDPRKGVRVWLGTYNSAEEAARAYDVEARRIRGKKAKVNFPEEAPMDPQQRCATSVKVPEFNTEQKPVLNTMGNTDVYSCPAVDYTLNQQFVQPQNMSFVPTVNAVEAPFMNFSSDQGSNSFSCSDFSWENDIKTPDITSVLASIPTSTEVNESAFLQNNGINSTVPPVMGDANVDLADLEPYMKFLMDDGSDESIDSILSCDVPQDVVGNMGLWTFDDMPLSAGFY

SEQ ID NO: 22741 - DNA, 1191 bp, Gossypium hirsutum
  CDS (1)..(1191)
atgtgtggaggtgcgattatctccgatttcattccgcctgcgcggtcgcgactggtgacggcgaattatttgtggccggatctgaaaaaatccggctctaaaaagcggtcgggtagaaagcactcgaagaagccggcggtcggctttgaagatgacttcgaggctgattttcaggtgtttaaggatgaggattctgatgtcgatgacttcaacgatgatgttgatgatgttttggctgatgttaagtcctttgctttttctgctacaaagaaaccctctcctgctgtttctcatggttcaaactccataaaatctgtggaattcagtggtcaagctgagaaatctgcaaaaagaaagaggaagaaccagtatcgcggaattcgccagcgtccgtggggtaaatgggctgctgagatccgtgatcctaggaaaggggttagggtgtggcttggaacttttaatactgctgaggaagctgcacgagcttatgatgctgaggcactgagaattcggggtaagaaagcaaaggtgaacttccctgatgagactccacgtaccactccaaagcatgctgttaaaatgaattctcagaaacctctttccgggtcaaatttgagttctgttcaatcaagtctcaacccagatttcagttactcgaacaaacttgagcagggctactatgataccgtgggtttcattgaagagaagtcactaatggatcagtttgcatatgcagaccctgttagagctgctgtagatgatgggttaaaaccctttgctgaccctgagaataccgcttcgttttttatctcagatccagggagtaacaactttgacagttccgaccttgtctggggcgaccagggtgccaagactcctgaaatatcatcctctcttgaacctactctagaggtcaacgagtttctggacaacgcaaaccctacgaagaagttgaaactgagcttgaataatgtcatgcctactggaggagacaattcggtaaagagtttatccgatgagctattagctatggacaatcaagtgaactactttcagacaccatttattgacgagaactggaatgtttcgatggatgacttccttaatggagatgcaactcaggttggcggaaacgaaatgggtttttggagctttgatgactttccttccatagatgggggtattttctga

SEQ ID NO: 22742 - protein, 396 aa, Gossypium hirsutum
MCGGAIISDFIPPARSRLVTANYLWPDLKKSGSKKRSGRKHSKKPAVGFEDDFEADFQVFKDEDSDVDDFNDDVDDVLADVKSFAFSATKKPSPAVSHGSNSIKSVEFSGQAEKSAKRKRKNQYRGIRQRPWGKWAAEIRDPRKGVRVWLGTFNTAEEAARAYDAEALRIRGKKAKVNFPDETPRTTPKHAVKMNSQKPLSGSNLSSVQSSLNPDFSYSNKLEQGYYDTVGFIEEKSLMDQFAYADPVRAAVDDGLKPFADPENTASFFISDPGSNNFDSSDLVWGDQGAKTPEISSSLEPTLEVNEFLDNANPTKKLKLSLNNVMPTGGDNSVKSLSDELLAMDNQVNYFQTPFIDENWNVSMDDFLNGDATQVGGNEMGFWSFDDFPSIDGGIF

SEQ ID NO: 22743 - DNA, 1173 bp, Gossypium hirsutum
  CDS (1)..(1173)
atgtgtggaggtgctattatctccgatttcataccgccgtcgcggtcgcgacgattgacggccgatttcttgtggcccgatctgaaaaaatccgggttgaagaaggggtcgggtaagagatactcgaagcccgtgatcgacttgggcgatgatttcgagactgactttcaggagttcaaagatgaagaatctgatatagatgattatgatgttgatgatgttttggctgatgtaaagccctttgcttttaacgctacaaagaaacctgcttctgctgtctctcatggttcgaactctgaaaaatccatgcaattcaatggtcaagctgagaaatgtgcgaaaagaaagaggaagaaccagtatcgtggaatccggcagcgcccatggggtaaatgggctgctgagatccgtgacccaaggaaaggggttagggtctggttaggaactttcaatactgctgaagaagctgcgagagcttatgatgctgaggcacggagaattcgtggtaagaaagctaaggtgaacttccctaacgagactccgcgtacctctccaaagcatgcagtcaagacaaattctcagaaaccactttccaagtcaaattcgagccctgttcagccaaatctcaaccagaattacaattacttgaaccagcctgagcaggaatactttgataccatgggtttcgtagaagagaagccatcggtcaatcagttcgcatacgtggaccctgttcctacgtctatagatgctggatttaatcaatcagataatgcccccttgtacttcaattcagaccagggaagtaactcgatcaattgttccgactatggctggggagaacagggtgccaaaactcctgaaatatcatccattctggaagcttctgtagagggtgatgagtttcttgaggatgctaaccctagcaagaagctgaaaccaagttccgacaatgttatgcctgccgaagacaactccgcgaagaccttgtcggacgagctgttggctttggacaaccagatgaaatacttccaaatgccgccatttattgaaggaaactgggacgccactattgatgctttcctcaatggagatgcaacacaggatggtggaaacccgatggatctttggaactttgatgatttccctaccatggcggagggtgttttctga

SEQ ID NO: 22744 - protein, 390 aa, Gossypium hirsutum
MCGGAIISDFIPPSRSRRLTADFLWPDLKKSGLKKGSGKRYSKPVIDLGDDFETDFQEFKDEESDIDDYDVDDVLADVKPFAFNATKKPASAVSHGSNSEKSMQFNGQAEKCAKRKRKNQYRGIRQRPWGKWAAEIRDPRKGVRVWLGTFNTAEEAARAYDAEARRIRGKKAKVNFPNETPRTSPKHAVKTNSQKPLSKSNSSPVQPNLNQNYNYLNQPEQEYFDTMGFVEEKPSVNQFAYVDPVPTSIDAGFNQSDNAPLYFNSDQGSNSINCSDYGWGEQGAKTPEISSILEASVEGDEFLEDANPSKKLKPSSDNVMPAEDNSAKTLSDELLALDNQMKYFQMPPFIEGNWDATIDAFLNGDATQDGGNPMDLWNFDDFPTMAEGVF

SEQ ID NO: 22745 - DNA, 1146 bp, Manihot esculenta
  CDS (1)..(1146)
atgtgtggcggtgctatcatctccgacttcatccctgccaccgctgctggccgatcctcgcgacggttgacagcggactttctctggcctgatctaaagaagcccattgggaaaatcgttggtgaccttgacgatgatttcgaggctgatttccaggagtttaaggatgagtctgatgtcgatgaggaagatgacgttttgtttgatgtcaagcctttctctttctctgctactgcttctcctcctcctcgcaatcgcagtccttcacgtggttctacagctgtaaagtctgtggaatttaatgggctagctgaaaaatctgcaaagagaaagagaaaaaaccagtacagaggaatccggcagcgcccatggggaaaatgggctgctgagattcgtgaccccaggaaaggggtgcgtgtctggctaggaacattcaatactgctgaagaagctgcaagagcgtatgatgctgaggcacgtagaattcgtggcaagaaagctaaagtgaactttcctgatgaagctccacgtgcttccccaaagcggacaatgaaggcaaaccctcagaaaccacttcctaagagaaatgctactgagagtatgagttacttgaacaatccagatcaggactacttcaatactttgggctctgttgatgagaaaccactagtgagccagtttgatttgatggactcttttcctgccaatggagatgctacagtcaaatctattcctccatgtgataatgttcccacgtttttcaattctgatcagggaagcaactcatttgaatgttccgactttggatggggggagcaggcctcaaagactcctgaaatctcatctgttctttcagctactccagaaattgatgaatcacttttcatggatgatgctaaccctaaaaagaagatgaagtctgactctgaaaatgcagttcctatagaagaaagcaatggaaaatctctatcagaggagttgttggcttttgacaaccagatgaactttcagatgccttatcttgagggaagttgggaggcttcacttgatggcttccttaatggagacgtgactcaggatggtggaaatccaatggacctgtggagctttgatgacctccctaatatggttgggggagtttattga

SEQ ID NO: 22746 - protein, 381 aa, Manihot esculenta
MCGGAIISDFIPATAAGRSSRRLTADFLWPDLKKPIGKIVGDLDDDFEADFQEFKDESDVDEEDDVLFDVKPFSFSATASPPPRNRSPSRGSTAVKSVEFNGLAEKSAKRKRKNQYRGIRQRPWGKWAAEIRDPRKGVRVWLGTFNTAEEAARAYDAEARRIRGKKAKVNFPDEAPRASPKRTMKANPQKPLPKRNATESMSYLNNPDQDYFNTLGSVDEKPLVSQFDLMDSFPANGDATVKSIPPCDNVPTFFNSDQGSNSFECSDFGWGEQASKTPEISSVLSATPEIDESLFMDDANPKKKMKSDSENAVPIEESNGKSLSEELLAFDNQMNFQMPYLEGSWEASLDGFLNGDVTQDGGNPMDLWSFDDLPNMVGGVY

SEQ ID NO: 22747 - DNA, 1143 bp, Populus tremula x Populus alba
  CDS (1)..(1143)
atgtgtggcggtgctatcatctcaggcttcatcgctccgacaaccaccgctcgatcttctcggcggttgacctcgggctttgagtggcttgagccgaagaaacccttcaacaacaagcacttgaagccagttgttgctgatcccgaagatgattttgaggctgatcttcaagagtttaaggacgagtctgatgtcgacgaggattatgatgtctttgctgatgccaagccttttgctttctctgccagtgcttctgaacctgctaaaaaacgtgggctccctcgtggttctactgctgttaaatctgctggattcagtggacttgctaaaaactcagcaaagaggaagagaaagaaccagtttagaggaattaggcagcgtccatggggaaaatgggctgctgagattcgtgatcccaggaaaggggtacgtgtctggttgggaacattcaatactgcagaagaagctgctagagcatatgattctgaggcacgtagaattcgtggcaagaaagcgaaggtgaacttccctgatgaagctccatgtgcttcagcaaggcatccaattaaggaaaactcacagaaacgacttacaaaggcaaatttaagccaggattttagttacttgagcaacccagaaacggattataataatatgggctttgtggaagagaaaccacaagtgagccagtttggaataatgaattctatcccggtcaatggagattctggggtgacgcccttaactccttctgacaatgcttctatgtatttcaattctgacaaggggagcaactcatttgattgtgactttgggtggggagaacaaggcgctgaaatcttgtctgttcttgcagcaactccagaagttgatgaatccgtctttgtggaagctaatcctaagaagttgaaatcatacactgagtatgcagtgcctgttgaagagaggaatggaaaatctctgtccgaagagttgctggcttttgacaatcagttgatgaaccttcagatgccagatcttgtgggtaactgggaggcttctcttgatagcttccttaatggagacacaactcaggatggcacaaacgcagtggacttgtggagcttcgaagacttcccctccatggttgggggagtttattga

SEQ ID NO: 22748 - protein, 380 aa, Populus tremula x Populus alba
MCGGAIISGFIAPTTTARSSRRLTSGFEWLEPKKPFNNKHLKPVVADPEDDFEADLQEFKDESDVDEDYDVFADAKPFAFSASASEPAKKRGLPRGSTAVKSAGFSGLAKNSAKRKRKNQFRGIRQRPWGKWAAEIRDPRKGVRVWLGTFNTAEEAARAYDSEARRIRGKKAKVNFPDEAPCASARHPIKENSQKRLTKANLSQDFSYLSNPETDYNNMGFVEEKPQVSQFGIMNSIPVNGDSGVTPLTPSDNASMYFNSDKGSNSFDCDFGWGEQGAEILSVLAATPEVDESVFVEANPKKLKSYTEYAVPVEERNGKSLSEELLAFDNQLMNLQMPDLVGNWEASLDSFLNGDTTQDGTNAVDLWSFEDFPSMVGGVY

SEQ ID NO: 22749 - DNA, 1200 bp, Oryza sativa subsp
  CDS (1)..(1200)
atgtgcggcggagcaatcatctccgggttcatcccgccgtcggccgctgcggcggcggcggcggcggcggcggcggccaagaagcagcagggcaggagggtcacggccgacgtgctgtggccggggatgctgcggaaggggaaggcgggggcggcggaggaggactttgaggccgacttccgcgagttcgagcgtggcatgagcgacgacgaggcggaggggggcggcggcgaggaggaggaggaggaggaggacgacgtggtcgtggaggtccccccgccggcgacggcgaggttcgtcgtccgtgccgcggccaaggcggcgcccccaactgcagatgggatgttgactacaaagcttgtccaacatgatggacctactgctagatcggcaaagcgcaagaggaagaatcagtacagggggatccgccagcgtccctggggcaaatgggcagctgaaatccgagaccccagcaagggtgtccgtgtttggcttggaacatataacactgctgaggaggcagctagggcatatgacgctgaagcccgcaagatccgtggcaagaaagccaaggtcaactttcctgatgaaccagctgttgctcagaagctctccctgaagcaaaacgctgccaagcaagagaaactagctccacctctgaagtcctgtggcgatgatgctttctttcagctaaacagttcagacaatgatttgtttgcaatgcttgcaaaggtgcctgcaaagccggcagagcctgttgatctcatgcctccagtcaaacctcttgcttccactgagacattcgagatgaacatgctctctgatacgagcagcaactcatttggctcttcagactttggttgggaggatgacaccctgaccccagactacacttcagtctttgttcctaatgctgccatgccagcatatggtgaacctgcttacctgacaggtggagcgccaaagagaatgaggaacaactatggtatcgccgtgccccagggaaatggcatgcctaatctcgcacaaaacatgcccaccttcgatcccgagatgaagtatttgccattaccttatgttgagagcagctcagatgaatcaatggacaaccttctgcaaaatgatgctacacaagacggggcaagcaacgagggcatctggagccttgatgagctgctcatggcagctggtgcctactga

SEQ ID NO: 22750 - protein, 399 aa, Oryza sativa subsp
MCGGAIISGFIPPSAAAAAAAAAAAAKKQQGRRVTADVLWPGMLRKGKAGAAEEDFEADFREFERGMSDDEAEGGGGEEEEEEEDDVVVEVPPPATARFVVRAAAKAAPPTADGMLTTKLVQHDGPTARSAKRKRKNQYRGIRQRPWGKWAAEIRDPSKGVRVWLGTYNTAEEAARAYDAEARKIRGKKAKVNFPDEPAVAQKLSLKQNAAKQEKLAPPLKSCGDDAFFQLNSSDNDLFAMLAKVPAKPAEPVDLMPPVKPLASTETFEMNMLSDTSSNSFGSSDFGWEDDTLTPDYTSVFVPNAAMPAYGEPAYLTGGAPKRMRNNYGIAVPQGNGMPNLAQNMPTFDPEMKYLPLPYVESSSDESMDNLLQNDATQDGASNEGIWSLDELLMAAGAY

SEQ ID NO: 22751 - DNA, 1110 bp, Capsicum annuum
  CDS (1)..(1110)
atgtgtggtggtgcaattatctccgatttggtacctcctagccggatttcccgccggctaaccgccgagttgctatggggtaactctgatctgagcaaaaagaagaaaaatccagggaattattactcaaagcctttgaacaggtctaagtttattgaccttgatgaggaatttgaagctgactttcaggacttcaaggactatgccgatgacgatgttgatgatgttaagcccttcggttccaaatctgtgaaatctggcgattcaagctgcgatactgaaaaatcttccaagagaaagaggaagaatcagtaccgggggatcagacagcgtccttggggtaagtgggcagctgaaattcgtgatccgaggaaagggattcgagtttggcttggaactttcaattctgcggaagaagcagctagagcttatgatgttgaggcacgaaggatcagaggcaagaaggctaaggtgaactttcctgatggatctccagcttctgcttcaagacgtgctgttaagccaaatcctcaggaggcacttcgcgaggaaatcttgaacacagttcagccgaacacaacttatatcaacaacttggacggcggatctgatgattcgtttggctttttcgaagagaaaccagcagcaaagcagtatggctatgagaatgtttcttttactgctggagatatgggactgggttcaatttccccttcaactggtacaacaaatgtttacttcagttctgatgaaggaagcaacacctttgactgctctgatttcggttggggtgaaccatgtccgaggactccagagatctcatctgttctgtcagaagttctagaatgtaatggtactcaatctgatgaagatgctagaccagagaaaaaactgaagtcgtgttccaacgcttccttgccagatgaggataacactgtgcacacgctatctgaagagctatcggcttttgaatcccagatgaagttcttgcagatcccatatcttgagggaaattgggatgcatcagttgatgcctttgtcaacacaggcgcaattcaggatggcggaaatgcgatggatctctggccttcgatgatgttccttctttaa

SEQ ID NO: 22752 - protein, 369 aa, Capsicum annuum
MCGGAIISDLVPPSRISRRLTAELLWGNSDLSKKKKNPGNYYSKPLNRSKFIDLDEEFEADFQDFKDYADDDVDDVKPFGSKSVKSGDSSCDTEKSSKRKRKNQYRGIRQRPWGKWAAEIRDPRKGIRVWLGTFNSAEEAARAYDVEARRIRGKKAKVNFPDGSPASASRRAVKPNPQEALREEILNTVQPNTTYINNLDGGSDDSFGFFEEKPAAKQYGYENVSFTAGDMGLGSISPSTGTTNVYFSSDEGSNTFDCSDFGWGEPCPRTPEISSVLSEVLECNGTQSDEDARPEKKLKSCSNASLPDEDNTVHTLSEELSAFESQMKFLQIPYLEGNWDASVDAFVNTGAIQDGGNAMDLWPSMMFLL

SEQ ID NO: 22753 - DNA, 1137 bp, Fagus sylvatica
  CDS (1)..(1137)
atgtgtggaggagctataatctccgactttatagcgccaaccgggtcgcggcggttgacggcggattatctctggggcgatcggaaaaaacccatttcaggaaagcgattctcgaagcctgtagtcgatttggacgacgaattcgagctcgattttcagggctttaaggacgaggaggagtctgatatcgacgaggaagaggtccttgtgcaagatgtcaagcccttcactttttctgctcctcctagctctggatctaagcctgtaaaatccgtggaattcaatgggcaagctgagaaatctgcaaagagaaagaggaagaatcagtatcgggggatccggcagcgcccatggggtaagtgggctgctgagattcgagacccaaggaaaggggtccgtgtctggcttggaacttttaacactgcagaaaaagctgcaagagcttatgatgcagaggcacggagaattcgtggcaagaaggctaaggtgaattttcccgatgagactccccgtgcttctccaaagcgttcagttaaggcaaatctgcagaagccacttgccaaggcaaacctgaactctgtccagcccaacctgaaccaaaatttcaattttatgaacaactctgatcaggactataccatgggtttgatggaagagaaacctttcacaaaccagtatgggtatatggattccatccctgccaatgcagatgttggactaaaaccctttgcttccaataatactaccccgtactttaactcagatcaggggagtaactcgtttgattgttctgactatggatggggagaacagggctctaagactccagaaatctcatctgttctttcagctactttagaaggggatgaatctcagtttgtggaggatgctatgcccacgaagaaattgaagtcagactctgggaatgcagtgttcattgaaaataacactgcaaagacactgtcagaggagctctcagcttttgagtcccagatgaactttcagatgccatttcttgagggaagctgggaatccaacatggaggcactgttcagtggggacacaactcaggatggtaactcgatggatctttggagcttcgatgacctccccgttatggctgggggagttctgtga

SEQ ID NO: 22754 - protein, 378 aa, Fagus sylvatica
MCGGAIISDFIAPTGSRRLTADYLWGDRKKPISGKRFSKPVVDLDDEFELDFQGFKDEEESDIDEEEVLVQDVKPFTFSAPPSSGSKPVKSVEFNGQAEKSAKRKRKNQYRGIRQRPWGKWAAEIRDPRKGVRVWLGTFNTAEKAARAYDAEARRIRGKKAKVNFPDETPRASPKRSVKANLQKPLAKANLNSVQPNLNQNFNFMNNSDQDYTMGLMEEKPFTNQYGYMDSIPANADVGLKPFASNNTTPYFNSDQGSNSFDCSDYGWGEQGSKTPEISSVLSATLEGDESQFVEDAMPTKKLKSDSGNAVFIENNTAKTLSEELSAFESQMNFQMPFLEGSWESNMEALFSGDTTQDGNSMDLWSFDDLPVMAGGVL

SEQ ID NO: 22755 - DNA, 1155 bp, Glycine max
  CDS (1)..(1155)
atgtgtggtggtgcgattatctccgacttcataccggcaggtcccgccagcggggcgcggcgcgtgaccgccgacatcctgtggccgagtttgaggaagcgcttctcgaagccgctgctggacgatgatttcgaggctgggttcagagaattcaaggatgattcggaaatcgaggatgttgatgacgaggacgatgaagacgaggaggagttgaagaagaagccctttgggttctctcgctccagcaacaaggctgcttctaagcctctctctcgtggagcaacaactgtgaaatctgtggaatcaaaggggcaagctgagaagtgtgccaagagaaagaggaagaaccagtatcgcggaatccgccagcgtccatggggaaagtgggctgctgagattcgcgacccaagaaagggggttcgtgtttggcttggaactttcagcactgctgaagaagctgcaagagcttacgatgctgaagcaaggaggatccgtggcaagaaagccaaggtgaatttccctgatgagccttcaggcgctgcttcctcaaaacgtctcaaggcgaatccagaggctcagccaatgaagaaaaatctgaactctgtgaagccgaaaataaaccagatgttcaattttggtgacaatcttgagggctactacagccctatagatcaggtggaacagaaaccactggttaaccagtatgttaaccgtgccccgtttgctggaaatggagttcaagtctcacctgttactccatctgctgatgttactgcttacttcagctctgagcattcgagcaactcgtttgattattctgaccttggatggggtgaacaagtccccaagacccccgagatctcatccttgctttctgctgctcctttggagggtgctgctgatcaggttcagaagaccaacaactcgcaggatgtggtggctgcacaagatgattctgcaaaaaccctttccgaagagcttgcagacattgaatcccagctcaagttctttgagaccccttcttttcttgatgaagcctgggctgatgctacattggcgtctttgctcggcggagacgcaactcatgacgccgccggaaaccctatgaacctttggagcttcgacgacctgccttccatggcaggagtcttctga

SEQ ID NO: 22756 - protein, 384 aa, Glycine max
MCGGAIISDFIPAGPASGARRVTADILWPSLRKRFSKPLLDDDFEAGFREFKDDSEIEDVDDEDDEDEEELKKKPFGFSRSSNKAASKPLSRGATTVKSVESKGQAEKCAKRKRKNQYRGIRQRPWGKWAAEIRDPRKGVRVWLGTFSTAEEAARAYDAEARRIRGKKAKVNFPDEPSGAASSKRLKANPEAQPMKKNLNSVKPKINQMFNFGDNLEGYYSPIDQVEQKPLVNQYVNRAPFAGNGVQVSPVTPSADVTAYFSSEHSSNSFDYSDLGWGEQVPKTPEISSLLSAAPLEGAADQVQKTNNSQDVVAAQDDSAKTLSEELADIESQLKFFETPSFLDEAWADATLASLLGGDATHDAAGNPMNLWSFDDLPSMAGVF

SEQ ID NO: 22757 - DNA, 1068 bp, Triticum aestivum
  CDS (1)..(1068)
  misc_feature (316)..(316): n is a, g, c or t
atgtgcggcggcgccatcctctccgacatcatcccgccgccgcgccgggccaccggcggcaacgtctggcgggcggacaagaagaggcgggccaggcccgacgccgccgcggggaggccccgccgtgcgcccgaggaggagttccaggaggaggagggcgacgcggagttcgaggccgacttcgaggggttcgtggaggcggaggaggagtccgacggcgaggccaagcccttccccgtccgcaggagcggcttctccggagatggattgaaggcaactgctgctggtgatgatgactgtgcctcagggtctgctnaaaggaagagaaagaaccagttcaggggcatccgccgccgcccttggggtaaatgggctgctgaaataagagatcctcgcaagggtgtccgtgtctggcttggtacttacaactccgctgaggaagctgccagagcctatgatgttgaagcccgcagaattcgtggcaagaaggcagaggtcaatttcccagaagaagctcctatggctcctcagcaacgctgcgctactgctgtgaaggtgcccgagttcaacaccgaacagaagccggtactcaacaccatgggcaacgcagatgtgtattcctgctctgctgttgactacaccttaaatcagcaatttgtgcagcctcagaacatgtcgtttgtgcctacagtgaatgcagttgaggcccctttcatgaatttttcctctgaccagggtagcaactcctttagttgctcagacttcagctgggagaatgatatcaagacccctgacataacttctgtgcttgcatccattcccacctcaacagaggtcaatgaatctgcatttctccagaacaatggcatcaattcaacggtacctcctgtgatgggtgatgctaatgttgatcttgccgacttggagccatacatgaagttcctgatggacgatggttcagatgagtcaattgacagcattctaagctgtgatgtaccccaggatgtggtcggcaacatgggcctttggacctttgatgacatgcccttgtctgctggtttctactga

SEQ ID NO: 22758 - protein, 355 aa, Triticum aestivum
  misc_feature (106)..(106): The Xaa at location 106 stands for Stop, Gln, Glu, or Lys.
MCGGAILSDIIPPPRRATGGNVWRADKKRRARPDAAAGRPRRAPEEEFQEEEGDAEFEADFEGFVEAEEESDGEAKPFPVRRSGFSGDGLKATAAGDDDCASGSAXRKRKNQFRGIRRRPWGKWAAEIRDPRKGVRVWLGTYNSAEEAARAYDVEARRIRGKKAEVNFPEEAPMAPQQRCATAVKVPEFNTEQKPVLNTMGNADVYSCSAVDYTLNQQFVQPQNMSFVPTVNAVEAPFMNFSSDQGSNSFSCSDFSWENDIKTPDITSVLASIPTSTEVNESAFLQNNGINSTVPPVMGDANVDLADLEPYMKFLMDDGSDESIDSILSCDVPQDVVGNMGLWTFDDMPLSAGFY

SEQ ID NO: 22759 - DNA, 1164 bp, Nicotiana tabacum
  CDS (1)..(1164)
atgtgtggtggtgctataatctccgattacattgccccgagccgaacttctcgccggctcaccgccgagttgctatggggccggtccgatctgagtaataagcaaaaaaatcctaacaattatcactccaagccgttgagatcccaagtagttgacctagacgatgacttcgaggctgattttcaggactttaaagatttctccgatgacgaggatgttcaagtcgatgtcaagccatttgccttctctgcttcgaaaaactctaatgttgaaggctccaaatctgtgaaaactgatgattcagacaaggatgctgatagatcctctaagagaaagaggaagaatcagtatagggggatcagacagcgaccttggggtaagtgggcagctgaaatacgtgacccaagaaaaggggttcgggtgtggctgggaactttcaatactgcagaagaagctgccagagcttatgatgttgaggctaggaggatcagaggcaataaagctaaggtaaactttcccgatgaagctccagtgcctgcctcgagacgtactgttaaggtgaatcctcaaaaggtccttcctaaggagatcctggactcggttcagcccgactcgactatcataaacaacatggaggattgctgttatgattctttgggatttcttgaagagaaacccatgacgaagcagtttggatgtgaggatgggagcagtgcttctggagatacgggatttggctcatttgccccttcagctggtaccgatatctacttcaactctgatgttggaagtaactcttttgactgctctgattttggttggggagagccatgtgccaggactccagagatatcatccgttctgtcagctgttattgaaagcaatgaatctcaacttgttgaagatgataccagtccaatgaaaaaactgaaatcaagccccattaatccagtagctgatgatggaaataccgcaaacaagctatctgaagagctttcagcttttgaaacccagatgaagttccttcagatcccctatctggagggaaattgggatgcatcagttgatactttcctcaactcaagtgcaactcaggatggtgataatgctatggacttatggtcctttgatgatgttccttctttattgggaggtgtcttttaa

SEQ ID NO: 22760 - protein, 387 aa, Nicotiana tabacum
MCGGAIISDYIAPSRTSRRLTAELLWGRSDLSNKQKNPNNYHSKPLRSQVVDLDDDFEADFQDFKDFSDDEDVQVDVKPFAFSASKNSNVEGSKSVKTDDSDKDADRSSKRKRKNQYRGIRQRPWGKWAAEIRDPRKGVRVWLGTFNTAEEAARAYDVEARRIRGNKAKVNFPDEAPVPASRRTVKVNPQKVLPKEILDSVQPDSTIINNMEDCCYDSLGFLEEKPMTKQFGCEDGSSASGDTGFGSFAPSAGTDIYFNSDVGSNSFDCSDFGWGEPCARTPEISSVLSAVIESNESQLVEDDTSPMKKLKSSPINPVADDGNTANKLSEELSAFETQMKFLQIPYLEGNWDASVDTFLNSSATQDGDNAMDLWSFDDVPSLLGGVF

SEQ ID NO: 22761 - DNA, 1068 bp, Triticum aestivum
  CDS (1)..(1068)
atgtgcggcggcgccatcctctccgacatcatcccgccgccgcgccgggccaccggcggcaacgtctggcgggcggacaagaagaggagggccaggcccgacgccgccgcggggaggccccgccgcgtgcccgaggaggagttccaggaggaggagagcgacgcggagttcgaggccgacttcgaggggttcgtggaggcggaggaggagtccgacggcgaggccaagcccttccccgtccgcaggagcggcttctccggagatggattgaaggcaactgctgctggtgatgatgactgtgcttcagggtctgctaaaaggaagagaaagaaccagttcaggggcatccgccgccgcccttggggtaaatgggctgctgaaataagagatcctcgcaagggtgtccgtgcctggcttggcacttacaactctgctgaggaagctgtcagagcctatgatgttgaagcccgcagaattcgtggcaagaaggcaaagtcaatttcccagaagaagctcccatggctcctcagcaaacgctgcgctacctctgtgaaggtgcccgagttcaacaccgaacagaagccagtactcaacaccatgggcaacgcagatgtgtattcctgccctgctgttgactacaccttaaatcagcaatttgtgcagcctcagaacatgtcgtttgtgcctacagtgaatgcagttgaggctcctttcatgaatttttcctctgaccaggggagcaactcctttagttgctcagacttcagctgggagaatgatatcaagacccctgacataacttctgtgcttgcatccattcccacctcaactgaggtcaatgaatctgcatttctccagaacaatggcattaattcaacggtacctcctgtgatgggtgatgctaatgttgatcttgcctacttggagccgtacatgaagttcctgatggacgatggttcagatgagtcaattgacagcattctaagctgtgatgtaccgcaggacgttgtcggcaacatgggcctttggacctttgatgacatgcccttgtctgctggtttctactga

SEQ ID NO: 22762 - protein, 355 aa, Triticum aestivum
MCGGAILSDIIPPPRRATGGNVWRADKKRRARPDAAAGRPRRVPEEEFQEEESDAEFEADFEGFVEAEEESDGEAKPFPVRRSGFSGDGLKATAAGDDDCASGSAKRKRKNQFRGIRRRPWGKWAAEIRDPRKGVRAWLGTYNSAEEAVRAYDVEARRIRGKKAKSISQKKLPWLLSKRCATSVKVPEFNTEQKPVLNTMGNADVYSCPAVDYTLNQQFVQPQNMSFVPTVNAVEAPFMNFSSDQGSNSFSCSDFSWENDIKTPDITSVLASIPTSTEVNESAFLQNNGINSTVPPVMGDANVDLAYLEPYMKFLMDDGSDESIDSILSCDVPQDVVGNMGLWTFDDMPLSAGFY

SEQ ID NO: 22763 - DNA, 1050 bp, Triticum aestivum
  CDS (1)..(1050)
atgtgcggcggcgccatcctctccgacatcatcccgccgccgcgccggcccgccggcggccgcctctggcaggcggacaggaagaagaggagggccgggccccgccgcgtgcccgaggaggagcccgaggaggaggcggaggagggcgacgaggacttcgaggccgacttcgaggggttcgtggacgaggagtccgacggcgaggtcaagcccttccccgcccgcaggagcggcttctccggagatggattgaaggcaactgctgctggtgaatatgactgtgcctcagggtctgctaaaaggaagagaaagaaccagttcaggggcatccgccgccgcccttggggtaaatgggctgctgaaataagagatcctcgcaagggtgtccgtgtctggcttggtacttacaactccgctgaggaagctgccagagcctatgatgttgaagcccgcagaattcgtggcaagaaggcaaaggtcaatttcccagaagaagctcctatggctcctcagcaacgctgcgctactgctgtgaaggtgcccgagttcaacaccgaacagaagccggtactcaacaccatgggcaacgcagatgtgtattcctgctctgctgttgactacaccttaaatcagcaatttgtgcagcctcagaacatgtcgtttgtgcctacagtgaatgcagttgaggcccctttcatgaatttttcctctgaccagggtagcaactcctttagttgctcagacttcagctgggagaatgatatcaagacccctgacataacttctgtgcttgcatccattcccacctcaacagaggtcaatgaatctgcatttctccagaacaatggcatcaattcaacggtacctcctgtgatgggtgatgctaatgttgatcttgccgacttggagccatacatgaagttcctgatggacgatggttcagatgagtcaattgacagcattctaagctgtgatgtaccccaggatgtggtcggcaacatgggcctttggacctttgatgacatgcccttgtctgctggtttctactga

SEQ ID NO: 22764 - protein, 349 aa, Triticum aestivum
MCGGAILSDIIPPPRRPAGGRLWQADRKKRRAGPRRVPEEEPEEEAEEGDEDFEADFEGFVDEESDGEVKPFPARRSGFSGDGLKATAAGEYDCASGSAKRKRKNQFRGIRRRPWGKWAAEIRDPRKGVRVWLGTYNSAEEAARAYDVEARRIRGKKAKVNFPEEAPMAPQQRCATAVKVPEFNTEQKPVLNTMGNADVYSCSAVDYTLNQQFVQPQNMSFVPTVNAVEAPFMNFSSDQGSNSFSCSDFSWENDIKTPDITSVLASIPTSTEVNESAFLQNNGINSTVPPVMGDANVDLADLEPYMKFLMDDGSDESIDSILSCDVPQDVVGNMGLWTFDDMPLSAGFY

SEQ ID NO: 22765 - DNA, 1119 bp, Solanum lycopersicum
  CDS (1)..(1119)
atgtgtggtggtgcaattatctccgatttggtacctcctagccggatttctcgccggttaaccgctgattttctatggggtacatccgatctgaacaagaagaagaagaaccctagtaattaccactcaaagcccttgaggtctaagtttattgaccttgaagatgaatttgaagctgactttcagcacttcaaggataattctgatgatgatgatgatgtgaaggcatttggccccaaatccgtgagatctggtgattcaaactgcgaagctgacagatcctccaagagaaagaggaagaatcagtaccgggggatcagacagcgtccttggggtaagtgggcagctgaaatacgtgatccaaggaaaggtattcgagtctggcttggtactttcaattcagccgaagaggcagccagagcttatgatgctgaggcgcgaaggatcagaggcaagaaagctaaggtgaactttcctgatgaagctccagtgtctgtttcaagacgtgctattaagcaaaatccccaaaaggcacttcgtgaggaaaccctgaacacagttcagcccaacatgacttatattagtaacttggatggtggatctgatgattcgttcagttttttcgaagagaaaccagcaaccaagcagtacggcttcgagaatgtgtcttttactgctgtagatatgggactgggctcagtttccccttcagctggtacaaatgtttacttcagctctgatgaagcaagtaacacttttgactgctctgatttcggttgggctgaaccgtgtgcaaggactccagagatctcatctgttctgtcggaagttctggaaaccaatgagactcattttgatgatgattccagaccagagaaaaaactgaagtcctgttccagcacttcattgacagttgacggtaacactgtgaacacgctatctgaagagctatcggcttttgaatcccagatgaagttcttgcagatcccatatctcgagggaaattgggatgcatcggttgatgccttcctcaatacaagtgcaattcaggatggtggaaacgccatggacctttggtccttcgatgatgtaccttctttaatgggaggtgcctactaa

SEQ ID NO: 22766 - protein, 372 aa, Solanum lycopersicum
MCGGAIISDLVPPSRISRRLTADFLWGTSDLNKKKKNPSNYHSKPLRSKFIDLEDEFEADFQHFKDNSDDDDDVKAFGPKSVRSGDSNCEADRSSKRKRKNQYRGIRQRPWGKWAAEIRDPRKGIRVWLGTFNSAEEAARAYDAEARRIRGKKAKVNFPDEAPVSVSRRAIKQNPQKALREETLNTVQPNMTYISNLDGGSDDSFSFFEEKPATKQYGFENVSFTAVDMGLGSVSPSAGTNVYFSSDEASNTFDCSDFGWAEPCARTPEISSVLSEVLETNETHFDDDSRPEKKLKSCSSTSLTVDGNTVNTLSEELSAFESQMKFLQIPYLEGNWDASVDAFLNTSAIQDGGNAMDLWSFDDVPSLMGGAY

SEQ ID NO: 22767 - DNA, 1128 bp, Fagus sylvatica
  CDS (1)..(1128)
atgtgtggaggagctataatctccgactttatagcgccaaccgggtcgcggcggttgacggcggattatctctggggcgatcggaaaaaacccatttcaggaaagcgattctcgaagcctgtagtcgatttggacgacgaattcgagctcgattttcagggcttcaaggacgaggaggagtctgatatcgacgaggaagaggtccttgtgcaagatgtcaagcccttcactttttctgctcctcctagctctggatctaagcctgtaaaatccgtggaattcaatgggcaagctgagaaatctgcaaagagaaagaggaagaatcagtatcgggggatccggcagcgcccatggggtaagtgggctgctgagattcgagacccaaggaaaggggtccgtgtctggctcggaacttttaacactgcagaagaagctgcaagagcttatgatgcagaagcacggagaattcgtggcaagaaaagcaaagggaattttccgatgagacttcccgtgccaaagcgttcagttaaggcaaatctgcagaagccacttgccaaggcaaacctgaactctgtccagcccaacctgaaccaaaatttcaattttatgaactctgatcaggactataccatgggtttgatggaagagaaacctttcacgaaccagtatgggtatatggattccatccctgtcaatgcagatgttggactaaaatcctttgcttccaataatactgccccatactttaactcagatcaggggagtaactcgtttgattgttctgactatggatggggagaacagggctctaagactccagaaatctcatctgttctttcagccactttagaaggggatgaatctcagtttgtggaggatgctgtgcccacgaagaaattgaagtcagactctgggaatgcagtgttcattgaaaataacactgcaaagacactgtcagaggagctctcagcttttgagtcccagatgaactttcagatgccatttcttgagggaagctgggaatccaacatggaggcactgttcagtggggacacaactcaggatggtaactcgatggatctttggagcttcgatgacctccccgttatggctgggggagttctgtga

SEQ ID NO: 22768 - protein, 375 aa, Fagus sylvatica
MCGGAIISDFIAPTGSRRLTADYLWGDRKKPISGKRFSKPVVDLDDEFELDFQGFKDEEESDIDEEEVLVQDVKPFTFSAPPSSGSKPVKSVEFNGQAEKSAKRKRKNQYRGIRQRPWGKWAAEIRDPRKGVRVWLGTFNTAEEAARAYDAEARRIRGKKSKGNFPMRLPVPKRSVKANLQKPLAKANLNSVQPNLNQNFNFMNSDQDYTMGLMEEKPFTNQYGYMDSIPVNADVGLKSFASNNTAPYFNSDQGSNSFDCSDYGWGEQGSKTPEISSVLSATLEGDESQFVEDAVPTKKLKSDSGNAVFIENNTAKTLSEELSAFESQMNFQMPFLEGSWESNMEALFSGDTTQDGNSMDLWSFDDLPVMAGGVL

SEQ ID NO: 22769 - DNA, 1098 bp, Oryza sativa
  CDS (1)..(1098)
atgtgcggcggcgccatcatccaccacctgaaggggcacccggaggggtcgcgccgggcgacggaggggctcctgtggcccgagaagaagaagcccaggtggggcggcggcgggaggcgccacttcggggggttcgtggaggaggacgacgaggacttcgaggccgacttcgaggagttcgaggtggactccggggactcggatttggagctcggggaggaggacgacgatgacgtcgtcgagatcaagccggccgccttcaagagggccctctccagagataacttgagcaccattaccactgccggatttgatggtcctgctgcaaagtctgccaaaagaaagagaaagaaccaattcaggggcatccgccagcgcccttggggtaagtgggctgctgaaatcagagatcctcgcaagggtgttcgtgtctggcttggcactttcaacagtgctgaagaagctgcaagagcttatgatgctgaagcacgcaggattcgtggcaagaaggccaaggtgaattttccagaggctccaacaactgctcagaagcgtcgtgctggctccaccactgctaaagcacccaagtcaagtgtggaacagaagcctactgtcaaaccagcattcaacaatcttgccaatgcaaatgcgtttgtctacccatctgctaacttcacttcaaacaagccgtttgttcagcctgataacatgccatttgttcctgcaatgaactctgctgctcctattgaggaccctatcatcaactctgaccagggaagcaactcatttggctgctctgactttggctgggagaatgataccaagacaccagatattacatcaattgctcccatttcaaccatagctgaagtcgatgaatctgcattcattaagagcagtaccaacccaatggtccctcctgttatggagaacagtgctgttgatctgcctgatttagaaccctacatgaggttccttctggatgatggtgctggtgactcaattgatagccttctcaacctggatggatcacaggatgttgtcagcaacatggacctctggagctttgatgacatgcccgttagcgatttctattga

SEQ ID NO: 22770 - protein, 365 aa, Oryza sativa
MCGGAIIHHLKGHPEGSRRATEGLLWPEKKKPRWGGGGRRHFGGFVEEDDEDFEADFEEFEVDSGDSDLELGEEDDDDVVEIKPAAFKRALSRDNLSTITTAGFDGPAAKSAKRKRKNQFRGIRQRPWGKWAAEIRDPRKGVRVWLGTFNSAEEAARAYDAEARRIRGKKAKVNFPEAPTTAQKRRAGSTTAKAPKSSVEQKPTVKPAFNNLANANAFVYPSANFTSNKPFVQPDNMPFVPAMNSAAPIEDPIINSDQGSNSFGCSDFGWENDTKTPDITSIAPISTIAEVDESAFIKSSTNPMVPPVMENSAVDLPDLEPYMRFLLDDGAGDSIDSLLNLDGSQDVVSNMDLWSFDDMPVSDFY

SEQ ID NO: 22771 - DNA, 1005 bp, Oryza sativa
  CDS (1)..(1005)
atgtgtggaggcgccatcctcgccgagttcatcccggcgccgtcgcgcgccgcggcggcgaccaagcgggtgaccgccagccacctgtggccggccggctccaagaacgccgcccgcggcaagagcaagagcaagaggcagcagaggagcttcgccgacgtcgacgacttcgaggccgccttcgagcagttcgacgatgactccgacttcgacgacgcggaggaagaagacgaaggacacttcgtgttcgcgtccaaatctcgtgtcgtcgccgggcacgacgggcgcgcggcggcgagggcggcgagcaagaagaagcgggggcggcacttccgaggcatccggcagcggccatgggggaagtgggcggcggagatccgcgacccgcacaagggcacgcgcgtctggctcggcacgttcaacaccccggaggaggccgcacgcgcctacgacgtcgaggcgcgccgcctccgcggcagcaaggccaaggtcaacttccccgccacgcccgccgccgcgcgcccacgccgcggcaacacgagagccaccgccgtgccaccgccggcgacagcacccgccgccgccccgccgcgcggactgaagcgagaattctcgccgcctgctgagaccgcgctacctttcttcaccaacggcttcgtcgacctgacgaccgccgcggcgccgccaccggccatgatgatgacgagctccttcaccgacagcgtcgccacgtcggagtccggcgggagccccgccaagaaggcgaggtccgacgacgtcgactcgtccgagggcagcgtcggcggcggcagcgacacgctgggtttcaccgacgagctggagttcgacccgttcatgctgttccagctcccctactccgacggctacgagtccatcgacagcctcttcgccgccggcgacgccaacagcgcgaacaccgacatgaacgccggcgtcaacctgtggagcttcgacgacttcccaatcgacggcgcccttttctga

SEQ ID NO: 22772 - protein, 334 aa, Oryza sativa
MCGGAILAEFIPAPSRAAAATKRVTASHLWPAGSKNAARGKSKSKRQQRSFADVDDFEAAFEQFDDDSDFDDAEEEDEGHFVFASKSRVVAGHDGRAAARAASKKKRGRHFRGIRQRPWGKWAAEIRDPHKGTRVWLGTFNTPEEAARAYDVEARRLRGSKAKVNFPATPAAARPRRGNTRATAVPPPATAPAAAPPRGLKREFSPPAETALPFFTNGFVDLTTAAAPPPAMMMTSSFTDSVATSESGGSPAKKARSDDVDSSEGSVGGGSDTLGFTDELEFDPFMLFQLPYSDGYESIDSLFAAGDANSANTDMNAGVNLWSFDDFPIDGALF

SEQ ID NO: 22773 - DNA, 1089 bp, Oryza sativa
  CDS (1)..(1089)
atgtgcggcggcgccatcctctccgacctcatcccgccgccgcggcgggtcaccgccggcgacctctggctggagaagaccaagaagcagcagcagcagaagaagaagaacaagggcgcgaggaggctgccactgcgccaagaggaggaggatgatttcgaggccgacttcgaggagttcgaggtggattccggcgagtgggaggtggagtccgacgccgacgaggccaagccgctcgccgcgccccggagcggcttcgctaaaggtggattgaaaaacactactgttgctggtgctgatgggcctgcagcaaggtctgctaaaaggaagagaaagaaccaattcaggggtatccgccagcggccatggggcaaatgggctgcggaaatcagagatcctcgcaaaggtgtccgcgtctggcttggcaccttcaactctcctgaggaagctgccagagcttatgatgctgaagcacgaaggattcgaggcaagaaggccaaggtcaatttcccagatggggctccagtggcttctcagaggagtcatgctgagccctcctccatgaacatgcctgctttcagcatcgaagagaagccggccgtcatgtcagcaggcaacaaaaccatgtacaacacaaatgcttatgcctaccctgctgttgagtacaccttacaggagccatttgtgcagattcagaatgtctcatttgttcctgcaatgaacgcgattgaggatactttcgtgaacctgtcctctgatcaagggagcaactcctttggttgctcggactttagccaggagaatgatatcaagacccctgacataacttccatgcttgcaccgaccatgacaggtgttgatgactccgcattcctccagaacaatgccagtgatgcaatggtacctcctgtgatggggaatgctagcattgatcttgctgacctggagccgtacatgaaatttctgatcgatggtggttcggatgagtcgattgacacccttctgagctctgatggatctcaggatgtggccagtagcatggacctttggagcttcgatgacatgcccgtgtcggccgagttctactga

SEQ ID NO: 22774 - protein, 362 aa, Oryza sativa
MCGGAILSDLIPPPRRVTAGDLWLEKTKKQQQQKKKNKGARRLPLRQEEEDDFEADFEEFEVDSGEWEVESDADEAKPLAAPRSGFAKGGLKNTTVAGADGPAARSAKRKRKNQFRGIRQRPWGKWAAEIRDPRKGVRVWLGTFNSPEEAARAYDAEARRIRGKKAKVNFPDGAPVASQRSHAEPSSMNMPAFSIEEKPAVMSAGNKTMYNTNAYAYPAVEYTLQEPFVQIQNVSFVPAMNAIEDTFVNLSSDQGSNSFGCSDFSQENDIKTPDITSMLAPTMTGVDDSAFLQNNASDAMVPPVMGNASIDLADLEPYMKFLIDGGSDESIDTLLSSDGSQDVASSMDLWSFDDMPVSAEFY

SEQ ID NO: 22775 - DNA, 1191 bp, Oryza sativa
  CDS (1)..(1191)
atgtgcggcggagcaatcatctccgggttcatcccgccgtcggccgctgcggcggcggcggctgcggtggccaagaagcagcagggcaggagggtcacggccgacgtgctgtggccggggatgctgcggaaggggaaggcggcggcggcggaggaggactttgaggccgacttccgcgagttcgagcgtggcatgagcgacgacgaggcggaggggggcggcggcgaggaggaggaggacgacgacgacgtggtcgtggtggtccccccgccggcggcggcgaggttcgtcgtccgtgccgcggccaaggcggcgcccccaactgcagatgggatgttgactacaaagcttgtccaacatgatggacctactgctagatcagcaaagcacaagaggaagaatcagtacagggggatccgccagcgtccctggggcaaatgggcagctgaaatccgagaccccagcaagggtgtccgtgtttggcttggaacatataacactgctgaggaggcagctagggcatatgacgctgaagcccgcaagatccgtggcaagaaagccaaggtcaactttcctgatgaaccagctgttgctcagaagctctccctgaagcaaaacgctgccaagcaagagaaactagctccacctctgaagacctgtggcgatgatgctttctttcagctaaacagttcagacaatgatttgtttgcaatgcttgcaaaggtgcctgcaaagccggcagagcctgttgatctcatgcctccagtcaaacctcttgcttccactgagacattcgagatgaacatgctctctgatacgagcagcaactcatttggctcttcagactttggttgggaggatgacaccctgaccccagactacacttcagtcttcgttcctaatgctgccatgccagcatatggtgaacctgcttacctgacaggtggagcgccaaagagaatgaggaacaactatggtatcgccgtgccccagggaaatggcatgcctaatctcgcacaaaacatgcccaccttcgatcccgagatgaagtatttgccattaccttatgttgagagcagctcagatgaatcaatggacaaccttctgcaaaatgatgctacacaagacggggcaagcaacgagggcatctggagccttgatgagctgctcatggcagctggtgcctactga

SEQ ID NO: 22776 - protein, 396 aa, Oryza sativa
MCGGAIISGFIPPSAAAAAAAAVAKKQQGRRVTADVLWPGMLRKGKAAAAEEDFEADFREFERGMSDDEAEGGGGEEEEDDDDVVVVVPPPAAARFVVRAAAKAAPPTADGMLTTKLVQHDGPTARSAKHKRKNQYRGIRQRPWGKWAAEIRDPSKGVRVWLGTYNTAEEAARAYDAEARKIRGKKAKVNFPDEPAVAQKLSLKQNAAKQEKLAPPLKTCGDDAFFQLNSSDNDLFAMLAKVPAKPAEPVDLMPPVKPLASTETFEMNMLSDTSSNSFGSSDFGWEDDTLTPDYTSVFVPNAAMPAYGEPAYLTGGAPKRMRNNYGIAVPQGNGMPNLAQNMPTFDPEMKYLPLPYVESSSDESMDNLLQNDATQDGASNEGIWSLDELLMAAGAY

SEQ ID NO: 22777 - DNA, 1059 bp, Brassica napus
  CDS (1)..(1059)
atgtgtggaggagctataatctccgaattcatccctccgccgaagtcccgccgcgtcaccagcgagttcatctggccggatctgaaaaatctgaagaagaagtcgaggaagcgatcccatttcttcgatctggacaacgagttcgaggctgatttcaaagggtttaaggatgatgattcgtcttttgagtgtgaagatggattcgatgtgaagccctttgccttcaccgcagctaccaaacccgtagcttcccttcccaccaacgtcgccacgactggttcagtttctgacaagaaagctgtggagtccgatgagaaatctggcaagaggaagagaaagaatcagtacagagggattaggctgcgcccctggggaaaatgggctgctgagatccgtgatcctaaaaaaggctcacgagaatggcttggaacgttcgaaaccgctgaggaagcagcaagagcttatgacgcagctgcgcgcaggatccgtggcgataaagctaaggtgaacttccctgaggaggtgatcagtagtcctaagaagccagtggctaaaccaaaccagaccccagctttggttcagcagccaacgcatgtgagtcagtactgcaacaactcctttgacaacatgggacatgactccttgagtttcatggaagagaagcctcgggtttacaacaatcagttcttcgatgttggacagtatttcggttccgaccaggggagtaactcatttgactgctctgagtttgggtggagtgatcacgcccccaagacaccaccagagaattcttcaatggtagttaacaacaaccaagctacctttgctgaagaaaccattgcagccaagaaggtcaaactcagctctgaggacgagacaagcgacaatgatgatctgatggcgtatcttgacaacgccctgtgggagtctccgttagaagtggaagctatgctcggcgtagatgctgctgctgctgctggtgtggctcaggaagaggcaaacccaatggagctgtggagcttagatgatatcaactttatgctggatggagacttctga

SEQ ID NO: 22778 - protein, 352 aa, Brassica napus
MCGGAIISEFIPPPKSRRVTSEFIWPDLKNLKKKSRKRSHFFDLDNEFEADFKGFKDDDSSFECEDGFDVKPFAFTAATKPVASLPTNVATTGSVSDKKAVESDEKSGKRKRKNQYRGIRLRPWGKWAAEIRDPKKGSREWLGTFETAEEAARAYDAAARRIRGDKAKVNFPEEVISSPKKPVAKPNQTPALVQQPTHVSQYCNNSFDNMGHDSLSFMEEKPRVYNNQFFDVGQYFGSDQGSNSFDCSEFGWSDHAPKTPPENSSMVVNNNQATFAEETIAAKKVKLSSEDETSDNDDLMAYLDNALWESPLEVEAMLGVDAAAAAGVAQEEANPMELWSLDDINFMLDGDF

SEQ ID NO: 22779 - DNA, 1140 bp, Brassica napus
  CDS (1)..(1140)
atgtgtggaggagctataatctccgagttcatacctccgtcgaggtcccgccgcgtcacgagcgagcatctctggccggatctgaagaacaaagggaaagcttcgaagaagaagcgatccggtttcatcgatctggacgatgagttcgaggctgactttcaagggtttaaggacgatgcatcgttcgattgcgaagatgaattcgatgtggatgatgacgtcttcgccgatgtcaaaccctttgtcttcgccgcaggtgccaagcccgtagcttcccctcccgccgccttggcttccactggttcagtctctgggaagaaaaccatagagtctggtggacaagctgagaagtctgctaagagaaagaggaagaatcagtacagggggattaggcagcgcccttggggcaaatgggctgctgagatccgtgatcccagaaaaggctcccgggagtggcttggaacattcgacaccgctgaggaagcagcaagagcttatgatgcagctgcacgcaggatccgcggcaataaagctaaggtgaacttcccagaggagatggtccctagcgtctcccagaaacgccctgctgctaagaaggcagtggctaaaccaaaccaaagcccagcatccgttcagcagccaacacatgtgagtcagtactgcaacaactcctttgacaacatgggacatgactcctcctttggtgatgtgagtttcatggaagagaagcctcagatgtgtaacaatcagttctttgatgtcggaggcaacaatggataccagtatttcagttctgaccagggcagtaactcactggactgctctgagtttgggtggagtgatcaaacccccaagacacctgagatctcttcaatgctagtcaacaataaccaagctcctttcattgaagaaaccaatccagccaagaagctcaaaaccagctctgaggacgggacaagcaacaatgatagttctgatgatctgatggcatacctgaacaacgccttgtgggagtctccattggaagtggaagctatgttcggtggtgatgctgctactatgactcaggaagagggaaacccaatggacctatggagcttagatgatatcaactccatgctggatggtggagtcttctga

SEQ ID NO: 22780 - protein, 379 aa, Brassica napus
MCGGAIISEFIPPSRSRRVTSEHLWPDLKNKGKASKKKRSGFIDLDDEFEADFQGFKDDASFDCEDEFDVDDDVFADVKPFVFAAGAKPVASPPAALASTGSVSGKKTIESGGQAEKSAKRKRKNQYRGIRQRPWGKWAAEIRDPRKGSREWLGTFDTAEEAARAYDAAARRIRGNKAKVNFPEEMVPSVSQKRPAAKKAVAKPNQSPASVQQPTHVSQYCNNSFDNMGHDSSFGDVSFMEEKPQMCNNQFFDVGGNNGYQYFSSDQGSNSLDCSEFGWSDQTPKTPEISSMLVNNNQAPFIEETNPAKKLKTSSEDGTSNNDSSDDLMAYLNNALWESPLEVEAMFGGDAATMTQEEGNPMDLWSLDDINSMLDGGVF

SEQ ID NO: 22781 - DNA, 954 bp, Brassica napus
  CDS (1)..(954)
atgtgtggaggagcaataatctccgatttcatcccgccgccgaggtctcgccgcgtcaccagcgagtttctctggccggatctgaagaagagctcgaagaaacgctcgagtttcttcgatcttgacgatgagttcgaggctgacttccagggcttcaaggatgattcctctatcgattgcgatgatgcgaagccgttcgttttcgccggggctcgtaagcccgccgtatccgccgccactgccgattcagtgtttggcaagaaagttgttgatggagaaggtgagaggtctgcaaagaggaagaggaagagccagtaccgagggataaggcaacgtccttggggcaaatgggctgctgagattcgtgatccaagggaaggttcaagagtttggcttggaactttcaaaaccgccgaggaagctgcaagagcttacgacgctgcagctcgtagaatccgtggttccaaagctaaggtgaatttccctgaggagaaggagaacccacctgccaagaaggtggctccaaacccaagtccagttttggctcagaacttggacaactcctttgacaacatgtgtttcatggaggagaagcaccaagttaacaacaacaacaatcagtttggtggtaatggatatcatcagtatttcagctcagaccagggtagtaactcattcggttgttctgagtttggttggaacgatcaagctcctataactcctgagatctcctctgcttttatcaacaacaactctgtcacattcgccgaggaagctgatccagctaagcagctcaaggtcatggattttgagacaacttacaacagcactgaatgggattcttcacttgatttcttcagtggagacgctgtggcgactcaggacaatggtgcaaatcctatggagctatggagcattgatgagatcaattccatgattggaggagtcttctaa

SEQ ID NO: 22782 - protein, 317 aa, Brassica napus
MCGGAIISDFIPPPRSRRVTSEFLWPDLKKSSKKRSSFFDLDDEFEADFQGFKDDSSIDCDDAKPFVFAGARKPAVSAATADSVFGKKVVDGEGERSAKRKRKSQYRGIRQRPWGKWAAEIRDPREGSRVWLGTFKTAEEAARAYDAAARRIRGSKAKVNFPEEKENPPAKKVAPNPSPVLAQNLDNSFDNMCFMEEKHQVNNNNNQFGGNGYHQYFSSDQGSNSFGCSEFGWNDQAPITPEISSAFINNNSVTFAEEADPAKQLKVMDFETTYNSTEWDSSLDFFSGDAVATQDNGANPMELWSIDEINSMIGGVF

SEQ ID NO: 22783 - DNA, 1047 bp, Brassica napus
  CDS (1)..(1047)
atgtgtggaggagctataatctccgaattcatccctccgccgaactcccgccgcgtcaccagcgagtttatctggccggatctgaaaaatctgaagaagaagaagtcgaggaagcgatctgatttcttggatctggacgatgaattcgaggctgatttcaaagggtttaaggatgatgattcgtcttttgactgcgaagatggattcgatgtgaagccctttgccttcaccgcagcttcccttcccaccaacgtcgcctccactggttcagtttctggcaagaaaaccatagagtctgatgagaaatctggcaagaggaagagaaagaatcagtacaggggaattaggctgcgcccatggggaaagtgggccgccgagatccgcgatcctaaaaaaggctcacgagaatggcttggaacgttcgaaaccgctgaggaagctgcaagagcttatgacgcagctgcgcgcaggatccgtggcggtaaagccaaggtgaacttccctgaggaggtgatcagtaatcttaagaagccagtggctaaaccaaaccataccccagctttggttcagccgccaacacatgtgggtcagtactgcaacaacaactcctttgacaacatgggacatgactccttgagttttatcgaggagaagcctcagatgtacaacaatcagttcttcgatgttggacagtatttcagctctgaccagggtagtaactcgtttgactgctctgagtttgggtggagtgatcacgcccccaagacaccaccggagatctcttcaatgctagtcaataacaaccgagctacgtttgatgaagaaaccaacgcagccaagaaggtcaaactcaactctgaggacgagacaagcgacaatgatgatctgatggcgtaccttgacaacgccctgtgggagtctcctttggaaatggaagctatgctcggcgtagatgttgctgctgatggtgtggctcagaaagaggcaaacccaatggagctgtggagcttagatgatatcaactttatgctggatggagacttctga

SEQ ID NO: 22784 - protein, 348 aa, Brassica napus
MCGGAIISEFIPPPNSRRVTSEFIWPDLKNLKKKKSRKRSDFLDLDDEFEADFKGFKDDDSSFDCEDGFDVKPFAFTAASLPTNVASTGSVSGKKTIESDEKSGKRKRKNQYRGIRLRPWGKWAAEIRDPKKGSREWLGTFETAEEAARAYDAAARRIRGGKAKVNFPEEVISNLKKPVAKPNHTPALVQPPTHVGQYCNNNSFDNMGHDSLSFIEEKPQMYNNQFFDVGQYFSSDQGSNSFDCSEFGWSDHAPKTPPEISSMLVNNNRATFDEETNAAKKVKLNSEDETSDNDDLMAYLDNALWESPLEMEAMLGVDVAADGVAQKEANPMELWSLDDINFMLDGDF

SEQ ID NO: 22785 - DNA, 1062 bp, Brassica napus
  CDS (1)..(1062)
atgtgtggaggagctataatctccgatttcatccctccgccgagtttccgccgcgtcacgagcgagtttctctggccggatctgaagaagagcaaggggaaagcctcgaagaagcgatccgatttcttcgatctggacgacgagttcgaggctgattttcaagggtttgaggatgacgacgcgtcttttgactgcgaagacgatgatgatgaagtcttcgctaaagtgaagccctttgtcttcaccgcgaccaccaagcccgtagcttcccctcccactggttcagtgtctggcaagaagatcatagagtccggtggtcaagctgagaagtctgctaagagaaagagaaagaatcagtacagggggattaggcagcgaccttgggggaaatgggctgctgagatccgtgatccaagaaaaggctccagggaatggcttggaacgtttgacaccgccgaggaagctgcaagagcctatgatgcaactgcacgcagaatccgcggcagtaaagccaaggtgaatttcccagaggagagcaacaacaaccgtagcgtctcccagaaacgaccttctgctaagaagctggtggctaaaccaaaccaaagcccagctttggttcagcagccaatgagtcagtactacaacaacgcctttggtgatgtgagtttcatggaagagaagcctcagatgtacaacaatcagtttggtttagcaaactcgtacaacaaccagtacttcagttctgatcagggcagcaactcatttgactgctctgagtttgggcggagcgatcacggtcccaagacacctgagatctcttcaatgctggttaataataaccaaactccgttcattgaagtaaccaatgcagccaagaagctcaaacccagctctgatgatctgatggcataccttgacaatgccttgtgggaatctccatctccattggaagttgaagccatgctgggtgtagatgctgccgctgtgactcagggagaggagaaccctatggacctatggagcttagatgatattaattacatgctggaaggagtcttctga

SEQ ID NO: 22786 - protein, 353 aa, Brassica napus
MCGGAIISDFIPPPSFRRVTSEFLWPDLKKSKGKASKKRSDFFDLDDEFEADFQGFEDDDASFDCEDDDDEVFAKVKPFVFTATTKPVASPPTGSVSGKKIIESGGQAEKSAKRKRKNQYRGIRQRPWGKWAAEIRDPRKGSREWLGTFDTAEEAARAYDATARRIRGSKAKVNFPEESNNNRSVSQKRPSAKKLVAKPNQSPALVQQPMSQYYNNAFGDVSFMEEKPQMYNNQFGLANSYNNQYFSSDQGSNSFDCSEFGRSDHGPKTPEISSMLVNNNQTPFIEVTNAAKKLKPSSDDLMAYLDNALWESPSPLEVEAMLGVDAAAVTQGEENPMDLWSLDDINYMLEGVF

SEQ ID NO: 22787 - DNA, 834 bp, Linum usitatissimum
  CDS (1)..(834)
atgtgtggcggagccattatcgccgatttcattcctcgcaaccgcaaccgcaacttaaccgctgccgacctatggccggagtcctttttcagcaaagccagcccctttgatactcacgatcagccagcctcattccctgccaaaagatcccaccacacctcttcaggtggtgcggaatcagataataacaaaggtgaaccagtcaaaaagcagaggaagaacttgtacaggggaatcaggcagcgtccatgggggaaatgggctgcggagattcgcgacccgcggaaaggcgttcgggtttggctaggcaccttcaactccgccgaggaagcagctcgcgcttacgacaaagaagcactcaaaatccgcggcaagaaagctaaagtcaatttccccaatgaagaatcgatcaatcactcgaacattcaccctccgtttcagatcttgcagtccaataaccagcacgatccgatcattctggatagctacccggagagctgtaatttcgggttcgacctcaaccagatagaggactacccttcttccactggttggaacaacaacaatggcggttacgctgctggtgaattccttggtgtcaaagaagaagaagaggaggaagtagtgctggagaataagatccatagctccgaagagtcggagcagacatcggaggtgcagaaattgtcggaggagctgatggcgtatgagaattacatgaagttttatcagattccgtatatggaaggggaatcggtgagccgtcagagcgccgcccaggagagcgttgtgggagatctctggaacttcgacgacgatgttgattccctctaa

SEQ ID NO: 22788 - protein, 277 aa, Linum usitatissimum
MCGGAIIADFIPRNRNRNLTAADLWPESFFSKASPFDTHDQPASFPAKRSHHTSSGGAESDNNKGEPVKKQRKNLYRGIRQRPWGKWAAEIRDPRKGVRVWLGTFNSAEEAARAYDKEALKIRGKKAKVNFPNEESINHSNIHPPFQILQSNNQHDPIILDSYPESCNFGFDLNQIEDYPSSTGWNNNNGGYAAGEFLGVKEEEEEEVVLENKIHSSEESEQTSEVQKLSEELMAYENYMKFYQIPYMEGESVSRQSAAQESVVGDLWNFDDDVDSL

SEQ ID NO: 22789 - DNA, 1098 bp, Zea mays
  CDS (1)..(1098)
atgtgcggcggcgccatcctgtcggacatcatcccgccgccgccgccgcggcgggtcacggcgggccacctctggcccgagagcaagaagccgaggagggctgcagccggcaggaggagagcccccgtggagcaggagcaggaggaggatttcgaggccgacttcgaggagttcgaggtggagtccggcgagtcggagctcgagtccgaggacgagcccaagcccaagcccttcgccgcccccagcagcgcgctcgccagaggtggactaaacactggtgcagctggtgtcgatggccctgctgcaaattcagttaaaaggaagaggaagaaccagttcaggggtatccgccggcgcccgtggggcaaatgggctgctgagatcagagatcctcgcaagggcgtgcgcgtctggctcggtacattcaactctcccgaagaagctgccagagcttacgacgccgaggcacgcaggatccgcggcaagaaggctaaagtcaacttcccggatgaggttcctacggcggtttctcagaagcgccgtgctgctgggcttgcctctctgaaagcgcctaagatggacgttgaggaggagaagccgatcatcaagccggcagtgaacaatatgaccaactcaaacgcatatcactaccctgccgtcgtcggccaccacaacatcatacccgagccattcatgcagactcaggacatgccattcgctcctctggtgaattatgctgccctcgtgaacctgtcttcagaccaaggcagcaactcgttcggttgctcggacttcagcctcgagaacgactccaggacccctgacataacttcggtgcctgcacccgttgctaccttggccgccgttggtgagtctgcgttcgtccagaacaccgccggccatgctgtggcgcctcctgcgacggggaacgctggtgttgatctcgccgagttggagccgtatatgaatttcctgatggacggtggttcagacgactcgatcagcactctcttgagctgtgatggatcccaggacgtggtcagcaacatggacctttggagcttcgaggacatgcccatgtctgctggtttctactga

SEQ ID NO: 22790 - protein, 365 aa, Zea mays
MCGGAILSDIIPPPPPRRVTAGHLWPESKKPRRAAAGRRRAPVEQEQEEDFEADFEEFEVESGESELESEDEPKPKPFAAPSSALARGGLNTGAAGVDGPAANSVKRKRKNQFRGIRRRPWGKWAAEIRDPRKGVRVWLGTFNSPEEAARAYDAEARRIRGKKAKVNFPDEVPTAVSQKRRAAGLASLKAPKMDVEEEKPIIKPAVNNMTNSNAYHYPAVVGHHNIIPEPFMQTQDMPFAPLVNYAALVNLSSDQGSNSFGCSDFSLENDSRTPDITSVPAPVATLAAVGESAFVQNTAGHAVAPPATGNAGVDLAELEPYMNFLMDGGSDDSISTLLSCDGSQDVVSNMDLWSFEDMPMSAGFY

SEQ ID NO: 22791 - DNA, 1092 bp, Zea mays
  CDS (1)..(1092)
atgtgcggcggcgccatcctgtcggacatcatcccgccgccgccaccgcggcgggtcacggctggccacctctggcccgagagcaagaagccgaggagggctgcatccggcaggaggggagcccccgtggagcagcatgagcaggaggaggatttcgaggccgacttcgaggagttcgaggtggagtccggcgagtcggagctcgagtccgaggacgagcccaagcccttcgccgcccccaggagcgcgctcgccagaggtggactaaacactggtgcagctggtgtcgatggccctgctgcaaattcagttaaaaggaagaggaagaaccagttcaggggtatccgccggcgcccgtggggcaaatgggctgctgagatcagagatcctcgcaagggcgtgcgcgtctggctcggtactttcaactcccccgaagaagctgccagagcttacgacgccgaggcacgcaggatccgcggcaagaaggctaaagtcaacttcccggatgaggttcctacggcggtttctcagaagcgccgtgctgctgggcctgcctctctgaaagcgcctaagatggacgttgaggaggagaagccgatcatcaagctcgcagtgaacaatatgaccaactcaaacgcatatcactaccctgccgtcgtcggccacaacatcatacccgagccattcatgcagactcagaacatgccattcgctcctctggtgaattatgctgccctagtgaacctgtcttcagaccaaggcagcaactcgttcggttgctcggacttcagcctcgagaacgactccaggacccctgacataacttcggtgcctgcgcccgttgccaccttggccgccgttggcgagtctgtgttcgtccagaacaccgccggccatgctgtggcgtctcctgcgacggggaacactggtgttgatctcgccgagttggagccgtatatgaatttcctgatggacggtggttcagacgactcgatcagcactctcttgagctgtgatggatcccaggacgtggtcagcaacatggacctttggagcttcgaggacatgcccatgtctgctggtttctactga

SEQ ID NO: 22792 - protein, 363 aa, Zea mays
MCGGAILSDIIPPPPPRRVTAGHLWPESKKPRRAASGRRGAPVEQHEQEEDFEADFEEFEVESGESELESEDEPKPFAAPRSALARGGLNTGAAGVDGPAANSVKRKRKNQFRGIRRRPWGKWAAEIRDPRKGVRVWLGTFNSPEEAARAYDAEARRIRGKKAKVNFPDEVPTAVSQKRRAAGPASLKAPKMDVEEEKPIIKLAVNNMTNSNAYHYPAVVGHNIIPEPFMQTQNMPFAPLVNYAALVNLSSDQGSNSFGCSDFSLENDSRTPDITSVPAPVATLAAVGESVFVQNTAGHAVASPATGNTGVDLAELEPYMNFLMDGGSDDSISTLLSCDGSQDVVSNMDLWSFEDMPMSAGFY

SEQ ID NO: 22793 - DNA, 954 bp, Brassica napus
  CDS (1)..(954)
atgtgtggaggagcaataatctccgatttcatcccgccgccgaggtctcgccgcgtcaccagcgagtttctctggccggatctgaagaagagctcgaagaaacgctcgagtttcttcgatcttgacgatgagttcgaggctgacttccagggcttcaaggatgattcctctatcgattgcgatgatgcgaagccgttcgttttcgccggggctcgtaagcccgccgtatccgccgccactgccgattcagtgtttggcaagaaagttgttgatggagaaggtgagaggtctgcaaagaggaagaggaagagccagtaccgagggataaggcaacgtccttggggcaaatgggctgctgagattcgtgatccaagggaaggttcaagagtttggcttggaacttttaaaacagccgaggaagctgcaagagcttatgatgctgcagctcgtagaatccgtggttccaaagctaaggtgaatttccctgaggagaaggagaacccacctgccaagaaggtggctccaaacccaagtccagttttggctcagaacttggacaactcctttgacaacatgtgtttcatggaggagaagcaccaagttaacaacaacagcaatcagtttggtggtaatggatatcatcagtatttcagctcagaccagggtagtaactcattcggttgttctgagttcggttggaacgatcaagctcctataactcctgagatctcctctgcttttatcaacaacaactctgtcacattcgccgaggaagctgatccagctaagcagctcaaggtcatggattttgagacaacttacaacagcactgaatgggattcttcacttgatttcttcagtggagacgctgtggcgactcaggacaatggtgcaaatcctatggagctatggagcattgatgagatcaattccatgattggaggagtcttctaa

SEQ ID NO: 22794 - protein, 317 aa, Brassica napus
MCGGAIISDFIPPPRSRRVTSEFLWPDLKKSSKKRSSFFDLDDEFEADFQGFKDDSSIDCDDAKPFVFAGARKPAVSAATADSVFGKKVVDGEGERSAKRKRKSQYRGIRQRPWGKWAAEIRDPREGSRVWLGTFKTAEEAARAYDAAARRIRGSKAKVNFPEEKENPPAKKVAPNPSPVLAQNLDNSFDNMCFMEEKHQVNNNSNQFGGNGYHQYFSSDQGSNSFGCSEFGWNDQAPITPEISSAFINNNSVTFAEEADPAKQLKVMDFETTYNSTEWDSSLDFFSGDAVATQDNGANPMELWSIDEINSMIGGVF

SEQ ID NO: 22795 - DNA, 1086 bp, Brassica napus
  CDS (1)..(1086)
atgtgtggaggagctataatctccgatttcatccctccgccgagtttccgccgcgtcacgagcgagtttctctggccggatctgaagaagagcaaggggaaagcctcgaagaagcgatccgatttcttcgatctggacgacgagttcgaggctgattttcaagggtttgaggatgacgacgcgtcttttgactgcgaagacgatgatgatgaagtcttcgctaaagtgaagccctttgtcttcaccgcgaccaccaagcccgtagcttcccctcccactggttcagtgtctggcaagaagatcatagagtccggtggtcaagctgagaagtctgctaagagaaagagaaagaatcagtacagggggattaggcagcgaccttgggggaaatgggctgctgagatccgtgatccaagaaaaggctccagggaatggcttggaacgtttgacaccgccgaggaagctgcaagagcctatgatgcagctgcacgcagaatccgcggcagtaaagccaaggtgaatttcccagaggagagcaacaacaaccgtagcgtctcccagaaacgaccttctgctaagaagctggtggctaaaccaaaccaaagcccagctttggttcagcagccaatgagtcagtactacaacaacgcctttggtgatgtgagtttcatggaagagaagcctcagatgtacaacaatcagtttgggttagcaaactcgtacaacaaccactacttcagttctgatcaggggagtaactcatttgactgctctgagtttgggtggagcgaccacggccccaagacacctgagatctcttcgatgctagtcggtaataaccaagctccgttcactgaagaaaccaatgcagccaagaagctcaaacccagctctgatgacggaacaagcaaccagtctgatgatctgatggcataccttgacaatgccttgtgggaatctccatctccattggaagttgaagccatgctgggtgtagatgctgccgctgtgactcagggagaggagaaccctatggacctatggagcttagatgatattaattacatgctggaaggagtcttctga

SEQ ID NO: 22796 - protein, 361 aa, Brassica napus
MCGGAIISDFIPPPSFRRVTSEFLWPDLKKSKGKASKKRSDFFDLDDEFEADFQGFEDDDASFDCEDDDDEVFAKVKPFVFTATTKPVASPPTGSVSGKKIIESGGQAEKSAKRKRKNQYRGIRQRPWGKWAAEIRDPRKGSREWLGTFDTAEEAARAYDAAARRIRGSKAKVNFPEESNNNRSVSQKRPSAKKLVAKPNQSPALVQQPMSQYYNNAFGDVSFMEEKPQMYNNQFGLANSYNNHYFSSDQGSNSFDCSEFGWSDHGPKTPEISSMLVGNNQAPFTEETNAAKKLKPSSDDGTSNQSDDLMAYLDNALWESPSPLEVEAMLGVDAAAVTQGEENPMDLWSLDDINYMLEGVF

SEQ ID NO: 22797 - DNA, 954 bp, Brassica napus
  CDS (1)..(954)
atgtgtggaggagcaataatctccgatttcattccgccgccgaggtctcgccgcgtcaccagcgagtttctctggccggatctgaagaagagctcgaagaaacgctcgagtttcttcgatcttgacgatgagttcgaggctgacttccagggcttcaaggatgattcctctatcgattgcgatgatgcgaagccgttcgttttcgccggggctcgtaaacccgccgtctccgccgccactgccgattcagttattggcaagaaagttgctgacggagaaggtgagaggtctgcaaagaggaagaggaagagccagtaccgagggataaggcaacgtccttggggaaaatgggctgctgagattcgtgatccaagggaaggttcaagagtttggcttggaacttttaaaacagccgaggaagctgcaagagcttacgacgctgcagctcgtagaatccgtggttccaaagctaaggtgaatttccctgaggagaaggagaacccacctgccaagaaggtggctccaaacccaagtccagttttggctcagaacttggacaactcctttgacaacatgtgtttcatggaggagaagcaccaagttaacaacaacaacaatcagtttggtggtaatggatatcatcagtatttcagctcagaccagggtagtaactcattcggttgttctgagtttggttggaacgatcaagctcctataactcctgagatctcctctgcttttatcaacaacaactctgccacattcgccgaggaagctgatccagctaagcagctcaaggtcatggattttgagacaacttacaacagcactgaatgggattcttcacttgatttcttcagtggagacgctgtggcgactcaggacaatggtgcaaatcctatggagctatggagcattgatgagatcaattccatgatgggaggagtcttctaa

SEQ ID NO: 22798 - protein, 317 aa, Brassica napus
MCGGAIISDFIPPPRSRRVTSEFLWPDLKKSSKKRSSFFDLDDEFEADFQGFKDDSSIDCDDAKPFVFAGARKPAVSAATADSVIGKKVADGEGERSAKRKRKSQYRGIRQRPWGKWAAEIRDPREGSRVWLGTFKTAEEAARAYDAAARRIRGSKAKVNFPEEKENPPAKKVAPNPSPVLAQNLDNSFDNMCFMEEKHQVNNNNNQFGGNGYHQYFSSDQGSNSFGCSEFGWNDQAPITPEISSAFINNNSATFAEEADPAKQLKVMDFETTYNSTEWDSSLDFFSGDAVATQDNGANPMELWSIDEINSMMGGVF

SEQ ID NO: 22799 - DNA, 1092 bp, Brassica napus
  CDS (1)..(1092)
atgtgtggaggagctataatctccgatttcatccctccgccgagtttccgccgcgtcacgagcgagtttctctggccggatctgaagaagagcaaggggaaagcctcgaagaagcgatccgatttcttcgatctggacgacgagttcgaggctgattttcaagggtttgaggatgacgacgcgtcttttgactgcgaagacgatgatgatgatgtcttcgctaaagtgaagccctttgtcttcaccgcgaccaccaagcccgtagcttcccctcccaccgccactggttcagtgtctggcaagaagatcatagagtccggtggtcaagctgagaagtctgctaagagaaagagaaagaatcagtacagggggattaggcagcgaccttggggaaaatgggctgctgagatccgtgatcctagaaaaggctccagggaatggcttggaacattcgacaccgccgaggaagcagcaagagcctatgatgcagctgcacgcaggatccgtggtagtaaagctaaggtgaatttcccagaggagagcaacaacaaccgtagcgtctcccagaaacgaccttctgctaagaagctggtggctaaaccaaaccaaagcccagctttggttcagcagccaatgagtcagtactgcaacaactcctttggtgatgtgagtttcgtggaagagaagcctcagatgtacaacaatcagtttgggttagcaaactcgtacaacaaccactacttcagttctgatcaggggagtaactcatttgactgctctgagtttgggtggagcgaccacggccccaagacacctgagatctcttcgatgctagtcggtaataaccaagctccgttcactgaagaaaccaatgcagccaagaagctcaaacccagctctgatgacggaacaagcaaccagtctgatgatctgatggcataccttgacaatgccttgtgggaatctccatctccattagaagttgaagccatgcttggtgtagatgctgttgctgtgactcagggagaggagaacccgatggacctatggagcttagatgatatcaattacatgctggaaggagtcttctga

SEQ ID NO: 22800 - protein, 363 aa, Brassica napus
MCGGAIISDFIPPPSFRRVTSEFLWPDLKKSKGKASKKRSDFFDLDDEFEADFQGFEDDDASFDCEDDDDDVFAKVKPFVFTATTKPVASPPTATGSVSGKKIIESGGQAEKSAKRKRKNQYRGIRQRPWGKWAAEIRDPRKGSREWLGTFDTAEEAARAYDAAARRIRGSKAKVNFPEESNNNRSVSQKRPSAKKLVAKPNQSPALVQQPMSQYCNNSFGDVSFVEEKPQMYNNQFGLANSYNNHYFSSDQGSNSFDCSEFGWSDHGPKTPEISSMLVGNNQAPFTEETNAAKKLKPSSDDGTSNQSDDLMAYLDNALWESPSPLEVEAMLGVDAVAVTQGEENPMDLWSLDDINYMLEGVF

SEQ ID NO: 22801 - DNA, 1092 bp, Zea mays
  CDS (1)..(1092)
atgtgcggcggcgccatcctgtcggacatcatcccgccgccgccaccgcggcgggtcacggctggccacctctggcccgagagcaagaagccgaggagggctgcatccggcaggaggggagcccccgtggagcagcatgagcaggaggaggatttcgaggccgacttcgaggagttcgaggtggagtccggcgagtcggagctcgagtccgaggacgagcccaagcccttcgccgcccccaggagcgcgctcgccagaggtggactaaacactggtgcagctggtgtcgatggccctgctgcaaattcagttaaaaggaagaggaagaaccagttcaggggtatccgccggcgcccgtggggcaaatgggctgctgagatcagagatcctcgcaagggcgtgcgcgtctggctcggtacattcaactctcccgaagaagctgccagagcttacgacgccgaggcacgcaggatccgcggcaagaaggctaaagtcaacttcccggatgaggttcctacggcggtttctcagaagcgccgtgctgctgggcttgcctctctgaaagcgcctaagatggacgttgaggaggagaagccgatcatcaagccggcagtgaacaatatgaccaactcaaacgcatatcactaccctgccgtcgtcggccacaacatcatacccgagccattcatgcagactcagaacatgccattcgctcctctggtgaattatgctgccctcgtgaacctgtcttcagaccaaggcagcaactcgttcggttgctcggacttcagcctcgagaacgactccaggacccctgacataacttcggtgcctgcgcccgttgctaccttggccgccgttggtgagtctgcgttcgtccagaacaccgccggccatgctgtggcgcctcctgcgacggggaacactggtgttgatctcgccgagttggagccgtatatgaatttcctgatggacggtggttcagacgactcgatcagcactctcttgagctgtgatggatcccaggacgtggtcagcaacatggacctttggagcttcgaggacatgcccatgtctgctggtttctactga

SEQ ID NO: 22802 - protein, 363 aa, Zea mays
MCGGAILSDIIPPPPPRRVTAGHLWPESKKPRRAASGRRGAPVEQHEQEEDFEADFEEFEVESGESELESEDEPKPFAAPRSALARGGLNTGAAGVDGPAANSVKRKRKNQFRGIRRRPWGKWAAEIRDPRKGVRVWLGTFNSPEEAARAYDAEARRIRGKKAKVNFPDEVPTAVSQKRRAAGLASLKAPKMDVEEEKPIIKPAVNNMTNSNAYHYPAVVGHNIIPEPFMQTQNMPFAPLVNYAALVNLSSDQGSNSFGCSDFSLENDSRTPDITSVPAPVATLAAVGESAFVQNTAGHAVAPPATGNTGVDLAELEPYMNFLMDGGSDDSISTLLSCDGSQDVVSNMDLWSFEDMPMSAGFY

SEQ ID NO: 22803 - DNA, 1038 bp, Glycine max
  CDS (1)..(1038)
atgtgtggaggagctatcatctctgatttcattccggcggcggcgatcgccgggtctcgccgcctgaccgccgattacctgtggccggatttgaagaagcggaagtctgacttggacgttgacttcgaggctgatttcagggattttaaagacgattctgatatcgacgacgacgacgacgatcaccaagtcaagccctttgctttcgccgcctcttctcgtctgtctacggcagcgaaatctgtggcattccaaggtcgggctgagatatctgcaaatagaaagaggaagaatcagtataggggaatccgtcaacgcccttggggaaaatgggcagctgagattcgggatccaagaaagggggttcgtgtctggcttggaaccttcaacactgctgaagaagctgcaagagcttatgatgctgaagcacggaggattcgtggcaagaaagccaaggtgaattttcctgaggcaccaggtacttcttctgtaaaacgttccaaggtaaatccacaggaaaatcttaagactgttcagcccaatctgggtcacaagttcagtgctggcaacaatcacatggatctggtggaacagaaacccctagttagccagtatgctaacatggcttccttccctggcagtggaaatgggctaagatcccttccttcgtctgatgatgcaaccctttacttcagttcagatcaagggagtaattcatttgattatgctcctgagatctcatccatgctttctgctcctttggattgtgaatctcattttgtgcaaaatgccaaccagcagcagcctaactctcagaatgtggtatctattgaagatgattctgcaaagacactctctgaggagcttgtggatattgaatctgagttgaagttctttcagatgccttatcttgaagggagctggggcgatacttcattggaatccttgctatctggtgacacaactcaggatggtggaaacctcatgaacctttggtgctttgatgacattccttccatggctggtggagttttctga

SEQ ID NO: 22804 - protein, 345 aa, Glycine max
MCGGAIISDFIPAAAIAGSRRLTADYLWPDLKKRKSDLDVDFEADFRDFKDDSDIDDDDDDHQVKPFAFAASSRLSTAAKSVAFQGRAEISANRKRKNQYRGIRQRPWGKWAAEIRDPRKGVRVWLGTFNTAEEAARAYDAEARRIRGKKAKVNFPEAPGTSSVKRSKVNPQENLKTVQPNLGHKFSAGNNHMDLVEQKPLVSQYANMASFPGSGNGLRSLPSSDDATLYFSSDQGSNSFDYAPEISSMLSAPLDCESHFVQNANQQQPNSQNVVSIEDDSAKTLSEELVDIESELKFFQMPYLEGSWGDTSLESLLSGDTTQDGGNLMNLWCFDDIPSMAGGVF

SEQ ID NO: 22805 - DNA, 1179 bp, Glycine max
  CDS (1)..(1179)
atgtgtggtggtgcgattatctccgacttcattccagcgggtcccgccggcggggcgcagcgcgtgaccgccgacatcctgtggccgaatttgaggaagcggttctcgaagtcgctgctggacgatgatttcgaggcagggttcagagaattcgaggatgactcggaaatcgaggatgtcgatgatgaggacgatgaagaggaggaggagttgaagaagaagaagccctttgggttctctcgctccaacaacaaggctgcttctaagcctctctctcgtggagcaacaactgtgaaatctgtggaatcaaaggggcaagctgagaagtgtgccaagagaaagaggaagaaccagtatcgcggaatccgccagcgtccatggggaaagtgggctgctgagattcgcgacccaagaaagggggttcgtgtttggcttggaactttcagcactgctgaagaagctgcaagagcttacgatgctgaagcaaggaggatccgtggcaagaaagccaaggtgaatttccctgatgagccttcaggcgctgcttcctcaaaacgtctcaaggcgaatccagaggctcagccaatgaagaaaaatctgaactctgtgaagccgaaaataaaccagatgttcaattttggtgacaatcttgagggctactacagccctatagatcaggtggaacagaaaccactggttaaccagtatgttaaccgtgccccgtttgctggaaatggagttcaagtctcacctgttactccatctgctgatgttactgcttacttcagctctgagcattcgagcagctcgtttgattattctgacctcggatggggtgaacaagtccccaagacacccgagatctcatccatgctttctgctgctcctttggacggtgaatctcagtttgtgcagggtgctgctgatcagaatcagaagaagaacaacctgctggatatggcatctgtgcaagatgattctgcaaaaactctttctgaggagcttgcagacattgaatcccagctgaagttctttgagaccccttcttttcttgatgaagcctgggctgatgctgcattggcgtctttgctcagtgaagatgcatctcaggatgctgctggaaaccctatgaacctttggagcttcgacgacctgccttccatggcaggagtcttctga

SEQ ID NO: 22806 - protein, 392 aa, Glycine max
MCGGAIISDFIPAGPAGGAQRVTADILWPNLRKRFSKSLLDDDFEAGFREFEDDSEIEDVDDEDDEEEEELKKKKPFGFSRSNNKAASKPLSRGATTVKSVESKGQAEKCAKRKRKNQYRGIRQRPWGKWAAEIRDPRKGVRVWLGTFSTAEEAARAYDAEARRIRGKKAKVNFPDEPSGAASSKRLKANPEAQPMKKNLNSVKPKINQMFNFGDNLEGYYSPIDQVEQKPLVNQYVNRAPFAGNGVQVSPVTPSADVTAYFSSEHSSSSFDYSDLGWGEQVPKTPEISSMLSAAPLDGESQFVQGAADQNQKKNNLLDMASVQDDSAKTLSEELADIESQLKFFETPSFLDEAWADAALASLLSEDASQDAAGNPMNLWSFDDLPSMAGVF

SEQ ID NO: 22807 - DNA, 1080 bp, Hordeum vulgare
  CDS (1)..(1080)
atgtgcggcggagccatcctcgcgggattcatcccgccgtcggcggccgcggcggcggccaaggcagcggcgacggccaagaagaagcagcagcagcgcagcgtgacggcagactcgctctggacgggcctgcggaaaaaggcggacgaggaggacttcgaggccgacttccgcgacttcgagcgggactccagcgaggaggaggacgacgaggtcgaggaggtcccccctccgccggcgccggcgacggccgggttcgccttcgccgccgcggccgaggtcgcgctcagggcccctgcccgccgagatgctgctgttcaacatgatggacctgctgccaaacaagtaaagcgcgttcggaagaatcagtacagagggatccgccagcgtccctgggggaaatgggcagctgaaatccgtgaccctagcaagggtgtccgggtttggctcgggacatacgacactgctgaggaggcagccagggcatatgatgctgaggcccgcaagatccgtggcaagaaagccaaggtcaattttcctgaggatgctccgactgttcagaagtctaccctgaagccaactgctgctaaatcagcaaagctagctccacctccgaaggcctgcgaggatcagcctttcaatcatctgagcagaggagacaatgatttgttcgcgatgtttgccttcagtgacaagaaggttcctgcaaagccaactgacagtgtggattcccttcttccagtgaaacaccttgcccccaccgaggcattcggaatgaacatgctctctgaccagagcagcaattcatttggctccactgactttgggtgggacgacgaggccatgaccccggactacacgtccgtcttcgtaccgagtgctgctgccatgccggcgtacggcgagcccgcttacctgcaaggcggagctccaaagagaatgaggaacaactttggcgtagctgtgctgcctcagggaaatggtgcacaagacatccctgcttttgacaatgaggatggggcaagcagtggggatctctggagcctcgatgagctgttcatggcagctggtggttattga

SEQ ID NO: 22808 - protein, 359 aa, Hordeum vulgare
MCGGAILAGFIPPSAAAAAAKAAATAKKKQQQRSVTADSLWTGLRKKADEEDFEADFRDFERDSSEEEDDEVEEVPPPPAPATAGFAFAAAAEVALRAPARRDAAVQHDGPAAKQVKRVRKNQYRGIRQRPWGKWAAEIRDPSKGVRVWLGTYDTAEEAARAYDAEARKIRGKKAKVNFPEDAPTVQKSTLKPTAAKSAKLAPPPKACEDQPFNHLSRGDNDLFAMFAFSDKKVPAKPTDSVDSLLPVKHLAPTEAFGMNMLSDQSSNSFGSTDFGWDDEAMTPDYTSVFVPSAAAMPAYGEPAYLQGGAPKRMRNNFGVAVLPQGNGAQDIPAFDNEDGASSGDLWSLDELFMAAGGY

SEQ ID NO: 22809 - DNA, 1068 bp, Triticum aestivum
  CDS (1)..(1068)
atgtgcggcggcgccatcctctccgacatcatcccgccgccgcgccgggccaccggcggcaacgtctggcgggcggacaagaagaggcgggccaggcccgacgccgccgcggggaggccccgccgtgcgcccgaggaggagttccaggaggaggagggcgacgcggagttcgaggccgacttcgaggggttcgtggaggcggaggaggagtccgacggcgaggccaagcccttccccgtccgcaggagcggcttctccggagatggattgaaggcaactgctgctggtgatgatgactgtgcctcagggtctgctaaaaggaagagaaagaaccagttcaggggcatccgccgccgcccttggggtaaatgggctgctgaaataagagatcctcgcaagggtgtccgtgtctggcttggtacttacaactccgctgaggaagctgccagagcctatgatgttgaagcccgcagaattcgtggcaagaaggcaaaggtcaatttcccagaagaagctcctatggctcctcagcaacgctgcgctactgctgtgaaggtgcccgagttcaacaccgaacagaagccggtactcaacaccatgggcaacgcagatgtgtattcctgctctgctgttgactacaccttaaatcagcaatttgtgcagcctcagaacatgtcgtttgtgcctacagtgaatgcagttgaggcccctttcatgaatttttcctctgaccagggtagcaactcctttagttgctcagacttcagctgggagaatgatatcaagacccctgacataacttctgtgcttgcatccattcccacctcaacagaggtcaatgaatctgcatttctccagaacaatggcattaattcaacggtacctcctgtgatgggtgatgctaatgttgatcttgccgacttggagccatacatgaagttcctgatggacgatggttcagatgagtcaattgacagcattctaagctgtgatgtaccccaggacgtggtcggcaacatgggcctttggacctttgatgacatgcccttgtctgctggtttctactga

SEQ ID NO: 22810 - protein, 355 aa, Triticum aestivum
MCGGAILSDIIPPPRRATGGNVWRADKKRRARPDAAAGRPRRAPEEEFQEEEGDAEFEADFEGFVEAEEESDGEAKPFPVRRSGFSGDGLKATAAGDDDCASGSAKRKRKNQFRGIRRRPWGKWAAEIRDPRKGVRVWLGTYNSAEEAARAYDVEARRIRGKKAKVNFPEEAPMAPQQRCATAVKVPEFNTEQKPVLNTMGNADVYSCSAVDYTLNQQFVQPQNMSFVPTVNAVEAPFMNFSSDQGSNSFSCSDFSWENDIKTPDITSVLASIPTSTEVNESAFLQNNGINSTVPPVMGDANVDLADLEPYMKFLMDDGSDESIDSILSCDVPQDVVGNMGLWTFDDMPLSAGFY

SEQ ID NO: 22811 - DNA, 1197 bp, Triticum aestivum
  CDS (1)..(1197)
atgtgcggcggcgcgatcctcaagggcctcaaggtccccgcgccggcgcggaaggtgacggcggctgtgctgtggcccgagaagaacaagcccaagcgggccgacggcggcgcccggcgcctcgcggggctcggccggcgtggggggctcgggctggacgacggcgaggcggacttcgaggccgacttcgaggagttcgaggccgactccggggactccggccaggagctcgggcgcggcggggtggctgagaaggacggcgacgacgaggtcgtcgagaccaagcccttcgccgccgtcaagaggtccctctcccaagatgacttaagcaccatgaccactgctggttttgatggtcctgcacaaaggtcagcaaaaaggaagagaaagaacgaattcaggggtatccgccagcgcccctggggtaagtgggctgctgaaatcagagatcctagcaagggtgtccgtgtttggcttggtaccttcaacagtgctgaagaagctgcaagagcttatgatgttgaagcacgaaggatccgtggcaagaaggccaaggttaactttccagaggaaccaacagttcctcagaagcgccgtgcttgccctgctgctcctaaagttcccaagtcaagcgcagcacaggaacctaccgtcataccagcagtcaacaaccttgccaacccaaatgctttcgtctacccgtctgctgactttgcatcaaagcagccacttgttcagcctgacaacgtgccatttgttcctgcaattaactctgctgcccctgttgaagctcctgttatgaatatgtactctgaccagggaagcaactcctttggctgctctgacttgggctgggagtatgacaccaagactccagatatatcatccattgctcccatttccaccattgctgaaggaacagagtctgcacttctccagagtaacacctacaacccagcggtgattgctgaaggagctgaatctgcgcctgtccagagcaacacctacaactcagtggtgcctcctgttatggagaacaatgctgttgattttgaaccttggatgaggtttcttttggatgatggcgtggatgagccgattgatagccttctgaattttgatgtgcctcaggatgtcgttggcaacatggacctttggagcttcgatgacatgcccatctgtggcaaaattttctga

SEQ ID NO: 22812 - protein, 398 aa, Triticum aestivum
MCGGAILKGLKVPAPARKVTAAVLWPEKNKPKRADGGARRLAGLGRRGGLGLDDGEADFEADFEEFEADSGDSGQELGRGGVAEKDGDDEVVETKPFAAVKRSLSQDDLSTMTTAGFDGPAQRSAKRKRKNEFRGIRQRPWGKWAAEIRDPSKGVRVWLGTFNSAEEAARAYDVEARRIRGKKAKVNFPEEPTVPQKRRACPAAPKVPKSSAAQEPTVIPAVNNLANPNAFVYPSADFASKQPLVQPDNVPFVPAINSAAPVEAPVMNMYSDQGSNSFGCSDLGWEYDTKTPDISSIAPISTIAEGTESALLQSNTYNPAVIAEGAESAPVQSNTYNSVVPPVMENNAVDFEPWMRFLLDDGVDEPIDSLLNFDVPQDVVGNMDLWSFDDMPICGKIF

SEQ ID NO: 22813 - DNA, 1095 bp, Zea mays
  CDS (1)..(1095)
atgtgcggcggcgccatcctgtcggacatcatcccgccgccgccgccgcggcgggtcacggcgggccacctctggcccgagagcaagaagccgaggagggctgcagccggcaggaggagagcccccgtggagcaggagcaggaggaggatttcgaggccgacttcgaggagttcgaggtggagtccggcgagtcggagctcgagtccgaggacgagcccaagcccaagcccttcgccgcccccagcagcgcgctcgccagaggtggactaaacactggtgcagctggtgtcgatggccctgctgcaaattcagttaaaaggaagaggaagaaccagttcaggggtatccgccggcgcccgtggggcaaatgggctgctgagatcagagatcctcgcaagggcgtgcgcgtctggctcggtacattcaactctcccgaagaagctgccagagcttacgacgccgaggcacgcaggatccgcggcaagaaggctaaagtcaacttcccggatgaggttcctacggcggtttctcagaagcgccgtgctgctgggcttgcctctctgaaagcgcctaagatggacgttgaggaggagaagccgatcatcaagccggcagtgaacaatatgaccaactcaaacgcatatcactaccctgccgtcgtcggccacaacatcatacccgagccattcatgcagactcagaacatgccattcgctcctctggtgaattatgctgccctcgtgaacctgtcttcagaccaaggcagcaactcgttcggttgctcggacttcagcctcgagaacgactccaggacccctgacataacttcggtgcctgcacccgttgctaccttggccgccgttggtgagtctgcgttcgtccagaacaccgccggccatgctgtggcgcctcctgcgacggggaacgctggtgttgatctcgccgagttggagccgtatatgaatttcctgatggacggtggttcagacggctcgatcagcactctcttgagctgtgatggatcccaggacgtggtcagcaacatggacctttggagcttcgacgacatgcccatgtctgctggtttctactga

SEQ ID NO: 22814 - protein, 364 aa, Zea mays
MCGGAILSDIIPPPPPRRVTAGHLWPESKKPRRAAAGRRRAPVEQEQEEDFEADFEEFEVESGESELESEDEPKPKPFAAPSSALARGGLNTGAAGVDGPAANSVKRKRKNQFRGIRRRPWGKWAAEIRDPRKGVRVWLGTFNSPEEAARAYDAEARRIRGKKAKVNFPDEVPTAVSQKRRAAGLASLKAPKMDVEEEKPIIKPAVNNMTNSNAYHYPAVVGHNIIPEPFMQTQNMPFAPLVNYAALVNLSSDQGSNSFGCSDFSLENDSRTPDITSVPAPVATLAAVGESAFVQNTAGHAVAPPATGNAGVDLAELEPYMNFLMDGGSDGSISTLLSCDGSQDVVSNMDLWSFDDMPMSAGFY

SEQ ID NO: 22815 - DNA, 1098 bp, Zea mays
  CDS (1)..(1098)
atgtgcggcggcgccatcctgtcggacatcatcccgccgccgccgccgcggcgggtcacggcgggccacctctggcccgagagcaagaagccgaggagggctgcagccggcaggaggagagcccccgtggagcaggagcaggaggaggatttcgaggccgacttcgaggagttcgaggtggagtccggcgagtcggagctcgagtccgaggacgagcccaaacccaagcccttcgccgcccccagcagcgcgctcgccagaggtggactaaacactggtgcagctggtgtcgatggccctgctgcaaattcagttaaaaggaagaggaagaaccagttcaggggtatccgccggcgcccgtggggcaaatgggctgctgagatcagagatcctcgcaagggcgtgcgcgtctggctcggtactttcaactcccccgaagaagctgccagagcttacgacgccgaggcacgcaggatccgcggcaagaaggctaaagtcaacttcccggatgaggttcctacggcggtttctcagaagcgccgtgctgctgggcttgcctctctgaaagcgcctaagatggacgttgaggaggagaagccgatcatcaagctcgcagtgaacaatatgaccaactcaaacgcatatcactaccctgccgtcgtcggccaccacaacatcatacccgagccattcatgcagactcagaacatgccattcgctcctctggtgaattatgctgccctcgtgaacctgtcttcagaccaaggcagcaactcgttcggttgctcggacttcagcctcgagaacgactccaggacccctgacataacttcggtgcctgcgcccgttgccaccttggccgccgttggagagtctgcgttcgtccagaacacggccggccatgctgtggcgcctcctgcgacggggaacactggtgttgatctcgccgagttggagccgtatatgaatttcctgatggacggtggttcagacgactcgatcagcactctcttgagctgtgatggatcccaggacgtggtcagcaacatggacctttggagcttcgacgacatgcccatgtctgctggtttctactga

SEQ ID NO: 22816 - protein, 365 aa, Zea mays
MCGGAILSDIIPPPPPRRVTAGHLWPESKKPRRAAAGRRRAPVEQEQEEDFEADFEEFEVESGESELESEDEPKPKPFAAPSSALARGGLNTGAAGVDGPAANSVKRKRKNQFRGIRRRPWGKWAAEIRDPRKGVRVWLGTFNSPEEAARAYDAEARRIRGKKAKVNFPDEVPTAVSQKRRAAGLASLKAPKMDVEEEKPIIKLAVNNMTNSNAYHYPAVVGHHNIIPEPFMQTQNMPFAPLVNYAALVNLSSDQGSNSFGCSDFSLENDSRTPDITSVPAPVATLAAVGESAFVQNTAGHAVAPPATGNTGVDLAELEPYMNFLMDGGSDDSISTLLSCDGSQDVVSNMDLWSFDDMPMSAGFY

SEQ ID NO: 22817 - DNA, 1092 bp, Zea mays
  CDS (1)..(1092)
atgtgcggcggcgcgatccttgccaaccttcgcgagccggcgccgcgccggctcacagagcgggacatctggcagcagaagaagaagctcaagaggggcggcggcggcgggaggcgctcgttcgcggcggaggacgatgaggacttcgaggccgactttgaggtcttcgaggcagactccagtgattcagatttggagctcagggaggggactgacgacgacgtcgtcgagatcaagcccttcactgccaagaggactttctccagcgatggcttaagcaccatgactagtgctgtagcaaggtcagccaagaggaagagaaagaatctatacaggggtatccgccagaggccttggggcaagtgggctgctgagatcagagatcctcagaagggtgtccgtgtttggcttggtactttcaatagtcctgaggaagctgcaagagcttatgatgctgaagcgcgcaggattcgtggcaagaaggccaaggttaactttcctgatgcaccagaagttggtcagaagcgccgttctggctcagcttccgctaaagcatccaagtcaagttttggacagaagcctattgtcaaagtagctatgaacaaccttgccaacacaaatgcatccttcttccaatctgttagctacccctccaattcatttgttcagcatggcaatataccatttgttccagcaatgaactctactggttctgttgaggatcctatcatgaatctgcactctgaccagggaagtaactcctttggctgctcagacttgggctgggagaatgataccaagacaccagacatcacttccattgctcccatttccactatcgcggaaggagacgagtctgcatttgttgacagcaattcaaacaactcatttgtgcttcctgccctggagaacagtgctgttgatctcactgatgggctgacagatttagaatcctatatgaggtttgttctggatggtggtccaagtgattcagttgatagccttctgaaccttgatggatcgcaggatgttggtagcgacatggacctctggagcttcgacgacatgcccatcgtcggcgatttcttttga

SEQ ID NO: 22818 - protein, 363 aa, Zea mays
MCGGAILANLREPAPRRLTERDIWQQKKKLKRGGGGGRRSFAAEDDEDFEADFEVFEADSSDSDLELREGTDDDVVEIKPFTAKRTFSSDGLSTMTSAVARSAKRKRKNLYRGIRQRPWGKWAAEIRDPQKGVRVWLGTFNSPEEAARAYDAEARRIRGKKAKVNFPDAPEVGQKRRSGSASAKASKSSFGQKPIVKVAMNNLANTNASFFQSVSYPSNSFVQHGNIPFVPAMNSTGSVEDPIMNLHSDQGSNSFGCSDLGWENDTKTPDITSIAPISTIAEGDESAFVDSNSNNSFVLPALENSAVDLTDGLTDLESYMRFVLDGGPSDSVDSLLNLDGSQDVGSDMDLWSFDDMPIVGDFF

SEQ ID NO: 22819 - DNA, 1086 bp, Zea mays
  CDS (1)..(1086)
atgtgcggcggcgcgatccttgccgagctccgcgagccggcgccgcgccggctcacggagcgggacatctggcagcagaagaagaagcccaagaggggcggcgccggcgggaggcgctcgttcgcggcggaagacgatgaggacttcgaggccgacttcgaggactttgaagccgactccggtgattcggatttggagctcggggaaggggctgacgacgacgtcatcgagatcaagcccttcgccgccaagagtactttctccagagatggcttaagcaccatgactactgctggttatgatgcccctgcagcaaggttggccaaaaggaagaggaagaatcaatacaggggtatccgccagcgcccttggggtaagtgggctgctgagatcagagatccccagaagggcgttcgtgtttggcttggtactttcaatagtccggaggaagctgcaagagcttatgatgctgaagcgcgcaggattcgtggcaagaaggccaaggttaactttcctgatgcaccagcagttggtcagaagtgccgttctagttcagcttctgctaaagcactcaagtcatgtgttgaacagaagccaattgtcaaaacagatatgaacatccttgccaacacaaatgcacccttctaccaatctgttaactacgcatccaacaatccatttgttccagcaatgaactctactgtttcttttgaggatcctatcatgaatctgcactctgaccagggaagtaactcccttggctgctcagacttgggctgggagaatgatactaagacaccagacatcacatccattgctcccattcccactattgctgaaggcgatgagtctgtatttgtcaactccaattcaaacagctcgatggtgcctcctgtcctggagaacaatgctgttgatctcactgatgggctgacagatttggaatcctatatgaggtttcttatggatggcggtgcaagtgattcaattgatagccttctgaaccttgatggatcacaggatcttggtagcaatatggacctctggaccttcgatgacatgcccatcgctggcgatttcttctga

SEQ ID NO: 22820 - protein, 361 aa, Zea mays
MCGGAILAELREPAPRRLTERDIWQQKKKPKRGGAGGRRSFAAEDDEDFEADFEDFEADSGDSDLELGEGADDDVIEIKPFAAKSTFSRDGLSTMTTAGYDAPAARLAKRKRKNQYRGIRQRPWGKWAAEIRDPQKGVRVWLGTFNSPEEAARAYDAEARRIRGKKAKVNFPDAPAVGQKCRSSSASAKALKSCVEQKPIVKTDMNILANTNAPFYQSVNYASNNPFVPAMNSTVSFEDPIMNLHSDQGSNSLGCSDLGWENDTKTPDITSIAPIPTIAEGDESVFVNSNSNSSMVPPVLENNAVDLTDGLTDLESYMRFLMDGGASDSIDSLLNLDGSQDLGSNMDLWTFDDMPIAGDFF

SEQ ID NO: 22821 - DNA, 1095 bp, Zea mays
  CDS (1)..(1095)
atgtgcggcggcgccatcctgtcggacatcatcccgccgccgccaccgcggcgggtcacggctggccacctctggcccgagagcaagaagccgaggagggctgcatccggcaggaggggagcccccgtggagcagcatgagcaggaggaggatttcgaggccgacttcgaggagttcgaggtggagtccggcgagtcggagctcgagtccgaggacgagcccaagcccttcgccgcccccaggagcgcgctcgccagaggtggactaaacactggtgcagctggtgtcgatggccctgctgcaaattcagttaaaaggaagaggaagaaccagttcaggggtatccgccggcgcccgtggggcaaatgggctgctgagatcagagatcctcgcaagggcgtgcgcgtctggctcggtacattcaactcccccgaagaagctgccagagcttacgacgccgaggcacgcaggatccgcggcaagaaggctaaagtcaacttcccggatgaggttcctacggcggtttctcagaagcgccgtgctgctgggcctgcctctctgaaagcgcctaagatggacgttgaggaggagaagccgatcatcaagctcgcagtgaacaatatgaccaactcaaacgcatatcactaccctgccgtcgtcggccaccacaacatcatacccgagccattcatgcagactcagaacatgccattcgctcctctggtgaattatgctgccctagtgaacctgtcttcagaccaaggcagcaactcgttcggttgctcggacttcagcctcgagaacgactccaggacccctgacataacttcggtgcctgcgcccgttgccaccttggccgccgttggcgagtctgcgttcgtccagaacaccgccggccatgctgtggcgcctcctgcgacggggaacactggtgttgatctcgccgagttggagccgtatatgaatttcctgatggacggtggttcagacgactcgatcagcactctcttgagctgtgatggatcccaggacgtggtcagcaacatggacctttggagcttcgaggacatgcccatgtctgctggtttctactga

SEQ ID NO: 22822 - protein, 364 aa, Zea mays
MCGGAILSDIIPPPPPRRVTAGHLWPESKKPRRAASGRRGAPVEQHEQEEDFEADFEEFEVESGESELESEDEPKPFAAPRSALARGGLNTGAAGVDGPAANSVKRKRKNQFRGIRRRPWGKWAAEIRDPRKGVRVWLGTFNSPEEAARAYDAEARRIRGKKAKVNFPDEVPTAVSQKRRAAGPASLKAPKMDVEEEKPIIKLAVNNMTNSNAYHYPAVVGHHNIIPEPFMQTQNMPFAPLVNYAALVNLSSDQGSNSFGCSDFSLENDSRTPDITSVPAPVATLAAVGESAFVQNTAGHAVAPPATGNTGVDLAELEPYMNFLMDGGSDDSISTLLSCDGSQDVVSNMDLWSFEDMPMSAGFY

SEQ ID NO: 22823 - DNA, 1092 bp, Zea mays
  CDS (1)..(1092)
atgtgcggcggcgccatcctgtcggacatcatcccgccgccgccaccgcggcgggtcacggctggccacctctggcccgagagcaagaagccgaggagggctgcatccggcaggaggggagcccccgtggagcagcatgagcaggaggaggatttcgaggccgacttcgaggagttcgaggtggagtccggcgagtcggagctcgagtccgaggacgagcccaagcccttcgccgcccccaggagcgcgctcgccagaggtggactaaacactggtgcagctggtgtcgatggccctgctgcaaattcagttaaaaggaagaggaagaaccagttcaggggtatccgccggcgcccgtggggcaaatgggctgctgagatcagagatcctcgcaagggcgtgcgcgtctggctcggtactttcaactcccccgaagaagctgccagagcttacgacgccgaggcacgcaggatccgcggcaagaaggctaaagtcaacttcccggatgaggttcctacggcggtttctcagaagcgccgtgctgctgggcctgcctctctgaaagcgcctaagatggacgttgaggaggagaagccgatcatcaagctcgcagtgaacaatatgaccaactcaaacgcatatcactaccctgccgtcgtcggccacaacatcatacccgagccattcatgcagactcagaacatgccattcgctcctctggtgaattatgctgccctcgtgaacctgtcttcagaccaaggcagcaactcgttcggttgctcggacttcagcctcgagaacgactccaggacccctgacataacttcggtgcctgcgcccgttgccaccttggccgccgttggtgagtctgcgttcgtccagaacaccgccggccatgctgtggcgcctcctgcgacggggaacactggtgttgatctcgccgagttggagccgtatatgaatttcctgatggacggtggttcagacgactcgatcagcactctcttgagctgtgatggatcccaggacgtggtcagcaacatggacctttggagcttcgaggacatgcccatgtctgctggtttctactga

SEQ ID NO: 22824 - protein, 363 aa, Zea mays
MCGGAILSDIIPPPPPRRVTAGHLWPESKKPRRAASGRRGAPVEQHEQEEDFEADFEEFEVESGESELESEDEPKPFAAPRSALARGGLNTGAAGVDGPAANSVKRKRKNQFRGIRRRPWGKWAAEIRDPRKGVRVWLGTFNSPEEAARAYDAEARRIRGKKAKVNFPDEVPTAVSQKRRAAGPASLKAPKMDVEEEKPIIKLAVNNMTNSNAYHYPAVVGHNIIPEPFMQTQNMPFAPLVNYAALVNLSSDQGSNSFGCSDFSLENDSRTPDITSVPAPVATLAAVGESAFVQNTAGHAVAPPATGNTGVDLAELEPYMNFLMDGGSDDSISTLLSCDGSQDVVSNMDLWSFEDMPMSAGFY

SEQ ID NO: 22825 - DNA, 1092 bp, Zea mays
  CDS (1)..(1092)
atgtgcggcggcgccatcctgtcggacatcatcccgccgccgccaccgcggcgggtcacggctggccacctctggcccgagagcaagaagccgaggagggctgcatccggcaggaggggagcccccgtggagcagcatgagcaggaggaggatttcgaggccgacttcgaggagttcgaggtggagtccggcgagtcggagctcgagtccgaggccgagcccaagcccttcgccgcccccaggagcgcgctcgccagaggtggactaaacactggtgcagctggtgtcgatggccctgctgcaaattcagttaaaaggaagaggaagaaccagttcaggggtatccgccggcgcccgtggggcaaatgggctgctgagatcagagatcctcgcaagggcgtgcgcgtctggctcggtactttcaactcccccgaagaagctgccagagcttacgacgccgaggcacgcaggatccgcggcaagaaggctaaagtcaacttcccggatgaggttcctacggcggtttctcagaagcgccgtgctgctgggcctgcctctctgaaagcgcctaagatggacgttgaggaggagaagccgatcatcaagctcgcagtgaacaatatgaccaactcaaacgcatatcactaccctgccgtcgtcggccacaacatcatacccgagccattcatgcagactcagaacatgccattcgctcctctggtgaattatgctgccctagtgaacctgtcttcagaccaaggcagcaactcgttcggttgctcggacttcagcctcgagaacgactccaggacccctgacataacttcggtgcctgcgcccgttgccaccttggccgccgttggcgagtctgtgttcgtccagaacaccgccggccatgctgtggcgtctcctgcgacggggaacactggtgttgatctcgccgagttggagccgtatatgaatttcctgatggacggtggttcagacgactcgatcagcactctcttgagctgtgatggatcccaggacgtggtcagcaacatggacctttggagcttcgaggacatgcccatgtctgctggtttctactga

SEQ ID NO: 22826 - protein, 363 aa, Zea mays
MCGGAILSDIIPPPPPRRVTAGHLWPESKKPRRAASGRRGAPVEQHEQEEDFEADFEEFEVESGESELESEAEPKPFAAPRSALARGGLNTGAAGVDGPAANSVKRKRKNQFRGIRRRPWGKWAAEIRDPRKGVRVWLGTFNSPEEAARAYDAEARRIRGKKAKVNFPDEVPTAVSQKRRAAGPASLKAPKMDVEEEKPIIKLAVNNMTNSNAYHYPAVVGHNIIPEPFMQTQNMPFAPLVNYAALVNLSSDQGSNSFGCSDFSLENDSRTPDITSVPAPVATLAAVGESVFVQNTAGHAVASPATGNTGVDLAELEPYMNFLMDGGSDDSISTLLSCDGSQDVVSNMDLWSFEDMPMSAGFY

SEQ ID NO: 22827 - DNA, 21 bp, Artificial sequence
  primer
atgtgtggaggagctataatc

SEQ ID NO: 22828 - DNA, 22 bp, Artificial sequence
  primer
tcaaaagtctccttccagcatg

SEQ ID NO: 22829 - protein, 438 aa, Artificial sequence
  consensus sequence
  Variant (7)..(7): Xaa in position 7 is any amino acid
  Variant (9)..(10): Xaa in position 9 to 10 is any amino acid
  Variant (12)..(13): Xaa in position 12 to 13 is any amino acid
  Variant (14)..(21): Xaa in position 14 to 21 is any or no amino acid
  Variant (24)..(24): Xaa in position 24 is any amino acid
  Variant (26)..(29): Xaa in position 26 to 29 is any amino acid
  Variant (31)..(33): Xaa in position 31 to 33 is any amino acid
  Variant (34)..(63): Xaa in position 34 to 63 is any or no amino acid
  Variant (69)..(70): Xaa in position 69 to 70 is any amino acid
  Variant (72)..(75): Xaa in position 72 to 75 is any amino acid
  Variant (76)..(105): Xaa in position 76 to 105 is any or no amino acid
  Variant (108)..(124): Xaa in position 108 to 124 is any amino acid
  Variant (125)..(146): Xaa in position 125 to 146 is any or no amino acid
  Variant (148)..(148): Xaa in position 148 is any amino acid
  Variant (156)..(156): Xaa in position 156 is any amino acid
  Variant (161)..(161): Xaa in position 161 is any amino acid
  Variant (178)..(178): Xaa in position 178 is any amino acid
  Variant (180)..(180): Xaa in position 180 is any amino acid
  Variant (186)..(188): Xaa in position 186 to 188 is any amino acid
  Variant (198)..(198): Xaa in position 198 is any amino acid
  Variant (205)..(205): Xaa in position 205 is any amino acid
  Variant (213)..(213): Xaa in position 213 is any amino acid
  Variant (215)..(247): Xaa in position 215 to 247 is any amino acid
  Variant (248)..(280): Xaa in position 248 to 280 is any or no amino acid
  Variant (282)..(284): Xaa in position 282 to 284 is any amino acid
  Variant (285)..(311): Xaa in position 285 to 311 is any or no amino acid
  Variant (314)..(315): Xaa in position 314 to 315 is any amino acid
  Variant (320)..(321): Xaa in position 320 to 321 is any amino acid
  Variant (323)..(330): Xaa in position 323 to 330 is any amino acid
  Variant (331)..(332): Xaa in position 331 to 332 is any or no amino acid
  Variant (335)..(335): Xaa in position 335 is any amino acid
  Variant (336)..(336): Xaa in position 336 is any or no amino acid
  Variant (338)..(338): Xaa in position 338 is any amino acid
  Variant (340)..(379): Xaa in position 340 to 379 is any amino acid
  Variant (380)..(413): Xaa in position 380 to 413 is any or no amino acid
  Variant (415)..(416): Xaa in position 415 to 416 is any amino acid
  Variant (418)..(426): Xaa in position 418 to 426 is any amino acid
  Variant (427)..(433): Xaa in position 427 to 433 is any or no amino acid
  Variant (436)..(437): Xaa in position 436 to 437 is any amino acid
MCGGAIXSXXIXXXXXXXXXXRRXTXXXXWXXXXXXXXXXXXXXXXXXXXXXXXXXXXXXXXXFEADFXXFXXXXXXXXXXXXXXXXXXXXXXXXXXXXXXXXXXKPXXXXXXXXXXXXXXXXXXXXXXXXXXXXXXXXXXXXXXXSXKRKRKNQXRGIRXRPWGKWAAEIRDPRKGXRXWLGTFXXXEEAARAYDAXARRIRGXKAKVNFPXEXXXXXXXXXXXXXXXXXXXXXXXXXXXXXXXXXXXXXXXXXXXXXXXXXXXXXXXXXXXXXXXXXXQXXXXXXXXXXXXXXXXXXXXXXXXXXXXXXSDXXSNSFXXSXXXXXXXXXXTPXXIXSXXXXXXXXXXXXXXXXXXXXXXXXXXXXXXXXXXXXXXXXXXXXXXXXXXXXXXXXXXXXXXXXXXXXXXXXXXLXXDXXXXXXXXXXXXXXXXLWXXD

SEQ ID NO: 22830 - protein, 60 aa, Artificial sequence
  protein pattern
  Variant (3)..(3): Xaa in position 3 is any amino acid
  Variant (5)..(5): Xaa in position 5 is Phe or Tyr
  Variant (10)..(10): Xaa in position 10 is any amino acid
  Variant (24)..(24): Xaa in position 24 is any amino acid
  Variant (27)..(27): Xaa in position 27 is any amino acid
  Variant (29)..(29): Xaa in position 29 is any amino acid
  Variant (34)..(34): Xaa in position 34 is Phe or Tyr
  Variant (35)..(35): Xaa in position 35 is Asp, Glu, Asn or Ser
  Variant (36)..(36): Xaa in position 36 is Ser or Thr
  Variant (37)..(37): Xaa in position 37 is Ala or Pro
  Variant (46)..(46): Xaa in position 46 is Ala, Ser or Val
  Variant (47)..(47): Xaa in position 47 is Ala, Glu or Thr
  Variant (49)..(49): Xaa in position 49 is any amino acid
  Variant (50)..(50): Xaa in position 50 is Lys or Arg
  Variant (54)..(54): Xaa in position 54 is any amino acid
  Variant (56)..(56): Xaa in position 56 is Ala or Ser
  Variant (57)..(57): Xaa in position 57 is Glu or Lys
  Variant (58)..(58): Xaa in position 58 is Gly or Val
RKXQXRGIRXRPWGKWAAEIRDPXKGXRXWLGTXXXXEEAARAYDXXAXXIRGXKXXXNF

SEQ ID NO: 22831 - protein, 14 aa, Artificial sequence
  protein pattern
  Variant (7)..(7): Xaa in position 7 is Ile or Leu
  Variant (9)..(9): Xaa in position 9 is any amino acid
  Variant (10)..(10): Xaa in position 10 is any or no amino acid
  Variant (12)..(12): Xaa in position 12 is any or no amino acid
  Variant (14)..(14): Xaa in position 14 is Ala, Pro, Ser or Thr
MCGGAIXSXXIXPX

SEQ ID NO: 22832 - DNA, 2814 bp, Arabidopsis thaliana
  CDS (1)..(2814)
atggagggtaatttcgaggaacagaacaagcttccggagctgaaattggatgcaaagcaagctcaagggtttctctcgttctacaaaaccctaccaaatgatacgagagctgttagattctttgatcgcaaggattattatacagctcatggtgaaaattcagttttcattgcaaagacttattatcatacaaccactgctctacgtcagctcgggagtggttcaaatgctctttcaagcgtaagcattagtaggaacatgttcgaaacgattgctagggatcttctcctggagcgtaatgatcatactgtagaactttatgagggaagcggatcgaattggagacttgtgaaaacaggttctcctggaaacattggaagctttgaagatgttttgtttgcaaacaatgaaatgcaggacacaccagttgttgtctccatatttccaagttttcacgatggcagatgcgttattgggatggcctatgttgatctgactaggcgagttcttggactagctgagtttcttgatgatagccgcttcaccaatctggagtcttcgttgattgctctaggcgcaaaagaatgcatttttccagctgaatccggcaaatccaatgaatgcaaaagcctgtatgattccctggagaggtgtgccgtgatgataacagagaggaagaaacacgagttcaaaggaagagatttagattcagatcttaagagattggtgaaggggaatattgagcctgttagagatttggtatccgggtttgaccttgcgactcctgctctaggtgcattactctcgttttctgaacttctctcaaatgaggataactatgggaacttcacaatccgcagatatgatattggcggattcatgagacttgactctgcagctatgagggctttgaatgtgatggagagcaaaactgatgctaataagaatttcagtttgtttggtctcatgaacagaacatgtaccgcagggatgggtaagagactgcttcatatgtggctgaagcaacccctcgtggatttgaatgagattaagacgagattagatatagttcagtgctttgttgaagaagctgggttaaggcaggatcttagacagcatctgaagcgaatctcagatgttgagaggcttttgcgcagtctcgagagaagaagaggtgggttacagcacattattaaactctatcagtcaactataaggcttcccttcatcaaaacagctatgcaacagtacaccggagaattcgcatcactcatcagcgagagatacctgaaaaagcttgaggctttatcagatcaagatcaccttggaaagttcatcgatttggttgagtgctctgtagatcttgaccagctagaaaatggagaatacatgatatcttcaagctacgacaccaaattggcatctctgaaagatcagaaagaattgctggagcagcagattcacgaattgcacaaaaagacagcgatagaacttgatcttcaggtcgacaaggctcttaaacttgacaaagcagcgcaatttgggcatgtcttcaggatcacgaagaaggaagagccaaagatcaggaagaagctgacgacacagtttatagtgctggagactcgcaaagacggagtgaagttcacaaacacaaagctaaaaaaactgggggaccagtaccaaagtgttgtggatgattataggagctgtcaaaaggagctcgttgatcgtgtagttgagactgttaccagcttctctgaggtatttgaggacttagctgggttactttctgaaatggatgttttgttaagctttgctgatttggctgccagttgccctactccatactgtaggccagaaatcacctcttcggatgctggagatattgtactagaaggaagcagacatccatgtgtagaagctcaagattgggtgaatttcataccaaatgattgcagactcatgagagggaagagttggtttcaaatagtaacagggcctaacatgggagggaagtccactttcatccgccaggttggtgtgattgtgctgatggctcaagttggttcctttgttccttgtgataaagcatcaatttccataagagactgcatctttgcccgtgtaggagcaggcgattgccaactgcgtggagtgtcaacttttatgcaagaaatgcttgaaaccgcatcgatattgaaaggcgctagtgataagtcactgataattatcgatgaacttggtcgtggaacatcaacttatgatggttttggtttagcttgggctatatgtgagcatctggttcaagtgaaaagagcaccaactctgtttgctactcacttccatgaacttactgccttggctcaagcaaactctgaggtctctggtaacactgttggtgtggcaaacttccatgtcagcgctcacattgacactgaaagccgcaaactcaccatgctttacaaggttgaaccaggggcctgtgaccagagctttgggattcatgtggcggaatttgccaacttccctgaaagcgtcgtggccctcgcaagagagaaagctgcagagctggaagatttctctccctcctccatgataatcaacaatgaggagagtgggaagagaaagagcagagaagatgatccagatgaagtatcaagaggggcagagcgagctcacaagtttctgaaagagtttgcagcgataccacttgataaaatggagcttaaagattcacttcaacgggttcgtgagatgaaagatgagctagagaaagatgctgcagactgccactggctcaggcagtttctgtga

SEQ ID NO: 22833 - protein, 937 aa, Arabidopsis thaliana
MEGNFEEQNKLPELKLDAKQAQGFLSFYKTLPNDTRAVRFFDRKDYYTAHGENSVFIAKTYYHTTTALRQLGSGSNALSSVSISRNMFETIARDLLLERNDHTVELYEGSGSNWRLVKTGSPGNIGSFEDVLFANNEMQDTPVVVSIFPSFHDGRCVIGMAYVDLTRRVLGLAEFLDDSRFTNLESSLIALGAKECIFPAESGKSNECKSLYDSLERCAVMITERKKHEFKGRDLDSDLKRLVKGNIEPVRDLVSGFDLATPALGALLSFSELLSNEDNYGNFTIRRYDIGGFMRLDSAAMRALNVMESKTDANKNFSLFGLMNRTCTAGMGKRLLHMWLKQPLVDLNEIKTRLDIVQCFVEEAGLRQDLRQHLKRISDVERLLRSLERRRGGLQHIIKLYQSTIRLPFIKTAMQQYTGEFASLISERYLKKLEALSDQDHLGKFIDLVECSVDLDQLENGEYMISSSYDTKLASLKDQKELLEQQIHELHKKTAIELDLQVDKALKLDKAAQFGHVFRITKKEEPKIRKKLTTQFIVLETRKDGVKFTNTKLKKLGDQYQSVVDDYRSCQKELVDRVVETVTSFSEVFEDLAGLLSEMDVLLSFADLAASCPTPYCRPEITSSDAGDIVLEGSRHPCVEAQDWVNFIPNDCRLMRGKSWFQIVTGPNMGGKSTFIRQVGVIVLMAQVGSFVPCDKASISIRDCIFARVGAGDCQLRGVSTFMQEMLETASILKGASDKSLIIIDELGRGTSTYDGFGLAWAICEHLVQVKRAPTLFATHFHELTALAQANSEVSGNTVGVANFHVSAHIDTESRKLTMLYKVEPGACDQSFGIHVAEFANFPESVVALAREKAAELEDFSPSSMIINNEESGKRKSREDDPDEVSRGAERAHKFLKEFAAIPLDKMELKDSLQRVREMKDELEKDAADCHWLRQFL

SEQ ID NO: 22834 - DNA, 3033 bp, Nicotiana tabacum
  CDS (22)..(2841)
ataaaggttaaagaaaaaaaaatgaatgaaaatttggaggaacagagcaagcttcccgagcttaaactggatgctaagcaagctcaaggatttctctcattcttcaaaaccctgcccaaggaccctagggcagttcgcctctttgatcgtcgggactattatacatctcatggagatgatgcaactttcattgcagagacatattaccacacaacaactgcgttacgacagttgggtaatagagctgatgccctttccagtgttagtgtgagtagaaacatgtttgaaacaatagctcgtgacattctcttggagagaatggaccgtactcttgaactatatgagggcagtggttcaaactggagactggtaaaaagtggaaccccagggaatcttggaagttttgaggatattctgtttgctaataatgaaatgcaaaattctccggtgattgctgctcttgctccaaacttcggtcagaatggatgtgaagttggcttaggctatgttgatattactaagagagtccttggtttaacagaatttctagatgatagccacttcacaaatttggagtctgctttggttgctcttggttgcagagaatgtcttgtaccagcggagactggcaaatccagtgaatacaggcctatgtttgatgcaatatctagatgcggcgtgatggtaactgaaagaaagaaaactgaatttaaagggagagatttggtacaggatcttggtaggctcgtcaagggttcagtagaacctgttcgagatttggtctctgggttcgaatgtgcatcaggcgctttggggtgcatactttcttatgcagaactacttgcggatgagagcaactatggaaactatacagtcaaacaatacaacctcaatagttacatgagattagattctgctgctatgagagcactgaatgttatggagagcaaatcagatgctaataaaaattttagcttgttcggtctgatgaatagaacgtgtactgctggaatgggtaaaaggttattgcacatgtggctgaagcaacctttactagatgtagaagagattaactgtaggctggatttagttcaatcattcgtggaggatgctgcgcttcgccaagatttgaggcagcatctgaaaagaatttcagatattgagcggctgacacacaatcttgagaggaaaagagccagtttagtgcacgttgtaaaactctatcagtcaagtaccagagtaccatatatcaaaagtgttttggaacgtcatgatgggcaatttgcaacactcatcagggaaaggtatattgattctctagagaaatggagtgatgataatcacctgaataagttcataggtcttgtggaaacttctgttgaccttgatcaacttgagaatggagaatacatgatttcttctgcatatgacccaaatttatctgctctgaaggatgagcaagagacattggagcgacaaattcataatttgcacaaacaaactgccaatgatcttgatctacctattgataagtcacttaaactagataaagaaacacaatttggacacgtcttcagaattaccaagaaagaagaaccaaaagtcaggaagcagctaaattctcactacattgttctcgaaacacgtaaggatggggtaaagttcacctatacaaaactcaaaaaactaggagatcagttccagaagattgtagaggagtacaaaagctgtcagaaagaattggtagctcgtgtagttcaaacagctgcgagtttctccgaggtgtttgcaggtatagctggtgtacttgctgagttggatgtgttactgagttttgcggatttggctgccagttgcccaactccctacacaagaccaaatatcagtccaccagatacaggagatattatacttgaagggtgtaggcatccttgtgtggaagctcaagattgggttaactccattcctaatgactgtagactagttaggggagagagttggtttcagattatcacaggccctaacatgggtggaaagtcgacctacattcggcaggttggtgtgaatgtcctgatggcccaagttggctcgtttgttccatgtgacaatgctaccatttctattcgtgattgtatttttgctcgtgttggcgctggagattgccagctgagaggagtttctacttttatgcaagagatgcttgagactgcatcgatcttgaaaggagctactgatagatcattgattataattgatgagttgggccgtgggacatcaacctacgatggctttggtttagcttgggctatttgtgagcacattgttgaagaaattaaagcaccaacattgtttgccactcactttcatgagctgactgcattagccaacaagaatggagacaatggacataagaaaaatgctgggatagcaaattttcatgtttttgcacacattgacccttctaatcgcaagctaactatgctttacaaggttcacccaggtgcttgtgatcagagttttggtattcatgttgctgaatttgcaaattttccaccgagtgttgtggctctggctagagaaaaggcatctgagttggaggatttctctcctattgccataattccaaatgacattaaagaggcagcttcaaaacggaagagagaatttgaccgccatgacgtgtctagaggtactgccagagctcggcaattcttacaggatttcgctcagttgccactggataagatggatccaaacgtggtcaggcaaaagttgagcaaaatgaaaaccgacctggagagggatgcagttgactctcactggcttcagcaattcttttaattcttcagattagaactatcttctattctgtgaagcttgggggggaatgatacttatgggttttgtggatataacttagcctatctgtaaactttcatttaaatccttaccccaaacatgattctctgtaatcaggggacttttgtatgcattctgtgttaatagtaagcgttatcttatatggtcaaaaaa

SEQ ID NO: 22835 - protein, 939 aa, Nicotiana tabacum
MNENLEEQSKLPELKLDAKQAQGFLSFFKTLPKDPRAVRLFDRRDYYTSHGDDATFIAETYYHTTTALRQLGNRADALSSVSVSRNMFETIARDILLERMDRTLELYEGSGSNWRLVKSGTPGNLGSFEDILFANNEMQNSPVIAALAPNFGQNGCEVGLGYVDITKRVLGLTEFLDDSHFTNLESALVALGCRECLVPAETGKSSEYRPMFDAISRCGVMVTERKKTEFKGRDLVQDLGRLVKGSVEPVRDLVSGFECASGALGCILSYAELLADESNYGNYTVKQYNLNSYMRLDSAAMRALNVMESKSDANKNFSLFGLMNRTCTAGMGKRLLHMWLKQPLLDVEEINCRLDLVQSFVEDAALRQDLRQHLKRISDIERLTHNLERKRASLVHVVKLYQSSTRVPYIKSVLERHDGQFATLIRERYIDSLEKWSDDNHLNKFIGLVETSVDLDQLENGEYMISSAYDPNLSALKDEQETLERQIHNLHKQTANDLDLPIDKSLKLDKETQFGHVFRITKKEEPKVRKQLNSHYIVLETRKDGVKFTYTKLKKLGDQFQKIVEEYKSCQKELVARVVQTAASFSEVFAGIAGVLAELDVLLSFADLAASCPTPYTRPNISPPDTGDIILEGCRHPCVEAQDWVNSIPNDCRLVRGESWFQIITGPNMGGKSTYIRQVGVNVLMAQVGSFVPCDNATISIRDCIFARVGAGDCQLRGVSTFMQEMLETASILKGATDRSLIIIDELGRGTSTYDGFGLAWAICEHIVEEIKAPTLFATHFHELTALANKNGDNGHKKNAGIANFHVFAHIDPSNRKLTMLYKVHPGACDQSFGIHVAEFANFPPSVVALAREKASELEDFSPIAIIPNDIKEAASKRKREFDRHDVSRGTARARQFLQDFAQLPLDKMDPNVVRQKLSKMKTDLERDAVDSHWLQQFF

SEQ ID NO: 22836 - DNA, 3033 bp, Nicotiana tabacum
  CDS (22)..(2841)
aaagttaaaagaaaaaaaaaaatgaatgaaaatttggaggaacagagcaagcttcctgagcttaaacttgatgctaagcaagctcaaggatttctctcatttttcaaaaccctacccaaggaccctagggcagttcgcctctttgatcgtcgggactattatactgctcatggagatgatgcaactttcattgcagagacatattaccacacaacaactgcgttacgacagttgggtaatagagctgatgccctttccagtgttagtgtgagtagaaacatgtttgaaacaatagctcgtgacattctcttggagagaatggaccgtactcttgaactatatgagggcagtggttcaaactggagactggtaaaaagtggaaccccagggaatcttggaagttttgaggatattctgtttgctaataatgaaatgcaaaattctccggtgattgctgctcttgctccaaacttcggtcagaatggatgtgaagttggcttaggctatgttgatattactaagagagtccttggtttaacagaatttctagatgatagccacttcacaaatttggagtctgctttggttgctcttggttgcagagaatgtcttgtaccagcggagactggcaaatccagtgaatacaggcctatgtttgatgcaatatctagatgcggcgtgatggtaactgaaagaaagaaaactgaatttaaagggagagatttggtacaggatcttggtaggctcgtcaagggttcagtagaacctgttcgagatttggtctctgggttcgaatgtgcatcaggcgctttggggtgcatactttcttatgcagaactacttgcggatgagagcaactatggaaactatacagtcaaacaatacaacctcaatagttacatgagattagattctgctgctatgagagcactgaatgttatggagagcaaatcagatgctaataaaaattttagcttgttcggtctgatgaatagaacgtgtactgctggaatgggtaaaaggttattgcacatgtggctgaagcaacctttactagatgtagaagagattaactgtaggctggatttagttcaatcattcgtggaggatgctgcgcttcgccaagatttgaggcagcatctgaaaagaatttcagatattgagcggctgacacacaatcttgagaggaaaagagccagtttagtgcacgttgtaaaactctatcagtcaagtaccagagtaccatatatcaaaagtgttttggaacgtcatgatgggcaatttgcaacactcatcagggaaaggtatattgattctctagagaaatggagtgatgataatcacctgaataagttcataggtcttgtggaaacttctgttgaccttgatcaacttgagaatggagaatacatgatttcttctgcatatgacccaaatttatctgctctgaaggatgagcaagagacattggagcgacaaattcataatttgcacaaacaaactgccaatgatcttgatctacctattgataagtcacttaaactagataaagaaacacaatttggacacgtcttcagaattaccaagaaagaagaaccaaaagtcaggaagcagctaaattctcactacattgttctcgaaacacgtaaggatggggtaaagttcacctatacaaaactcaaaaaactaggagatcagttccagaagattgtagaggagtacaaaagctgtcagaaagaattggtagctcgtgtagttcaaacagctgcgagtttctccgaggtgtttgcaggtatagctggtgtacttgctgagttggatgtgttactgagttttgcggatttggctgccagttgcccaactccctacacaagaccaaatatcagtccaccagatacaggagatattatacttgaagggtgtaggcatccttgtgtggaagctcaagattgggttaactccattcctaatgactgtagactagttaggggagagagttggtttcagattatcacaggccctaacatgggtggaaagtcgacctacattcggcaggttggtgtgaatgtcctgatggcccaagttggctcgtttgttccatgtgacaatgctaccatttctattcgtgattgtatttttgctcgtgttggcgctggagattgccagctgagaggagtttctacttttatgcaagagatgcttgagactgcatcgatcttgaaaggagctactgatagatcattgattataattgatgagttgggccgtgggacatcaacctacgatggctttggtttagcttgggctatttgtgagcacattgttgaagaaattaaagcaccaacattgtttgccactcactttcatgagctgactgcattagccaacaagaatggagacaatggacataagaaaaatgctgggatagcaaattttcatgtttttgcacacattgacccttctaatcgcaagctaactatgctttacaaggttcacccaggtgcttgtgatcagagttttggtattcatgttgctgaatttgcaaattttccaccgagtgttgtggctctggctagagaaaaggcatctgagttggaggatttctctcctattgccataattccaaatgacattaaagaggcagcttcaaaacggaagagagaatttgaccgccatgacgtgtctagaggtactgccagagctcggcaattcttacaggatttcgctcagttgccactggataagatggatccaaacgtggtcaggcaaaagttgagcaaaatgaaaaccgacctggagagggatgcagttgactctcactggcttcagcaattcttttaattcttcagattagaactatcttctattctgtgaagcttgggggggaatgatacttatgggttttgtggatataacttagcctatctgtaaactttcatttaaatccttaccccaaacatgattctctgtaatcaggggacttttgtatgcattctgtgttaatagtaagcgttatcttatatggtcaaaaaa

SEQ ID NO: 22837 - protein, 939 aa, Nicotiana tabacum
MNENLEEQSKLPELKLDAKQAQGFLSFFKTLPKDPRAVRLFDRRDYYTAHGDDATFIAETYYHTTTALRQLGNRADALSSVSVSRNMFETIARDILLERMDRTLELYEGSGSNWRLVKSGTPGNLGSFEDILFANNEMQNSPVIAALAPNFGQNGCEVGLGYVDITKRVLGLTEFLDDSHFTNLESALVALGCRECLVPAETGKSSEYRPMFDAISRCGVMVTERKKTEFKGRDLVQDLGRLVKGSVEPVRDLVSGFECASGALGCILSYAELLADESNYGNYTVKQYNLNSYMRLDSAAMRALNVMESKSDANKNFSLFGLMNRTCTAGMGKRLLHMWLKQPLLDVEEINCRLDLVQSFVEDAALRQDLRQHLKRISDIERLTHNLERKRASLVHVVKLYQSSTRVPYIKSVLERHDGQFATLIRERYIDSLEKWSDDNHLNKFIGLVETSVDLDQLENGEYMISSAYDPNLSALKDEQETLERQIHNLHKQTANDLDLPIDKSLKLDKETQFGHVFRITKKEEPKVRKQLNSHYIVLETRKDGVKFTYTKLKKLGDQFQKIVEEYKSCQKELVARVVQTAASFSEVFAGIAGVLAELDVLLSFADLAASCPTPYTRPNISPPDTGDIILEGCRHPCVEAQDWVNSIPNDCRLVRGESWFQIITGPNMGGKSTYIRQVGVNVLMAQVGSFVPCDNATISIRDCIFARVGAGDCQLRGVSTFMQEMLETASILKGATDRSLIIIDELGRGTSTYDGFGLAWAICEHIVEEIKAPTLFATHFHELTALANKNGDNGHKKNAGIANFHVFAHIDPSNRKLTMLYKVHPGACDQSFGIHVAEFANFPPSVVALAREKASELEDFSPIAIIPNDIKEAASKRKREFDRHDVSRGTARARQFLQDFAQLPLDKMDPNVVRQKLSKMKTDLERDAVDSHWLQQFF

SEQ ID NO: 22838 - DNA, 3308 bp, Physcomitrella patens
  CDS (246)..(3086)
gttgagtcgaatttgcgaagccgtcgactggagcgagattgtgttagcgccgctctggtcagccttcttcatactacacctcggtgagttcgggatttgggagcgcaatttcgtaggagcttgaagtattttcgcttttcgagtgctttgagcaccgaggcgttgcgtttttttgaagatttgaatacctacagcatagttagtgttggatttggcaatccgattgtgggatggacccagatagtatggagaagggggatgagccgaagctgcccgaattgaagctagatgttaagcaggcacaggggttcatttctttcttccgcaggcttcccgagaacgagcaagctgtgcgcttctttgaccgcagggattatttcactgctcatggtgataatgcaaccttcattgccagtacgtactataggacgctcacagttctcaggcagctggggagcggggctgattctctccctggtgtgaccatcaacaaaagcatgtttgagactattgtgagggatctcttgctagaaagaactgattgcactgttgaactctatgagggcaccggatctaagtggcaacttgttaggagcgggtctcctggcaagcttggcagctttgaggaggtcctgttcgcaagcaatgagatgcaggaaactcctgtagtcatggctgtaaatattactacacgtcaaagcgagcggtgtgttgggatagcattcgtggatatgacgaagaggcagcttggaatgacagagttcttagacgatgacctatacaccagtttggagtccgccatggtagctttaagctgtcgtgaatgtatcatacccatgccaaccgctgccaagtcccctgatgatcgtaaacttcgtgatgtaatggcacgctgcaatgttttggttactgagaagaagaaatctgattttaggtcgcgagatgtagaacaagatttaggccgattagtcaaaggtcctgctgagcaacataaggaactggtggcagcatctgatttagcggctgctgctcttgccgcgcttctgacatatactgaactcctctctgatgacacaaattatggaaaatacgtcattcagccctacagtctggacctctacatgcgattggatgcagcagctttacgagctctcaatgtcactgagagcaaaacggattctaacaagcatcttagtctgtttggtttgatgaaccggacttgcacccaaggtatgggaaaaagattgctgaaccggtggttgaaacaacccctagtggatgttgttgagataaccaaaaggctggatacagtgcaagcgtttgtggaggatctagaattaaggcaggacttgcggtctcacctacggcgaatgcctgacattgagcgcttggttagcaagcttgagaagcgcaaagcgggattgcaagatgttgtgagattgtatcaggccagtttgaggctgcctttgattcgaacctgcctggagaagtatgacggagagttttccaaggatttgcaagagaaatacggcgcccatcttgatgtatggacacagccaaatcatctaggaaaatttgatggattagtcgaggcagctgtcgatctcgaacagctccagaatggagagtatatatatttcagcagattatgccaacagtcttcaagagctcaaaactgggcgcgacgatgtgaaaggcagatacttaaagttcaccagcagtcagcagatgacctggggcttcctgcggaaaagtcattgaagttggataagagtacacagtatggacatgtttttaggattactaagaaggaagagccgaaggttaggaaaaaattgaatagtcaatacataaccttggaaactaggaaagacggcataaagttcacgaatgccaagctgcgaaggttgagtgaacagtacacaaagctcacagaggaatactcgagtgcacagcgagagcttgttgcaaaggttgtggatgttgcagcaacatttgttgagattttctcaggagttgcagttcttctggctgatatggatgtacttcttagctttgctgacttagcttcctgcagtcccgtaccttacgtcaggccctcgatcacttctgctgatgaaggtgacataattctggaaggaagtcggcatccatgtgtagaagcccaggatgacgtcaatttcatttccaacgattgtcaattggtgcgaggcaagagctggtttcagattatcacaggacccaatatgggtggaaagtccaccttcattagacaggttggtgtgaacgtgttaatggctcaagttggatgctttgtaccatgcgaccgagcagagatcagtgtgcgtgattgcatctttgcgcgtgttggtgctggagattgccagctacgcggagtgccaacatttatggctgaaatgctggaaacagccagcattattaagtctgctacagagcgttctttgatcattattgatgaacttggtcggggtacttcaacttacgatggatttggtttggcgtgggcaatatgtgagtacttagtggaggtcactcgtgcacccactctctttgcaacccactttcacgagctaccagctttagaacattcaaactctccacctgtccatggacctcccagaggtccacttgtagggattgccaactatcacgttagtgctcatatcgacacaaaatcacagaaacttgccatgctctacaaggttgaagaaggaccttgcgaccaaagttttggtatccatgtagctgagtttgcgcattttcctgaaagtgttgttgaactcgctaagcagaaagcggcagaattagaggatttctctgatactgggaaggatgtttcaggggggcttagtaaggatgaggttggcactaagcgaaagagagtaagtggccctgatgacaaggtattaggagctgggcgggtgcgaaggttccttcaagagatggcagcattgcctgtagacaaaatgagtcgtgaggagacttatgccaaattaaaggccttgaaaagtgagtttgacagagacgccgcaacaaactcatggctgcaacagatagttcattgaaaggttctctgaacgttatgtacatttgatctagagacaaacatgttttatttatgaatatatcttccttgtgaggtgaagtaaatgatgatgaaatgtgaagtaatttttttgatccgtagctttgacaaaatacttatctgtctggacgaaacgcagtcttcaagctgttgtattgttcgacttattgataaagagggaaactaatgattcacacaaaaa

SEQ ID NO: 22839 - protein, 946 aa, Physcomitrella patens
MEKGDEPKLPELKLDVKQAQGFISFFRRLPENEQAVRFFDRRDYFTAHGDNATFIASTYYRTLTVLRQLGSGADSLPGVTINKSMFETIVRDLLLERTDCTVELYEGTGSKWQLVRSGSPGKLGSFEEVLFASNEMQETPVVMAVNITTRQSERCVGIAFVDMTKRQLGMTEFLDDDLYTSLESAMVALSCRECIIPMPTAAKSPDDRKLRDVMARCNVLVTEKKKSDFRSRDVEQDLGRLVKGPAEQHKELVAASDLAAAALAALLTYTELLSDDTNYGKYVIQPYSLDLYMRLDAAALRALNVTESKTDSNKHLSLFGLMNRTCTQGMGKRLLNRWLKQPLVDVVEITKRLDTVQAFVEDLELRQDLRSHLRRMPDIERLVSKLEKRKAGLQDVVRLYQASLRLPLIRTCLEKYDGEFSKDLQEKYGAHLDVWTQPNHLGKFDGLVEAAVDLEQLQNGEYIYFSRLCQQSSRAQNWARRCERQILKVHQQSADDLGLPAEKSLKLDKSTQYGHVFRITKKEEPKVRKKLNSQYITLETRKDGIKFTNAKLRRLSEQYTKLTEEYSSAQRELVAKVVDVAATFVEIFSGVAVLLADMDVLLSFADLASCSPVPYVRPSITSADEGDIILEGSRHPCVEAQDDVNFISNDCQLVRGKSWFQIITGPNMGGKSTFIRQVGVNVLMAQVGCFVPCDRAEISVRDCIFARVGAGDCQLRGVPTFMAEMLETASIIKSATERSLIIIDELGRGTSTYDGFGLAWAICEYLVEVTRAPTLFATHFHELPALEHSNSPPVHGPPRGPLVGIANYHVSAHIDTKSQKLAMLYKVEEGPCDQSFGIHVAEFAHFPESVVELAKQKAAELEDFSDTGKDVSGGLSKDEVGTKRKRVSGPDDKVLGAGRVRRFLQEMAALPVDKMSREETYAKLKALKSEFDRDAATNSWLQQIVH

SEQ ID NO: 22840 - DNA, 2829 bp, Oryza sativa (japonica cultivar-group)
  CDS (1)..(2829)
atggagggcgacgacttcttgccggagggcggcaagctccccgagctcaagctagatgcgaggcaagcgcagggcttcatctctttcttcaagaaactgccgcaggattcgagggctattcgtctcttcgatcggcgggattattacactgctcatggagagaatgccacattcattgcaaaaatatactatcacacaatgtctgccttacgccaattaggtagcaactctgatggactctcaagtgtcagtgtgagcaagactatgtttgagaccatcgcccgcaaccttttgttagagaggacagaccgtacattggaactctatgagggaagtgggtctagttggaggttaacaaaatctggaacacctggaaatattggcagttttgaagatattctgtttgcaaacaatgacatgcaagattctccggtaactgttgcattgtttcctgtgttccaggaaggacaactatatgtaggtcttagttttgttgatttgacaaacaggaagcttgggttgtctgagtttcccgaagatagtcgattcacaaatgtagagtcagcccttgttgcattaggttgcaaggagtgtcttctcccagcagattgtgagaaatctatagatttgaagcctcttcaggatgctatcactaactgcaatgttctattaactgaaagaaagaaggttgaatttaaatccagagatcttgtgcaggatcttggtagaataatcagaggtcctgttgagccagttcgtgatcttgtatctcagtttgactatgcattgggtgcccttggagctctagtttcatatgctgagttgctagcagatgatacaaactacggaaattacacaattgagaaatacagtttggaccgctacatgcgtcttgattctgctgctgtgcgagcattgaatattgccgaagctaaaactgatgtaaacaagaacttcagtttgtttggtttgatgaacagaacctgtacagtaggtatgggaaagagactgcttaacagatggctgaaacaacctctgctagatgtaaatgaaatcaataacagattagatatggttcaggctttcgtagaagatccagagcttcgtcagggacttaggtaccaactcaaaagaatgtcggacattgaccgtctgacacatgctctgcggaagagaacagccaatctgcagcctgttgtcaagctctaccagtcctgcattagagtctcatacatcaagaatgttcttcaacaatatgatggcagtttttctgcgctgataaggacaaagtttcttaattctttagatgagtggctgacagaggataggtttggtaggtttgcttctcttgttgagacagctattgaccttgatcaacttgagaatggtgagtataggatatctccccgatattcttctgatttggctgtgctgaaggatgagctttctgaagttgaaaatcacatcaacaatttgcacaagcatacagctgctgatctggatcttactattgataagcaattgaagctagaaaaagggcagcttggccatgtgttcagaatctcaaagaaagatgaacagaaggttaggaagaaactcactagcaattacataatcatagaaactcgtaaggatggtgtgaagttcacaagctccaagcttaaaaagttaggcgaccaataccaggcactgcttggtgagtacacaagttgtcagaaaaaggttgttgatgatgtagtaagagtttcagcctccttctcagaggtatttgaaaactttgctgcgatactatctgagttggatgttttacaaagttttgctgatttagcaacaagttccccaattccttatgtaagaccagaaatcacagcatcggaggaaggagatatcattttagaaggtagcagacatccttgtctggaggcccaagatggtgttaactttataccaaatgattgcactttggtgagagaaaaaagttggtttcagatcatcactgggccaaacatgggtggaaagtccacttttatacgacaggttggtgtgaatgtcctgatggcacaagttggatcgttcgttccatgtgatcgggcgagcattagtgtgagagattgtatttttgctcgtgttggtgctggtgattgccagctacgtggtgtttcaacctttatgcaagaaatgcttgaaacagcatccatcttgaaaggtgcatcggacaagtctcttattattattgatgagttggggcgtggaacttccacatatgatggatttggtcttgcatgggctatctgtgagcatcttgtggaagtgactagagcacctacgttgtttgccacgcattttcatgaattaactgcattaggacacaaaagtggtgatgagcaccaacacgttccaaatttgggaattgcaaattaccatgtgggtgcacatatagacccatcaagtcggaagttaactatgctttataaggttgaacccggtgcatgtgaccaaagctttggtatccacgttgcagaattcgctaattttccagaagctgttgttgctcttgcaaaaagcaaagcagaagaattagaagatttttcaactgcgcccaatttttccgatgattcaaaagatgaggttggatcaaaacgcaagagggtatttagcccagacgatgtgactagaggagctgctcgcgctcgccttttgttggaggaattggcctcattgcctctagacgagatggatggcaccaaggccgcagaaaccgtcaccaaactgaaatccgacttcgagaaagatgcagctgataatccttggcttcagcagttcctttga

SEQ ID NO: 22841 - protein, 942 aa, Oryza sativa (japonica cultivar-group)
MEGDDFLPEGGKLPELKLDARQAQGFISFFKKLPQDSRAIRLFDRRDYYTAHGENATFIAKIYYHTMSALRQLGSNSDGLSSVSVSKTMFETIARNLLLERTDRTLELYEGSGSSWRLTKSGTPGNIGSFEDILFANNDMQDSPVTVALFPVFQEGQLYVGLSFVDLTNRKLGLSEFPEDSRFTNVESALVALGCKECLLPADCEKSIDLKPLQDAITNCNVLLTERKKVEFKSRDLVQDLGRIIRGPVEPVRDLVSQFDYALGALGALVSYAELLADDTNYGNYTIEKYSLDRYMRLDSAAVRALNIAEAKTDVNKNFSLFGLMNRTCTVGMGKRLLNRWLKQPLLDVNEINNRLDMVQAFVEDPELRQGLRYQLKRMSDIDRLTHALRKRTANLQPVVKLYQSCIRVSYIKNVLQQYDGSFSALIRTKFLNSLDEWLTEDRFGRFASLVETAIDLDQLENGEYRISPRYSSDLAVLKDELSEVENHINNLHKHTAADLDLTIDKQLKLEKGQLGHVFRISKKDEQKVRKKLTSNYIIIETRKDGVKFTSSKLKKLGDQYQALLGEYTSCQKKVVDDVVRVSASFSEVFENFAAILSELDVLQSFADLATSSPIPYVRPEITASEEGDIILEGSRHPCLEAQDGVNFIPNDCTLVREKSWFQIITGPNMGGKSTFIRQVGVNVLMAQVGSFVPCDRASISVRDCIFARVGAGDCQLRGVSTFMQEMLETASILKGASDKSLIIIDELGRGTSTYDGFGLAWAICEHLVEVTRAPTLFATHFHELTALGHKSGDEHQHVPNLGIANYHVGAHIDPSSRKLTMLYKVEPGACDQSFGIHVAEFANFPEAVVALAKSKAEELEDFSTAPNFSDDSKDEVGSKRKRVFSPDDVTRGAARARLLLEELASLPLDEMDGTKAAETVTKLKSDFEKDAADNPWLQQFL

SEQ ID NO: 22842 - DNA, 2652 bp, Agrobacterium tumefaciens str. C58
  CDS (1)..(2652): transl_table=11
atgatggagcaatatatcgagatcaaggcgaacaatcccggttcgctgctgttttaccgcatgggcgatttttacgaattgttctttgacgatgcggtcgaagcctcccgcgcgctcggtatcacgctgacgaaacgcggccagcatatggggcacgatattcccatgtgcggcgttcccgttcacgctgccgatgactatctccagaagctcatcctgcgcggctaccgtgtcgccgtctgcgaacagattgaagacccggctgaagcgaagaagcgcggatcgaaatccgtggtcaagcgtgatgtggtgcggctcgtcacgcccggaacgctcactgaagaaaagctgctgtcgccgacggaatccaactatctgatggcgcttgcccgtattcgcggcagtgcggaggcgcagttcgcgctggcctggatcgatatttccaccggcgtcttccgtctggcggaaaccacgctgacgcggcttctcgccgatatctggcgtatcgatccgcgtgagctgatcgttgccgacagcctgttccacgacgaggaactacggccggttttcgatgtgctgggccgtgtcgcggtgccgcagccggccatcctcttcgacagtgcggtggcagaaggccgtattgcgcgttatttcaacgtctcgacgctggatggtttcggaacgttttcacgggtggaaatggcagccgcagcagcagccgtggcctatgtcgaaaagacccagattgccgagcgtccgccgctcggcgcgccggaacgcgaaagtgcggcatcgacgctcttcattgatcccgccacccgcgccaatctggaactggtgaaaacactatccggcgaccgggatggatcgctcctgcacgcgcttaaccgcactgtcactggcggcggtgcgcgacttctggccgaacgactgatgtcgccattgaccgatccggaaaggatcaatgcccgtcttgatgccgtggcctatctcatcgatgacgtctccctgtgcgatggtctgcgtgacgcgctgaaacatgtcgcggatatgcctcgtgcgctttcccgccttgcgctggaacgtggcggcccgcgcgatcttggcgccatccggcagggtctggtttcggccgaaaaaattgcggtcattctcgacggtgggctgctgccggatgagctggcgaaagctctcagggatttgaaagccctgcccggcgctcttgaagccatgctcggctcgatgctggccgacgatctgccgcttctgaaacgcgatggtggtttcctgcgtgagggcgccaatcccgaactcgacgaagttcgcgcactgcgcgaccagtcacgccgggtgatcgccgggttgcagctgcaatatgccgatgagaccggcatcaagtcgctcaagatcaagcataacaacgtgctgggttattttatcgaggtgacggcgggcaatgccgatgtgatgatggcaacggatgaggccaaagcgcgctttatccatcggcagaccatggcgggcgccatgcgcttcacaaccacggagcttgccgatctcgaaagccgcatcgccaatgccgcggccgaggctctgaccatggagctggaagccttcgagcgcatggtcgaggccgtggtgcagcaggcggaggcgatcaaggccggggctctggcgcttgcggtgatcgatgtcgcctcaagcctcgcctatcttgcgaccgaacaggcctattgccgtccgatcgtcgatgcctccatgaccttttcaatcaagggcggccggcacccggttgttgagcaagcgctgcggcggcagtctgccgggccgttcattgcgaataattgcgatctctccgccgtcaatggtggcaagaacggtgcaatctggctgctcaccggcccgaacatgggcggtaaatcgaccttcctgcgccagaatgcgctgatcgccatcctcgcgcagatcggttccttcgttccggcggaggctgcccatatcggcgtcgtagaccggctgttttcgcgcgtcggcgcctccgacgatctggcccgtggacgctcgaccttcatggtggagatggtcgaaaccgccgccattctcaatcaggcgacggatcgctcgctggtgatcctcgacgagatcggccgtggcaccgcaacttttgacgggctttcgatcgcctgggcggccgtcgagcatctgcatgaggtcaatcgttgtcgcggcctcttcgccacgcacttccacgaactgacggtactgtcggaaaaactcggccgcctttccaatgccacgatgcgggtgaaggagtgggaaggtgatgtcatcttcctgcatgaggtcgggccgggcgctgcggatcgttcctatggtattcaggtcgcgcgacttgcgggcctgcctgcctcagtggtggagcgtgcccgtgaggtgctgacgaagctcgaggatgccgaccgcaagaacccggccagccagctgatcgacgatctgccgctgttccagattgccgtccgccgcgaggaaacccgcaaggcggggccatcgaaagtggaggaggccctgaagagcttcaacccggacgaaatgacgccgcgtgaggcattggacgcgctctatgcgttgaagaaagaacttggcaaggcttga

SEQ ID NO: 22843 - protein, 883 aa, Agrobacterium tumefaciens str. C58
MMEQYIEIKANNPGSLLFYRMGDFYELFFDDAVEASRALGITLTKRGQHMGHDIPMCGVPVHAADDYLQKLILRGYRVAVCEQIEDPAEAKKRGSKSVVKRDVVRLVTPGTLTEEKLLSPTESNYLMALARIRGSAEAQFALAWIDISTGVFRLAETTLTRLLADIWRIDPRELIVADSLFHDEELRPVFDVLGRVAVPQPAILFDSAVAEGRIARYFNVSTLDGFGTFSRVEMAAAAAAVAYVEKTQIAERPPLGAPERESAASTLFIDPATRANLELVKTLSGDRDGSLLHALNRTVTGGGARLLAERLMSPLTDPERINARLDAVAYLIDDVSLCDGLRDALKHVADMPRALSRLALERGGPRDLGAIRQGLVSAEKIAVILDGGLLPDELAKALRDLKALPGALEAMLGSMLADDLPLLKRDGGFLREGANPELDEVRALRDQSRRVIAGLQLQYADETGIKSLKIKHNNVLGYFIEVTAGNADVMMATDEAKARFIHRQTMAGAMRFTTTELADLESRIANAAAEALTMELEAFERMVEAVVQQAEAIKAGALALAVIDVASSLAYLATEQAYCRPIVDASMTFSIKGGRHPVVEQALRRQSAGPFIANNCDLSAVNGGKNGAIWLLTGPNMGGKSTFLRQNALIAILAQIGSFVPAEAAHIGVVDRLFSRVGASDDLARGRSTFMVEMVETAAILNQATDRSLVILDEIGRGTATFDGLSIAWAAVEHLHEVNRCRGLFATHFHELTVLSEKLGRLSNATMRVKEWEGDVIFLHEVGPGAADRSYGIQVARLAGLPASVVERAREVLTKLEDADRKNPASQLIDDLPLFQIAVRREETRKAGPSKVEEALKSFNPDEMTPREALDALYALKKELGKA

SEQ ID NO: 22844 - DNA, 2673 bp, Apis mellifera
  CDS (1)..(2673)
atgacaaaactgaataccacagtacgtttttttaatagatcagattattatacattacatggtaatgatgctttatttgctgcacaagaaatttttaaaactacatctgtttgtaaaatgataggtgcagatccatataaaactgaaggagttattcttaacaaaaatcattttgaatcttttatacgtgatctattgttagtaaaacaatacagagtagaagtttatattaatcaaggaactgcaaaaaatcaaaattggatattagaatataaaggatctcctggtaatttaacacagtttgaggatatattgtttggcaataatgatattgctgttagtgttcgtgttatagcagtgaaattaggaatagaaggaaaatttagaattgtaggtttaagttgtgtagatactacggcaactttattttctgtttgtgaatttcaagataatgaatcattttctaatttggaatcattaattgtcacacttgctcctaaagaatgtttattaattcaaggcgaaggcagctatgaatttcaaactttaaaacaactaatagaacgaaataatgtgatgattactacaagaaaaaaaaatgaattttctagtgaatcagttatacaagatttaaatactttgataagattcaagaaaggtcaacaacaaaatgtacaatctttacctgaagtcaatttaacttttgctatgtcagctacttctgctcttattaaatatttagatttaacatcagatgaaggaaatttgaatcagtttagcatagatcaaataaagcaatcacgttatttgaaattagattcagctgctataaaagcacttaatattgaaccacgtattgatacttcttgtgttttaaatggaaatgcacctacaagtattttgaatctcttagataaatgtagaactccacaaggacatagactccttgcacaatggattagacaacctttaaaagatttatcacttataaaagaaagacatgatattgttgaagtattagtaaatgacaatgaattacgatctaatcttaatgaagatcatttaagacgcataccagatttacaagtacttgcaaaaaaattggccaggaaaaaagcaacactacaagattgctataagatttatacatgtatgtcacatttacctatattattagaacaatttcttaaaataaatataatagctttaaaaacaatgtttactgatcctttaagtgaatttattaaagatatggataaatttcaacaaatggttgaacaaacaattgatttagattctgctgaaaaaggagattttttagtacgacctgaatttgatgatgaattaaaagaattaaaatgtactatggatgaaatagaaataaaattgcaagcacaattgaataaagttgctgatgatctttcaatcgaagctggaaaaatactaaaactagaatcaaatcaacaatttggatattatttccgtgtaacattgaaggaagaaaaggtattaagaaataaaaaacaatatattattttagattctaataaaagtggtgtacgatttcgaagtaataaattaaatgatttaaatgatgaatacattggtattagagataaatatataatggaacaaaaaaaagttgttgcggaaataattgaaattgcagctggttatagtaatacaataaaagctattggaaatgtattagcatcaattgatgtacttactgcttttgcttctgctgctatatgtgctaataaaccatatgtgcgtcctgaaatgctccctagtgaaaaaggagaatttaatcttattcaagttcgacatccatgtttagaagttcaagaaggagtagattatatagctaatgatatcaattttaaaagaggagaatgtcatttttgtattattactggtccaaatatgggaggtaaaagtacatatataagatctgctggtgttactgctctcatggcacatattggaagttttgttccttgtgatcaagcaagaatatcattattagactgtatattagctcgtgtaggagctgatgattgtcaattgaaaggactttctacatttatgatggaaatgatagaaactgctgctatattaaagacagcaacatgcaattcattagtgttgattgatgaattaggcagaggaacttctacttatgaaggttgcggtatagcatggtcaatcgccgaatatttagcaaaagaaattaaatgttattgtctttttgcaacacattttcatgaaataactaagttagaagaagaaatatctactgttaaaaatcaacatgttacagctcttgtagataataataaattaactttattatataaaataaaaccaggaatatgtgatcaaagttttggcatacacgtcgctaaaatggctaatttcccacaagatgttattgagtttgctaagcgtaaacaagcagaacttgaagattatcaagattcactttttgaaggatctgataatccacagaagaaagaagccgaaatttttattgcagaatttattgataaatgtaagaatttagatctatcattatctgatgcagagttaaaggataagattttaacatttaaagaagaagttttatctcacaaaaatccctatatacaaatgcttcttacagcttcataa

SEQ ID NO: 22845 - protein, 890 aa, Apis mellifera
MTKLNTTVRFFNRSDYYTLHGNDALFAAQEIFKTTSVCKMIGADPYKTEGVILNKNHFESFIRDLLLVKQYRVEVYINQGTAKNQNWILEYKGSPGNLTQFEDILFGNNDIAVSVRVIAVKLGIEGKFRIVGLSCVDTTATLFSVCEFQDNESFSNLESLIVTLAPKECLLIQGEGSYEFQTLKQLIERNNVMITTRKKNEFSSESVIQDLNTLIRFKKGQQQNVQSLPEVNLTFAMSATSALIKYLDLTSDEGNLNQFSIDQIKQSRYLKLDSAAIKALNIEPRIDTSCVLNGNAPTSILNLLDKCRTPQGHRLLAQWIRQPLKDLSLIKERHDIVEVLVNDNELRSNLNEDHLRRIPDLQVLAKKLARKKATLQDCYKIYTCMSHLPILLEQFLKINIIALKTMFTDPLSEFIKDMDKFQQMVEQTIDLDSAEKGDFLVRPEFDDELKELKCTMDEIEIKLQAQLNKVADDLSIEAGKILKLESNQQFGYYFRVTLKEEKVLRNKKQYIILDSNKSGVRFRSNKLNDLNDEYIGIRDKYIMEQKKVVAEIIEIAAGYSNTIKAIGNVLASIDVLTAFASAAICANKPYVRPEMLPSEKGEFNLIQVRHPCLEVQEGVDYIANDINFKRGECHFCIITGPNMGGKSTYIRSAGVTALMAHIGSFVPCDQARISLLDCILARVGADDCQLKGLSTFMMEMIETAAILKTATCNSLVLIDELGRGTSTYEGCGIAWSIAEYLAKEIKCYCLFATHFHEITKLEEEISTVKNQHVTALVDNNKLTLLYKIKPGICDQSFGIHVAKMANFPQDVIEFAKRKQAELEDYQDSLFEGSDNPQKKEAEIFIAEFIDKCKNLDLSLSDAELKDKILTFKEEVLSHKNPYIQMLLTAS

SEQ ID NO: 22846 - DNA, 2781 bp, Nasonia vitripennis
  CDS (1)..(2781)
atggctgtacaaccgaagcaacagtttgacatggattcggcgacccagcagggattcgtcagattcttcaagagtttgccagagaaaccgagtagtaccataaggttcttcaacaggtcggactattacacactgcacggaagcgatgccttgttcgctgcgcaggaggtgttcaagactacgtccgtctgcaagaagatcggcccagagcacaacaagatcgacggcgttatcctgaacaagaacaacttcgagaccttcgtaagggacctcttgctggtcaagcagtaccgcgtggaggtctacgtgaatcgaggctcgcataagaatcaggactggatcgtcgagtacaaaggctcaccgggtaatctagctcagttcgaggatatgctcttcaataacagcgaagtggctgtcgaggctggtgtcatcgccgtcaaatttagcgctgaagcttcctcgaaggtcgttggtatttgttgcatcgatgtgataaaatcgtcgatagcggtgtccgagttcaaagacgacgagtctttcatggatctcgaggggatagttgtgtccttgaagccgaaggagtgcatactacagagtggtgagagtaatccagactttaaggctgttaaagaggtacctctatcacctttcttgttgatggagaggaacaacgttctcgtgacaccgaggaagaaagctgagtttagcacggattctcttattacggacctgaacgttattttacgatttgacaaaggccagcagcgcaattctcaggctctatctcaaacgaacatgcagctagctatgcctgccactgctgctcttatcagatatttgaatctcgttgaagacagaggcagcgcggaccaattcactctcgaagaaatagagcgcagtcgctatcttcgcttagacgccgcagctataaaagccctgaacgtagagccacgtcccgatgccccgacgttcggtaacgccgcaacctcaagcatcttgggtttactggataagtgcaggacggcccagggtcgacgtttgctcgcccagtggattcgtcaacctctgaaggacctcgcgctgatcaaggagagacacgaggttgtcgggactttcttggataactcagcattgagcactgaattgagcgaagattttttaaggagagtaccggatcttcagcagttggctaagaagctggcaaagaagaaggctggcttgtacgagtgttacaagatataccagtgcatgaccaacctgccaggcttaatcgaaaaactgaatagtgtgtcggacaacgctgcggtcaaaaccatgctcctcgatcccttgaaagaatatctggaagaaatggataaatttcagcagatggcagagcaaacgattgacttagacgctgctgacaaaggcgattttctcgtaaaaccagagtttgatgatgagttgaaagagttaaaatccgtcatggactcgaatgaggctaaaatgaaatcgctgctgagcagagctgccgacgatctaggcatggaagcgggtaaatcgattaagcttgagacaacacctcagtacggttatcacttccggatcactttaaaagaagaaaagtctcttagaaacaataaatcctacacaatactggattccattaagggtggcgttaggtttaggaataaaaagttggaggacctcaacgatgtttatgcaactgcttatgatagttacacctcccaacagaagaacatagtagcagaaatcgtaaatacagcaggtggctacgttccaacgattaaaatgattgccggagtcatcgcaactcttgatgtgctcaattcttttgccatggcagcagcaactgcacttacgacgtacgttcgtccagagatgttacccagtgaagagcaagtgctacatcttgttcaggctagacatccatgcttagagatgcaagaaggagtcaattacatcgcaaatgatgtacattttactaaagatgatcgattccatatcgtaactgggcctaacatgggtggtaaaagtacttacatcaggtcgattggcgtcacggctctaatggcacacatcggtagttttgtgccatgcacaaaagctactatttctgtacttgattctattctggctaggataggagctgatgactctcaaatcaaaggactctccaccttcatggctgaaatggttgagacctctgcaattataaggacagcaactgttaattcgttagtaattattgatgaattgggaagaggaacatcgacttatgatggttgcggaatagcatgggccatagcagagcatttggcaaaggaggtaaaagcgtactgcctatttgctactcattttcacgaaattacaaggctcgctgaagacgtttctactgcgagtaattaccacgtcacggcaatggttggagataaattgacacttttgtataaagtcaagcctggtatatgcgatcaaagttttggaattcacgttgccaaaatggccgattttccagaagaggtgatcgagtttgcaaagcaaaagcaaactgaattggaagatttgcaaggaatagtcttcgagggatctgatgacccggaaaagaaaaaggaaatcatcaataatggtgaacaaattattcgcgaattcatgaacaaatgcaaggactttgaagaatctctatcagaagaggaactgatgaagaaagtaacggatttacgagacgaaattctagccaagaacaatccatacataaaatctctattaggcgtctcataa

SEQ ID NO: 22847 - protein, 926 aa, Nasonia vitripennis
MAVQPKQQFDMDSATQQGFVRFFKSLPEKPSSTIRFFNRSDYYTLHGSDALFAAQEVFKTTSVCKKIGPEHNKIDGVILNKNNFETFVRDLLLVKQYRVEVYVNRGSHKNQDWIVEYKGSPGNLAQFEDMLFNNSEVAVEAGVIAVKFSAEASSKVVGICCIDVIKSSIAVSEFKDDESFMDLEGIVVSLKPKECILQSGESNPDFKAVKEVPLSPFLLMERNNVLVTPRKKAEFSTDSLITDLNVILRFDKGQQRNSQALSQTNMQLAMPATAALIRYLNLVEDRGSADQFTLEEIERSRYLRLDAAAIKALNVEPRPDAPTFGNAATSSILGLLDKCRTAQGRRLLAQWIRQPLKDLALIKERHEVVGTFLDNSALSTELSEDFLRRVPDLQQLAKKLAKKKAGLYECYKIYQCMTNLPGLIEKLNSVSDNAAVKTMLLDPLKEYLEEMDKFQQMAEQTIDLDAADKGDFLVKPEFDDELKELKSVMDSNEAKMKSLLSRAADDLGMEAGKSIKLETTPQYGYHFRITLKEEKSLRNNKSYTILDSIKGGVRFRNKKLEDLNDVYATAYDSYTSQQKNIVAEIVNTAGGYVPTIKMIAGVIATLDVLNSFAMAAATALTTYVRPEMLPSEEQVLHLVQARHPCLEMQEGVNYIANDVHFTKDDRFHIVTGPNMGGKSTYIRSIGVTALMAHIGSFVPCTKATISVLDSILARIGADDSQIKGLSTFMAEMVETSAIIRTATVNSLVIIDELGRGTSTYDGCGIAWAIAEHLAKEVKAYCLFATHFHEITRLAEDVSTASNYHVTAMVGDKLTLLYKVKPGICDQSFGIHVAKMADFPEEVIEFAKQKQTELEDLQGIVFEGSDDPEKKKEIINNGEQIIREFMNKCKDFEESLSEEELMKKVTDLRDEILAKNNPYIKSLLGVS

SEQ ID NO: 22848 - DNA, 2775 bp, Magnaporthe grisea 70-15
  CDS (1)..(2775)
atgtcttcacggccagagctcaaggtcgacgacgagcacggtttcattcgcttcttcaagtcactgccagccgcccacaaggacacaataaggatcttcttccgaggagactactacacagcccacggcgaagatgccaacctgatcgctcgcaccgtatacaaaagcacttcggtggtgcggcaacttggccgcagtgatcacactggattgtcatctgtcacgctttccataacagtattcaagcaattcctccgagatgccctctacaaactcggcaagagggtagaaatctacgaaagcgccaacgggcggatgaactggaaggtcaccaagcaagcctcgccaggaaacctgcaagatgttgaggatgagctcggccaaaccgactcggcacccatgattttggctgtcaagatctcatccaaggcatcggaggctcggaatgttggtgtttgctttgccgacgcaagcgtgagagagttgggcgtgagcgagttcctcgacaatgatctcttctccaactttgaggctctcctcatccagcttggagtcaaggagtgcttgattcagtatgataaggccgaggatctcaaggacccggacctggccaagctcaagcaaatcatcgacaactgcggcgtggccatgtcggaaaggcctatggctgattttggcacccgagatatagagcaggatctggcaagactgctcaaagatgagagatcggcaagcctgctaccccaaacagatctcaagcttgccatgggggctgcatcggccctaatcaagtacttgaacgtgcttcaagacccttcaaactttgggcagtaccagctcttccaacatgacctctcacaattcatgaagctcgatgctgctgcactaaaggcgttaaacctcacaccaggtgcgcgtgatgggtcaaaaacgatgagtctgtatgggctattgaatcattgcaagaccccggttggcagccggctgttggcacagtggctcaagcaaccactgatgagcaaggatgaaatcgagggtcggcagcaacttgttgaggctttcatgaacgacacagaacttcgacagaccatgcaagaggagcacctgcgctccattccggacctatacagactggcgaagcgtttccagaggaagaaggcaaatcttgaggacgttgttagggcttaccaagtggttatccggcttccaggttttattggaaccctggagggtgtcatggatgaagcctaccgggatcctttggatgtcgcctataccacaaaactgcgggagctttcggacagtctagttcgcttgcaggagatggtggagacgacagtcgacttggatgcactggaaaaccatgagttcatcattaagcttgaattcgacgatggactgcgcataatccgaaagaagctggacagaatacggactgagatggacagggaattttccaaggcagcggatgacctcggccaggaaaaagagaagaagatcttcctcgaaaaccacaaggttcatggcttctgtatgaggctgaccaggacagaagccggctgtatccgcaataattctggataccaggagtgctcgacgcagaagaacggagtatacttcaccactaagcatctccagtcactacggcgagagtttgaccaactttctcaaagctacaaccgaacacaatccagtctcgtcaacgaggttgtgagtgttgccgcatcttatgcgcctctgctcgagaacctcgccggcatcctggcacacctggatgttatcgtctcgttcgcgcattgctctatgcacgccccgatctcatacgtccgcccgaagatccacccccgtggtcagggcaggactctactgcgcgaggcccgccacccatgtcttgaggtgcaagacgacgtgcagttcatcaccaatgacgtagagcttgaccgctcaggctcatcattccttatcattactggtcccaatatgggtggcaagtcgacatatatccgacagatcggcgtcatcgccctcatggcacagattggatgctttgtgccctgctcagaagccgagttgaccatctttgatgccatcctggcccgtgtcggcgcgagcgactcgcagctcaagggcgtgtccaccttcatggctgagatgctcgagacggccaatatcctcaagtcggccacggccgagtccctcatcatcatcgatgagctgggccgtggtacctcgacctatgacggcttcggtctcgcctgggccatctctgaacatattgtcgtcgagattggctgctcggcgctctttgccacacacttccacgagctgacggcgctggcggagcagcacaagcaggttgctaatctccacgtcactgcccacatcagcggcacaggagacgacgcgaaggcggatgaaaagcgtgaggtcacgttgctctacaaggtggagcccggtatttgcgaccagagctttggtattcatgttgcggaactcgtcaggttccccgacaaggtcgttcgcatggccaagaggaaggcagacgagctcgaagacttcaccaccaagcacaatgacaacctcggcttgcagtacagcaaggatgacgtcgagcaggggagtgcccggctcaaggagattctggttcaatggaaggaagaggtcaaggctggcgacatgagccgagaagagatggtcgcgaagatgaaggctctcgtggcggcagacaccaagcttttggagaacccgtttttccagtcgatcaaggcgctgtaa

SEQ ID NO: 22849 - protein, 924 aa, Magnaporthe grisea 70-15
MSSRPELKVDDEHGFIRFFKSLPAAHKDTIRIFFRGDYYTAHGEDANLIARTVYKSTSVVRQLGRSDHTGLSSVTLSITVFKQFLRDALYKLGKRVEIYESANGRMNWKVTKQASPGNLQDVEDELGQTDSAPMILAVKISSKASEARNVGVCFADASVRELGVSEFLDNDLFSNFEALLIQLGVKECLIQYDKAEDLKDPDLAKLKQIIDNCGVAMSERPMADFGTRDIEQDLARLLKDERSASLLPQTDLKLAMGAASALIKYLNVLQDPSNFGQYQLFQHDLSQFMKLDAAALKALNLTPGARDGSKTMSLYGLLNHCKTPVGSRLLAQWLKQPLMSKDEIEGRQQLVEAFMNDTELRQTMQEEHLRSIPDLYRLAKRFQRKKANLEDVVRAYQVVIRLPGFIGTLEGVMDEAYRDPLDVAYTTKLRELSDSLVRLQEMVETTVDLDALENHEFIIKLEFDDGLRIIRKKLDRIRTEMDREFSKAADDLGQEKEKKIFLENHKVHGFCMRLTRTEAGCIRNNSGYQECSTQKNGVYFTTKHLQSLRREFDQLSQSYNRTQSSLVNEVVSVAASYAPLLENLAGILAHLDVIVSFAHCSMHAPISYVRPKIHPRGQGRTLLREARHPCLEVQDDVQFITNDVELDRSGSSFLIITGPNMGGKSTYIRQIGVIALMAQIGCFVPCSEAELTIFDAILARVGASDSQLKGVSTFMAEMLETANILKSATAESLIIIDELGRGTSTYDGFGLAWAISEHIVVEIGCSALFATHFHELTALAEQHKQVANLHVTAHISGTGDDAKADEKREVTLLYKVEPGICDQSFGIHVAELVRFPDKVVRMAKRKADELEDFTTKHNDNLGLQYSKDDVEQGSARLKEILVQWKEEVKAGDMSREEMVAKMKALVAADTKLLENPFFQSIKAL

SEQ ID NO: 22850 - DNA, 2793 bp, Gibberella zeae PH-1
  CDS (1)..(2793)
atggcttcacgaccagaattaaagctcgacgacgagggcggtttcattcgcttcttcaagtctttaccagatgttaaccaagacacaatccgcatctttgatcgaggcgattggtacacttcccatggccaagatgccaactatatcgcaaagactgtctacaagacaacttctgttgtccgacagctcggccgaaatgaccataccgggctgccttccgtcaccatgaccatgaccgtattccgacaatttcttcgagaagccctactcaagctcggcaagcgaatcgagatttggcagagttcttccggtcgcatgaactggaagtgcatcaagcaggcgtcaccaggcaacctccaagacgtggaggacgacttaggaggtcagatcgagtctgcacctatgattctcgcagtcaagatctcagcaaaggcttctgaagctcgaaatgtcggtgtctgctttgcagatgccagcgtgcgagagttgggcgtcagcgagttcctcgacaacgacttgtattccaactttgaggcactccttatccagctcggtgtccgtgagtgcttgatacaagttgacaagggcgataagaaggatgaaaatgagaaggatcctgagttggccaagataaaaaagatcatcgacaactgcggcgtcgccattgcagagagaccagctggcgactttggcattcgagatattgaacaggacttggcacgcctactcaaggacgaacgatccgcatctcttctcccacagacagatctcaagctggccatgggatctgcagcatctctcatcaagtacctcggggttctgcaagacccttccaactttggccagtaccaactgtaccagcatgacctggctcattttatgaagttggatgcagctgccctcaaagctctcaacctcatgccagggccccgcgatgggtccaagacgatgagcatctttggcgttcttaaccactgcaagacaccagtgggcagtcgacttttggcacaatggttgaagcagcctttgatgagcaagaatgagattgaaaagcgtcagcagttggtggaagcgttctatgtcgacaccgaacttcgccaaacattacaggaggaacacctgcgatccatccccgatctttacagactctcaaagaggttccaacgaggcaaggccaacctggaagatgttgtccgcgcataccaagtcgtcattcgcttacctggcttcattggtacttttgagggtgtcatggatgaaaactacaaggaccccctcgacgaagcttacaccaccaagcttcgcgacctttctgatagcttgggcaagctccaggatatggtggagcagacagtcgatctagatgctcttgatcgccacgaatacatcatcaaggccgacttcgacaagagcttacgtatcatccgcaagaagcttgatcagctcgacaaggatatccgagccgagttcacagcttcagccaaggacctaggtcaagaagccgacaagaagattttccttgagaccagccacaaggtccatggagtgtgcatgcgtctcacacgacaagaggctggctgcatccgaaacaactccaagtaccaggagtgttcgacccagaagaacggcgtctacttcacaaccaagaagttgcaagcctatcgacgcgagtacgaccagctttctcaaaattacaacaggacgcaaagtagtcttgtccatgaggttgttcaggtcgcttcgtcttactgccctgtcttagaacgtcttgccggtatccttgctcatcttgatgtgattgtctctcttgctcacgcatctgttcatgcccctgagtcgtatgtccgacccaagattcacgcccgtggcgagggccagacgattcttcgcgaagctcgccacccctgcatggagcttcaggatgatgttcagttcataaccaatgatgttgagctcacacgcgacaagtcgtcgttccttattatcactggtcccaacatgggcggtaagtcgacatacattcgacaaacgggcgtcatcgctcttatggcccaggttggatgcttcgtgccatgtgcagaggcagagttgactatctacgactcgattctggcacgtgtgggtgctagcgactcgcagctcaagggtgtctctaccttcatggccgagatgctcgagacagccaatatcctcaagtcagctacgtcagagtccttgatcgttattgatgagctaggacgtggtacgtcgacttacgacggatttggtttggcatgggccatttcggagcacattgttaaggaaattggctgctccgccatgtttgccactcacttccacgaactcacagctcttgccgaccagtacccccaagtgcaaaaccttcatgtaacagcgcacatcggcggcactgatgcagcagcttcggaagcggatgccaaacgcgaagtgacgttgctgtacaaggtggcaccgggtgtgtgcgaccagagtttcggcatccacgttgcagagttggtccgcttcccggacaaggttgtccgcatggccaagcgcaaggcagacgagcttgaggactttaccaccaagcacgaggatctcggcctgcagtacagcaagcaggatatggaggatggcagtgccatgctgaagcgagtcctggtggagtggaaggacaaggtgaaggctggagatatgagccgagaggagcaagtagctgccttgaaagagcttgttggggcaaacccagagcttcaggcaaaccctttctttcaatctgtgaaagctctatag

SEQ ID NO: 22851 - protein, 930 aa, Gibberella zeae PH-1
MASRPELKLDDEGGFIRFFKSLPDVNQDTIRIFDRGDWYTSHGQDANYIAKTVYKTTSVVRQLGRNDHTGLPSVTMTMTVFRQFLREALLKLGKRIEIWQSSSGRMNWKCIKQASPGNLQDVEDDLGGQIESAPMILAVKISAKASEARNVGVCFADASVRELGVSEFLDNDLYSNFEALLIQLGVRECLIQVDKGDKKDENEKDPELAKIKKIIDNCGVAIAERPAGDFGIRDIEQDLARLLKDERSASLLPQTDLKLAMGSAASLIKYLGVLQDPSNFGQYQLYQHDLAHFMKLDAAALKALNLMPGPRDGSKTMSIFGVLNHCKTPVGSRLLAQWLKQPLMSKNEIEKRQQLVEAFYVDTELRQTLQEEHLRSIPDLYRLSKRFQRGKANLEDVVRAYQVVIRLPGFIGTFEGVMDENYKDPLDEAYTTKLRDLSDSLGKLQDMVEQTVDLDALDRHEYIIKADFDKSLRIIRKKLDQLDKDIRAEFTASAKDLGQEADKKIFLETSHKVHGVCMRLTRQEAGCIRNNSKYQECSTQKNGVYFTTKKLQAYRREYDQLSQNYNRTQSSLVHEVVQVASSYCPVLERLAGILAHLDVIVSLAHASVHAPESYVRPKIHARGEGQTILREARHPCMELQDDVQFITNDVELTRDKSSFLIITGPNMGGKSTYIRQTGVIALMAQVGCFVPCAEAELTIYDSILARVGASDSQLKGVSTFMAEMLETANILKSATSESLIVIDELGRGTSTYDGFGLAWAISEHIVKEIGCSAMFATHFHELTALADQYPQVQNLHVTAHIGGTDAAASEADAKREVTLLYKVAPGVCDQSFGIHVAELVRFPDKVVRMAKRKADELEDFTTKHEDLGLQYSKQDMEDGSAMLKRVLVEWKDKVKAGDMSREEQVAALKELVGANPELQANPFFQSVKAL

SEQ ID NO: 22852 - DNA, 2874 bp, Candida glabrata CBS 138
  CDS (1)..(2874)
atggcatctaatagacctgaattaaagttttcagatatatctgaagaacgtggattttataaaagatacgttaagttacctgagaagccttctggtacggtaaggattgttgataaaggtgattactatactgctgttggtgatgatgcggtgttcattgcagaaaatgtgtatcacacaatgtcagttctaaaggattgtcacgtggatccagcagttgctaaacaatttaatgaaccaaccaaatatgtgacaatgtcgctgcagatcgtggctagtttgttgaaactttgccttctagacgttggtaataaagttgaaatctatgacagaagctggaaattaatcaaaagcgcttccccaggtaatatagaacaggtctccgatcttttaaatttgaatattgatgcgtccattgttattgcaagtttgaagatacaacaaaatccaaaagatgcccatgttatattggggttgacattcattgatacaagtaactacaaaattggcatgatggatattatagacaatgaggcttactcgaacttggagagctttttaatacagttaggaataagagaatgtctagtacctgatttatctcaaaatggttccaccaatccagagttaaaaaaaatcacaaacgtcattgataggtgtggttcggtggttaccatagtccctaattctgaattttctaataaagatgtcgaggtagacttggcaaaactattaggcaacgatttaactttaacacttcctcagaatgtatcacaactggccttgggtgcttgtaatgcgctattaaactatctgcagctattaagtgaacaagagatgctaggtaaatatgagcttatccaacattctttagaatccataatgaaactagactcctcagcgatcaaagcattgaatctttttccacagaataatgccactttctttacgccaatgcaatcaggtacagttggatcaaatggtggcacaaaggttgcctctttgttccagttactcaataactgcaagacaaattctggtgttagattattaaatgaatggttaaagcaacctttgacagattttagtggtattcaagttcgtcacaatctcgttgaatttttgattgatcaattagagttaaggcaaatattgcaaaccgaatatttacctggggttcctgatattcgtaggttggttaaaaaacttaataaaaatggtactttagaagatgttctcaaagtgtatcagtttagtttgaaggtcccagatatcattaatattattgagtcattcctggaagatgatatcacaacaacagatatcaaagaattggtacgtaaaacttggtgtgatccattaaaagaatttatggaacctttaaaaaaatttgatgagatggttcaaacaaccgtcgatttggatgcttatgaagagaataatgaatttatgatccgtgtggagtttaatgaagaactggctaaagtacgtgaacaactaacagccatgagagatgagataaatgcaatccatctagaagctgcagaagatttaggatttgatccaaacaaaaagttaaaactagaaaatcatcacattcacggttggtgtatgagattgaccaggaatgatgcaaaagcactacgaaaccataagcagtatattgagctctcaacggttaaggcaggtatatttttcagcacaagaaaaatgaaagaaattgctcaagagactgttgtactacaaaaggattatgagagattgcaatcatctttggtcaaagagattgtttcaattacattaacatatacccctatatttgaaaagctttcgctagttattgcgcacttggatgtattatgttcatttgctcatgcctcatcatatgcgccaatcccctacgttaggcctacgatgcatccattaagttcagaccgcagaacaaaactaatgaattccaggcatccagtactagaagttcaggatgatgttacatttattgcaaatgatgtagatatggctaaagatgttagtgaatttcaaatcatcaccggtccaaatatgggaggtaaatcaacatatatcaggcaggtgggtgtcatcactctaatggcacaaattggatgttttgtgccatgtgacaatgctgaaatatcaattgtggatgctatattatgtagagtcggagcgggcgattctcagctaaagggtgtttctacatttatggttgaaatgttagagactgcctcaattttaaagaatgcgacatccaactctctcattattgttgatgagcttggaagaggtactagtacttacgatggttttggacttgcatgggcgatagctgaacatattgcaaaagaaattagatgttttgcattgtttgcaacacattttcatgaattgacaaatttatctgaacaacttccaaatgttaaaaacatgcatgtaatagcgcatatcgatgagtcagagaaagcattgaatagtaacgacattactttgttatataaagtggagccaggtatttctgatcgctcttttggtattcatgttgctgaggttgtccaattccctaaaaaaattgtaagtatggcaaagagaaaagccaatgaactggaggaacttaaaaatactagtaatgatctgaaaagagcaaaactgaacccacaagaaattgcagaaggcaatctaaaactgaagtgcatgcttaaagaatggaagcaatcagttgagaataagggattgttagatgttgaaaaattgtcggaagaggaaactcaattagcaattgaatcgttgttgaaaaaactatgtgatgcagaccattctgacgatagatacttttcttacctaaaggaattattataa

SEQ ID NO: 22853 - protein, 957 aa, Candida glabrata CBS 138
MASNRPELKFSDISEERGFYKRYVKLPEKPSGTVRIVDKGDYYTAVGDDAVFIAENVYHTMSVLKDCHVDPAVAKQFNEPTKYVTMSLQIVASLLKLCLLDVGNKVEIYDRSWKLIKSASPGNIEQVSDLLNLNIDASIVIASLKIQQNPKDAHVILGLTFIDTSNYKIGMMDIIDNEAYSNLESFLIQLGIRECLVPDLSQNGSTNPELKKITNVIDRCGSVVTIVPNSEFSNKDVEVDLAKLLGNDLTLTLPQNVSQLALGACNALLNYLQLLSEQEMLGKYELIQHSLESIMKLDSSAIKALNLFPQNNATFFTPMQSGTVGSNGGTKVASLFQLLNNCKTNSGVRLLNEWLKQPLTDFSGIQVRHNLVEFLIDQLELRQILQTEYLPGVPDIRRLVKKLNKNGTLEDVLKVYQFSLKVPDIINIIESFLEDDITTTDIKELVRKTWCDPLKEFMEPLKKFDEMVQTTVDLDAYEENNEFMIRVEFNEELAKVREQLTAMRDEINAIHLEAAEDLGFDPNKKLKLENHHIHGWCMRLTRNDAKALRNHKQYIELSTVKAGIFFSTRKMKEIAQETVVLQKDYERLQSSLVKEIVSITLTYTPIFEKLSLVIAHLDVLCSFAHASSYAPIPYVRPTMHPLSSDRRTKLMNSRHPVLEVQDDVTFIANDVDMAKDVSEFQIITGPNMGGKSTYIRQVGVITLMAQIGCFVPCDNAEISIVDAILCRVGAGDSQLKGVSTFMVEMLETASILKNATSNSLIIVDELGRGTSTYDGFGLAWAIAEHIAKEIRCFALFATHFHELTNLSEQLPNVKNMHVIAHIDESEKALNSNDITLLYKVEPGISDRSFGIHVAEVVQFPKKIVSMAKRKANELEELKNTSNDLKRAKLNPQEIAEGNLKLKCMLKEWKQSVENKGLLDVEKLSEEETQLAIESLLKKLCDADHSDDRYFSYLKELL

SEQ ID NO: 22854 - DNA, 2871 bp, Kluyveromyces lactis NRRL Y-1140
  CDS (1)..(2871)
atgtcatcaagacctgatctaaagttttctgatattgcagaggagcgaggattctacaagaggtttttacaacttcctcaaaggagtcagaatactattagattagttgacaaatccgattattacattgtggttggtgatgatgcgttatttgtggcagatcaagtataccatacatcatcagtattgaaagattgcaagatcgatcctagcacacttcgccaatttgatttacaggaaccattgaaatatgtgaccatgtctattcaaatagtgggcaatcttttgaagacatcactattggaactaggcaaaaagatcgaaatctacgatagaaactggaaacttttgaaaacagcttcaccaggtaacctcgaacaagtagatgatttaatagtagggtcagtggaaacgaacatcgttttagcaagtttgaaattaaattttaatggtactgctgcatcaaattattgcacaattggtgtttcatttgttgacaacacgaactacagaattgggttatttgatctactagacaacgaggttttctctaacttagaaagttgtttaattcaacttggtataaaggaatgtctaattccagatttgcgtgataatcctagtatggcaaatgatttaaagaagatattgagcgtcattgatcgctgttcttgtgtcgcatcctttgttaagcctagcgactttaacggaaaagacgttgaagccgatttagcaaagctttgcggtgatgaattatccttatcagtgtcaaagttttctgcaaactgtctaggtgcatgtagtgtcttattgaactacctaaacataatgaataacgaggccaacgttggaaactttgaagttgtggatcactctctttcgcaatttgtaaagttagatgcttctgcaatcaaagcactaaatgtgttccccacaggctcacagggtaatactgctcttttaagcgtcggctctcctcaaaaatgttcaagtcttttccagttgttgaatagatgtaaaactaattccggcgtaaggttgttgaacgagtggctgaagcaacccttgaccgacatcgaccagattaccaaaaggcatgatctagttgaatttttcatggatcagttagaattaagatcttctctacaagaagaatgcttacctagtgttccagatatccgcagactaacaaagaaacttcaaaaaaatgggaacttagaagatgttctcaagatttatcagtttgcacaaatggttccagttatttcagatctgttgaaacagaagaccgaagaggttgattctaatgatttaatgatactcgtgaaagaggttttactcgatccaatgttagaaaatgcaaatcctcttgagaaattgaaagagttggtagagaccactgttgatctagaagcttacgaggaaacaaatgaattcatgatcaaagtcgaatttaatgaacaattatctatcattagaactcatcttgatgaattaaaagatgctataagaacaatacacttagacactgctgatgatttgggcttcgatccagaaaagaaattgaaactagaaaaccaccatttacatggatggtgtatgcgattaacacgtaatgatgcaaaggccctacgtcaacataagaaatacattgagttgtccactgtaaaggctggtatattcttttcaacaaaagaactaaaaaatattgccgaagagacctcagaactacaaaaaaaatatgaacaacagcaagcatcgttagtcaaagaaattgtttcgattactctaagctatacaccggttttagagaagctttctgttgtaactgctcaactagacattctttgttcattcgcgcaagtatcttcatatgcgccaattccctatgttcgtccgaagatgtatccattgaacgatcaaaacagaacaacagaacttatagcatctcgccatcccattgtagagatgcaagacgatgttaccttcatttcaaatgatgtaaaattagtacagggtgattctgaattcatagtcattactggtcctaatatgggtggtaaatccacttacatcaggcagattggtgtaatatgtctaatggctcaaattggatgctttgttccatgcgacgaggcaaaaattgctgctgttgatgccatactatgccgtgttggagctggtgattctcaattgaagggtgtctccaccttcatgatggaaatgttagaaacagcgtcaatattgaagaatgccactcacaactcactagttatcgttgatgaattaggacgtggtacaagcacatatgatggttttggactagcatggtctatttccgaacacattgccaccaacatcaattgtttcacattgtttgctacacatttccatgaactcacgacgttggctgacaagctagacaatgtttctaacatgcacgtcgttgctcatatcgaggataatggatctcataattctgatgatataacgctactatacaaagtcgaggctggtagttcagaccagtccttcggtatacatgtcgccgaagtggtccaattcccaagcaaaattgttaatatggccaaacgtaaggctgccgaattagaagatttgaagaaagataatgattctctcaaaaaggcaaagctttcacctgaggatatagtgctgggaacagaatcactcaagaagtcgttaaaagtctggtgcaaagagttgaaaaagaataaccttattgataggctagatgacccgtccgtacaagaagaatgtgtcgataaattaaaacagcaaattgacaatttggcacgagaagaagatacgacatctctgtttgtagattgggttcgtgacacactattatga

SEQ ID NO: 22855 - protein, 956 aa, Kluyveromyces lactis NRRL Y-1140
MSSRPDLKFSDIAEERGFYKRFLQLPQRSQNTIRLVDKSDYYIVVGDDALFVADQVYHTSSVLKDCKIDPSTLRQFDLQEPLKYVTMSIQIVGNLLKTSLLELGKKIEIYDRNWKLLKTASPGNLEQVDDLIVGSVETNIVLASLKLNFNGTAASNYCTIGVSFVDNTNYRIGLFDLLDNEVFSNLESCLIQLGIKECLIPDLRDNPSMANDLKKILSVIDRCSCVASFVKPSDFNGKDVEADLAKLCGDELSLSVSKFSANCLGACSVLLNYLNIMNNEANVGNFEVVDHSLSQFVKLDASAIKALNVFPTGSQGNTALLSVGSPQKCSSLFQLLNRCKTNSGVRLLNEWLKQPLTDIDQITKRHDLVEFFMDQLELRSSLQEECLPSVPDIRRLTKKLQKNGNLEDVLKIYQFAQMVPVISDLLKQKTEEVDSNDLMILVKEVLLDPMLENANPLEKLKELVETTVDLEAYEETNEFMIKVEFNEQLSIIRTHLDELKDAIRTIHLDTADDLGFDPEKKLKLENHHLHGWCMRLTRNDAKALRQHKKYIELSTVKAGIFFSTKELKNIAEETSELQKKYEQQQASLVKEIVSITLSYTPVLEKLSVVTAQLDILCSFAQVSSYAPIPYVRPKMYPLNDQNRTTELIASRHPIVEMQDDVTFISNDVKLVQGDSEFIVITGPNMGGKSTYIRQIGVICLMAQIGCFVPCDEAKIAAVDAILCRVGAGDSQLKGVSTFMMEMLETASILKNATHNSLVIVDELGRGTSTYDGFGLAWSISEHIATNINCFTLFATHFHELTTLADKLDNVSNMHVVAHIEDNGSHNSDDITLLYKVEAGSSDQSFGIHVAEVVQFPSKIVNMAKRKAAELEDLKKDNDSLKKAKLSPEDIVLGTESLKKSLKVWCKELKKNNLIDRLDDPSVQEECVDKLKQQIDNLAREEDTTSLFVDWVRDTLL

SEQ ID NO: 22856 - DNA, 2664 bp, Yarrowia lipolytica CLIB122
  CDS (1)..(2664)
atgtcgcgaccggaattcaacatcgacaagaccgaggagcggtccttgacggccttctacaaggggctcgaggagcgagaggagccctgcgataatggaggcaccattcgagtgtttgagcgacctgacggatacgttttgtttggagtggacgctcgatacgtggcagagcgagtctaccgaacgctcacagccctcaaaaccaccgatctgaagcaggagtacgtcactattgccacttctggcttccagaactttctgcgagacgccctgctcaactatggactcaaggtcgagatctacggcaaagtcgacggcaagtggcgtatgacatcctggggaagtccgggaaacctgtctcaggtcgaggatcttatgtccggccagctcaacaccaaccccgtggcaattgctgtcaagactcagggcgacactgttggtctggcgtttgtggatctcaacaaccacgtgcttggcgtgtctgagtttgaagataacgagtgcatgagcaacctagagtcacttctgattcaattggacgtaaaggagtgcatcacatccgacgacaaggtcaaggctgtcattgaacgggcgggggtgtcccgtactgatgcaaagtcttcctggttcaatgccaacgaggtggagagcaacctagacaacctgctcgccgagaaactgcaacctacatctcccgaactcagcctcaagaacgctctgggttctctagcctgtctcatcaagtacctgtctttgacctccgacgctagcaaccatggtgccttcactatcaaaacacacactctgtcgcagtacatgaagctcgacgcgtctgcactcaaggctctgcatctcatgccttccgtgaaggattctaccaagtcttcttctctctacggtcttctcaacgtctgtaagactgctactggctctagaactctcgcccagtgggtcaagcagcctcttatggacaaacaggagattgagaagcggcacgagattgtggagatttttacgagcagcgacctgctcgagtctatcagacagaatctctctacgattcctgacctcaacagactgacccgaaagttcatgcgacaggctgcttctctggaggatgtggttcgagtctatcagatggtggccactcttcctcacattgcttctggcctgcgagctgctcagtctgaactgctcgaagaaactttcctgacacaactggactctatcattactggactgcaaaagtttgaggagcttgttgagtccaccattgatctcaactcgattgactcacacgagttcatgatcaatcctgacatggaggaaggtctgaatgacacaaaggcccgtctggaggcctgccaagaccgaatgaaggacatttttgcctctgtttccgacgagctcggtatggagatggacaagaagctcaagtttgagaaccatcacgtccacggctggagtttccgactcacgcgaaccgacgcctcatgtctgcgaggcctgtccaagttcaaggagcttgccactctcaaggccggtatcatttttaccaccaacgagctgcgaagcctctccaacgagttcacagatctatctcaggagtacaagaagatccaggctcgactggccaaggagatcatcgagattgcctgctcgtactgtcctctgttggagcgatgctcggctgttctgggccagctggacgtgctcacgtcttttgcttctgtggccattgagcgaaactacatccggcctactgtcgttgactctgacgacagaaagtgcattctcacagcctcccgacatccctgtctcgaggctcaagatacattcattcctaacgacgtgcatctcggccaggacagcaagaagttcctggttatcactggccccaatatgggcggtaagagtacttttatccgtcaagtgggtgtaattgtgctcatgaaccagattggttgcttcgtgccctgtgacagggccgagatttctatctttgactgcattctggcacgtgtgggtgcaggagactcgcagctcaagggtctgtctaccttcatgagtgagatgctggagacctctgctattctcaagagtgccacagacaagtctctgatcatcattgacgagttgggccgaggtacgtctacgtatgacggatttggactcgcctgggccatttccgaacacattgtcaagatgaactgcttcagcatgttcgccacacacttccacgagcttactgagctggcgaaggagcaccctgatcgtgtggacaacctgcatgttgctgctcacgttggagagtcatctgatgacatcactctgctctataaggtcgttcctggcgtatcctccaagtcctatggtactcacgtagctgaggtggtcaagttccctaccaaggtggtcaacatggcaaagagaaaggctcaggagctggatgacgtcaattcaggcacccagggcaaaaaatacgcttctgaggatctggttgccggaaataagcttcttaaggagattttgaccgagtggaagtcgcagatcaagggtgacgaggtggatggggcctctcagctgctcaagactgtggtcgataagtataagacacagatggagcagaatgtgttcatcaatgatgcacttgccagtttatag

SEQ ID NO: 22857 - protein, 887 aa, Yarrowia lipolytica CLIB122
MSRPEFNIDKTEERSLTAFYKGLEEREEPCDNGGTIRVFERPDGYVLFGVDARYVAERVYRTLTALKTTDLKQEYVTIATSGFQNFLRDALLNYGLKVEIYGKVDGKWRMTSWGSPGNLSQVEDLMSGQLNTNPVAIAVKTQGDTVGLAFVDLNNHVLGVSEFEDNECMSNLESLLIQLDVKECITSDDKVKAVIERAGVSRTDAKSSWFNANEVESNLDNLLAEKLQPTSPELSLKNALGSLACLIKYLSLTSDASNHGAFTIKTHTLSQYMKLDASALKALHLMPSVKDSTKSSSLYGLLNVCKTATGSRTLAQWVKQPLMDKQEIEKRHEIVEIFTSSDLLESIRQNLSTIPDLNRLTRKFMRQAASLEDVVRVYQMVATLPHIASGLRAAQSELLEETFLTQLDSIITGLQKFEELVESTIDLNSIDSHEFMINPDMEEGLNDTKARLEACQDRMKDIFASVSDELGMEMDKKLKFENHHVHGWSFRLTRTDASCLRGLSKFKELATLKAGIIFTTNELRSLSNEFTDLSQEYKKIQARLAKEIIEIACSYCPLLERCSAVLGQLDVLTSFASVAIERNYIRPTVVDSDDRKCILTASRHPCLEAQDTFIPNDVHLGQDSKKFLVITGPNMGGKSTFIRQVGVIVLMNQIGCFVPCDRAEISIFDCILARVGAGDSQLKGLSTFMSEMLETSAILKSATDKSLIIIDELGRGTSTYDGFGLAWAISEHIVKMNCFSMFATHFHELTELAKEHPDRVDNLHVAAHVGESSDDITLLYKVVPGVSSKSYGTHVAEVVKFPTKVVNMAKRKAQELDDVNSGTQGKKYASEDLVAGNKLLKEILTEWKSQIKGDEVDGASQLLKTVVDKYKTQMEQNVFINDALASL

SEQ ID NO: 22858 - DNA, 2622 bp, Candida albicans SC5314
  CDS (1)..(2622): transl_table=12
atgtctagtaccaaaatagatctcaaattcagtgacttggctgatgaaagactgtatttcaagaaatattcccaacttccaccaaaggagagcaccacaattagatttattgatcacaacaaccatgactattttactgcccttgggtctgatgccgatttgattgcagagaaaatctacagaacacagtctgtcattaaacaccacaaccagacaaagtatgtgactatttccccacaaaactttaaggagctgttgaattattgtttgcaaaatcattttaaagtcgaagtttatcatagcaaaactttccagttgatctcgtctggtaccgcaggaaacttggatagtctttctgaagaattcgatattgattttgattttagagatgggtccagctcatctattgctgctattaagcttggaaacaaagtcggtgtttgtgttattgctgattccattgtgcacttgtctgaattcgaggacaacgaattgtactcaaacttggaaagtttgttgattcaattaggggtcaaggaagttgtcatcccggctaacgtcgacaacaaaaagtttttccaaatgttagagaaattaaacgatttagtggttagtgcagccaaatcattccccaaggacaacgagcaggatataagtaaattattggatactgagaatttagagctttctttagctgcaaaaggtataaactcacttgactatgcattggctttgtcatgctgcggtgctttgattgactacttggatttgttgaacggtgacaaaacttttgaaataaacaagtacaacttgtcgacatttatgaaattggattcctccactatgaaagcgttgaacattttaccaaatggaacacaaaaggctattacgtctatatttgagttgttcaaatgcaagactttaggtggttctagattattgtcacagtggttgaagcaacccttgatcgacttgtcgttgatcgaggaacgtcaagaattggtaaaggcaatgattgatgacactagtttgagggttgaaatccaggagttcttgtcaaaggtgccagacattaatcgattgctcaaaaaaatcggtcttggtgttaaacggtcgggtgctgagaacaaaaaattgaacgaagtggtcaatttgtaccagttggtgctgttgcttcccaatttgactgaaatcctaaccatcgactactatgcgaaacccctcaaaaaggacgaacaagctttgtcaaagttttgcgaattagtcgaaaccactattgaccttgataccctgtttgacaaagactacaaaataaagcccgacttcgacccatccttgtcggaaatttccaataacatggaatcagcattcaaggccatcaacgacctttacttagaagctggtgatgatttgaatctcgacacagcaagtaacaaattaaagttggagcaacatcaaacccatggatggtgcatgagagtaactagaaacgattcaagagtgttaagaggtaaaagccaatataaggaactccaaacagtaaagtccggtgttttctttaccaccatcgaaatgaagagactttcacaagagtacaccaaggcttacgacgagtacaacgtcaagcaatccgaagttatcaaagaaatcttgtcgcttacattgacatatgaaccagtactccaatccctttcttcaactttggcacacttggatgtcattacctgttttgctactactgcaatgctcaactcatacacccaacccaaattgtttccctttgagtctagccgcaagatcaatttgatagagtcgagacaccccctccttgaggtgcaagatgatataaactttatttccaacgacgtaaaaatggacgacaaacactttgccattattacaggtccaaacatgggaggtaaatccacctatattagacaaatcggtaccattgctttgatggcacaggtagggtcatttatacctgccaatgacggtgcagaattaccaattttcgatgctatattatcacgtgtgggtgctggtgactcgcaattaaaaggtttgtccacatttatgattgaaatgttagagacttcgtcgattttggctactgcaactgccaactcattgattataattgacgagttgggtagaggaacatctacttacgacggattcggtctagcatgggcaatatctgaagaattgatcaaaagaaagtgttttgcagtgtttgccacccatttccatgaattgagccagttgtcagaaaagtatgatggagttgaaaatttgaatttaatggcagaacagacgaacgaagatataaccttgatttataaggttgggccaggtatttcaaatacatcttttggtatttctgtcgcagaaaagttacatatgccagagaagattgtcaatatggctaaaagaaaagtcgaagaattaagcgaagagccaccaattaaaaagcaatgttctgaaactgaagtcagagagggtatgagcagattacgagaaattctaaaagaatggagaaacaacccagaaatcaatattgctgactccttggctaaagagcctaacaagtttataaattatatagttgacactttatag

SEQ ID NO: 22859 - protein, 873 aa, Candida albicans SC5314
MSSTKIDLKFSDLADERSYFKKYSQLPPKESTTIRFIDHNNHDYFTALGSDADLIAEKIYRTQSVIKHHNQTKYVTISPQNFKESLNYCLQNHFKVEVYHSKTFQLISSGTAGNLDSLSEEFDIDFDFRDGSSSSIAAIKLGNKVGVCVIADSIVHLSEFEDNELYSNLESLLIQLGVKEVVIPANVDNKKFFQMLEKLNDLVVSAAKSFPKDNEQDISKLLDTENLELSLAAKGINSLDYALALSCCGALIDYLDLLNGDKTFEINKYNLSTFMKLDSSTMKALNILPNGTQKAITSIFELFKCKTLGGSRLLSQWLKQPLIDLSLIEERQELVKAMIDDTSLRVEIQEFLSKVPDINRLLKKIGLGVKRSGAENKKLNEVVNLYQLVSLLPNLTEILTIDYYAKPLKKDEQALSKFCELVETTIDLDTSFDKDYKIKPDFDPSLSEISNNMESAFKAINDLYLEAGDDLNLDTASNKLKLEQHQTHGWCMRVTRNDSRVLRGKSQYKELQTVKSGVFFTTIEMKRLSQEYTKAYDEYNVKQSEVIKEILSLTLTYEPVLQSLSSTLAHLDVITCFATTAMLNSYTQPKLFPFESSRKINLIESRHPLLEVQDDINFISNDVKMDDKHFAIITGPNMGGKSTYIRQIGTIALMAQVGSFIPANDGAELPIFDAILSRVGAGDSQLKGLSTFMIEMLETSSILATATANSLIIIDELGRGTSTYDGFGLAWAISEELIKRKCFAVFATHFHELSQLSEKYDGVENLNLMAEQTNEDITLIYKVGPGISNTSFGISVAEKLHMPEKIVNMAKRKVEELSEEPPIKKQCSETEVREGMSRLREILKEWRNNPEINIADSLAKEPNKFINYIVDTL

SEQ ID NO: 22860 - DNA, 2892 bp, Ustilago maydis 521
  CDS (1)..(2892)
atgtcaggcctcatgtatgatggtccgtcctcgtccgaaaagccagacctcggcttggacaatgccgctgaaagctctttctgtcagactttcaagtctatgcccaagccgacgccaggaaccttgcgtctcttcgaccgctccgacttctactcggcgcatggagatgatgctattctcatcgccaaccttgtcttcaagactcactcggcactcaagtatctcggcagcggcggcaaggacaacggcggcttgccttccatcactcttagtgtagcagccaccaaaaacttgctccgtgaagtcctcacctctcgtcagatgcgcgtcgagatctacggaaatgccggggccaagcgcaacaatcagtggtccatcgtcaagcaggcttctccaggtaacctgcagcaaatggaagacatgatctttgtcgatgccgacattgtcagctcccccatcgtcatggcgctcaaattgaccacccgagacggagtcaagaccgtcggtgctgccttcgccgacgccaccaacagagagctctgcgtgtctgaatatgcggaaaacgatctcttcagtaacacagagtcgctcatcattcagctcggtgtcaaggagtgcatcctgcccaaggacgacaaaggcgtcgacgccgatctcaaaaagctgcgcgaagtcatcgaacgttgcggcgtcgtcatgtttgacagcaaacgcgctgacttttccggtagaaacatcgatcaagacttgcgccgcttgcttaaggaagagtcttgcggtctaaatctcaccgagctcgacctcaagctcgccatggcggcggcatctgccctcatgtcgtacctcgccctgctcaccgacgagtccaactttggccagtacagtatccgcacccacgacctctcacaataccttcgcctcgacaactctgcgttgcgtgcactcaacctgttccctgagccaggtcagactggatccagcaagaacactagcatctatggccttctgaatcgctgtcgcaccggtcaaggccagcgcttgctcggccagtggctcaagcagccgcttgtcaacgtccacgctatcgagcaaaggcagaacttggtggagctattcgttaacgacaacagcacacgtcagctcatccaaaacgattatctcaagctcatgccggacatgcatcgcatcagcaagcgtttccaaaaagggatcgccacattggaggatgtcgtacgtgtctatcaggcaattctcagactacctggcttgattcagacgctcgctgatatggagacgccttcagaagctctttcagaattgctcaagaccagttatcttgatccttttgaggctcatcgggcagcactcaccaaattcaacgagctggtagaagctacgctcgaccttaccgagctttctcagcataactttgtcattaagcctgactttgacgacaatctgcgcgagatcaaggaagcgctcgatgacacccgtgacaagcttgacgagcagcaccgactagcaggcaaggaactccgcatggacacagagaagaagctgcatctggagaaccaccacgtgtacggttactgcttgcgggtcacgcgtacagacgcgggtcttgtacgcaacaagaagggctacatggacattgccacggtcaaaggcggactctatttcaccaacgaagctctgcgcgatctggccaatgactttaaagatttgtcggaacgctacagtcgttcgcaaagtggtctagtcaaagaggtcattcagatcgcctcgtcctactgccctcccctggagaagcttaacgtcgtgctcgcacacctcgatgtgattgtcagcttcgctcatgtatcggacagcgcacctgtcccgtatgtcaagccagtcgtgagcgagaaagggaccaacgccgacgttgatttgcgtgaggccagacatccctgcctcgaagtgatggacgacatcaactttatctcgaacgacacagagatggtgcgtgggcagtccgagtttttggtcatcacaggacccaacatgggcggcaagtcgacctacattcgtcaggttggcatcatcgctctcatggcacagataggttgctttgttcccgccgcacagggcgccaggctgcctgtctttgactgcatcctcgcacgagtcggtgcgggcgacagccagctcaagggcgtttccacattcatggccgagatgcttgaaaccgcgaccattctcaagacggccacgtccgattcgctcatcatcatcgacgagctcggacgaggcacttcgacctacgacgggtttggtctggcgtgggccatttccgagtggatcgccaccaacatccgatgcaagtgtctgttcgcaacccacttccacgagcttaccaacttggcggcacaacaaccccatgtgcgcaacctgcacgtcgtggcgctggtcaagcagaaagagggcggatctcgtcaggatcgcgacatcacattgttgtacaaggtgcagccagggatcagtgaccaaagtttgggtatcaatgtcgctgagctggccaacttccctccttcggtgatcgcgctggcaaagcgaaaagcggaggaactcgaggactacgatgtagacgagcaaaccgcctcggtgctcgatagtctgccggaggatgtgacgaagcagggtgccgcgttgatcaacgagttcctcaaaacgtgggctgagcggagtggattggttgcgcagcaaggggtgtgggttggaaaggagaccaagcgttcgcgactggaagcagatccggaagcagaattgcagcaactcaggcaggtggttgacgagttccgacctcgcatcgaggcgaatgcttgggctgccaaggtattggaaagcttttaa

SEQ ID NO: 22861 - protein, 963 aa, Ustilago maydis 521
MSGLMYDGPSSSEKPDLGLDNAAESSFCQTFKSMPKPTPGTLRLFDRSDFYSAHGDDAILIANLVFKTHSALKYLGSGGKDNGGLPSITLSVAATKNLLREVLTSRQMRVEIYGNAGAKRNNQWSIVKQASPGNLQQMEDMIFVDADIVSSPIVMALKLTTRDGVKTVGAAFADATNRELCVSEYAENDLFSNTESLIIQLGVKECILPKDDKGVDADLKKLREVIERCGVVMFDSKRADFSGRNIDQDLRRLLKEESCGLNLTELDLKLAMAAASALMSYLALLTDESNFGQYSIRTHDLSQYLRLDNSALRALNLFPEPGQTGSSKNTSIYGLLNRCRTGQGQRLLGQWLKQPLVNVHAIEQRQNLVELFVNDNSTRQLIQNDYLKLMPDMHRISKRFQKGIATLEDVVRVYQAILRLPGLIQTLADMETPSEALSELLKTSYLDPFEAHRAALTKFNELVEATLDLTELSQHNFVIKPDFDDNLREIKEALDDTRDKLDEQHRLAGKELRMDTEKKLHLENHHVYGYCLRVTRTDAGLVRNKKGYMDIATVKGGLYFTNEALRDLANDFKDLSERYSRSQSGLVKEVIQIASSYCPPLEKLNVVLAHLDVIVSFAHVSDSAPVPYVKPVVSEKGTNADVDLREARHPCLEVMDDINFISNDTEMVRGQSEFLVITGPNMGGKSTYIRQVGIIALMAQIGCFVPAAQGARLPVFDCILARVGAGDSQLKGVSTFMAEMLETATILKTATSDSLIIIDELGRGTSTYDGFGLAWAISEWIATNIRCKCLFATHFHELTNLAAQQPHVRNLHVVALVKQKEGGSRQDRDITLLYKVQPGISDQSLGINVAELANFPPSVIALAKRKAEELEDYDVDEQTASVLDSLPEDVTKQGAALINEFLKTWAERSGLVAQQGVWVGKETKRSRLEADPEAELQQLRQVVDEFRPRIEANAWAAKVLESF

SEQ ID NO: 22862 - DNA, 2898 bp, Cryptococcus neoformans var. neoformans B-3501A
  CDS (1)..(2898)
atgcccatgtatgggaacgaatccacctcggcgcccaagccgctcttcgatatggacaaggacagcgaggaaaaatttgtgcgatttgtggagcgtatgccgactaaattggacggcatgatcaggctgttcgatcgtggggactactactcggctcacggcgcggacgccatcttcattgccaacgaagtctacagaaccacaaatgtcctcaaataccttggttcaggttctaaaccctcttcctcttctggacaatatgctcgaggattaccttctgtcaccatatccatggctttgaccaaagctttcctccgggaggcccttacaaccaagcagatgcgtgtcgaaatctacgcccccacgggaggagtcgctcctggaagccgaaaggatcattccaaatgggagatctcaaagacagcttcgcccggcaatctgagccaagtagaagacctgctattcagtgacagagatctgacagcgaatgcggtctcaatggccatcagggtggtggtcaaagatgggataaacactgtcggtgtgggtttcgtagatgtacaagaaaaggtggtaggagtgtctgaattcgttgatgatgagaacttttcgaacaccgagtcgctattgatccaacttggtgtaaaggaatgtatattgcaagcagatgagaagcgtccagagctggccaaattaaggatgttggtggagtggtgtggtgtcatcgtcaccgatcgcaaatcgagcgagttccaaaccaaaaatgttgaacaagaccttaatcggttgttgcacgagtctcatgctggtgccgctttaccggagtttgacctcaaaatcgccatgtcagctctatcagcacttatcaattatctctcacttctatccgacctctccctccatggtcaactccgattatatcgtcatgatctttctcagtacatgaagcttgacgcgtccgccctcaaggctttgaacctgatgccaaatcctcaagagctgggtggtaacaagaatatgagcatatatgggttgttaaacagatgcaagactagtcaagggacaaggttgttgggaaggtggttgaaacagccactggtgaatcgccatgagattattcagagacagactatggttgaggttttcgttgaggattctgtcaatcgccaatctattcaaacaaagtacctcaagcagatgcctgactttcacagaatctcgaaaaagttccacaaacgagtggctggattggaagacgttgtcagggtgtaccaagctgtgcagctgctgcctggtttgcaggaaattctggaaaatgccgacaccccagaaccaggagccagggatcttattgaggaaatttggctcaagcctttacgcgaacatattgaaaagcttggaaattattcttccatggtagaagacaccatcgatcttgacgaacttgctaatcacaactatgtgatacttcctactatcgatgaagatcttcagagatacagagaagagttgttaaacgtgcgagatcagcttgatgatgaacacaggcgagttggaagtgatctgggtctggatatcgacaagaagcttcatttggagaatcatcaagtttacaagtactccttcaggattactaaggcggaggctagcctcattcgtaacaagaaggaatatattgacctcgctacccaaaaatctggtaccatattcaccactaaaaccctcaaggcgctgagcgaggagtacttcagactgcaggagttgtacgagaagcagcaaaggcaccttgtcaaggaggtcgtctcgatcgcttcctcgtacacaccggttttggaaatgctggataacttgattgcggctgtcgatgtcattgtcagtatggctcacgtctcttctgaggctcccattccttatgttaaacccatcttgactgaaaaaggtaccggtgacgtcgttgttctaggcgcccgtcatccttgtcttgaagtccaagacgatattgtctttatccctaatgaccatgaaatgcgcaagggtgattccgagtttatcatccttaccggaccgaacatgggtggtaaatcgacgtacatccgacagattggtgtcatcgcccttatggctcaggttggatgctttgtgcccgccacagaagctcggctacccatctttgactgtatccttgcgagggttggtgctggggacaaccaactgaaaggagtcagtacattcatggccgagatgttggagacggcgaccatcttgagatctgctaccaaagactctctgatcatcatcgatgagcttggtcgaggtacatctacatacgatggttttggtcttgcttgggcaatatcagaatacattgccgaaacgattcactgcttctgtctcttcgccacccatttccacgagcttaccagcctttctgaaaagaattctcacgtgaagaacttgcacgttgaagcccttgtcaaggacaaagatggagaagggggtgcgaaggaaagggacattacgttgctgtaccaagtcaaagaaggtatctgtgatcaaagtttcggtatccatgtggccgagttggcaaacttccctgagagtgtcgtcaagctcgccaagcgtaaagcggaagagttggaagattttggagacgaccaaacccgagccccatcatccaagttttcaaagacggaaatcgatgctggtacagacatcgtcaaagagttcctcgacacttggaaatctcgcgtctctgccgctggaaggggaggaggggcggatgctgagatggccatgagtgaagatgagatggttcagctgttgaaggataccgcggaagaattcaaggaccgattggaagggaatgagtgggtgaagagcttgatgagcacattctag

SEQ ID NO: 22863 - protein, 965 aa, Cryptococcus neoformans var. neoformans B-3501A
MPMYGNESTSAPKPLFDMDKDSEEKFVRFVERMPTKLDGMIRLFDRGDYYSAHGADAIFIANEVYRTTNVLKYLGSGSKPSSSSGQYARGLPSVTISMALTKAFLREALTTKQMRVEIYAPTGGVAPGSRKDHSKWEISKTASPGNLSQVEDLLFSDRDLTANAVSMAIRVVVKDGINTVGVGFVDVQEKVVGVSEFVDDENFSNTESLLIQLGVKECILQADEKRPELAKLRMLVEWCGVIVTDRKSSEFQTKNVEQDLNRLLHESHAGAALPEFDLKIAMSALSALINYLSLLSDLSLHGQLRLYRHDLSQYMKLDASALKALNLMPNPQELGGNKNMSIYGLLNRCKTSQGTRLLGRWLKQPLVNRHEIIQRQTMVEVFVEDSVNRQSIQTKYLKQMPDFHRISKKFHKRVAGLEDVVRVYQAVQLLPGLQEILENADTPEPGARDLIEEIWLKPLREHIEKLGNYSSMVEDTIDLDELANHNYVILPTIDEDLQRYREELLNVRDQLDDEHRRVGSDLGLDIDKKLHLENHQVYKYSFRITKAEASLIRNKKEYIDLATQKSGTIFTTKTLKALSEEYFRLQELYEKQQRHLVKEVVSIASSYTPVLEMLDNLIAAVDVIVSMAHVSSEAPIPYVKPILTEKGTGDVVVLGARHPCLEVQDDIVFIPNDHEMRKGDSEFIILTGPNMGGKSTYIRQIGVIALMAQVGCFVPATEARLPIFDCILARVGAGDNQLKGVSTFMAEMLETATILRSATKDSLIIIDELGRGTSTYDGFGLAWAISEYIAETIHCFCLFATHFHELTSLSEKNSHVKNLHVEALVKDKDGEGGAKERDITLLYQVKEGICDQSFGIHVAELANFPESVVKLAKRKAEELEDFGDDQTRAPSSKFSKTEIDAGTDIVKEFLDTWKSRVSAAGRGGGADAEMAMSEDEMVQLLKDTAEEFKDRLEGNEWVKSLMSTF

SEQ ID NO: 22864 - DNA, 2742 bp, Tribolium castaneum
  CDS (1)..(2742)
atgtcaataacacaccccgcggaagcgctaaatttagatttcaaacaacaacgcctatttgtggactttttcaacaatttaccccagaaaccatcctccactttacgcttcttcagccatggcgatttctacaccctccacagctctgacgcctcatccgcgtccacttttacgggaaacatcgtcaaatacatgggggaagacccccagctctcgtacgttgtcctccgaaagtcccaatttgagcaatacgtccgggagttgctcctcgtccgccaataccgcgtggaagtctacgtcaaaagcacccccaacaagatcaacgactggacgttaaaatacaagggttcccccgggaacctctcccagttcgaggacgtcctcttcgagaacgcctccataaccttcagcaatgacgtcctgggcctcaaagtgaccaaaggccgaataatcgcagcggccagtgtgaattcaaccgaattaaagttccaagtgtgtgagttcagtgataacgagtgcttcaccgaactggaggccctgatcgcgcaagtgggccctcgcgagtgtgtcattccgcaaggggaagcccccgatttaatcgagttgaagaaagtgttagaacgcaatagtgtgctagtggctagggcgaaaaaaagcgactttggggccgaaaacattgtacaggaccttaacaggctcctgtactttgccgaaggccaccaaaggagttgcctcagtttccccgaaacccacaattcggaagctctcacgtgtcttaacgctgtgatcaagttcctgaacttgaccggagacgagcaaaactttaaccagttcaggattagttcgctcgatgtccaccgttacgtgcgtttggacaacgcggctctctattcactcaacatcctccctaaaccgggggttaacacacttgagtctacaaaccaaacaagcaagaatttcagcttgaaagggattctggaccattgtgttacccctcaaggtcgccgattgctcgaaacctggatcaagcaacccttgaaagacttgaacttgatccaggaacggcacgaaatcgtcgaaacctttgtcaaaaacccacagctgagacaggacctccaaaccgaggtcttggctcgcttacccgacctcctcctcctctccaaaaaactgtccagtcaaaaagccacgctgcaagattgctataaagtgtatcaagtggtcgcggctgttcccctcctcctcaaaaacctcaaacaggttgacaacccctccctccaatccgccctaatccacccgattgaggagttacgcaacgacctggacaagtatcaggacatgattgaggaactcctggatttggagctagtcgatcggggggagttcctggtcaagagtagttttagccccgctttggaggaaatctcagccaggaagttgcaaattgaggaacgcatgcagaaattattgagggcggctgccaatgacttgggctttgaggaggagaagacaatcaagttggattataccgaccaacaccggtattttttccgtgtgactcttaaggaggagccggttttgaggtccaattcgcgttatcagattctggacgttgtcaaaggcggtgttagattcactaacagcaaactggccgagcttaatgacgattacgccgaggcgaaagccgagtacgtcgagcaacagaaaactatcatttcggagatgtttgctgtggcagccggctatggcgattgtttgcgcaacttgaacatgttcatagccacggttgatgttttggtggcgtttgccaacgtggcagtgtgggcacgtgtgccgtacatacggcccaaaatgttcgaggctggtcaaagcccactcaagttgttcaaagtgaggcatccctgtatcgagcaacaggaacacgtgtcgttcattcccaacagtgttgagtttgactcagagcacactttgcacatcatcacagggcctaacatgtgcgggaaaagcacctacattcggagtattggcgtttgtgtgttaatggcccagattgggtcgttcgtgccgtgcaattacgccgaaataccgatagttgacgcgattctagcacgtgtgggtgctgaggattgtttattgaagggtctgagcacgtttatggtggaaatgatcgaaacggccacgattatcaagagtgccacgccgaattcacttgttataattgacgagttggggagggggacgtccacttatgacgggtgtggcttggcattcgctatagctgagtttttagccaaagaaatcaagtgtttttcgttgtttgccacacattttcacgagattacgcgtctggcggagatgcaccccagtgtgtgtaataagcacgtgaccgcggtcaccactgataacaccattacgcccctttatcagatcagggatggggagtgtgataacagttatgggattcattgtgcgcgcatggttgagttttccgatgatgtgattcagtcggccgttgagcatcagaagaagttggaacatacggccggaatgcaatttctgagggactttgagccggttttaagacgccaagtcgtttcagaaggcgataaaataatccaagatactttagagaaggtgaaaggtttggataagttatccgatgaggatttggtcaaggaaatagcgaaactaaaggaagagcttgaagggactggaaatttgtttattaaaggcttgcttcaataa

SEQ ID NO: 22865 - protein, 913 aa, Tribolium castaneum
MSITHPAEALNLDFKQQRLFVDFFNNLPQKPSSTLRFFSHGDFYTLHSSDASSASTFTGNIVKYMGEDPQLSYVVLRKSQFEQYVRELLLVRQYRVEVYVKSTPNKINDWTLKYKGSPGNLSQFEDVLFENASITFSNDVLGLKVTKGRIIAAASVNSTELKFQVCEFSDNECFTELEALIAQVGPRECVIPQGEAPDLIELKKVLERNSVLVARAKKSDFGAENIVQDLNRLLYFAEGHQRSCLSFPETHNSEALTCLNAVIKFLNLTGDEQNFNQFRISSLDVHRYVRLDNAALYSLNILPKPGVNTLESTNQTSKNFSLKGILDHCVTPQGRRLLETWIKQPLKDLNLIQERHEIVETFVKNPQLRQDLQTEVLARLPDLLLLSKKLSSQKATLQDCYKVYQVVAAVPLLLKNLKQVDNPSLQSALIHPIEELRNDLDKYQDMIEELLDLELVDRGEFLVKSSFSPALEEISARKLQIEERMQKLLRAAANDLGFEEEKTIKLDYTDQHRYFFRVTLKEEPVLRSNSRYQILDVVKGGVRFTNSKLAELNDDYAEAKAEYVEQQKTIISEMFAVAAGYGDCLRNLNMFIATVDVLVAFANVAVWARVPYIRPKMFEAGQSPLKLFKVRHPCIEQQEHVSFIPNSVEFDSEHTLHIITGPNMCGKSTYIRSIGVCVLMAQIGSFVPCNYAEIPIVDAILARVGAEDCLLKGLSTFMVEMIETATIIKSATPNSLVIIDELGRGTSTYDGCGLAFAIAEFLAKEIKCFSLFATHFHEITRLAEMHPSVCNKHVTAVTTDNTITPLYQIRDGECDNSYGIHCARMVEFSDDVIQSAVEHQKKLEHTAGMQFLRDFEPVLRRQVVSEGDKIIQDTLEKVKGLDKLSDEDLVKEIAKLKEELEGTGNLFIKGLLQ

SEQ ID NO: 22866 - DNA, 2643 bp, Syntrophus aciditrophicus SB
  CDS (1)..(2643): transl_table=11
ttgggaatgaaagaatccatggaaataagcagtttgaccccggcgatgaagcagtatgcggaagtcaaggctctgcacaaggactgcattgtccttttccgcatgggggatttttatgaaatcttttttgaagacgccgtaaccgcatccaaaattctggatatcacccttacatcaagaaacaagggaaaggaggacagcatccccctttgcggctttccataccatgcatcgtctacttacattccaaagctgattgaaaagggattcaaggtagcggtctgtgaacagattgaagatccgaaactggccaaaggcgttgtcaggcgggaggtcgttcggatcgtcaccccggggctggttgtcgacacagcaaatcttcatgccaaggaaaataactttctggcggcggttttccctttggagcatcatatcgggttggcctttctggatatttcaacaggggaattccgggtcagtgattttcaggatatccggttttttgaaacggagcttgcagccttggattttcgagagatcatggttccacagggaagcgggaagcaaggttttttaaaagcttttgccggcagggaaaattcctgccgccttgatgaatttcccgatgaatatttcgatcgggaatcggccctgggccgcctgcaggactatatccggaaagaggacctggaagatctggggctgaaagactgccccgcggttatcggggcggcgggcgccgtcctgcgctatgtggaggaaacccagaaaagccggctgacacacatcaatcggctgcaatggtactcggcggctgaatacctcgttctcgatgaaacggcgaagcggaacctcgaacttttcaaaacgattcaggataaccggactgccggttccctgttttctgttctcgatgaaaccgtgacggccatgggagggcgccgcctccgctggtggctgaactacccccttgtcgatccggagaaaattaaggcaaggctggctgccgttgcggaaatccgtgaaaatcacctgtttcgcgaaaatctgcgaaaagttctttccgaggtttacgacatggaacgcctggcgggacggattgccctgggagttgccaacggtcgtgatctgattgctttgaaacagtctctgaaaaatctcccggttctgaaaaacctccttgccgacagcaattcgttcatgctggacagaattcaagacggcattgacgaattgcccgatctttacgatctcattgaaaaagcgatttgcgattctcctccggtcacgcttcgagaaggggggatcattaaggaaggatatgacgaggaaagggatcggctgttcttcatgacgcgggacggccggcgctggatcgcggccctcgaggagaaggaaagaaaaagaacgggcatttcatcgctcaaggtgggttttaacaacgtcttcgggtattacatcgagatctccaaggccaactctgccctggctccggaagattacgtgagaaagcagaccctcgtcaacgcggaacgctacattaatcaggaactcaaggaatacgaggcgaccgtgctcaacgcggagacgcgatgccgggagcgggaatatgacctgttcatgcaggtaagggaatgcgcggcggcggaaattactcgaatgcaggcgacggcgacgctgctggctgatcttgatgcgctggcctcgctggctgaagtagctgaaaagtataattactgctgtccagttgtggacctggaagatcggatcgagattgacgtggggcgccatcccgttgtcgaacggatgtccctcagggacggcttcgttcccaatgacgtggttctggacacggacgaaaaccggttcctggtgattacgggtccgaacatggcggggaaatccacctacatccgccaggtggccctgatcgttctaatggcccagatggggagtttcgtgccgtcatcacgggcgcggatcggggtcgtggatcgcatcttcacgcggatcggagccgcggacagcctgatccgggggcagagcaccttcatggtggaaatgaatgaggtggcccagatcctctgtcatgccaccggccgaagcctggtcatactggatgaggtgggaaggggaaccagcacgtttgacgggctcagcattgcctgggcggtggcggaatatctccatgacaaaaactggatcggggcgcggaccctgtttgcgacacactatcatcagcttaccgaattggccgtcgcgggaacgggatacaggaattacaatatcgcggtcaaggaatggggtgaccgaatcatcttcctcagaaagattgttcccggaggaacaaaccggagttacgggattcaggttgcccgcatcgccggagttccggaagaggtcattgtccgcgccagagagatcctcgacaatctggaaaaaggggaaatggatgaggtgggcatgcccaggattgcccggagcagaaaaagaaaaccccgcaacccgggacagttgaatctcttcatgagcgagcgggaacgcgtcatcgaagagcttgcggcgttgaacatttcccgcgtggagccgcatgatgccctcaacatgatgctgaactggcaggaaaggcttaaagaaggctga

SEQ ID NO: 22867 - protein, 880 aa, Syntrophus aciditrophicus SB
MGMKESMEISSLTPAMKQYAEVKALHKDCIVLFRMGDFYEIFFEDAVTASKILDITLTSRNKGKEDSIPLCGFPYHASSTYIPKLIEKGFKVAVCEQIEDPKLAKGVVRREVVRIVTPGLVVDTANLHAKENNFLAAVFPLEHHIGLAFLDISTGEFRVSDFQDIRFFETELAALDFREIMVPQGSGKQGFLKAFAGRENSCRLDEFPDEYFDRESALGRLQDYIRKEDLEDLGLKDCPAVIGAAGAVLRYVEETQKSRLTHINRLQWYSAAEYLVLDETAKRNLELFKTIQDNRTAGSLFSVLDETVTAMGGRRLRWWLNYPLVDPEKIKARLAAVAEIRENHLFRENLRKVLSEVYDMERLAGRIALGVANGRDLIALKQSLKNLPVLKNLLADSNSFMLDRIQDGIDELPDLYDLIEKAICDSPPVTLREGGIIKEGYDEERDRLFFMTRDGRRWIAALEEKERKRTGISSLKVGFNNVFGYYIEISKANSALAPEDYVRKQTLVNAERYINQELKEYEATVLNAETRCREREYDLFMQVRECAAAEITRMQATATLLADLDALASLAEVAEKYNYCCPVVDLEDRIEIDVGRHPVVERMSLRDGFVPNDVVLDTDENRFLVITGPNMAGKSTYIRQVALIVLMAQMGSFVPSSRARIGVVDRIFTRIGAADSLIRGQSTFMVEMNEVAQILCHATGRSLVILDEVGRGTSTFDGLSIAWAVAEYLHDKNWIGARTLFATHYHQLTELAVAGTGYRNYNIAVKEWGDRIIFLRKIVPGGTNRSYGIQVARIAGVPEEVIVRAREILDNLEKGEMDEVGMPRIARSRKRKPRNPGQLNLFMSERERVIEELAALNISRVEPHDALNMMLNWQERLKEG

SEQ ID NO: 22868 - DNA, 2664 bp, Methanococcoides burtonii DSM 6242
  CDS (1)..(2664): transl_table=11
atgatcaaactaacacctgcaatgaaacaatactatgatgcgaagaagcaacatagtgatgcacttattttcttcaggatgggggatttctatgaatccttcggagaggatgcaaagatcattgcaaaagaacttgagataacccttacaacgcggggcaaggacattgagggtgagaaaatgccccttgcaggtattccctatcatgctctcgataattacctgccgcgtttgataaagaaaggctataaagtagctatatgtgagcagcttgaagaccctaaaaaagcaaagggtattatcaagcgtggggttgtcagggtcgtaacgcccggtactgccattgatacttcgatgttcacggacccgtccaataattatctcatgtcaatttcaggtggagatggggattacggtgtctcatttctggatgtttccactggcgagttcctgaccacacagtttgctgataaatctccttatgacaggatagccagtgaggcagcacggatgcgaccttcagagtgtataatctcacggacgatgttctctgatgaaaggcttgttgaaaggttgaaggagctcaatgtgcttgtacaggggttcaaggatgaggcttttgacgttgattcttcgagaaagcttcttgaaaggcatttcaatgtctccacacttgaaggaatgggctgtgccggtctgccctacgccacatcttctgcaggagctgcacttgattatgcgctgaccacacagatgagggaactggggcatgtaagtgagctgagcacttattcagattctgagttcatgatgcttgactcgatcaccctgagaaatctggagatcgtgaagaacgtgcgaggggaagggaacgatacttccatattgaaggtacttgatgataccaatacacccatgggtggcaggttgcttcagaaatggcttttaaaacccctcatcaatgtcgattccatcgatcacaggctggatgcgctggaatgtctggcaaatgataccatgctgagattcgatgttcgctctcatctgtcctttgtgaaggacatagaacgtctcataggcagggtcgtttacggcaattcgaacgcccgggatcttatcgctttgaaaaggtccctgggttcagtgccgcagatagtcgaaagcatgggtgatgatcccggatgtgagatgctcataaatatcagggatggtcttcttgggtttgaacagctcgaaaatatcgtgaagctgatcgatgatgccatcgtggatgaacctccagtaagcgtgcgggaagggggcatgatcaggtccggctacaatgaaaaactggatgagcttaagggtatgtccactggcggaaagacctggatcgcttcgttccagcagaaggaacgtgacaggacaggtataaaatcgcttaaggttggctacaatagagtattcggctactacatcgagatcacaaaatccaacatcgcacagatacctgatgattatattagaaagcagacaatgcggaatgctgaaaggttctacactccagagctcaaggaatgggaagatgtgatcctttccgcagacgagaagattacagcgcttgagaatgaactgttcactgagataacttccaggatcgcttcccatgcatccgatctgcagaggatcgctgttctgatcgggcaattggattgtaccgcaagccttgccgaagttgcagtgaacaataattttgtaagacctaacattacttccgattgcaagatacttatccgggaaggcagacatccggtggttgagaaaaccgtacgtggtggattcgtgcccaatgatacggaaatggattgtgtggacgagcagttccttttgataacagggcctaacatggcgggtaaatccacttacatgcgtcaggtctcacttatcgtgataatggcacaggcaggttcctttgttccggcttcacatgcttccataggcattgtggacagggtcttcacaagggttggtgccttcgatgaccttgcaagcgggcagagtaccttcatggtagagatggtggagcttgccaatatactgaacaatgcgacccctaagagccttgtgctccttgatgagatcggcaggggtacgagcacttatgatggttatagtatcgcaaaggctgtggtcgagtatatccacaataagggcagggttggcgtacgttccctttttgcgacccattaccatcagcttaccaacatctcttccagtttgaaaagggtgaagaactatcatatcgcggtgaaggaagatggcgatgatcttgttttcctccgaaagatcgtgcccggtgccactgataagagctatggtatccatgttgcaaggcttgcaggtgtacctcataaggtgacacagagggcgaaggaggtcctgcaggacattgaagacgaaagtgtcatcagcaaggaaagcgattcgaagaggggtaggaaaaagaagtcggcacaatacacccagttgatgcttttcgatccggagggctcttctgcacctgtagctgagcctgatcctgttgttgaggagctgaaagagcttgatgtcaatagtatgactcccatcgaggcactgaacaagttaagtgaattgcagaaaaaggcaggtaagggcggaaaataa

SEQ ID NO: 22869 - protein, 887 aa, Methanococcoides burtonii DSM 6242
MIKLTPAMKQYYDAKKQHSDALIFFRMGDFYESFGEDAKIIAKELEITLTTRGKDIEGEKMPLAGIPYHALDNYLPRLIKKGYKVAICEQLEDPKKAKGIIKRGVVRVVTPGTAIDTSMFTDPSNNYLMSISGGDGDYGVSFLDVSTGEFLTTQFADKSPYDRIASEAARMRPSECIISRTMFSDERLVERLKELNVLVQGFKDEAFDVDSSRKLLERHFNVSTLEGMGCAGLPYATSSAGAALDYALTTQMRELGHVSELSTYSDSEFMMLDSITLRNLEIVKNVRGEGNDTSILKVLDDTNTPMGGRLLQKWLLKPLINVDSIDHRLDALECLANDTMLRFDVRSHLSFVKDIERLIGRVVYGNSNARDLIALKRSLGSVPQIVESMGDDPGCEMLINIRDGLLGFEQLENIVKLIDDAIVDEPPVSVREGGMIRSGYNEKLDELKGMSTGGKTWIASFQQKERDRTGIKSLKVGYNRVFGYYIEITKSNIAQIPDDYIRKQTMRNAERFYTPELKEWEDVILSADEKITALENELFTEITSRIASHASDLQRIAVLIGQLDCTASLAEVAVNNNFVRPNITSDCKILIREGRHPVVEKTVRGGFVPNDTEMDCVDEQFLLITGPNMAGKSTYMRQVSLIVIMAQAGSFVPASHASIGIVDRVFTRVGAFDDLASGQSTFMVEMVELANILNNATPKSLVLLDEIGRGTSTYDGYSIAKAVVEYIHNKGRVGVRSLFATHYHQLTNISSSLKRVKNYHIAVKEDGDDLVFLRKIVPGATDKSYGIHVARLAGVPHKVTQRAKEVLQDIEDESVISKESDSKRGRKKKSAQYTQLMLFDPEGSSAPVAEPDPVVEELKELDVNSMTPIEALNKLSELQKKAGKGGK

SEQ ID NO: 22870 - DNA, 2727 bp, Rhizobium leguminosarum bv. viciae 3841
  CDS (1)..(2727): transl_table=11
gtgaacgcacgaatagatacagggaatgaagccttttcggctgccgagcttgccacggcggaaagccgtgcctcggcgacgccgatgatggagcaatatatcgagatcaaggcgaacaatccggattcgcttctgttctatcgcatgggcgatttctacgagctgttcttcgaggatgcgctggaagcctcacgcgcgctcgggatcacgctgaccaagcgcggccagcacatgggccaggatatcccgatgtgcggcgttccggtgcatgcggccgatgattatctacagaagctgatttcgctcggcttccgcgtcgccgtctgcgagcagatcgaggatcccgcggaagcgaagaaacgcggcgcgaaatccgtcgtcaggcgcgacgtcgtccgcctcgtcactcccggcacgatcaccgaggaaaagctgctttcgccctcggaatccaactatctgatggcgctgacccgcattcgcggcagcggcgaggccttgctggcgcttgcctggatcgatatttccaccggcgtcttccggcttgccgagaccgaagcctcgcgcctgcttgccgatatcctgcgcatcgatccgcgcgaactcatcctgcccgacaccatcttccacgatcccgaactcaagccggtcttcgacgtgctcggccgcacagccgtgccgcagccttccgtgctcttcgacagcgccagcgccgaaggccggatcgcgcggtatttcggcgtcgcgacgctcgacggcttcggcaccttttcgcgcgccgagctggcggccgcggctgccgccgtcgcctatgtcgagaagacgcagatcgccgagcggccgccgcttggaaagccggagcgggaaagtgcggcttcgacgctgttcatcgatcctgccacccgcgccaatctcgaacttgcccgcacgctgtctggcgatcgcaacggttcgctgctgaaggcgatcgaccgcaccgtcaccggcggcggtgccaggcttctcgccgaacggctgatgtcgccgttgaccgaccccgcccgcatcaatgcgcggctcgattcgatcggcttcctgatcgacgagcccttgctctgcggcaatctgcgcgacacgttgaaacatgtgcccgacatgccgcgtgcgctgtcgcggctggcgctcgaccgcggcggcccgcgcgatctctcagcgattcgccagggccttgacgcggcgggcggagttgcggtgatgctcggcaaggcggtgctgcccgaagagctcggccaggcgctgtccgagctgcaggcccttcccgcgaccctggaaaagctgcttgccgaaacgcttgccgaagaattgccgctgttgaaacgcgatggcggcttcctgcgcgacggcgccaacgccgagctcgacgaggtccgggcactgcgcgaccagtcgcgtcgcgtcatcgctggcttgcaattgcaatatgccgaggaaaccggcatccggtcgctgaagatcaagcacaacaacgtcctcggctatttcatcgaagtcaccgccggcaatgcctcgccgatgacggagacggcggacgcgaaggcccgcttcatccaccgccagacgatggcgaacgcgatgcgcttcaccacgaccgaacttgccgatctcgaaagccgcatcgccaatgcggccgaccaggcgcttacgatcgaactcgaagccttcgacaggatgacggcggccgtcgttgcggaagccgaggcgatcaagtcgggcgcccgggcgctcgcggtcatcgacgtcgccgcaggcctggcgcttctcgcggaggagcaggcctattgccgcccgcaggtcgacggctcgaagatgtttgccatcgagagcgggcgccatccggtcgtcgagcaggcgctgcggcggcaggcgggcggccccttcgtcgccaatcattgcgatctgtcgccgaagaccggcgaccgggacggggcgatctggctactgaccggcccgaacatgggcggtaagtcgaccttcctgcgccagaacgcgctgatatcaatcctggcgcagatgggctccttcgtgccggcgacatcggcccatatcggcatcgtcgaccggcttttctcgcgcgtcggcgcctccgacgatctggcgcgcgggcgctcgaccttcatggtcgagatggtggaaacggcggcgatcctcaaccaggcaagcgaccgttcgctcgtcatcctcgacgagatcggccgcggcaccgcgacgttcgacggcctgtcgatcgcctgggccgccgtcgagcacctgcatgaggccaatcgctgccgcggcctcttcgccacgcatttccacgagttgaccgtgctttcggaaaagcttggccggctgtcgaacgcgacgatgcgcgtcaaggaatgggacggcgacgtcattttcctgcacgaggtcgggccgggtgcggctgaccgctcctatggcatccaggtcgcgcgccttgccgggcttccggcctcggtcgtggcacgcgcccgcgacgtactcacccgtctggaagatgccgaccgcaagaacccggcgagccagctgatcgacgacctgccgctcttccaggtggcggtgcgccgcgaggaaacggcccgcggggcctccaaggtcgaggaggcgctgaaggcgatgagccttgacgacatgacgccgcgcgaggcaatggatgcgctttacgacctcaagaaaaagctgaaatag

SEQ ID NO: 22871 - protein, 908 aa, Rhizobium leguminosarum bv. viciae 3841
MNARIDTGNEAFSAAELATAESRASATPMMEQYIEIKANNPDSLLFYRMGDFYELFFEDALEASRALGITLTKRGQHMGQDIPMCGVPVHAADDYLQKLISLGFRVAVCEQIEDPAEAKKRGAKSVVRRDVVRLVTPGTITEEKLLSPSESNYLMALTRIRGSGEALLALAWIDISTGVFRLAETEASRLLADILRIDPRELILPDTIFHDPELKPVFDVLGRTAVPQPSVLFDSASAEGRIARYFGVATLDGFGTFSRAELAAAAAAVAYVEKTQIAERPPLGKPERESAASTLFIDPATRANLELARTLSGDRNGSLLKAIDRTVTGGGARLLAERLMSPLTDPARINARLDSIGFLIDEPLLCGNLRDTLKHVPDMPRALSRLALDRGGPRDLSAIRQGLDAAGGVAVMLGKAVLPEELGQALSELQALPATLEKLLAETLAEELPLLKRDGGFLRDGANAELDEVRALRDQSRRVIAGLQLQYAEETGIRSLKIKHNNVLGYFIEVTAGNASPMTETADAKARFIHRQTMANAMRFTTTELADLESRIANAADQALTIELEAFDRMTAAVVAEAEAIKSGARALAVIDVAAGLALLAEEQAYCRPQVDGSKMFAIESGRHPVVEQALRRQAGGPFVANHCDLSPKTGDRDGAIWLLTGPNMGGKSTFLRQNALISILAQMGSFVPATSAHIGIVDRLFSRVGASDDLARGRSTFMVEMVETAAILNQASDRSLVILDEIGRGTATFDGLSIAWAAVEHLHEANRCRGLFATHFHELTVLSEKLGRLSNATMRVKEWDGDVIFLHEVGPGAADRSYGIQVARLAGLPASVVARARDVLTRLEDADRKNPASQLIDDLPLFQVAVRREETARGASKVEEALKAMSLDDMTPREAMDALYDLKKKLK

SEQ ID NO: 22872 - DNA, 2727 bp, Synechococcus sp. WH 7805
  CDS (1)..(2727): transl_table=11
atgccgcgctccgctgcccaatccgaagcgcaaacccttcagggaagtctgttcggagctcctgaatccgccgagacatcaaaaaggcgttcggtgccgtccgctgcaaccgagctggatgacctgacggatgccagcctcagcgccgatgccgccgcccggccccggcaacgccaggagcgcgatgcgttcaccaacgctggaaacgaacaagacgcagatggctcggatccagacgacaacggcgatgaaccggcctgggcccaccacaaccaagtggatctggcccagctcacgccgatgctgcgccactacgtagagctcaaaattgagcatcccgagcgcgttctgctctaccgcctcggtgacttcttcgagtgcttctttgaggatgctgttgagctctcacgggttctggagctcaccctcaccggcaaagaagggggcaaagcgatcggccgcgtgcccatggccggcattccccatcacgccgctgagcgctactgcgccgacctgatccgacgcggctattcggtggccctctgcgatcagctcgaaacaacccccagcaagggtgccctgctcaaacgcggcatcacccgcgtgctcactcccggcacggtgctggaagaaggcatgctcagcgcccgccgtaacaattggctggccgccgtggtggtggagccctccaccagtaaaaagcccttccgttggggactggccagtgccgacgtgagcaccggcgatgtgctggtgctggagcgcagcggcagcgatgcccttcaccagcagctggcccagctcgaagcatctgaactgctttgggccgctgaggacgacaccgagccagcgcgaccggcctggtgccccgatcgcctgcggctcagccccatggcccgcaccccctttagcgctcccgaggcggaacagaccctcaaggcgcactacaaactgacgagccttgatggcctgggcctgccggagctacccctggccctacgggctttcggagggttgctgcagtacgtcaacgacacccagcccctggaagacaacgcccgtgtacctctggatgtacccaggatcgtgcacagcggcgagaccctggtgctcgacgcccagacccgccgcaacctggagctcacagccacccagcgggacggacagctgcagggatcgttgctttgggccatcgaccagaccctcacggccatgggcggccgctgcctgcgccgctggctggaggcgccactgatggacctcaccgccatccaacagcgccaggcggtggtgagcctgctggtggatcagcgttctctgcgccaggtgctgcgccgcctgctgcgccccatgggcgatctggagcgcctggcaggccgggccggtgcaggccatgccggtgcccgcgatctggtggccatcgccgatggcctcgagcggctcccccaactaacggcccgcctgcaaagcaagctgacgcactggcccgaggagctcacagctctgcatcagcctgaaccagctctagtcgagctggccgctgacatccgccagaccctcatcgccgcccctcccctctcactcagcgaaggcggcctgatccacgacggcgtcgaccccctgctcgatggcctgcgcaaccaactcgacgatcagaacgcctggctggccgagcaggagcgtctggagcgtgagcgcagcggcaacaacaacctgcgcctgcagtaccaccgcaccttcggttacttcctggcggtcagcaaagccaaggcttcatcggtgccgaaccattggatccgccgccagaccctggccaatgaggagcgcttcatcaccccagaactgaaagagcgggaaggacgcatctttcaactgcgagctcgggcctgccagcgggaatacgaattcttctgtggcctgcgtgagcaggtgggggcgatggccgcaccgatccgccaagcggcccgagcaatagccagtctcgacgccctcacctcgctggcagagtccgccgccacaggcggctggtgcgccccagtgctcagtgacaatcgccaattggagatccgcgcaggtcgtcatccggtagtggaacagctgctggttgagtccgccttcacccccaacgacctcgccctgggcaatggcactgatctgatcgtgctcaccggccccaatgcaagcggcaagagctgctatctacgccagatcggtgtcattcagctgctggcccagatcggcagctgggtgcctgccgcctcagccgccatcggcctgaccgatcgcatcttcacccgggtgggcgccgtggatgatctcgctgcgggccagtccaccttcatggtggaaatggcggaaaccgccaacatcctgcaccacgccagcgaacgctccctggtgctgctcgatgagatcggccggggtacggccaccttcgatggcctttccatcgcctgggccgtgagcgaacacctggccggcgatctcaaagcccgcaccgtgtttgccacccattaccacgagctcaacaacctggccgcagagcgctccaacgtggccaacttccaggtcatggtgcaggaaaccggcgccgatctggtgttcttgcatcaagtgcaggctggcggagccagccgcagctacggcatcgaagccgcgcgcctcgccggcgtgcccgcacccgtggtgcaacgcgctcggcaggtgctcgatcagctggcggcctga

SEQ ID NO: 22873 - protein, 908 aa, Synechococcus sp. WH 7805
MPRSAAQSEAQTLQGSLFGAPESAETSKRRSVPSAATELDDLTDASLSADAAARPRQRQERDAFTNAGNEQDADGSDPDDNGDEPAWAHHNQVDLAQLTPMLRHYVELKIEHPERVLLYRLGDFFECFFEDAVELSRVLELTLTGKEGGKAIGRVPMAGIPHHAAERYCADLIRRGYSVALCDQLETTPSKGALLKRGITRVLTPGTVLEEGMLSARRNNWLAAVVVEPSTSKKPFRWGLASADVSTGDVLVLERSGSDALHQQLAQLEASELLWAAEDDTEPARPAWCPDRLRLSPMARTPFSAPEAEQTLKAHYKLTSLDGLGLPELPLALRAFGGLLQYVNDTQPLEDNARVPLDVPRIVHSGETLVLDAQTRRNLELTATQRDGQLQGSLLWAIDQTLTAMGGRCLRRWLEAPLMDLTAIQQRQAVVSLLVDQRSLRQVLRRLLRPMGDLERLAGRAGAGHAGARDLVAIADGLERLPQLTARLQSKLTHWPEELTALHQPEPALVELAADIRQTLIAAPPLSLSEGGLIHDGVDPLLDGLRNQLDDQNAWLAEQERLERERSGNNNLRLQYHRTFGYFLAVSKAKASSVPNHWIRRQTLANEERFITPELKEREGRIFQLRARACQREYEFFCGLREQVGAMAAPIRQAARAIASLDALTSLAESAATGGWCAPVLSDNRQLEIRAGRHPVVEQLLVESAFTPNDLALGNGTDLIVLTGPNASGKSCYLRQIGVIQLLAQIGSWVPAASAAIGLTDRIFTRVGAVDDLAAGQSTFMVEMAETANILHHASERSLVLLDEIGRGTATFDGLSIAWAVSEHLAGDLKARTVFATHYHELNNLAAERSNVANFQVMVQETGADLVFLHQVQAGGASRSYGIEAARLAGVPAPVVQRARQVLDQLAA

SEQ ID NO: 22874 - DNA, 2718 bp, Oryza sativa subsp
  CDS (1)..(2718)
atggagggcgacgacttcttgccggagggcggcaagctccccgagctcaagctagatgcgaggcaagcgcagggcttcatctctttcttcaagaaactgccgcaggattcgagggctattcgtctcttcgatcggcgggattattacactgctcatggagagaatgccacattcattgcaaaaatatactatcacacaatgtctgccttacgccaattaggtagcaactctgatggactctcaagtgtcagtgtgagcaagactatgtttgagaccatcgcccgcaaccttttgttagagaggacagaccgtacattggaactctatgagggaagtgggtctagttggaggttaacaaaatctggaacacctggaaatattggcagttttgaagatattctgtttgcaaacaatgacatgcaagattctccggtaactgttgcattgtttcctgtgttccaggaaggacaactatatgtaggtcttagttttgttgatttgacaaacaggaagcttgggttgtctgagtttcccgaagatagtcgattcacaaatgtagagtcagcccttgttgcattaggttgcaaggagtgtcttctcccagcagattgtgagaaatctatagatttgaagcctcttcaggatgctatcactaactgcaatgttctattaactgaaagaaagaaggttgaatttaaatccagagatcttgtgcaggatcttggtagaataatcagaggtcctgttgagccagttcgtgatcttgtatctcagtttgactatgcattgggtgcccttggagctctagtttcatatgctgagttgctagcagatgatacaaactacggaaattacacaattgagaaatacagtttggaccgctacatgcgtcttgattctgctgctgtgcgagcattgaatattgccgaagctaaaactgatgtaaacaagaacttcagtttgtttggtttgatgaacagaacctgtacagtaggtatgggaaagagactgcttaacagatggctgaaacaacctctgctagatgtaaatgaaatcaataacagattagatatggttcaggctttcgtagaagatccagagcttcgtcagggacttaggtaccaactcaaaagaatgtcggacattgaccgtctgacacatgctctgcggaagagaacagccaatctgcagcctgttgtcaagctctaccagtcctgcattagagtctcatacatcaagaatgttcttcaacaatatgatggcagtttttctgcgctgataaggacaaagtttcttaattctttagatgagtggctgacagaggataggtttggtaggtttgcttctcttgttgagacagctattgaccttgatcaacttgagaatggtgagtataggatatctccccgatattcttctgatttggctgtgctgaaggatgagctttctgaagttgaaaatcacatcaacaatttgcacaagcatacagctgctgatctggatcttactattgataagcaattgaagctagaaaaagggcagcttggccatgtgttcagaatctcaaagaaagatgaacagaaggttaggaagaaactcactagcaattacataatcatagaaactcgtaaggatggtgtgaagttcacaagctccaagcttaaaaagttaggcgaccaataccaggcactgcttgtgataaatcttaaattcttgtcacaggtatttgaaaactttgctgcgatactatctgagttggatgttttacaaagttttgctgatttagcaacaagttccccaattccttatgtaagaccagaaatcacagcatcggaggaaggagatatcattttagaaggtagcagacatccttgtctggaggcccaagatggtgttaactttataccaaatgattgcactttggtgagagaaaaaagttggtttcagatcatcactgggccaaacatgggtggaaagtccacttttatacgacaggttggtgtgaatgtcctgatggcacaagttggatcgttcgttccatgtgatcgggcgagcattagtgtgagagattgtatttttgctcgtgttggtgctggtgattgccagctacgtggtgtttcaacctttatgcaagaaatgcttgaaacagcatccatcttgaaaggtcttgcatgggctatctgtgagcatcttgtggaagtgactagagcacctacgttgtttgccacgcattttcatgaattaactgcattaggacacaaaagtggtgatgagcaccaacacgttccaaatttgggaattgcaaattaccatgtgggtgcacatatagacccatcaagtcggaagttaactatgctttataaggttgaacccggtgcatgtgaccaaagctttggtatccacgttgcagaattcgctaattttccagaagctgttgttgctcttgcaaaaagcaaagcagaagaattagaagatttttcaactgcgcccaatttttccgatgattcaaaagatgaggttggatcaaaacgcaagagggtatttagcccagacgatgtgactagaggagctgctcgcgctcgccttttgttggaggaattggcctcattgcctctagacgagatggatggcaccaaggccgcagaaaccgtcaccaaactgaaatccgacttcgagaaagatgcagctgataatccttggcttcagcagttcctttga

SEQ ID NO: 22875 - protein, 905 aa, Oryza sativa subsp
MEGDDFLPEGGKLPELKLDARQAQGFISFFKKLPQDSRAIRLFDRRDYYTAHGENATFIAKIYYHTMSALRQLGSNSDGLSSVSVSKTMFETIARNLLLERTDRTLELYEGSGSSWRLTKSGTPGNIGSFEDILFANNDMQDSPVTVALFPVFQEGQLYVGLSFVDLTNRKLGLSEFPEDSRFTNVESALVALGCKECLLPADCEKSIDLKPLQDAITNCNVLLTERKKVEFKSRDLVQDLGRIIRGPVEPVRDLVSQFDYALGALGALVSYAELLADDTNYGNYTIEKYSLDRYMRLDSAAVRALNIAEAKTDVNKNFSLFGLMNRTCTVGMGKRLLNRWLKQPLLDVNEINNRLDMVQAFVEDPELRQGLRYQLKRMSDIDRLTHALRKRTANLQPVVKLYQSCIRVSYIKNVLQQYDGSFSALIRTKFLNSLDEWLTEDRFGRFASLVETAIDLDQLENGEYRISPRYSSDLAVLKDELSEVENHINNLHKHTAADLDLTIDKQLKLEKGQLGHVFRISKKDEQKVRKKLTSNYIIIETRKDGVKFTSSKLKKLGDQYQALLVINLKFLSQVFENFAAILSELDVLQSFADLATSSPIPYVRPEITASEEGDIILEGSRHPCLEAQDGVNFIPNDCTLVREKSWFQIITGPNMGGKSTFIRQVGVNVLMAQVGSFVPCDRASISVRDCIFARVGAGDCQLRGVSTFMQEMLETASILKGLAWAICEHLVEVTRAPTLFATHFHELTALGHKSGDEHQHVPNLGIANYHVGAHIDPSSRKLTMLYKVEPGACDQSFGIHVAEFANFPEAVVALAKSKAEELEDFSTAPNFSDDSKDEVGSKRKRVFSPDDVTRGAARARLLLEELASLPLDEMDGTKAAETVTKLKSDFEKDAADNPWLQQFL

SEQ ID NO: 22876 - DNA, 2742 bp, Ostreococcus tauri
  CDS (1)..(2742)
atggcggacgcggacgcggagacgaaattcgcgcgcgtctacgcgcgattgatcgcggacgacggacgcgcgggcgagcgcgtcgtgcgattcttcgatcgacgagatttttattcggtgcacggtgcggacgcggagtacgtcgcgcggacgttttataagacgacgtcggtgatcaagcacacggggaggggagaagatgcgttggcgggcgtcacgctgaatcgcgccatgtttgagacggcgttgcgggagctgttgatcgagggcgcggagggcgctcgagtggagctgtacgaagagagcaagccgagcgggacgtggacgctttctaagacagcgtcgccgggtcgaacgcaggcgttcgaggaggagttgtttcgctcgaatgaaatgtcggatgccgcggtggtgtgcgcggttcgcgcgacgagcggcggcggcgtgggcgtggcgtacgtgaacgcgacgacgcgcgaattgggcgcgtgcgcgttcgtggacgatgaacagttttgcacgctcgagagcgtgttgtgtcagatgggcgcgaaggaatgcgtggtgccgaaggaaggtttggagacgcctgaggggagacggttgcgagacgtcgtcgcgagatgcggcgcgctagccacggagcgtccttcgcgagagtttgacgtgttggatctcgagagcgatcttgataggctgatcaagggcaatgtcgaggcgcatcgagcggtgatcgatcaaccaaactctgcggcgtgtctcgccgcggttttgcgtttcagcgagatgctcgccgatagcgccaatcatgggcgatgttcgctgagcatgtacgacaccggtcgttacatgcgtcttgacgcctcggcacttcgcgcgctgaactctttcggcttgctgaacaagtgccgaacccccatgggtcgacgtcttctctcgagatggctgaaacagccgctcgtcgacgtcggcgaaattgcccaacgacacgacgtcgtgcacgaatttgtgaactccgctgaggtcagagatgctcttcgcagtgctcaccttcgatctctaccggatattgagcgcatcactagaaagctcgaacggcgtaaggcgacgttgatggacctgtgtcgactgtatcaagcgagcgcagcgctcccgcacatggcggaggcgctggaacgatgcgaaggtcgattcgcggatttcattcgcaccaagtacgccgatgagctgaagaagttcagcgatccgagccatctcgggcgtttcgaaggtcttttagaggcggcggtggatctgagcaagattcctgacgagtatgttatctgcgcttcgtacgacgccgagcttggggagctgcaaaagcaaaaggacgtcctggaagaggacattcgaagcgcgttcgccgacgctagcaaagatttggggatggaacgagacaaacagttgaagttggagcacaacaacatgcacggctggtttatgagattgaccaagaaggatgagacctcagttcgcaagaagctaagcgtcagttatcaaattctcgaggcgaagaaggatgggaccaagtttacgaacaaaaagcttcgcgcgctctccgagcaacgcgtcgctctcgatcgtagctatgaggccaagcagcgtcacctcgtcgagcgcgtcgtcgacgtggcggcttcgttttctgaagtcttcctgaacgtctctgccatggccgcggagatcgacgttctcgtctccttcgctgaagtcgcagtgagcgcccccgtaccattcgttcgtccaatcatgcaggaaaagtcatctgacacgatccatttggagaattgtcgacacccgaacgtcgaagcgcaggacaacgtgcgattcatcgcgaacacgtgctcgatgaagaagggcgagtcttggtttcaaatcatcacgggtccgaacatgggtgggaagagtacgtttattcgccaggtgggcgtgtgcgtgctcctggcacagatcgggagtttcgtaccgtgtgatgaagcaacgatcgccgttcgggatgccatttttgctcgcgtcggagccggtgattgtcaactccgcggcatctccacgttcatggctgagatgctcgagacggcggctattttgaaggcagcaacgccttcgagtttggtcatcatcgatgagctcggtcgcgggacgagcacatacgacggctttggtctcgcttgggcgatcagcgagcacatagtgaacgagattcaggctccatgcatgttcgccacgcacttccacgagctcaccgcgctgaaaggtgcgagcggcgtcgccaactttcacgtcgaggcgctcatcgaccaggcgagccggaaacttaccatgttgtaccaaatcaagcccggtgcgtgcgatcaatcgtttgggattcactgcgccgagtttgctcggttccccgaggaagttctcaaggttgccagacaaaaggcggaggaactggaagatttcagcaaggaaggcgccgagcgagccgtcgcggatgtttccgaacccaacgccaagcgtcaacgcggcgaggaagtctccgacgacatggctcgcggcgtcatccgcgcacgccagtttctctctgacttcgccgcggtgccactcgagcgcatgtccccagccgaggccgtcgcccgtgcgagacagctcaaagctgaactcgagagcgacgccgcgcacaactcctggctcaccgatctcgtcgccaacgccgcgtga

SEQ ID NO: 22877 - protein, 913 aa, Ostreococcus tauri
MADADAETKFARVYARLIADDGRAGERVVRFFDRRDFYSVHGADAEYVARTFYKTTSVIKHTGRGEDALAGVTLNRAMFETALRELLIEGAEGARVELYEESKPSGTWTLSKTASPGRTQAFEEELFRSNEMSDAAVVCAVRATSGGGVGVAYVNATTRELGACAFVDDEQFCTLESVLCQMGAKECVVPKEGLETPEGRRLRDVVARCGALATERPSREFDVLDLESDLDRLIKGNVEAHRAVIDQPNSAACLAAVLRFSEMLADSANHGRCSLSMYDTGRYMRLDASALRALNSFGLLNKCRTPMGRRLLSRWLKQPLVDVGEIAQRHDVVHEFVNSAEVRDALRSAHLRSLPDIERITRKLERRKATLMDLCRLYQASAALPHMAEALERCEGRFADFIRTKYADELKKFSDPSHLGRFEGLLEAAVDLSKIPDEYVICASYDAELGELQKQKDVLEEDIRSAFADASKDLGMERDKQLKLEHNNMHGWFMRLTKKDETSVRKKLSVSYQILEAKKDGTKFTNKKLRALSEQRVALDRSYEAKQRHLVERVVDVAASFSEVFLNVSAMAAEIDVLVSFAEVAVSAPVPFVRPIMQEKSSDTIHLENCRHPNVEAQDNVRFIANTCSMKKGESWFQIITGPNMGGKSTFIRQVGVCVLLAQIGSFVPCDEATIAVRDAIFARVGAGDCQLRGISTFMAEMLETAAILKAATPSSLVIIDELGRGTSTYDGFGLAWAISEHIVNEIQAPCMFATHFHELTALKGASGVANFHVEALIDQASRKLTMLYQIKPGACDQSFGIHCAEFARFPEEVLKVARQKAEELEDFSKEGAERAVADVSEPNAKRQRGEEVSDDMARGVIRARQFLSDFAAVPLERMSPAEAVARARQLKAELESDAAHNSWLTDLVANAA

SEQ ID NO: 22878 - DNA, 2754 bp, Drosophila melanogaster
  CDS (1)..(2754)
atgcaggccaaagcaaccgacagcaggcaggaacctaccctgaatatggacacaaatgcgcgtcgcaatttcatcagattccatgcgaaactcggcgagaaacccgcaactacagtgaggttctttgatcacaccgatcgctatacggtccacggcagcgatgactgcgaacttgtggccaaaatcgtatacaaatccacggccttcattggcgcactgctgccggatgacaaaaaggagactcttcagtttgtgtccatgtccaagggcaacttcgagctggctgtgcgcgagctgctcttggtgcgcaattaccgggttgaggtgtacgttaagaattccagcgattgggaaatcgagtaccgcggatcacccggcaatctgctgcaattcgaggacatcctgttctccaataaggaggttttggtcgggaacagcatcatctcgctgctggttaagctcgatggcggtggccagcggcgtgtgggtgtggccagcgtcgagcagaacgactgcaagttccagctgcttgaattcctagacgatgacttcttcaccgaactggaggccaccgtggtcctgctcggaccaaaggagtgcctgctgccaagcatcgagggcgaatatagtgctgtgaagacgctgctcgacagaaatggtgtcatgattacgatgccaaagaagagcggcgacaacgatctgctgcaggatctaaatcgtcttttgcgtttcgccaagggacaacaggaggatgccacgggcttgaaggaactccagcttcagctggcctccaacgcactgaagaccgccatcaagtacctggacctggtcaatgacgccggaaatctgggacactacgagatcaagcaactggacctaaaccgctttgtccacttagattctgctgccgtggctgcgttaaacatcatgccaaagccaggcacacatccatctatgccctcgtatcgctggcaaagcgtcttgggcgtgctggatcattgccgtacaccacagggacatcgcctgatgggtcagtgggttaagcagccactgcgaagccgaaatatcctcaatgatcgtcataacattgtccagtgcctactcgaatctccagacacaatggagactttgagtctcgattatctgaagcgtattccggatattcttatgctaactaagaagataatgcgacgcaaagctaatttacaagatttattccgcatttaccaggtcattctgaggaccccgaaaattcttaaagttctgcatgagctcgataattcaacgatcgaaagtgtgatctgtgcgccttttaaaagcttcctaaaggatctgacagggctcaagcagatggtcgagcaggtggttgactttgaggccatcgaaaggggcgagtatctggtgaaggcttcgtttgacagccgtctaatggagctgcagcagatgatgacggagctttattcgaaaatggaagagttgcagttcaaatgcagtcaggaattgaatttggatggcaaaaaccaggtgaagctggaaagtgtggccaaattgggacaccacttccgcatcaccgtgaaagatgattccgtgctgcgcaagaacaagaactatcgcatcgtggatgtgatcaagggcggtgttcgcttcacatccgataagctggagggctacgccgatgagtttgccagctgccgcactcgctacgaggaacagcagctgtccattgtggaggagataattcatgtggctgtaggatatgctgccccgctcactttgcttaacaacgagcttgcccagctcgactgtttggtgagctttgctatcgccgcccgcagtgcgcccactccctatgtgcggcccaaaatgctggaggaaggtgctcgcgagctggttctcgaggatgtgcgtcatccttgtttggagctgcaggagcatgtcaacttcatagctaacagtgttgactttaagaaagaggagtgcaacatgtttataatcacgggacccaacatgggtggcaagagcacttatattcgctctgtgggtaccgctgtgctaatggcccatatcggagcttttgtaccctgcagcttggccacaatcagcatggtggactccattcttggaagagtgggagctagtgacaacatcatcaagggtttgagcacatttatggtcgagatgattgaaacatctggcataataaggactgccactgacaaatccttggtaatcatagacgaacttggtcgtggcacttccacgtacgaaggttgcggcatcgcctggtccattgctgaacatctggccaaggagaccaagtgcttcactttgttcgccactcattttcacgagataaccaagctggcggagaccctgtctacggttaaaaactgtcatatggccgcagttgcggatgctgatgactttactctgctgtatcaagtgcgttcgggggtcatggaaaaaagctttggcattcaggtggcgcgattggccaattttcccgagcatgtcgtccaaaacgcgcaggaggtgtacaatgagttcgaggacgagcatgtggacaagcagaagaaagaggataaggcactgctggaaaagattcaagtggctattcaacagctgtcaacagccgggaacaacgtggacattaacgtggaggatttgacccagctggtcacccagtttacgaaggatatcgagcagctggatagtgattacttcaaatctgtgctggccactagtgaggcttga

SEQ ID NO: 22879 - protein, 917 aa, Drosophila melanogaster
MQAKATDSRQEPTLNMDTNARRNFIRFHAKLGEKPATTVRFFDHTDRYTVHGSDDCELVAKIVYKSTAFIGALLPDDKKETLQFVSMSKGNFELAVRELLLVRNYRVEVYVKNSSDWEIEYRGSPGNLLQFEDILFSNKEVLVGNSIISLLVKLDGGGQRRVGVASVEQNDCKFQLLEFLDDDFFTELEATVVLLGPKECLLPSIEGEYSAVKTLLDRNGVMITMPKKSGDNDLLQDLNRLLRFAKGQQEDATGLKELQLQLASNALKTAIKYLDLVNDAGNLGHYEIKQLDLNRFVHLDSAAVAALNIMPKPGTHPSMPSYRWQSVLGVLDHCRTPQGHRLMGQWVKQPLRSRNILNDRHNIVQCLLESPDTMETLSLDYLKRIPDILMLTKKIMRRKANLQDLFRIYQVILRTPKILKVLHELDNSTIESVICAPFKSFLKDLTGLKQMVEQVVDFEAIERGEYLVKASFDSRLMELQQMMTELYSKMEELQFKCSQELNLDGKNQVKLESVAKLGHHFRITVKDDSVLRKNKNYRIVDVIKGGVRFTSDKLEGYADEFASCRTRYEEQQLSIVEEIIHVAVGYAAPLTLLNNELAQLDCLVSFAIAARSAPTPYVRPKMLEEGARELVLEDVRHPCLELQEHVNFIANSVDFKKEECNMFIITGPNMGGKSTYIRSVGTAVLMAHIGAFVPCSLATISMVDSILGRVGASDNIIKGLSTFMVEMIETSGIIRTATDKSLVIIDELGRGTSTYEGCGIAWSIAEHLAKETKCFTLFATHFHEITKLAETLSTVKNCHMAAVADADDFTLLYQVRSGVMEKSFGIQVARLANFPEHVVQNAQEVYNEFEDEHVDKQKKEDKALLEKIQVAIQQLSTAGNNVDINVEDLTQLVTQFTKDIEQLDSDYFKSVLATSEA

SEQ ID NO: 22880 - DNA, 2835 bp, Penicillium marneffei
  CDS (1)..(2835)
atgtcttcacggccggagctcaaagtcgacgatgaacctggattcattcgttttttccgatcgctaccttccaaagatgctatcaatgaaagtaatccgaccactatccgcttgtttgaccgtggcgactggtatacagcacacggcactgatgccgaattcattgcccgcaccgtttacaaaaccacttcggttttacgaacattaggccgaagtgactccggcggcttaccatcagtcactctgagtgtgactgtctttcgaaatttcctacgagaagctcttttccgtctgaacaagcgcatcgaaatctgggtgtctgcagagagtggaagaggacagtggaagttaggcaagcaggccagcccgggaaacttgcaggatgttgaagaggagctcggcggtgcgggtgggagtgcgatggattcggcgcccatcatccttgccgtcaaggtttccgctcgttcgtcagaggctaagaatattggtgtttgcttcgcggatgctagcgttcgagaactcggtgtgagcgaattcctcgacaacgatgtctactcaaatttcgagtcgcttgttatacagcttggagtaaaagaatgtgtcattcagcttgatagcaccaagaaagacgctgaactggcgaaacttagggctattgctgatacttgcggtgttgctataaccgagcgacccatggcagactttggtacgagagatattgagcaggatttaaccagactgttgcgtgatgaaagatcagctgctacattacctcaaacggagctgaagttggcgatgggcgccgctgctgctctgatcaaatacttaggagtcatgtcagattcgaccaatttcggtcaataccaactctatcagcacgatttgtcacaatacatgaaactagatgccgccgcattgcgtgccttgaatctcatgccgggcccacgagacggagcgaagaatatgagtttgtatggacttttgaaccattgcaaaacccctgtgggaagccgattgcttgctcaatggctcaaacagccactgatggatcaggcagagatagaaaaacgtcatcagttggttgaagcatttgttgtcgacacggaattacgacagactatgcaggaggagcatctgcgagcaatcccagacttatacagactggccaagcgctttcagcgtagtcaggctaatttggaggatgtggtacgagtttatcaggttgctatccgcttaccaggcttcgtccgcagcttcgaaaatgtcatggacgagcaataccaaactcctttggatgaccaatacacgacaaagctacgcaacctatctaacagtcttgcaaaattggaggagatggttgaaactacggttgaccttgatgcgctcgctaaccatgaatttatcatcaaacctgagttcgacgacagtctccgggtcattcgaaagaagctggacaagctccgatacgacatggatttggaacaccggcgggtcgctaaagacctaaatcaagacatggagaagaaactattcatggagaaccaccgcgttcatggttggtgcttcagattaaccagaaatgaagccgggtgtattcgcaacaaacgagagtatcaggagtgttcgacacagaagaacggagtatacttcaccacgagaacgatgcaagaacttcgcagagaacatgatcaattgtcatcgaactacaaccgcactcaatcaggcctagttcaagaggtagttaatgttgctacttcttactgccctgtgctagaacaactagccggcattctagctcatctagatgtcattgtgagttttgcccacgtatcggttcatgctccgacagcatatgctcggcccaagatgcaccctcgaggtacaggaaacactattcttaaagaagcacgtcatccatgcatggaaatgcaagacgatatctcatttatcacaaacgacgtgtcacttgtgcgaggtgaatcctcattcctcattatcacaggaccgaacatgggtggcaaatcaacctatattcggcagatcggtgttattgcgctgatggctcagattggctgcttcgtgccttgcactgaggcagagctgacaattttcgactgcattcttgctcgagtgggagcaagtgattcgcagctcaaaggtgtgtcaacttttatggctgaaatgctcgagacttcaaacatcttgaagtctgccacatccgaatcattgatcatcattgatgagcttggtcgaggaaccagtacttacgatggcttcgggcttgcatgggccatttccgagcatattgtcacggaaataggctgtttcggaatgtttgcaactcatttccatgagctaacggccttggccgatcgctatccaaaatccgtgaagaacctgcatgtggtcgcttttattagcgatgctaaggaaggagaaagcaataagaagagggaggtcacgctcctctaccgcgttgaacctggcgtctgcgatcagtctttcggtattcacgttgccgaactcgttcgcttcccggagaaggtggtcaatatggctcgacaaaaagcagaagaattagaagatttcaccacagcaacttccgataacacggagaagaaagaaacctcagcccttgacagctactcccaagacgaagtagaagaaggcagcgcactcttgaaatcaatgctactcaagtggaaggcagaaattgaagctccaggcagagagaacttgaccgcagaagaaaaacgacagatcatgcgcgacttggttacagcagatggcaacttgcaatcgaataaggtctttcagagcatcaaagctctttag

SEQ ID NO: 22881 - protein, 944 aa, Penicillium marneffei
MSSRPELKVDDEPGFIRFFRSLPSKDAINESNPTTIRLFDRGDWYTAHGTDAEFIARTVYKTTSVLRTLGRSDSGGLPSVTLSVTVFRNFLREALFRLNKRIEIWVSAESGRGQWKLGKQASPGNLQDVEEELGGAGGSAMDSAPIILAVKVSARSSEAKNIGVCFADASVRELGVSEFLDNDVYSNFESLVIQLGVKECVIQLDSTKKDAELAKLRAIADTCGVAITERPMADFGTRDIEQDLTRLLRDERSAATLPQTELKLAMGAAAALIKYLGVMSDSTNFGQYQLYQHDLSQYMKLDAAALRALNLMPGPRDGAKNMSLYGLLNHCKTPVGSRLLAQWLKQPLMDQAEIEKRHQLVEAFVVDTELRQTMQEEHLRAIPDLYRLAKRFQRSQANLEDVVRVYQVAIRLPGFVRSFENVMDEQYQTPLDDQYTTKLRNLSNSLAKLEEMVETTVDLDALANHEFIIKPEFDDSLRVIRKKLDKLRYDMDLEHRRVAKDLNQDMEKKLFMENHRVHGWCFRLTRNEAGCIRNKREYQECSTQKNGVYFTTRTMQELRREHDQLSSNYNRTQSGLVQEVVNVATSYCPVLEQLAGILAHLDVIVSFAHVSVHAPTAYARPKMHPRGTGNTILKEARHPCMEMQDDISFITNDVSLVRGESSFLIITGPNMGGKSTYIRQIGVIALMAQIGCFVPCTEAELTIFDCILARVGASDSQLKGVSTFMAEMLETSNILKSATSESLIIIDELGRGTSTYDGFGLAWAISEHIVTEIGCFGMFATHFHELTALADRYPKSVKNLHVVAFISDAKEGESNKKREVTLLYRVEPGVCDQSFGIHVAELVRFPEKVVNMARQKAEELEDFTTATSDNTEKKETSALDSYSQDEVEEGSALLKSMLLKWKAEIEAPGRENLTAEEKRQIMRDLVTADGNLQSNKVFQSIKAL

SEQ ID NO: 22882 - DNA, 2763 bp, Phaeosphaeria nodorum
  CDS (1)..(2763)
atggcgtccagaccggagatgcgagaggaggatgagacgggcttctgcaagttcttccgcaacctgcccgagaagaatgaggatacgattcgcatattcgaccgcaaagaatactacagtgcacacggcgaagatgcggtcttcatagcaaacacagtttacaagacaaccgccgtcatacgaaagctgggacgagacccgggcctggactccgtgacgatgacaaacatggtctaccgcaacttcctacgagacgccctcttcagactcagcaagcggatagagatatggcagtcgcccggccagcggatggactggaagatggcgaaacaggcatctccaggcaacttacaagatctcgaggaggagctgggcggtcagattgagaatgcgcccataatactggcggtgaaagttactgcgaaggcgtccgaggcacgcagcgtgggtgtctgcttcgcggatgccagcgtacgggagctaggtgtcaccgaattcctggacaatgacctctactccaacttcgaatcgctactcattcagctcggcgtcaaagaatgcttgatacaattagatgcatcaaagaaggacatcgagctgaacaagctccggaccatcgcagacaactgtggatgtgctgtagcagagcggagtgcgacggactttggcacaaaggacatcgagcaggacctgccacgattactcaaagacgaagctggcacactacctcagatggatctaaagcttgctatgggcgcagcttcttgtctgattcgatacctcggcctcatgtccgactcatcgaactttgggcagtaccagctctaccagcatgatctctcacaatacatgaagctagatgcggcggctttgaaggcgctgaacctcatgcctggaccgagagacggtgccaagaacatgagcttgtacggactgctgaaccattgcaagacaccaaccggcagccgactgcttgcacaatggctgaagcagccgctgatgaacgtggcagaaattgagcggcggcagcagctagtcgaagccttcgtcaacgatactgagctgaggcagaccatgcaagaagaacatctgcgctccataccggatctttaccgcctctctaagaaattccagcgcaaggtcgcaaatctggaggatgtcgttcgcgcataccaagtcatcatccgattacctggcttcctcagctcgcttgagtcagttatggacgagaagtacaaggatccacttgatgctgaatacaccgacaagctgcggcaattctcagccgcgttcgggggcctgcaggaaatggtcgagacaaccgtcgacctggacgcacttgataatcacgagttcatcatcaagcccgagttcgacgaggcattgcgaacgatccggaagcgcctagataagctcaagcgcgacatggagtctgagcatgcacgcgttggtgacgacctcaaccaggacacagagaagaaactcttcctagagaaccacaaagtacacggatggtgcttcaggcttacgcgcaatgagtctggcgctatcaggcagaagaagcagtaccaggagattcaaacgcagaagaacggcgtctactttacgacatcgacattgcaggataagcgaagagagtttgaccagatgtccgagaactacaatcgcacgcagtccggtttggtcaacgaagtggtctcggtcgcatcgtcgtacgtgccggtagtagagaagctggcggcggtactcgcacatcttgatgttattgttgctttcgcacacgtctcagtccacgcgccaacctcgtacactcgcccaaagatgcacgctcgaggcactggcaacactattctgaaggaagcacgtcatccgtgcatggagcagcaagacgacatctcgtttataaccaatgacattagcttgaaacgcggcgagagcgagttcctcatcatcacaggtcccaacatgggtggaaagtcgaccttcattcgccagacgggtgtcatcgctcttatggcgcaaattggctgctttgtccctgcagcagaagcagagctgaccatcttcgactgcatccttgcgcgagtcggcgccagcgatagctcaatcaagggtgtgtcaacattcatggcagagatgcttgagacggccaacatcctcaagtccgccaccaaagagtcgctcatcatcattgacgaacttggtcgcggcaccagcacctacgatggtttcggtcttgcctgggctatttcggagtacattgtaaaagagatcggcgccttcgcactctttgcgacgcacttccacgagttgactgcgctctcgaacacctacccacaagtcgagaatcttcacgtcgttgcgcacatctccgaaggcactgaagaaactgacagcggcgtgcaaaagaagcgcgaagtcactctcctctacaaagtcgagcctggcttctcggaccagtcattcggcattcacgtcgccgagctcgtccgcttcccacagaaagtcattaatatggcgaagcgcaaggccgatgagcttgaagacttttcgggtaagcatgaggataatttcgagcaagccagcaaggaggaggtcgaggagggaagcaagatgttgaaagagatgctggcgaaatggaaagaggaagtcgaaggaaagggcttgacgaagaaacagcaagtggagaggatgaaggaacttgtccacgaaaacgaggcgcttcaggccaacgggttcttcaagggcatacaagcgttgtaa

SEQ ID NO: 22883 - protein, 920 aa, Phaeosphaeria nodorum
MASRPEMREEDETGFCKFFRNLPEKNEDTIRIFDRKEYYSAHGEDAVFIANTVYKTTAVIRKLGRDPGLDSVTMTNMVYRNFLRDALFRLSKRIEIWQSPGQRMDWKMAKQASPGNLQDLEEELGGQIENAPIILAVKVTAKASEARSVGVCFADASVRELGVTEFLDNDLYSNFESLLIQLGVKECLIQLDASKKDIELNKLRTIADNCGCAVAERSATDFGTKDIEQDLPRLLKDEAGTLPQMDLKLAMGAASCLIRYLGLMSDSSNFGQYQLYQHDLSQYMKLDAAALKALNLMPGPRDGAKNMSLYGLLNHCKTPTGSRLLAQWLKQPLMNVAEIERRQQLVEAFVNDTELRQTMQEEHLRSIPDLYRLSKKFQRKVANLEDVVRAYQVIIRLPGFLSSLESVMDEKYKDPLDAEYTDKLRQFSAAFGGLQEMVETTVDLDALDNHEFIIKPEFDEALRTIRKRLDKLKRDMESEHARVGDDLNQDTEKKLFLENHKVHGWCFRLTRNESGAIRQKKQYQEIQTQKNGVYFTTSTLQDKRREFDQMSENYNRTQSGLVNEVVSVASSYVPVVEKLAAVLAHLDVIVAFAHVSVHAPTSYTRPKMHARGTGNTILKEARHPCMEQQDDISFITNDISLKRGESEFLIITGPNMGGKSTFIRQTGVIALMAQIGCFVPAAEAELTIFDCILARVGASDSSIKGVSTFMAEMLETANILKSATKESLIIIDELGRGTSTYDGFGLAWAISEYIVKEIGAFALFATHFHELTALSNTYPQVENLHVVAHISEGTEETDSGVQKKREVTLLYKVEPGFSDQSFGIHVAELVRFPQKVINMAKRKADELEDFSGKHEDNFEQASKEEVEEGSKMLKEMLAKWKEEVEGKGLTKKQQVERMKELVHENEALQANGFFKGIQAL

SEQ ID NO: 22884 - DNA, 2613 bp, Candidatus Kuenenia stuttgartiensis
  CDS (1)..(2613): transl_table=11
atgatcactgaaacccctatgatacgccaatataatgagatcaaaaaagatcacaaagatgcgctgcttttcttccgcatgggcgatttttatgaattattttttgaagacgcaaaaattgcctcaaagatattagggattacccttacttcccgttccaagggtgaaaatgcggttcctatggcaggcattcctcatcacgcctcagaatcctatacccgaaaactaatcaaagcaggtcataaagtggcgatctgcgaacaactgcaagaccccggcgaggcgaaaggaattgttgaccgcggggttatcagaatcattaccccgggcacggttacagaagatgcgctccttgatggtaaaaacaataattatttattggcactgtggaaggataaggaaatttttggcttgtcatggatagacctgtcaaccggaaaatttgaaattgaagatattcgggaagaacgcctttttgacgaattagcccggttaaacccctccgaaatagtgctgcccgacgatattacggaaagcaacgccaccttcacacaaaggataagaaccgaatgcaatgccatgattacaccgctgcccgcctgggaattctcggaaagcaccggctatcaggcattattggaacacttcggcacacattccctggaaggattcggatgccaggacgcaggagttgccctgggcgccgcaggcgcaatattgcattacctgaaagagacacaaaagacgtcgctcaaacacatcgccaaaatacaaaagtacgaaacaaacaaccgggtgattatggacagggcgacgcaacaaagcctggaactaacacaaactatccgaaacaaaaaccgcgagggatcgcttcttggagcgcttgatcagacaaaaacacctatgggcgcaagattgcttaaggattgggtcataagcccgctgaaaaatcacgatgagatcaaatatcgccagcttggggtaagagaattcaccgaaaaaccggagttgcgaagagaaatcatcgccatcttacacgatatttatgatattgaaaggattgcggcaaaggtaagctgcggacgtgcaaacgcacgcgacctcatatcgctgcagcaatctctctcaaaattgccggaactcaaggaaaaactggatttttttatcaccgctattatttcagacagagaaaaggagatcgacccccttgatgaattaagaacgctgataggcatggcaatatcacttgattcgccgcattctctcaaagaaggcggtattattaaagaagggtatgatgcagcgcttgatgaactacgctacatatccaaaaatggaaaacaatggattgcacattttcaggcggaagaaattgccaggacaaatattaattcccttaaggtaggatacaacaaggtttttgggtattatattgaaattaccaacactcaccgggaaaatatcccccctgcctatatcagaaaacaaaccttaaagaatgccgagcggtatatcacgccggagttaaaagagtatgaaacaaaagtgctcaccgcggaagaacgcgcaaaagacctggaatatgatctttttattcaattacgggacaaggcgggcacttttacgaaacagctccagggcatttcagaggcaattgcccaaattgacgtcctgtcaacattggctaagattgcagtagaaaacagatatgccatgcctgaaattacagacagtttggaactcaatataaacgacggctgccatcctgtgcttactatggaacttgatagagaaaggtttgtgcctaacgatataaatttagacggcgtccaggataagacgatggtcataactggtcccaacatggctggaaaaagcacctatatccgccaaacggcgcttctcgtaattatggcgcaaatgggcagttttatcccggcaaaaaatgcgactatcggcactgtagaccgtatttttgcgcgcgtcggcgcatccgacgagctatcaaaagggcaaagcaccttcatggtggaaatgaatgaaaccgcaaacatcctgaataatgccacagaacgtagtctgattatcttagatgaagtaggaagagggacaagcacttttgacggtatcagcattgcatgggcaattacagaatatatttaccaaaatatcggggcgcgaacgttatttgccacacattatcacgaattaacggaattatcgctgctcttctccggcattaagaatttcaatgtcgcggtgaaggaatggggagaagagataatcttcctgcgaaaaattgttgctggcggaacagataaaagctacggaatacatgttgcgcggcttgcaggaataccgaagcagattattcagcgtgcgcgctctattttgaacaacctggaagcggcgaccttagacataaacggcaaaccgaagtttgcccctttaaaaacagaccatgtaaaaaagccccgtcaacgaaaactctttgcctcaaaggaagatttggtaatcgatgaaataaaaaaactttctctcgatgaaatagcgccggctgacgccctaaataaacttgccgaattaaagaaaaggctttatgaagatgagtaa

SEQ ID NO: 22885 - protein, 870 aa, Candidatus Kuenenia stuttgartiensis
MITETPMIRQYNEIKKDHKDALLFFRMGDFYELFFEDAKIASKILGITLTSRSKGENAVPMAGIPHHASESYTRKLIKAGHKVAICEQLQDPGEAKGIVDRGVIRIITPGTVTEDALLDGKNNNYLLALWKDKEIFGLSWIDLSTGKFEIEDIREERLFDELARLNPSEIVLPDDITESNATFTQRIRTECNAMITPLPAWEFSESTGYQALLEHFGTHSLEGFGCQDAGVALGAAGAILHYLKETQKTSLKHIAKIQKYETNNRVIMDRATQQSLELTQTIRNKNREGSLLGALDQTKTPMGARLLKDWVISPLKNHDEIKYRQLGVREFTEKPELRREIIAILHDIYDIERIAAKVSCGRANARDLISLQQSLSKLPELKEKLDFFITAIISDREKEIDPLDELRTLIGMAISLDSPHSLKEGGIIKEGYDAALDELRYISKNGKQWIAHFQAEEIARTNINSLKVGYNKVFGYYIEITNTHRENIPPAYIRKQTLKNAERYITPELKEYETKVLTAEERAKDLEYDLFIQLRDKAGTFTKQLQGISEAIAQIDVLSTLAKIAVENRYAMPEITDSLELNINDGCHPVLTMELDRERFVPNDINLDGVQDKTMVITGPNMAGKSTYIRQTALLVIMAQMGSFIPAKNATIGTVDRIFARVGASDELSKGQSTFMVEMNETANILNNATERSLIILDEVGRGTSTFDGISIAWAITEYIYQNIGARTLFATHYHELTELSLLFSGIKNFNVAVKEWGEEIIFLRKIVAGGTDKSYGIHVARLAGIPKQIIQRARSILNNLEAATLDINGKPKFAPLKTDHVKKPRQRKLFASKEDLVIDEIKKLSLDEIAPADALNKLAELKKRLYEDE

SEQ ID NO: 22886 - DNA, 2856 bp, Physcomitrella patens
  CDS (1)..(2856)
atggacccagatagtatggagaagggggatgagccgaagctgcccgaattgaagctagatgttaagcaagcacaggggttcatttctttcttccgcaggcttcccgagaacgagcaagctgtgcgcttctttgaccgcagggattatttcactgctcatggtgataatgcaaccttcattgccagtacgtactataggacgctcacagttctcaggcagctggggagcggggctgattctctccctggtgtgaccatcaacaaaagcatgtttgagactattgtgagggatctcttgctagaaagaactgattgcactgttgaactctatgagggcaccggatctaagtggcaacttgttaggagcgggtctcctggcaagcttggcagctttgaggaggtcctgttcgcaagcaatgagatgcaggaaactcctgtagtcatggctgtaaatattactacacgtcaaagcgagcggtgtgttgggatagcattcgtggatatgacgaagaggcagcttggaatgacagagttcttagacgatgacctatacaccagtttggagtccgccatggtagctttaagctgtcgtgaatgtatcatacccatgccaaccgctgccaagtcccctgatgatcgtaaacttcgtgatgtaatggcacgctgcaatgttttggttactgagaagaagaaatctgattttaggtcgcgagatgtagaacaagatttaggccgattagtcaaaggtcctgctgagcaacataaggaactggtggcagcatctgatttagcggctgctgctcttgccgcgcttctgacatatactgaactcctctctgatgacacaaattatggaaaatacgtcattcagccctacagtctggacctctacatgcgattggatgcagcagctttacgagctctcaatgtcactgagagcaaaacggattctaacaagcatcttagtctgtttggtttgatgaaccggacttgcacccaaggtatgggaaaaagattgctgaaccggtggttgaaacaacccctagtggatgttgttgagataaccaaaaggctggatacagtgcaagcgtttgtggaggatctagaattaaggcaggacttgcggtctcacctacggcgaatgcctgacattgagcgcttggttagcaagcttgagaagcgcaaagcgggattgcaagatgttgtgagattgtatcaggccagtttgaggctgcctttgattcgaacctgcctggagaagtatgacggagagttttccaaggatttgcaagagaaatacggcgcccatcttgatgtatggacacagccaaatcatctaggaaaatttgatggattagtcgaggcagctgtcgatctcgaacagctccagaatggagagtatatatatttcagcagattatgccaacagtcttcaagagctcaaaactgggcgcgacgatgtgaaaggcagatacttaaagttcaccagcagtcagcagatgacctggggcttcctgcggaaaagtcattgaagttggataagagtacacagtatggacatgtttttaggattactaagaaggaagagccgaaggttaggaaaaaattgaatagtcaatacataaccttggaaactaggaaagacggcataaagttcacgaatgccaagctgcgaaggttgagtgaacagtacacaaagctcacagaggaatactcgagtgcacagcgagagcttgttgcaaaggttgtggatgttgcagcaacatttgttgagattttctcaggagttgcagttcttctggctgatatggatgtacttcttagctttgctgacttagcttcctgcagtcccgtaccttacgtcaggccctcaatcacttctgctgatgaaggtgacataattctggaaggaagtcggcatccatgtgtagaagcccaggatgacgtcaatttcatttccaacgattgtcgattggtgcgaggcaagagctggtttcagattatcacaggacccaatatgggtggaaagtccaccttcattagacaggttggtgtgaacgtgttaatggctcaagttggatgctttgtaccatgcgaccgagcagagatcagtgtgcgtgattgcatctttgcgcgtgttggtgctggagattgccagctacgcggagtgtcaacatttatggctgaaatgctggaaacagccagcattattaagtctgctacagagcgttctttgatcattattgatgaacttggtcggggtacttcaacttacgatggatttggtttggcgtgggcaatatgtgagtacttagtggaggtcactcgtgcacccactctctttgcaacccactttcacgagctaacagctttagaacattcaaactctccacctgtccatggacctcccagaggtccacttgtagggattgccaactatcacgttagtgctcatatcgacacaaaatcacagaaacttgccatgctctacaaggttgaagagggaccttgcgaccaaagttttggtatccatgtagctgagtttgcgcattttcctgaaagtgttgttgaactcgctaagcagaaagcggcagaattagaggatttctctgatactgggaaggatgtttcaggggggcttagtaaggatgaggttggcactaagcgaaagagagtaagtggccctgatgacaaggtattaggagctgggcgggtgcgaaggttccttcaagagatggcagcattgcctgtagacaaaatgagtcgtgaggagacttatgccaaattaaaggccttgaaaagtgagtttgacagagacgccgcaacaaactcatggctgcaacagatagttcattga

SEQ ID NO: 22887 - protein, 951 aa, Physcomitrella patens
MDPDSMEKGDEPKLPELKLDVKQAQGFISFFRRLPENEQAVRFFDRRDYFTAHGDNATFIASTYYRTLTVLRQLGSGADSLPGVTINKSMFETIVRDLLLERTDCTVELYEGTGSKWQLVRSGSPGKLGSFEEVLFASNEMQETPVVMAVNITTRQSERCVGIAFVDMTKRQLGMTEFLDDDLYTSLESAMVALSCRECIIPMPTAAKSPDDRKLRDVMARCNVLVTEKKKSDFRSRDVEQDLGRLVKGPAEQHKELVAASDLAAAALAALLTYTELLSDDTNYGKYVIQPYSLDLYMRLDAAALRALNVTESKTDSNKHLSLFGLMNRTCTQGMGKRLLNRWLKQPLVDVVEITKRLDTVQAFVEDLELRQDLRSHLRRMPDIERLVSKLEKRKAGLQDVVRLYQASLRLPLIRTCLEKYDGEFSKDLQEKYGAHLDVWTQPNHLGKFDGLVEAAVDLEQLQNGEYIYFSRLCQQSSRAQNWARRCERQILKVHQQSADDLGLPAEKSLKLDKSTQYGHVFRITKKEEPKVRKKLNSQYITLETRKDGIKFTNAKLRRLSEQYTKLTEEYSSAQRELVAKVVDVAATFVEIFSGVAVLLADMDVLLSFADLASCSPVPYVRPSITSADEGDIILEGSRHPCVEAQDDVNFISNDCRLVRGKSWFQIITGPNMGGKSTFIRQVGVNVLMAQVGCFVPCDRAEISVRDCIFARVGAGDCQLRGVSTFMAEMLETASIIKSATERSLIIIDELGRGTSTYDGFGLAWAICEYLVEVTRAPTLFATHFHELTALEHSNSPPVHGPPRGPLVGIANYHVSAHIDTKSQKLAMLYKVEEGPCDQSFGIHVAEFAHFPESVVELAKQKAAELEDFSDTGKDVSGGLSKDEVGTKRKRVSGPDDKVLGAGRVRRFLQEMAALPVDKMSREETYAKLKALKSEFDRDAATNSWLQQIVH

SEQ ID NO: 22888 - DNA, 3080 bp, Petunia hybrida
  CDS (97)..(2925)
acgcgggggccaatcttacatttctccattttccataaaatccttttattttcctttctactgcagaaattaaaaataaaaattaaagaaattaaaatggatacaaattttgaggaacaagccaagcttcctgagcttaaacttgatgctaggcaagctcaagggtttctctcattcttcaaaactctacctaaggacactagggctgttcgtctctttgatcgtcgggactattatactgctcatggagatgatgcttctttcattgcaaagacatattaccatacaacatctgctttacgacagttgggtaatggagctgatgctctttccagtgttactgtgagtagaaacatgtttgaaacaatagctcgtgacattctcttggagagaatggatcgtactcttgaattatatgaaggtagtggttcaaactggagactggtcaaaaatggaacgcctggagttcttggaagtttcgaggatatactgtttgcaaataatgaaatgcaagattctccagtgattgttgctcttgctccaaactccagtcagaatggatgtacaattgggttaggttatgttgacattactaagagaatccttggtttagcagagtttctagatgatagccacttcaccaatttggagtctgctttggttgcccttggttgcagagaatgtcttgtaccagcagagactgggaaatccagtgaatacaggcctctgtatgacgcaatctcaagatgtggcgtgatggtaactgaaagaaagaaagctgaatttaaagggagggatttggtacaggatcttggaaggctcgtcaagggttcaacagaacctgttcgagatttagtctctggcttcgaatgcgcagcaggtgctttagggtgcatactttcttatgcggaactactcgcagatgagagcaattatggaaactatatagtcaaacaatacaacctcagcagttacatgagattagattcagctgctatgagagcactgaatgtcatggagagcaaaacagatgctaataaaaattttagcttgttcggtctcatgaatagaacctgtactgctggaatgggtaaaaggttattgcacatgtggctaaagcagcctttactagatgtagataagattaactgtagactcgatttagttcaggcatttgtggaggatgcagcactccgccaagatttgaggcagcatctgaaaagaatcgcagatattgagcggctgacacgcaatcttgagaggaaaagagccagtttagtgcatgttgtaaaactctatcagtcaagcatcagattaccatatatcaaaagtgttttggcacgatatgatgggcaatttgcaacacttatcagggaaaaatatattgatcctctagagaatttgagtgatgataatcacctgaataagttcattggtcttgtggaaacttctattgaccttgatcaacttgagagtggagaatacatgatttcttctgcatatgacccaaatttatctgctctgaaggacgagcaagaaacattggagcgacatattcataatctgcacaaacaaactgccaatgatcttgatctacctgttgataaatcgcttaaactagataaagaaacaacatttggacacgtcttcagaattactaagaaagaagaaccaaaaatcaggaagcagctaaattctcattacattattcttgaaactcgtaaggatggggttaagtttaccaatacaaaactcaaaaagctaggagatcagtaccaaaagatcgttgaggagtataagagctgtcagaaggaattggtagctcgtgtagttcaaacagctgcgagtttttctgaggtgtttgaaggtatagctggttcactttctgagttagatgtgttactgagtttagccgatttggctgccagttgtccaactccctacacaagaccaaatatcactccaccggatacaggagatatcatacttgaagggtgtagacatccttgtgtggaagctcaagactgggttaacttcatccctaatgactgtagactagttaggggagagagttggtttcagattatcacgggccctaacatgggtggaaaatcaacgtacattcggcaggttggtgtcaatatcctgatggcccaagttggctcatttgttccatgtaacaatgcttcaatttctattcgtgattgtatttttgctcgtgttggcgctggagattgccagctgagaggagtttctacttttatgcaagagatgcttgagactgcatctatcttgaaaggagctactgataaatcattgattataattgatgagttgggccgtgggacatcaacctatgatggctttggtttagcttgggctatttgtgagcacattgttgaggtaattaaagcaccaacactgtttgccactcactttcatgagctgactgcattggccaacgcgaatggagacaatgggcataagcaaattgctggtgtagcaaattttcatgtcagtgcacacatcgacgcttctagtcgcaagctaactatgctgtacaaggttcaaccaggtgcttgtgatcaaagttttggtattcacgtagcagagtttgcaaattttccacgaagcgttgtggacctggctagagaaaaggcatctgagttggaggatttctctcctaatgccatgattttaaatgatggtgaaaaggcagcctcaaaacggaagagaaactttgaccccaatgatgtgtctagaggttctgcccgagctcgtcaattcttagaggatttcactaacttgccactggataagatggatcaaaagcaagccttgcaacagttgagcaaaatgaaaaccgacctcgagagggatgcagttgactgtaactggcttcagcagttctttagtttaaattagaccaatcttattttgtgaagctttgctgggggaatgacactgaaaggctttgtgtatataacttggccaaattttgaacatgattctctgtaatcaggggatctttgtgtgcatcctgtgttcatagtaaacgttaatttatgggtcagaaaaaa

SEQ ID NO: 22889 - protein, 942 aa, Petunia hybrida
MDTNFEEQAKLPELKLDARQAQGFLSFFKTLPKDTRAVRLFDRRDYYTAHGDDASFIAKTYYHTTSALRQLGNGADALSSVTVSRNMFETIARDILLERMDRTLELYEGSGSNWRLVKNGTPGVLGSFEDILFANNEMQDSPVIVALAPNSSQNGCTIGLGYVDITKRILGLAEFLDDSHFTNLESALVALGCRECLVPAETGKSSEYRPLYDAISRCGVMVTERKKAEFKGRDLVQDLGRLVKGSTEPVRDLVSGFECAAGALGCILSYAELLADESNYGNYIVKQYNLSSYMRLDSAAMRALNVMESKTDANKNFSLFGLMNRTCTAGMGKRLLHMWLKQPLLDVDKINCRLDLVQAFVEDAALRQDLRQHLKRIADIERLTRNLERKRASLVHVVKLYQSSIRLPYIKSVLARYDGQFATLIREKYIDPLENLSDDNHLNKFIGLVETSIDLDQLESGEYMISSAYDPNLSALKDEQETLERHIHNLHKQTANDLDLPVDKSLKLDKETTFGHVFRITKKEEPKIRKQLNSHYIILETRKDGVKFTNTKLKKLGDQYQKIVEEYKSCQKELVARVVQTAASFSEVFEGIAGSLSELDVLLSLADLAASCPTPYTRPNITPPDTGDIILEGCRHPCVEAQDWVNFIPNDCRLVRGESWFQIITGPNMGGKSTYIRQVGVNILMAQVGSFVPCNNASISIRDCIFARVGAGDCQLRGVSTFMQEMLETASILKGATDKSLIIIDELGRGTSTYDGFGLAWAICEHIVEVIKAPTLFATHFHELTALANANGDNGHKQIAGVANFHVSAHIDASSRKLTMLYKVQPGACDQSFGIHVAEFANFPRSVVDLAREKASELEDFSPNAMILNDGEKAASKRKRNFDPNDVSRGSARARQFLEDFTNLPLDKMDQKQALQQLSKMKTDLERDAVDCNWLQQFFSLN

SEQ ID NO: 22890 - DNA, 2871 bp, Kluyveromyces lactis
  CDS (1)..(2871)
atgcggcctctagatgcatgctcgagatttaccatattgcagaggagcgaggattctcaagaggtttttacaacttctcaaaggagtcagaatactattagattagttgacaaatccgattattacattgtggttggtgatgatgcgttatttgtggcagatcaagtataccatacatcatcagtattgaaagattgcaagatcgatcctagcacacttcgccaatttgatttacaggaaccattgaaatatgtgaccatgtctattcaaatagtgggcaatcttttgaagacatcactattggaactaggcaaaaagatcgaaatctacgatagaaactggaaacttttgaaaacagcttcaccaggtaacctcgaacaagtagatgatttaatagtagggtcagtggaaacgaacatcgttttagcaagtttgaaattaaattttaatggtactgctgcatcaaattattgcacaattggtgtttcatttgttgacaacacgaactacagaattgggttatttgatctactagacaacgaggttttctctaacttagaaagttgtttaattcaacttggtataaaggaatgtctaattccagatttgcgtgataatcctagtatggcaaatgatttaaagaagatattgagcgtcattgatcgctgttcttgtgtcgcatcctttgttaagcctagcgactttaacggaaaagacgttgaagccgatttagcaaagctttgcggtgatgaattatccttatcagtgtcaaagttttctgcaaactgtctaggtgcatgtagtgtcttattgaactacctaaacataatgaataacgaggccaacgttggaaactttgaagttgtggatcactctctttcgcaatttgtaaagttagatgcttctgcaatcaaagcactaaatgtgttccccacaggctcacagggtaatactgctcttttaagcgtcggctctcctcaaaaatgttcaagtcttttccagttgttgaatagatgtaaaactaattccggcgtaaggttgttgaacgagtggctgaagcaacccttgaccgacatcgaccagattaccaaaaggcatgatctagttgaatttttcatggatcagttagaattaagatcttctctacaagaagaatgcttacctagtgttccagatatccgcagactaacaaagaaacttcaaaaaaatgggaacttagaagatgttctcaagatttatcagtttgcacaaatggttccagttatttcagatctgttgaaacagaagtccgaagaggttgattctaatgatttaatgatactcgtgaaagaggttttactcgatccaatgttagaaaatgcaaatcctcttgagaaattgaaagagttggtagagaccactgttgatctagaagcttacgaggaaacaaatgaattcatgatcaaagtcgaatttaatgaacaattatctatcattagaactcatcttgatgaattaaaagatgctataagaacaatacacttagacactgctgatgatttgggcttcgatccagaaaagaaattgaaactagaaaaccaccatttacatggatggtgtatgcgattaacacgtaatgatgcaaaggccctacgtcaacataagaaatacattgagttgtccactgtaaaggctggtatattcttttcaacaaaagaactaaaaaatattgccgaagagacctcagaactacaaaaaaaatatgaacaacagcaagcatcgttagtcaaagaaattgtttcgattactctaagctatacaccggttttagagaagctttctgttgtaactgctcaactagacattctttgttcattcgcgcaagtatcttcatatgcgccaattccctatgttcgtccgaagatgtatccattgaacgatcaaaacagaacaacagaacttatagcatctcgccatcccattgtagagatgcaagacgatgttaccttcatttcaaatgatgtaaaattagtacagggtgattctgaattcatagtcattactggtcctaatatgggtggtaaatccacttacatcaggcagattggtgtaatatgtctaatggctcaaattggatgctttgttccatgcgacgaggcaaaaattgctgctgttgatgccatactatgccgtgttggagctggtgattctcaattgaagggtgtctccaccttcatgatggaaatgttagaaacagcgtcaatattgaagaatgccactcacaactcactagttatcgttgatgaattaggacgtggtacaagcacatatgatggttttggactagcatggtctatttccgaacacattgccaccaacatcaattgtttcacattgtttgctacacatttccatgaactcacgacgttggctgacaagctagacaatgtttctaacatgcacgtcgttgctcatatcgaggataatggatctcataattctgatgatataacgctactatacaaagtcgaggctggtagttcagaccagtccttcggtatacatgtcgccgaagtggtccaattcccaagcaaaattgttaatatggccaaacgtaaggctgccgaattagaagatttgaagaaagataatgattctctcaaaaaggcaaagctttcacctgaggatatagtgctgggaacagaatcactcaagaagtcgttaaaagtctggtgcaaagagttgaaaaagaataaccttattgataggctagatgacccgtccgtacaagaagaatgtgtcgataaattaaaacagcaaattgacaatttggcacgagaagaagatacgacatctctgtttgtagattgggttcgtgacacactattatga

SEQ ID NO: 22891 - protein, 956 aa, Kluyveromyces lactis
MRPLDACSRFTILQRSEDSQEVFTTSQRSQNTIRLVDKSDYYIVVGDDALFVADQVYHTSSVLKDCKIDPSTLRQFDLQEPLKYVTMSIQIVGNLLKTSLLELGKKIEIYDRNWKLLKTASPGNLEQVDDLIVGSVETNIVLASLKLNFNGTAASNYCTIGVSFVDNTNYRIGLFDLLDNEVFSNLESCLIQLGIKECLIPDLRDNPSMANDLKKILSVIDRCSCVASFVKPSDFNGKDVEADLAKLCGDELSLSVSKFSANCLGACSVLLNYLNIMNNEANVGNFEVVDHSLSQFVKLDASAIKALNVFPTGSQGNTALLSVGSPQKCSSLFQLLNRCKTNSGVRLLNEWLKQPLTDIDQITKRHDLVEFFMDQLELRSSLQEECLPSVPDIRRLTKKLQKNGNLEDVLKIYQFAQMVPVISDLLKQKSEEVDSNDLMILVKEVLLDPMLENANPLEKLKELVETTVDLEAYEETNEFMIKVEFNEQLSIIRTHLDELKDAIRTIHLDTADDLGFDPEKKLKLENHHLHGWCMRLTRNDAKALRQHKKYIELSTVKAGIFFSTKELKNIAEETSELQKKYEQQQASLVKEIVSITLSYTPVLEKLSVVTAQLDILCSFAQVSSYAPIPYVRPKMYPLNDQNRTTELIASRHPIVEMQDDVTFISNDVKLVQGDSEFIVITGPNMGGKSTYIRQIGVICLMAQIGCFVPCDEAKIAAVDAILCRVGAGDSQLKGVSTFMMEMLETASILKNATHNSLVIVDELGRGTSTYDGFGLAWSISEHIATNINCFTLFATHFHELTTLADKLDNVSNMHVVAHIEDNGSHNSDDITLLYKVEAGSSDQSFGIHVAEVVQFPSKIVNMAKRKAAELEDLKKDNDSLKKAKLSPEDIVLGTESLKKSLKVWCKELKKNNLIDRLDDPSVQEECVDKLKQQIDNLAREEDTTSLFVDWVRDTLL

SEQ ID NO: 22892 - DNA, 2754 bp, Drosophila melanogaster
  CDS (1)..(2754)
atgcaggccaaagcaaccgacagcaggcaggaacctaccctgaatatggacacaaatgcgcgtcgcaatttcatcaaattccatgcgaaactcggcgagaaacccgcaactacagtgaggttctttgatcacaccgatcgctatacggtccacggcagcgatgactgcgaacttgtggccaaaatcgtatacaaatccacggccttcattggcgcactgctgccggatgacaaaaaggagactcttcagtttgtgtccatgtccaagggcaacttcgagctggctgtgcgcgagctgctcttggtgcgcaattaccgggttgaggtgtacgttaagaattccagcgattgggaaatcgagtaccgcggatcacccggcaatctgctgcaattcgaggacatcctgttctccaataaggaggttttggtcgggaacagcatcatctcgctgctggttaagctcgatggcggtggccagcggcgtgtgggtgtggccagcgtcgagcagaacgactgcaagttccagctgcttgaattcctagacgatgacttcttcaccgaactggaggccaccgtggtcctgctcggaccaaaggagtgcctgctgccaagcatcgagggcgaatatagtgctgtgaagacgctgctcgacagaaatggtgtcatgattacgatgcccaagaagagcggcgacaacgatctgctgcaggatctaaatcgtcttttgcgtttcgccaagggacaacaggaggatgccacgggcttgaaggaactccagcttcagctggcctccaacgcactgaagaccgccatcaagtacctggacctggtcaatgacgccggaaatctgggacactacgagatcaagcaactggacctaaaccgctttgtccacttagattctgctgccgtggctgcgttaaacatcatgccaaagccaggcacacatccatctatgccctcgtatcgctggcaaagcgtcttgggcgtgctggatcattgccgtacaccacagggacatcgcctgatgggtcagtgggttaagcagccactgcgaagccgaaatatcctcaatgatcgtcataacattgtccagtgcctactcgaatctccagacacaatggagactttgagtctcgattatctgaagcgtattccggatattcttatgctaactaagaagctaatgcgacgcaaagctaatttgcaagatttattccgcatttaccaggtcattctgaggaccccgaaaattcttaaagttctgcatgagctcgataattcaacgatcgaaagtgtgatctgtgcgccttttaaaagcttcctaaaggatctgacagggctcaagcagatggtcgagcaggtggttgactttgaggccatcgaaaggggcgagtatctggtgaaggcttcgtttgacagccgtctaatggagctgcagcagatgatgacggagctttattcgaaaatggaagagttgcagttcaaatgcagtcaggaattgaatttggatggcaaaaaccaggtgaagctggaaagtgtggccaaattgggacaccacttccgcatcaccgtgaaagatgattccgtgctgcgcaagaacaagaactatcgcatcgtggatgtgatcaagggcggtgttcgcttcacatccgataagctggagggctacgccgatgagtttgccagctgccgcactcgctacgaggaacagcagctgtccattgtggaggagataattcatgtggctgtaggatatgctgccccgctcactttgcttaacaacgagcttgcccagctcgactgtttggtgagctttgctatcgccgcccgcagtgcgcccactccctatgtgcggcccaaaatgctggaggaaggtgctcgcgagctggttctcgaggatgtgcgtcatccttgtttggagctgcaggagcatgtcaacttcatagctaacagtgttgactttaagaaagaggagtgcaacatgtttataatcacgggacccaacatgggtggcaagagcacttatattcgctctgtgggtaccgctgtgctaatggcccatatcggagcttttgtaccctgcagcttggccacaatcagcatggtggactccattcttggaagagtgggagctagtgacaacatcatcaagggtttgagcacatttatggtcgagatgattgaaacatctggcataataaggactgccactgacaaatccttggtaatcatagacgaacttggtcgtggcacttccacgtacgaaggttgcggcatcgcctggtccattgctgaacatctggccaaggagaccaagtgcttcactttgttcgccactcattttcacgagataaccaagctggcggagaccctgtctacggttaaaaactgtcatatggccgcagttgcggatgctgatgactttactctgctgtatcaagtgcgttcgggggtcatggaaaaaagctttggcattcaggtggcgcgattggccaattttcccgagcatgtcgtccaaaacgcgcaggaggtgtacaatgagttcgaggacgagcatgtggacaagcagaagaaagaggataaggcactgctggaaaagattcaagtggctattcaacagctgtcaacagccgggaacaacgtggacattaacgtggaggatttgacccagctggtcacccagtttacgaaggatatcgagcagctggatagtgattacttcaaatctgtgctggccactagtgaggcttga

SEQ ID NO: 22893 - protein, 917 aa, Drosophila melanogaster
MQAKATDSRQEPTLNMDTNARRNFIKFHAKLGEKPATTVRFFDHTDRYTVHGSDDCELVAKIVYKSTAFIGALLPDDKKETLQFVSMSKGNFELAVRELLLVRNYRVEVYVKNSSDWEIEYRGSPGNLLQFEDILFSNKEVLVGNSIISLLVKLDGGGQRRVGVASVEQNDCKFQLLEFLDDDFFTELEATVVLLGPKECLLPSIEGEYSAVKTLLDRNGVMITMPKKSGDNDLLQDLNRLLRFAKGQQEDATGLKELQLQLASNALKTAIKYLDLVNDAGNLGHYEIKQLDLNRFVHLDSAAVAALNIMPKPGTHPSMPSYRWQSVLGVLDHCRTPQGHRLMGQWVKQPLRSRNILNDRHNIVQCLLESPDTMETLSLDYLKRIPDILMLTKKLMRRKANLQDLFRIYQVILRTPKILKVLHELDNSTIESVICAPFKSFLKDLTGLKQMVEQVVDFEAIERGEYLVKASFDSRLMELQQMMTELYSKMEELQFKCSQELNLDGKNQVKLESVAKLGHHFRITVKDDSVLRKNKNYRIVDVIKGGVRFTSDKLEGYADEFASCRTRYEEQQLSIVEEIIHVAVGYAAPLTLLNNELAQLDCLVSFAIAARSAPTPYVRPKMLEEGARELVLEDVRHPCLELQEHVNFIANSVDFKKEECNMFIITGPNMGGKSTYIRSVGTAVLMAHIGAFVPCSLATISMVDSILGRVGASDNIIKGLSTFMVEMIETSGIIRTATDKSLVIIDELGRGTSTYEGCGIAWSIAEHLAKETKCFTLFATHFHEITKLAETLSTVKNCHMAAVADADDFTLLYQVRSGVMEKSFGIQVARLANFPEHVVQNAQEVYNEFEDEHVDKQKKEDKALLEKIQVAIQQLSTAGNNVDINVEDLTQLVTQFTKDIEQLDSDYFKSVLATSEA

SEQ ID NO: 22894 - DNA, 2829 bp, Zea mays
  CDS (1)..(2829)
atggagggcgacgacttcacgccggagggcggcaagctccccgagttcaagctagatgcgagacaagcgcagggtttcatctccttcttcaagaagctgccgcaggatccccgggccgttcgtctcttcgatcgcagggattattacactgcccatggcgagaatgctacgtttatcgcaaggacatactaccacacaatgtctgccttacgtcaactaggtagcagctctgatggaatcttaagtgccagcgtgagcaaggctatgtttgagaccattgcccgcaacattttgttggaaaggactgactgtacattggaactctatgagggaagtgggtcaaattggaggttaacaaagtccggaacacctggaaatattggtagttttgaagacattctgtttgcaaacaatgacatggaagattcaccagtgattgttgctttgtttccagcgtgccgggaaagtcagctgtatgtagggcttagttttttggatatgaccaataggaagcttgggttggctgagtttcccgaagatagccgattcactaatgttgaatcagctcttgttgcattaggttgcaaggagtgtcttctcccagcagattgtgaaaaatccattgacctaaatccccttcaagacgtcattagtaactgtaatgttctgttgactgagaaaaagaaggctgacttcaaatccagggatctcgcacaagatcttggtagaataatcaggggttctgttgagcctgtacgtgatctactatctcagtttgactatgcccttggtccccttggagctcttttatcttatgccgagttgctagcagatgacactaactatggaaattacacaattgagaagtacaatttgaactgctacatgcgacttgattctgctgcagttcgagcattaaacattgcagaagggaaaactgatgtaaacaagaacttcagtttgtttggtttgatgaacagaacttgtactgttgggatgggaaaaagattgctgaacagatggctgaaacaacctctattagatgttaatgaaattaataaccgactagacatggttcaggcttttgtagaagacccagaacttcgtcagggactccggcaacaacttaaaaggatatcagatattgatcgtctaacacatagtctccgaaagaaatcagctaatctgcagcctgttgttaagctttatcagtcctgtagcagaatcccatacatcaagggcattcttcagcaatataatggccaattttcaacattgataaggtcaaagtttcttgaaccgttagaagaatggatggcaaagaatcgatttggtcggttttcttctcttgttgagacagctattgatcttgctcagctggagaatggagagtacagaatatctcctctatattcttctgacttgggtgtactaaaggatgagctttctgtggttgaaaaccacataaacaatctgcacgtggatacagctagtgatctggatctttctgttgataagcaactgaagctagaaaaaggatcccttggacatgtgttcagaatgtcaaagaaagaggaacagaaagtcaggaagaaactcactggcagctacttaatcatagaaactcgtaaagatggtgtaaagttcacaaattctaagctgaaaaatctaagtgatcaataccaggcattgtttggtgagtacacaagttgtcagaaaaaggtggttggtgatgtagtgagggtttcaggcacattctcagaggtatttgaaaattttgctgcagttctgtcggagttggatgttttacaaagttttgctgatttggcaactagttgcccagttccttatgttaggccagacatcactgcgtcggatgaaggagatattgttctactgggtagcagacatccttgtctagaggcacaagatggtgttaactttatacccaatgattgcactctggtgagagggaaaagttggtttcagatcatcactggaccaaacatgggaggaaaatccacatttataagacaggttggtgtaaatgtattgatggcacaagttggttcctttgtaccttgtgatcaagcaagcattagtgtgagggattgtatttttgctcgtgttggcgctggtgattgccaacttcatggtgtatcaacttttatgcaagaaatgcttgaaacagcatccatcctaaaaggcgcctctgataagtctcttataattattgatgagctggggcgtggaacttccacatatgatggatttggtcttgcatgggctatctgtgagcatcttatggaagtgactcgagcgcctaccttgtttgcaacccatttccatgaactaactgcattagcacatagaaatgatgatgagcaccaacacatttcagacatcggagttgcaaattatcacgtgggtgctcacatagacccattaagtaggaagttaactatgctttacaaggttgaacctggtgcatgcgaccaaagttttggtattcatgttgcagaatttgctaattttccagaagctgttgttgcccttgcgaaaagcaaagcagcagagttagaagacttttctactacacctaccttttccgatgatttgaaagacgaggttggatcaaagcgcaagagggtatttagcccagatgacatcaccagaggagctgcacgggctcggcttttccttgaggaattcgccgcattgcctatggatgagatggatgggagcaagatcttggagatggccaccaagatgaaagctgacttgcagaaagatgcagctgacaatccttggctccagcagttcttctga

SEQ ID NO: 22895 - protein, 942 aa, Zea mays
MEGDDFTPEGGKLPEFKLDARQAQGFISFFKKLPQDPRAVRLFDRRDYYTAHGENATFIARTYYHTMSALRQLGSSSDGILSASVSKAMFETIARNILLERTDCTLELYEGSGSNWRLTKSGTPGNIGSFEDILFANNDMEDSPVIVALFPACRESQLYVGLSFLDMTNRKLGLAEFPEDSRFTNVESALVALGCKECLLPADCEKSIDLNPLQDVISNCNVLLTEKKKADFKSRDLAQDLGRIIRGSVEPVRDLLSQFDYALGPLGALLSYAELLADDTNYGNYTIEKYNLNCYMRLDSAAVRALNIAEGKTDVNKNFSLFGLMNRTCTVGMGKRLLNRWLKQPLLDVNEINNRLDMVQAFVEDPELRQGLRQQLKRISDIDRLTHSLRKKSANLQPVVKLYQSCSRIPYIKGILQQYNGQFSTLIRSKFLEPLEEWMAKNRFGRFSSLVETAIDLAQLENGEYRISPLYSSDLGVLKDELSVVENHINNLHVDTASDLDLSVDKQLKLEKGSLGHVFRMSKKEEQKVRKKLTGSYLIIETRKDGVKFTNSKLKNLSDQYQALFGEYTSCQKKVVGDVVRVSGTFSEVFENFAAVLSELDVLQSFADLATSCPVPYVRPDITASDEGDIVLLGSRHPCLEAQDGVNFIPNDCTLVRGKSWFQIITGPNMGGKSTFIRQVGVNVLMAQVGSFVPCDQASISVRDCIFARVGAGDCQLHGVSTFMQEMLETASILKGASDKSLIIIDELGRGTSTYDGFGLAWAICEHLMEVTRAPTLFATHFHELTALAHRNDDEHQHISDIGVANYHVGAHIDPLSRKLTMLYKVEPGACDQSFGIHVAEFANFPEAVVALAKSKAAELEDFSTTPTFSDDLKDEVGSKRKRVFSPDDITRGAARARLFLEEFAALPMDEMDGSKILEMATKMKADLQKDAADNPWLQQFF

SEQ ID NO: 22896 - DNA, 2949 bp, Schizosaccharomyces pombe
  CDS (1)..(2949)
atgtcttctagaaacgcttcaattgctaatgaaagaactgatgaggcaaggatgtttaatttttatgaaaaaatgcctaaagatacaaacacagtgcgtgtatttgatcgaggggaattttacgttgcaataggagaagacgcttcgtttgttgctcaaaacgcgtatcacactacttcggtgctaaaacaccacaatgtgtctaatacatcttattgtaacttatctccttcactatttattaagtttgcggaagatgttttaagcaaccttgcaaagagagttgaaatttggggagccaattccgcaaagacaggatttgaattgttgaagcaagctagtcctggaaatatgcaaatgctggaagatttgcttgttagtgagaattatcaagaatccacagccattagtgatagctcagttagttcggttttgttggctgttactactagggttaaacaagatcagcgaataattggcgttgcttttatagatccaattttaaaaaaattaggtgtttcagaatttgttgactcagatgcttatacgaactttgaagctctcatagtgcaagttggagcgaaagagtgcataatatcgcaatctgggcatgaatcgacgaatggcaattcagccgtttctattaacacggcagaaatcaatcgtcttcgaaatattattgaaggttgtggcgcattagttacaactataagaagctctgaattttcggctcgagatgttgaacttgagctctcaaaagtgctcgacagtccagttacacatgctcttgttccagaactaggtctacaattagcaatggcatcctgcaatgcattgcttcgctatttaggacctgcgttactaaaccctgacatggaagacgaccgtgaaaacacatctcgaaagctccatctgtatcatcacaacttggaacaatacatgcgattagatattgcagcagttcgttctcttaacctacttcctcctcccaatggtaatgctcataaaacaatgagtctttatggtttacttaatcattgtagaactgcgatgggagcaaggaatttaagaagatggattgttcagccacttttggatgcaaaatcaattgaacgaagacatgacttggtctccgcacttgtggaagatgctgaggcacgccagttattgcttgatgatgatcatcttcttcgttcaattccagatattcctaaactatgcaggcgtttaactcgtggatcagctagtctagaagatgttgtacgtatttatcaaatggcaaaggcacttccgaagatcgttacggtacttgactctttgactagtgaacataaagatttggtggataaagtatacacgaacgtccttaacaatcattgcaaaaacttggaaaaattaatagagcttgttgaaaccaccatcgacttggaagcattggattcacatcagtatattatccgtgcagagtttgatgaggagctattagatttgcgtcaacgattagacgaattacagcattctatctttgaagaacataaaagggtcggttcagatctccaccaagataccgagaaaaaattacatcttgagcaacatcacctctatggatggtgtctacgccttactagaacagaagctggctgtttaagaggccgtagttctcattatacagaattatcaactcaaaaaaatggagtctactttaccactaaacgtcttcattcactaaacaattcttatatggatcaccaaaaaagctaccggtaccaccaaaatgggcttgcacgtgaagttataaagatagctgcaacatacggtcctcctttggaggcgattggccaagtaattgctcatttggacgtgattctaagtttcgcacatgcaagtacggtagctgtaataccttatgtaagaccaaatattgtggattcaagcattgcacaagaaaagcatggacaaagtagcaatattttggacattgtttcattagaagatactcctaattttgaagaaatacgaagaactctagaaaataatcattgtgctcgtctctacctaaaacaagcgcgacatccttgtttggaagctcaggacgatgtgaagttcatacccaatgatgttaatcttgagcatggaagttcagagctattaatcataaccggaccaaatatgggtggaaaatcaacgtatatccgtcaagttggagttattaccgtcatggcacagattggttgtccagtgccttgtgaagtggctgatctagatattattgatgctatccttgcacgtgtcggagccagcgactcacagcttaaaggcatttctactttcatggccgaaatgttggagaccgctacgattttgagagctgccacaccgcgatccttaatcatcattgatgaattaggacgagggactagcacaaccgatggttttggattagcgtgggctattacagaacacatcgtgactcaaatcggttgcttttgccttttcgcaacacattatcatgaaatgaccaaactatcagaagaaatcactactgtcaaaaatttgcatgttacagcctatgtaggtgattcagaatcgaaggatgtagctttactctataatgtttgtgaaggagctagtgatcggagttttggaatccatgttgctaaacttgcgcacttccctcccaagattattgaaatggcaagcaacaaagccgcagaattagaagctgaagactctggagcccaaggggatactcaagaagtgaaatctaaaaaagaaggtatggcaattgtacgtgatataatgagacaatggcgtagcaacgtcaaaccagaaatgactcagcaacaaatgatggaccaatttcaaaaagtcatcggctcattcgcacagcaaatcaattccaacaactggctacaatccagggtatccacaaatgaggtttcctcatga

SEQ ID NO: 22897 - protein, 982 aa, Schizosaccharomyces pombe
MSSRNASIANERTDEARMFNFYEKMPKDTNTVRVFDRGEFYVAIGEDASFVAQNAYHTTSVLKHHNVSNTSYCNLSPSLFIKFAEDVLSNLAKRVEIWGANSAKTGFELLKQASPGNMQMLEDLLVSENYQESTAISDSSVSSVLLAVTTRVKQDQRIIGVAFIDPILKKLGVSEFVDSDAYTNFEALIVQVGAKECIISQSGHESTNGNSAVSINTAEINRLRNIIEGCGALVTTIRSSEFSARDVELELSKVLDSPVTHALVPELGLQLAMASCNALLRYLGPALLNPDMEDDRENTSRKLHLYHHNLEQYMRLDIAAVRSLNLLPPPNGNAHKTMSLYGLLNHCRTAMGARNLRRWIVQPLLDAKSIERRHDLVSALVEDAEARQLLLDDDHLLRSIPDIPKLCRRLTRGSASLEDVVRIYQMAKALPKIVTVLDSLTSEHKDLVDKVYTNVLNNHCKNLEKLIELVETTIDLEALDSHQYIIRAEFDEELLDLRQRLDELQHSIFEEHKRVGSDLHQDTEKKLHLEQHHLYGWCLRLTRTEAGCLRGRSSHYTELSTQKNGVYFTTKRLHSLNNSYMDHQKSYRYHQNGLAREVIKIAATYGPPLEAIGQVIAHLDVILSFAHASTVAVIPYVRPNIVDSSIAQEKHGQSSNILDIVSLEDTPNFEEIRRTLENNHCARLYLKQARHPCLEAQDDVKFIPNDVNLEHGSSELLIITGPNMGGKSTYIRQVGVITVMAQIGCPVPCEVADLDIIDAILARVGASDSQLKGISTFMAEMLETATILRAATPRSLIIIDELGRGTSTTDGFGLAWAITEHIVTQIGCFCLFATHYHEMTKLSEEITTVKNLHVTAYVGDSESKDVALLYNVCEGASDRSFGIHVAKLAHFPPKIIEMASNKAAELEAEDSGAQGDTQEVKSKKEGMAIVRDIMRQWRSNVKPEMTQQQMMDQFQKVIGSFAQQINSNNWLQSRVSTNEVSS

SEQ ID NO: 22898 - DNA, 3234 bp, Saccharomyces cerevisiae
  CDS (219)..(3113)
acctcaacagctacacattcttttataatccttaatattctatatatacatatatgaaaaaatagaaaacgcgaaaacttgtcattttttttttaggcgtttttataatatactgaaaataaaaagaggctctttaaatgttgacactctactccaatatcaactgtaaaaaatctctttatctgctgacctaacatcaaaatcctcagattaaaagtatgtcctccactaggccagagctaaaattctctgatgtatcagaggagagaaacttctataagaagtatacagggttgccgaagaaaccattaaaaaccattagattagtggataaaggcgactattacacagttataggttcagatgcgatatttgtggcagattcagtctatcatactcaatctgttttaaagaactgccaattggaccctgtaacggcaaagaacttccatgaaccaactaaatatgttactgtttcgctacaagttcttgccactctgctgaagttatgtttgttggatctgggatataaagttgagatatacgataagggttggaaattaataaaaagcgcatctccagggaacattgagcaagttaatgagctaatgaatatgaatattgattcgagtatcatcattgcaagtttgaaagttcaatggaattcccaagatggaaactgcattattggagttgctttcattgataccactgcatacaaggtgggaatgcttgatattgtcgataatgaagtgtattccaacctagagagtttcttgattcaattgggtgtaaaggaatgtttggtgcaggacttgacatcaaattcaaactccaatgctgaaatgcagaaagtaataaatgtaattgatcgctgtgggtgcgtcgttacattattgaaaaactcagaattttctgaaaaagatgtcgaactggatttaaccaagttactgggcgatgatttggcattatcgttaccacaaaaatactctaaattatctatgggtgcatgcaatgcattgattggatatttacaattgctctcagagcaagatcaagtaggcaagtatgaattagttgaacataaattaaaggagtttatgaagttggatgcctccgctattaaagcccttaatttattcccacaaggaccacaaaatccatttggtagcaacaatttagctgtatctggatttacgagtgctggtaattctggtaaagtaacttctcttttccagttactgaatcattgcaaaacaaatgctggtgttcggcttttaaatgaatggttgaagcaaccactgaccaatattgacgaaattaataaaagacatgatttagtcgactatctaattgaccaaatcgagttaagacagatgttgacttctgaatatttacccatgattccagatattcgtagattgactaagaaattaaataaaagaggaaacttagaggatgtcttgaaaatttaccaattcagtaaaagaataccagaaattgttcaagttttcacttcgttcttggaggacgacagccccactgaaccagtaaacgaactggtccgctccgtttggctagctcctttaagccaccacgttgaacctttgtccaaattcgaagaaatggttgaaacaacggttgatttggatgcttatgaagaaaataacgaatttatgattaaagttgagtttaatgaggaattaggaaagataagaagtaaactggatacgttgcgtgatgaaattcattcaatccatcttgattctgctgaagatctaggattcgatccggacaaaaaactgaagttggagaaccatcatctgcatggttggtgtatgaggttgacacgtaatgacgccaaggagttacgtaaacataagaagtacattgagttgtcgacagtaaaagctggtatattttttagtaccaaacaattaaagtcaatcgccaatgaaaccaatattcttcaaaaggagtacgacaagcaacaatcggctctggttagagaaattataaatattacattaacgtacacaccagtttttgaaaaactatccttagtcttagcgcatttagatgtgattgcctcttttgctcatacttcctcgtatgctcctataccatacattagacccaagttgcatcccatggattcggaaagaagaactcacctaataagctcccgtcatccagtactggaaatgcaagacgatataagctttatatctaatgatgtcacattagagagtggaaagggcgactttttaatcataactggaccaaacatgggaggtaaatctacttacatcagacaggttggtgtgatttctttaatggcccaaattggttgtttcgtaccttgtgaagaagctgaaatagccatagtagatgcaattctttgcagggtcggggcaggagattcccaattgaaaggtgtttccacatttatggttgaaatattggaaactgcttctatactaaagaatgcgagtaagaattctttgattattgtagatgaactagggcgtggtactagtacatatgatggttttggtctagcttgggcaattgctgaacatatcgcaagtaagattggatgtttcgctttgtttgcaactcactttcatgaattgacagaattgtctgaaaaattgcccaatgtcaagaatatgcatgttgttgcacatatcgagaaaaatttaaaagaacaaaaacatgacgatgaggacatcacgttgttatacaaagttgagcctggtatttcagatcagtcttttggtattcatgttgcagaagttgttcaatttccagaaaaaattgttaaaatggctaaacgtaaagccaatgaattggacgatctaaaaactaataatgaagatttgaaaaaagctaagctatcattacaggaagttaacgaaggtaatattcgtttgaaggctttactgaaagagtggattagaaaagtgaaggaggagggtttacatgacccaagcaaaattactgaagaagcttcccagcataaaatacaagagctattgcgtgctatagcaaatgaaccagaaaaggaaaacgataattacctgaaatatataaaagccttgttgttataattaatattacaacgacatcttaagtgagaatcgatagataatatatagatacaaatagtacatataatatgcattgggaaagaatttttattttttacaatctttgtagacaaggtacagt

SEQ ID NO: 22899 - protein, 964 aa, Saccharomyces cerevisiae [sequence omitted]

SEQ ID NO: 22900 - DNA, 2703 bp, Methanosarcina barkeri
  CDS (1)..(2703): transl_table=11
atgactaaaatgatgacccctgcaatgtgccagtactatgaagccaagcaggcatatcctgacactctgatcttcttccgcatgggagacttttacgaatctttcggagaagacgcaaaaactattgcaaaagaactcgagatcacgcttacagcccgaggaaaggacaaatcaggagagagaatgccgcttgcaggaataccttaccatgcaattgacacctatctgccgaggcttataaataaagggtataaagtggcaatttgcgaacagcttgaagacccgaaaaaggcaaagggaattgtaaaaagaggggttgtcagggttgtcactccaggtacggcaattgactcttccatgttttcagatgcctcaaacaattacctcatggcagttgctgggagagaaattggaaagcctggaaagaatgccgaaaacgaattcgaaattggggtgtcgtttctcgatatttctacaggtgaattccttacaacgcaattcagggactcggaaaattttgaaaagcttctaagcgagctcgctcgcatgcggccgtcagaatgcattcttccttcatctctgtatgaaaatcccgcacttgccgagcggctgagagcccaaactattgtgcaggaatttgcccccgatatttcaggagcaaaggaagctggagaaaggttgaaaaaccatttcagggttgcaacccttgaaggcatgggctgtgagaacctggattttgcagtgtattcggcctgggctgccctggaatatgcacagactacacagatgcgggagcttacccatattaataccctgagaacctactcaaattccgaatttatgatccttgattccgtaactctgcggaatctcgaaattgttaaaaacgtgcgagatgaaggggacgaaaattctctttaccgcattctgaatcatacgaaaacgccaatgggaagccgtgccctgaaaaagtggcttttgaaacctttgctttccgtagaaaaaatcaactatcgactcgatgctgttgaagaactgacagcaaagcctctgctccgttacgatctccggaactggctttcagatgtcagggatatagaacgcctcgtaggcagggtagtctatgggaactcaaacgcaagagaccttgtagccctgaaaaaatcccttgaagctctgcctcctgtccgggattcccttctagaaaacattgaatccacaattttaaatgatattgcagtcggacttgcatcgttttccgaacttgaaaatctggctgaaatgatagatagagcaatcgttgatgagcctccaatctcagttcgggaaggaggcatgataaagtctggatataatgcagaactcgatgaactcaaggatattgcaagcaacagcaggcagtggattgcaaattttcagcagaaggaaagagaaagaagcggcataaagtccctgaaagtgggatataataagatttttgggtattacatagaagtaacaaatgccaacagcagccaggtgcctgaggattatatcagaaagcaaaccatggcaaatgccgagcgcttttttacccctgaactcaaggaaaaagagagccttatcctgacagccaatgaaaaagctatagctctcgagtatgaaatctttacagaaattttgcagaccctttcagcccattcaagagaacttcaggaaaccgccgaaagaataggcacgcttgatgtccttacagacctggctgaagtagcagaaaataacaattatatcaggccccagcttacagacgactgcaagattcttatccgggacgggaggcatccggtagttgaaaacaccgtacatggcggctttgtcccgaacgataccgaaatggactgcaaggaaaatcagtttttgctggtaacaggcccgaatatggcaggtaagtccacttacatgcgtcagactgcccttatagctattatggctcaggtaggttcttttgttcctgcatcctatgcttcaatagggattattgatcaggtctttacaagaattggggcatttgacgaccttgcaagtgggcagagtacctttatggtagaaatggttgagcttgccaatatcctgaataatgcaagcccgagaagtcttgtgcttcttgatgagatcggcaggggaacaagtacctatgatgggtacagcattgcaaaagctgttgtggaattcctgcataacagggggaaagtaggagtaagggctctatttgcaactcattaccaccagctcacagcccttgaagagaaattaaaaagagtcaaaaattatcatgttgcggtaaaagaagaaggtcatgagttagttttcctgcgaaagatcgtgccgggtgcaacagacaggagttatggaatccaggttgcaaggcttgcaggcgttccggaaaaggtaattgaaagggcaaatgagattcttaaggaactcgaaagagagaacgtgctcgaagaggttgaagacagcaagaacggaaaaaagagaaaaagtaaggctacagcgcgttatacccagatgatgctgtttgaccctggagacagcggtggaaatacagcaaaggtaaacagacccagccctgtagaaacagttcttaaaaaactgaatgtggacgaaatgacaccaatagaagccctgaacaagcttcatgagctcaaaaggctgctgaattga

SEQ ID NO: 22901 - protein, 900 aa, Methanosarcina barkeri
MTKMMTPAMCQYYEAKQAYPDTLIFFRMGDFYESFGEDAKTIAKELEITLTARGKDKSGERMPLAGIPYHAIDTYLPRLINKGYKVAICEQLEDPKKAKGIVKRGVVRVVTPGTAIDSSMFSDASNNYLMAVAGREIGKPGKNAENEFEIGVSFLDISTGEFLTTQFRDSENFEKLLSELARMRPSECILPSSLYENPALAERLRAQTIVQEFAPDISGAKEAGERLKNHFRVATLEGMGCENLDFAVYSAWAALEYAQTTQMRELTHINTLRTYSNSEFMILDSVTLRNLEIVKNVRDEGDENSLYRILNHTKTPMGSRALKKWLLKPLLSVEKINYRLDAVEELTAKPLLRYDLRNWLSDVRDIERLVGRVVYGNSNARDLVALKKSLEALPPVRDSLLENIESTILNDIAVGLASFSELENLAEMIDRAIVDEPPISVREGGMIKSGYNAELDELKDIASNSRQWIANFQQKERERSGIKSLKVGYNKIFGYYIEVTNANSSQVPEDYIRKQTMANAERFFTPELKEKESLILTANEKAIALEYEIFTEILQTLSAHSRELQETAERIGTLDVLTDLAEVAENNNYIRPQLTDDCKILIRDGRHPVVENTVHGGFVPNDTEMDCKENQFLLVTGPNMAGKSTYMRQTALIAIMAQVGSFVPASYASIGIIDQVFTRIGAFDDLASGQSTFMVEMVELANILNNASPRSLVLLDEIGRGTSTYDGYSIAKAVVEFLHNRGKVGVRALFATHYHQLTALEEKLKRVKNYHVAVKEEGHELVFLRKIVPGATDRSYGIQVARLAGVPEKVIERANEILKELERENVLEEVEDSKNGKKRKSKATARYTQMMLFDPGDSGGNTAKVNRPSPVETVLKKLNVDEMTPIEALNKLHELKRLLN

SEQ ID NO: 22902 - DNA, 2703 bp, Methanosarcina mazei
  CDS (1)..(2703): transl_table=11
atgactgaaatgatgacccctgcaatgcgccagtactatgaagccaagcaggcataccctgacacccttatcttcttccggatgggagacttttacgaatcctttggagaagacgcaaaaaccattgcaaaagagctcgaaatcacgttaacagccaggggcaaggacaggtcaggggagaggatgcctcttgcaggcattccttaccatgccattgatacataccttccaaggctgataaacaaaggatacaaggtagccatctgtgaacagctcgaagacccgaagcaggcaaaaggagttgtaaagagaggcgttgtcagggtggtaaccccggggacagcaatagactcatccatgttcccggatgcgtcaaataactaccttatggcggttgcagggaaagaagtcggaaagaccggaaaaagcggagaaaaggaaatggaattcggactctcattcctcgacatttcaacaggggagttccttacaacccagtttacggattccggaagctttgataaattactcagcgaacttgcccgaatgaagcctgcggaatgcatcctgcccccgaccctgtacgggaattcggtacttgttgacaggttaagggaacagacaatagtccaggaatttgccccggaaatctctgggatagaagaagccggggaaaaactgaaaattcatttcagggtttcaaccctcgagggcatgggctgtgaaaaactggaattcggagtctattccgcatggtctgcccttgaatatgcaaaaacgacccagatgagagaccttgctcatatcaataccctcaggacctattcaaacaccgaattcatggtcctcgactctgtcaccctccgcaacctcgaaatcgtgaaaaacgtgcgggatgaaggggaccataactccctttacaggactttgagctttacaaagacgccaatggggagtagaattctgaaaaaatggctcttaaagccgctcctttccgtagaacagataaaccacaggctggacgcagtagaagagctggcaggaaaccctctgctccgctatgatattcgggactggctttcggaggtaagggatattgaacgcctcgtaggcagaatagtgtacggaaacgccaatgcaagggacctcgtagccctgaaaaagtcccttgatgccgtaccctctatccgggactgccttctggaaaaagccggagcagagatgttaaaagggattgctgaaggtctcgcatcattttcagaaattgaagaactggccaaaatgattggaaatgcaattgttgaagagcctcccgtaagcgtccgcgaaggcgggatgataaaatccgggttcagcgaggaacttgacgagctaagagacatttcaagtaacagcaagcagtggattgcagccttccagcagaaagaaaaggacaggacagggatcaagtccctgaaaatcggatacaataaggtcttcgggtattatatcgaggttaccaatgcaaacagcagccaggtacctgatgactatataagaaagcagacaatggcaaatgccgagcgtttctttacgcctgagcttaaagaaaaagaaagcctgatcctgacagcaaacgataaagccgtggctcttgagtacgaaattttcacagaaatcacagagaccctttcagcccattcaaaggagctccaggaaacagcagaaaggataggcgtacttgatgtccttgcagaccttgccgaagttgcggaaaataataattatacacgccctcagctcacagaagactgcaagattcttatccgggacggcaggcatccagtagtcgaaagtacggtatccggaggttttgtcccgaatgatacggaaatggactgcaaggagaaccagtttttgctggttacaggccccaatatggcagggaaatcaacctatatgcgccagacagcccttattgcaattatggctcaggcaggttcttttgtcccggcttcctatgcttccataggtgtcatcgaccaggtttttacaaggataggggcttttgacgaccttgcaagcggacagagcacttttatggttgagatggtggaactggcaaatatccttaacaatgcaagcccgaaaagccttgtgctgcttgacgaaataggcaggggaacgagcacctatgacgggtacagcattgcaaaagcggttgttgagtttctgcacaacaggggaaaggtaggcataagggctctttttgcgacccattaccatcagctcacatcacttgaagagaaattaaaaagggtaaaaaattatcatattgcagtaaaagaagaaggacacgagctggtttttctgaggaaaatcgtgccgggggcaaccgacaggagttacgggatacatgttgcaaggcttgccggagtcccggaaaaggtaatcgaaagggcaaatgagatcctcagggaactcgaaagggaaagcgtactcgaagaatccgaagactgtgaaaacgggaaaaaaagaaaaggcaaagcgaccacccgttatactcagatgctcctttttgaccccgggagcagaagcgggaattcggaagtaaaaagaggattaagccctgtagaagcagccctgaaaaagatgaatgtggatgaaatgaccccgatagaagccatgaataaacttcatgagctgaaaaagctgcttggttga

SEQ ID NO: 22903 - protein, 900 aa, Methanosarcina mazei
MTEMMTPAMRQYYEAKQAYPDTLIFFRMGDFYESFGEDAKTIAKELEITLTARGKDRSGERMPLAGIPYHAIDTYLPRLINKGYKVAICEQLEDPKQAKGVVKRGVVRVVTPGTAIDSSMFPDASNNYLMAVAGKEVGKTGKSGEKEMEFGLSFLDISTGEFLTTQFTDSGSFDKLLSELARMKPAECILPPTLYGNSVLVDRLREQTIVQEFAPEISGIEEAGEKLKIHFRVSTLEGMGCEKLEFGVYSAWSALEYAKTTQMRDLAHINTLRTYSNTEFMVLDSVTLRNLEIVKNVRDEGDHNSLYRTLSFTKTPMGSRILKKWLLKPLLSVEQINHRLDAVEELAGNPLLRYDIRDWLSEVRDIERLVGRIVYGNANARDLVALKKSLDAVPSIRDCLLEKAGAEMLKGIAEGLASFSEIEELAKMIGNAIVEEPPVSVREGGMIKSGFSEELDELRDISSNSKQWIAAFQQKEKDRTGIKSLKIGYNKVFGYYIEVTNANSSQVPDDYIRKQTMANAERFFTPELKEKESLILTANDKAVALEYEIFTEITETLSAHSKELQETAERIGVLDVLADLAEVAENNNYTRPQLTEDCKILIRDGRHPVVESTVSGGFVPNDTEMDCKENQFLLVTGPNMAGKSTYMRQTALIAIMAQAGSFVPASYASIGVIDQVFTRIGAFDDLASGQSTFMVEMVELANILNNASPKSLVLLDEIGRGTSTYDGYSIAKAVVEFLHNRGKVGIRALFATHYHQLTSLEEKLKRVKNYHIAVKEEGHELVFLRKIVPGATDRSYGIHVARLAGVPEKVIERANEILRELERESVLEESEDCENGKKRKGKATTRYTQMLLFDPGSRSGNSEVKRGLSPVEAALKKMNVDEMTPIEAMNKLHELKKLLG

SEQ ID NO: 22904 - DNA, 2577 bp, Protochlamydia amoebophila
  CDS (1)..(2577): transl_table=11
ttgtttatttttcaattaaaaataagtttatttatgtctgattttgaacaacattcccttgatgaaagtaaaatttcacccatgatgatgcagtggcacgcctgtaaaaaaatggcgggcgatgccattttattttttcggatgggtgatttttatgaagctttttatgaagacgctcatctgctatctaaggagttggagctgacattgactaaacggcaagaaattcccatgagtggaattccttttcatacaagtgaaggatatatcgataaacttgtcgctaaaggatttcgagttgccattgcagaacaaatagaagatcctaaaaaaactaaaggcttagtcaagcgcgaagttgttcgtgttgtgtctcctggaacagttattaactcctctcttctttccgacaaaaacaataatttttttgctgccttagtaaaagtggggcaaatttttggattagcttttttagatttgacgactggtgaatattgggtgagtgaatttacgcaagaaagagaacttttaaatgaactttatcgtttgcaccctgctgaatttttaacttctgaaaaattcaaagaaaaacatgcttctttgtttgaagaaatgcaacaaacatattcttttttagtcaatacattagaagactggcaatttgagcatcaacaagcacatgatttccttattaatcatttcaaggttcaacgcttagatggttttggactaagcggaatggttgcagctatcaatgccgcaggagctttattaaattatttacaagaaacactgtgtctaccaatccaacatattcaaagcattcgttgctattcttcttcccagtttatgatgttagatcgaatgacacagcgtaatctggaactaacgcattctctacaagacggaagtagacgtcatacattgctaggtgtcattgatcaaacgcagactcctatgggcgctcggctcatgcatcattgggttaagcaacctcttttaaaagtttctgagattcatcaaaggcaaaatggaatccaagctctattaaatcacgaacacattgtagatcaattacaaaatctattccttcaaattaaagatattgaacgcttgatgatgaaagtcagtgcttgctacgctacgcctcgggaccttatagctcttcatttttcttttaagcccattgcatttattaaatctcttttgttaaacattccttcagaatggataaatgagcacgcacaaaaacttgatcctctatctaaaatgaatgcattaatatccaatgcaatcgtagaagagccgcctctaagacttggtgaagggaaaacgttccgacaaggttttcatcgtgaattagatgaattgcgagaaatcagtcatgacagtaaagcttggatggctcgttaccaaactcaaatcagagaagaaaccggtattaaaaccctgaaagtaggttttaataaaatgtttggttattttatcgaagtcagtcgtggtcaaatagataaaatgcctgatcactttatacgtcgacaaacccttgttaatgctgaacggtatatcacacctgagttaaaagaatatgaaagcaaagtcttaacagcggaagaacgcatcaactctattgaaagtgaactttttcaccaacttcgtttagaagttgcttcatatactaaaaatgtattagaagtcgctcaagcattagctaaaattgattgtttaatatctttaaccaatgtagcaaaaaagtattgctacacatgtcctgtcattgatgacagctccattcttgtgatcgaagaaggaaggcatccagtaatcgagacagtgtgccggcatgaaaaatttattcccaatgacacgtatttagatgatcaagctaatcgattgctcttaatcacaggccctaacatggcaggaaaatcgacatatctgagacaagtagctttaattgtcattttagctcaaataggttctttcgttccagcagctaaagctcacataggaattatcgataaagtctttacacgaataggtgctagtgatgatttatctagaggacagtcaacttttatggttgaaatgactgaaacggcaaatattttaaacaatgccacttctcaatctctcgttattttagatgaaatcggtcggggaacaagtacatatgacggcatatcaattgcttggtctgtggcagaatatcttctaacaacagaaaaaaggatggctaaaacattatttgcaactcattactgggaacttacaaaattagaagagaaggttccaggtgctgttaattacaacgttgctgttcatgaagcggacgatcacattacatttctaagaaaaatcatcaaaggaggaactgacaaaagctatggaatccacgttgctcgcctagctgggcttccacaagccgttttaaaccgttctaaagaaattttagaacatttggaagaaaatgcgaatcgtaagagcgcttttgagcctacccgttcaaaaaagagtatggtttctaaagtaaaagttccttcaactgactttcaattgaacttatttcaatcataa

SEQ ID NO: 22905 - protein, 858 aa, Protochlamydia amoebophila
MFIFQLKISLFMSDFEQHSLDESKISPMMMQWHACKKMAGDAILFFRMGDFYEAFYEDAHLLSKELELTLTKRQEIPMSGIPFHTSEGYIDKLVAKGFRVAIAEQIEDPKKTKGLVKREVVRVVSPGTVINSSLLSDKNNNFFAALVKVGQIFGLAFLDLTTGEYWVSEFTQERELLNELYRLHPAEFLTSEKFKEKHASLFEEMQQTYSFLVNTLEDWQFEHQQAHDFLINHFKVQRLDGFGLSGMVAAINAAGALLNYLQETLCLPIQHIQSIRCYSSSQFMMLDRMTQRNLELTHSLQDGSRRHTLLGVIDQTQTPMGARLMHHWVKQPLLKVSEIHQRQNGIQALLNHEHIVDQLQNLFLQIKDIERLMMKVSACYATPRDLIALHFSFKPIAFIKSLLLNIPSEWINEHAQKLDPLSKMNALISNAIVEEPPLRLGEGKTFRQGFHRELDELREISHDSKAWMARYQTQIREETGIKTLKVGFNKMFGYFIEVSRGQIDKMPDHFIRRQTLVNAERYITPELKEYESKVLTAEERINSIESELFHQLRLEVASYTKNVLEVAQALAKIDCLISLTNVAKKYCYTCPVIDDSSILVIEEGRHPVIETVCRHEKFIPNDTYLDDQANRLLLITGPNMAGKSTYLRQVALIVILAQIGSFVPAAKAHIGIIDKVFTRIGASDDLSRGQSTFMVEMTETANILNNATSQSLVILDEIGRGTSTYDGISIAWSVAEYLLTTEKRMAKTLFATHYWELTKLEEKVPGAVNYNVAVHEADDHITFLRKIIKGGTDKSYGIHVARLAGLPQAVLNRSKEILEHLEENANRKSAFEPTRSKKSMVSKVKVPSTDFQLNLFQS

SEQ ID NO: 22906 - DNA, 2751 bp, Rhizobium meliloti
  CDS (1)..(2751): transl_table=11
atgaatttcctgatggatgcatcgaaccgctcgggcgacgtcctttccgtgtccgatctcgcaagcgaggagagccgctccactgccacgccgatgatggagcagttcatcgagatcaaggcgaacaatccggattcgctcctgttctaccgcatgggcgatttctacgagctgttcttccaggatgcggtcgaggcctcgcgcgcgctcggtatcacgctgacgaaacgcggccagcacatgggacaggagattccgatgtgcggcgtgccggtgcatgcggccgacgattacctgcagaagctgatcgcatccggctaccgtgtcgccgtctgcgaacaggtggaggacccggccgaagcgaagaagcgcggcagcaaatcggtcgtgcgccgcgatgtcgtgcgcctggtgacgccggggacgatcaccgaggacaagctgctctcgccttcggaatcgaactatctgatggcgctggcgcgcatcaggagcggctcggagccggcctatgctcttgcctggatcgacatttcgacgggcatcttccgcctcgccgagacggcggagagccgcctgcttgccgacatattgcggatcgaaccgcgcgagctgatcctgcccgacaccgtctttcacgatccggatctcaggcccgtcttcgacgtgctcgggcgcgtcgcggtgccgcagccggccgtcctcttcgacagcgcgacggcggagggccgcatttcacgctactacggcgtgggcacgctcgatgggttcggcagcttctcgcgcgcggagctcgcggccgcttcggcggcggtctcctatgtcgagaagacccagctccaggagcgcccggcgctcggcattccggaaagggaaagcgccgcctcgacactcttcatcgatccggcgacccgcgccaatctggaactcgccaagacgctttccggctcccgcgacggcagcctgctcaagtcgctcgatcgcacgatgacgagcgggggcgccaggctgctcgccgaaaggctgatgtcgcccctgaccgacccggagcggatcaaccagcggctcgattcgatcgaggtgctggccgatcagccgcgctttacgacggatgttcgcgacgcgcttcgcagggcgccggacatgccgcgggccctgtcgcggctcgcgctcggccgcggcggccctcgcgatctcggtgccatccaggcgggcatgcgggccgcggcggcgatatcggcgctcctctcgggcgccgagctctcggcggaactgaccgaagcgcgcgacgcgatcgcggccttgccgggggaattgctcgcgcgcctcgacgcgacccttgccgaggaactgccgcttctgaagcgcgacggcggcttcgtccgcgagggcgcgagcgccgagctcgacgagatgcgggcgctgcgcgatcagtcgcgccgcgtgatcgcggggctgcagctgcaatattgcgaagagacgggcatcaagtcgctgaagatcaagcacaacaacgtgctcggctacttcatcgaggtgaccgccggcaatgccggatcgatgaccgacaccgacgccggccgcgcccgcttcattcatcgccagaccatggcgaatgccatgcgcttcaccacgaccgagcttgccgagctcgaaacgaagatcgccaatgccgcggaccgggcgctggcgatcgagctcgagaccttcgaggccatggtgcgcgaggtggtcgccgaggccgaggcgatcaaggcggcagcgctggcgctcgcgacgatcgacgtctcggccgggctcgcagtgcttgcggaggagcagaattatacgcgccctacggtcgaccgctcgcgaatgttcgcgatcgacggaggacgccaccccgtcgtggagcaggccctgcggcgccaggctgccaatcccttcgtcgccaacggctgcgatctttctccgccgaacggcgagcagggcggcgcgatctggctcctcaccgggcccaacatgggcggcaagtcgaccttcctgcgccagaacgcgctgatcgcgatcatggcccagacgggatccttcgtgcccgcggccgccgcgcatatcggcgtggtcgaccggctcttctcgcgcgtcggcgcttcggacgatctcgcccgcgggcggtcgaccttcatggtcgagatggtcgagacggcggcgatcctcaatcaggcgacggaccgctcgctggtgatcctcgacgagatcggccgcggcaccgcgaccttcgacggcctgtcgatcgcctgggcggcggtcgagcatctgcacgaggtcaatcgctgccgcgggctcttcgcgacccatttccacgagctgacggttctctccgaaaagctcgtgcggctgtcgaacgcgaccatgcgcgtcaaggagtgggacggcgacgtcatcttcctgcacgaggtaggcccgggcgccgccgaccgttcctacggcatccaggtcgcccgccttgcgggcttgccggcgtcggtcgtcgcccgcgcgagggatgtgcttgccaagctcgaggatgccgaccgcaagaatccggcgagccagctgatcgacgacctgccgctgttccaggttgccgtccggcgagaggaggcggcgagggcatcgtcgggtccttcgaaggtcgaggaggccctgaaggcgctcaacccggacgacatgacgccgcgagaggcgctcgacgcgctttacgcgctcaagaaggagctttccaaccgctga

SEQ ID NO: 22907 - protein, 916 aa, Rhizobium meliloti
MNFLMDASNRSGDVLSVSDLASEESRSTATPMMEQFIEIKANNPDSLLFYRMGDFYELFFQDAVEASRALGITLTKRGQHMGQEIPMCGVPVHAADDYLQKLIASGYRVAVCEQVEDPAEAKKRGSKSVVRRDVVRLVTPGTITEDKLLSPSESNYLMALARIRSGSEPAYALAWIDISTGIFRLAETAESRLLADILRIEPRELILPDTVFHDPDLRPVFDVLGRVAVPQPAVLFDSATAEGRISRYYGVGTLDGFGSFSRAELAAASAAVSYVEKTQLQERPALGIPERESAASTLFIDPATRANLELAKTLSGSRDGSLLKSLDRTMTSGGARLLAERLMSPLTDPERINQRLDSIEVLADQPRFTTDVRDALRRAPDMPRALSRLALGRGGPRDLGAIQAGMRAAAAISALLSGAELSAELTEARDAIAALPGELLARLDATLAEELPLLKRDGGFVREGASAELDEMRALRDQSRRVIAGLQLQYCEETGIKSLKIKHNNVLGYFIEVTAGNAGSMTDTDAGRARFIHRQTMANAMRFTTTELAELETKIANAADRALAIELETFEAMVREVVAEAEAIKAAALALATIDVSAGLAVLAEEQNYTRPTVDRSRMFAIDGGRHPVVEQALRRQAANPFVANGCDLSPPNGEQGGAIWLLTGPNMGGKSTFLRQNALIAIMAQTGSFVPAAAAHIGVVDRLFSRVGASDDLARGRSTFMVEMVETAAILNQATDRSLVILDEIGRGTATFDGLSIAWAAVEHLHEVNRCRGLFATHFHELTVLSEKLVRLSNATMRVKEWDGDVIFLHEVGPGAADRSYGIQVARLAGLPASVVARARDVLAKLEDADRKNPASQLIDDLPLFQVAVRREEAARASSGPSKVEEALKALNPDDMTPREALDALYALKKELSNR

SEQ ID NO: 22908 - DNA, 2760 bp, Oryza sativa
  CDS (1)..(2760)
atggagggcgacgacttcttgccggagggcggcaagctccccgagctcaagctagatgcgaggcaagcgcagggcttcatctctttcttcaagaaactgccgcaggattcgagggctattcgtctcttcgatcggcgggattattacactgctcatggagagaatgccacattcattgcaaaaatatactatcacacaatgtctgccttacgccaattaggtagcaactctgatggactctcaagtgtcagtgtgagcaagactatgtttgagaccatcgcccgcaaccttttgttagagaggacagaccgtacattggaactctatgagggaagtgggtctagttggaggttaacaaaatctggaacacctggaaatattggcagttttgaagatattctgtttgcaaacaatgacatgcaagattctccggtaactgttgcattgtttcctgtgttccaggaaggacaactatatgtaggtcttagttttgttgatttgacaaacaggaagcttgggttgtctgagtttcccgaagatagtcgattcacaaatgtagagtcagcccttgttgcattaggttgcaaggagtgtcttctcccagcagattgtgagaaatctatagatttgaagcctcttcaggatgctatcactaactgcaatgttctattaactgaaagaaagaaggttgaatttaaatccagagatcttgtgcaggatcttggtagaataatcagaggtcctgttgagccagttcgtgatcttgtatctcagtttgactatgcattgggtgcccttggagctctagtttcatatgctgagttgctagcagatgatacaaactacggaaattacacaattgagaaatacagtttggaccgctacatgcgtcttgattctgctgctgtgcgagcattgaatattgccgaagctaaaactgatgtaaacaagaacttcagtttgtttggtttgatgaacagaacctgtacagtaggtatgggaaagagactgcttaacagatggctgaaacaacctctgctagatgtaaatgaaatcaataacagattagatatggttcaggctttcgtagaagatccagagcttcgtcagggacttaggtaccaactcaaaagaatgtcggacattgaccgtctgacacatgctctgcggaagagaacagccaatctgcagcctgttgtcaagctctaccagtcctgcattagagtctcatacatcaagaatgttcttcaacaatatgatggcagtttttctgcgctgataaggacaaagtttcttaattctttagatgagtggctgacagaggataggtttggtaggtttgcttctcttgttgagacagctattgaccttgatcaacttgagaatggtgagtataggatatctccccgatattcttctgatttggctgtgctgaaggatgagctttctgaagttgaaaatcacatcaacaatttgcacaagcatacagctgctgatctggatcttactattgataagcaattgaagctagaaaaagggcagcttggccatgtgttcagaatctcaaagaaagatgaacagaaggttaggaagaaactcactagcaattacataatcatagaaactcgtaaggatggtgtgaagttcacaagctccaagcttaaaaagttaggcgaccaataccaggcactgcttggtgagtacacaagttgtcagaaaaaggttgttgatgatgtagtaagagtttcagcctccttctcagaggtatttgaaaactttgctgcgatactatctgagttggatgttttacaaagttttgctgatttagcaacaagttccccaattccttatgtaagaccagaaatcacagcatcggaggaaggagatatcattttagaaggtagcagacatccttgtctggaggcccaagatggtgttaactttataccaaatgattgcactttggtgagagaaaaaagttggtttcagatcatcactgggccaaacatgggtggaaagtccacttttatacgacaggttggtgtgaatgtcctgatggcacaagttggatcgttcgttccatgtgatcgggcgagcattagtgtgagagattgtatttttgctcgtgttggtgctggtgattgccagctacgtggtgtttcaacctttatgcaagaaatgcttgaaacagcatccatcttgaaaggtcttgcatgggctatctgtgagcatcttgtggaagtgactagagcacctacgttgtttgccacgcattttcatgaattaactgcattaggacacaaaagtggtgatgagcaccaacacgttccaaatttgggaattgcaaattaccatgtgggtgcacatatagacccatcaagtcggaagttaactatgctttataaggttgaacccggtgcatgtgaccaaagctttggtatccacgttgcagaattcgctaattttccagaagctgttgttgctcttgcaaaaagcaaagcagaagaattagaagatttttcaactgcgcccaatttttccgatgattcaaaagatgaggttggatcaaaacgcaagagggtatttagcccagacgatgtgactagaggagctgctcgcgctcgccttttgttggaggaattggcctcattgcctctagacgagatggatggcaccaaggccgcagaaaccgtcaccaaactgaaatccgacttcgagaaagatgcagctgataatccttggcttcagcagttcctttga

SEQ ID NO: 22909 - protein, 919 aa, Oryza sativa
MEGDDFLPEGGKLPELKLDARQAQGFISFFKKLPQDSRAIRLFDRRDYYTAHGENATFIAKIYYHTMSALRQLGSNSDGLSSVSVSKTMFETIARNLLLERTDRTLELYEGSGSSWRLTKSGTPGNIGSFEDILFANNDMQDSPVTVALFPVFQEGQLYVGLSFVDLTNRKLGLSEFPEDSRFTNVESALVALGCKECLLPADCEKSIDLKPLQDAITNCNVLLTERKKVEFKSRDLVQDLGRIIRGPVEPVRDLVSQFDYALGALGALVSYAELLADDTNYGNYTIEKYSLDRYMRLDSAAVRALNIAEAKTDVNKNFSLFGLMNRTCTVGMGKRLLNRWLKQPLLDVNEINNRLDMVQAFVEDPELRQGLRYQLKRMSDIDRLTHALRKRTANLQPVVKLYQSCIRVSYIKNVLQQYDGSFSALIRTKFLNSLDEWLTEDRFGRFASLVETAIDLDQLENGEYRISPRYSSDLAVLKDELSEVENHINNLHKHTAADLDLTIDKQLKLEKGQLGHVFRISKKDEQKVRKKLTSNYIIIETRKDGVKFTSSKLKKLGDQYQALLGEYTSCQKKVVDDVVRVSASFSEVFENFAAILSELDVLQSFADLATSSPIPYVRPEITASEEGDIILEGSRHPCLEAQDGVNFIPNDCTLVREKSWFQIITGPNMGGKSTFIRQVGVNVLMAQVGSFVPCDRASISVRDCIFARVGAGDCQLRGVSTFMQEMLETASILKGLAWAICEHLVEVTRAPTLFATHFHELTALGHKSGDEHQHVPNLGIANYHVGAHIDPSSRKLTMLYKVEPGACDQSFGIHVAEFANFPEAVVALAKSKAEELEDFSTAPNFSDDSKDEVGSKRKRVFSPDDVTRGAARARLLLEELASLPLDEMDGTKAAETVTKLKSDFEKDAADNPWLQQFL

SEQ ID NO: 22910 - DNA, 2829 bp, Zea mays
  CDS (1)..(2829)
atggagggcgacgacttcacgccggagggcggcaagctccccgagttcaagctagatgcgagacaagcgcagggtttcatctccttcttcaagaagctgccgcaggatccccgggccgttcgtctcttcgatcgcaggggttattacactgcccatggcgagaatgctacgtttatcgcaaggacatactaccacacaatgtctgccttacgtcaactaggtagcagctctgatggaatcttaagtgccagcgtgagcaaggctatgtttgagaccattgcccgcaacattttgttggaaaggactgactgtacattggaactctatgagggaagtgggtcaaattggaggttaacaaagtccggaacacctggaaatattggtagttttgaagacattctgtttgcaaacaatgacatggaagattcaccagtgattgttgctttgtttccagcgtgccgggaaagtcagctgtatgtagggcttagttttttggatatgaccaataggaagcttgggttggctgagtttcccgaagatagccgattcactaatgttgaatcagctcttgttgcattaggttgcaaggagtgtcttctcccagcagattgtgaaaaatccattgacctaaacccccttcaagacgtcattagtaactgtaatgttctgttgactgagaaaaagaaggctgacttcaaatccagggatctcgcacaagatcttggtagaataatcaggggttctgttgagcctgtacgtgatctactatctcagtttgactatgctcttggtccccttggagctcttttatcttatgccgagttgctagcagatgacactaactatggaaattacacaattgagaagtacaatttgaactgctacatgcgacttgattctgctgcagttcgagcattaaacattgcagaagggaaaactgatgtaaacaagaacttcagtttgtttggtttgatgaacagaacttgtactgttgggatgggaaaaagattgctgaacagatggctgaaacaacctctattagatgttaatgaaattaataaccgactagacatggttcaggcttttgtagaagacccagaacttcgtcagggactccggcaacaacttaaaaggatatcagatattgatcgtctaacacatagtctccgaaagaaatcagctaatctgcagcctgttgttaagctttatcagtcctgtagcagaatcccatacatcaagggcattcttcagcaatataatggccaattttcaacattgataaggtcaaagtttcttgaaccgttagaagaatggatggcaaagaatcgatttggtcggttttcttctcttgttgagacagctattgatcttgctcagctggagaatggagagtacagaatatctcctctatattcttctgacttgggtgtactaaaggatgagctttctgtggttgaaaaccacataaacaatctgcacgtggatacagctagtgatctggatctttctgttgataagcaactgaagctagaaaaaggatcccttggacatgtgttcagaatgtcaaagaaagaggaacagaaagtcaggaagaaactcactggcagctacttaatcatagaaactcgtaaagatggtgtaaagttcacaaattctaagctgaaaaatctaagtgatcaataccaggcattgtttggtgagtacacaagttgtcagaaaaaggtggttggtgatgtagtgagggtttcaggcacattctcagaggtatttgaaaattttgctgcagttctgtcggagttggatgttttacaaagttttgctgatttggcaactagttgcccagttccttatgttaggccagacatcactgcgtcggatgaaggagatattgttctactgggtagcagacatccttgtctagaggcacaagatggtgttaactttatacccaatgattgcactctggtgagagggaaaagttggtttcagatcatcactggaccaaacatgggaggaaaatccacatttataagacaggttggtgtaaatgtattgatggcacaagttggttcctttgtaccttgtgatcaagcaagcattagtgtgagggattgtatttttgctcgtgttggcgctggtgattgccaacttcatggtgtatcaacttttatgcaagaaatgcttgaaacagcatccatcctaaaaggcgcctctgataagtctcttataattattgatgagctggggcgtggaacttccacatatgatggatttggtcttgcatgggctatctgtgagcatcttatggaagtgactcgagcgcctaccttgtttgcaacccatttccatgaactaactgcattagcacatagaaatgatgatgagcaccaacacatttcagacatcggagttgcaaattatcacgtgggtgctcacatagacccattaagtaggaagttaactatgctttacaaggttgaacctggtgcatgcgaccaaagttttggtattcatgttgcagaatttgctaattttccagaagctgttgttgcccttgcgaaaagcaaagcagcagagttagaagacttttctactacacctaccttttccgatgatttgaaagacgaggttggatcaaagcgcaagagggtatttagcccagatgacatcaccagaggagctgcacgggctcggcttttccttgaggaattcgccgcattgcctatggatgagatggatgggagcaagatcttggagatggccaccaagatgaaagctgacttgcagaaagatgcagctgacaatccttggctccagcagttcttctga

SEQ ID NO: 22911 - protein, 942 aa, Zea mays
MEGDDFTPEGGKLPEFKLDARQAQGFISFFKKLPQDPRAVRLFDRRGYYTAHGENATFIARTYYHTMSALRQLGSSSDGILSASVSKAMFETIARNILLERTDCTLELYEGSGSNWRLTKSGTPGNIGSFEDILFANNDMEDSPVIVALFPACRESQLYVGLSFLDMTNRKLGLAEFPEDSRFTNVESALVALGCKECLLPADCEKSIDLNPLQDVISNCNVLLTEKKKADFKSRDLAQDLGRIIRGSVEPVRDLLSQFDYALGPLGALLSYAELLADDTNYGNYTIEKYNLNCYMRLDSAAVRALNIAEGKTDVNKNFSLFGLMNRTCTVGMGKRLLNRWLKQPLLDVNEINNRLDMVQAFVEDPELRQGLRQQLKRISDIDRLTHSLRKKSANLQPVVKLYQSCSRIPYIKGILQQYNGQFSTLIRSKFLEPLEEWMAKNRFGRFSSLVETAIDLAQLENGEYRISPLYSSDLGVLKDELSVVENHINNLHVDTASDLDLSVDKQLKLEKGSLGHVFRMSKKEEQKVRKKLTGSYLIIETRKDGVKFTNSKLKNLSDQYQALFGEYTSCQKKVVGDVVRVSGTFSEVFENFAAVLSELDVLQSFADLATSCPVPYVRPDITASDEGDIVLLGSRHPCLEAQDGVNFIPNDCTLVRGKSWFQIITGPNMGGKSTFIRQVGVNVLMAQVGSFVPCDQASISVRDCIFARVGAGDCQLHGVSTFMQEMLETASILKGASDKSLIIIDELGRGTSTYDGFGLAWAICEHLMEVTRAPTLFATHFHELTALAHRNDDEHQHISDIGVANYHVGAHIDPLSRKLTMLYKVEPGACDQSFGIHVAEFANFPEAVVALAKSKAAELEDFSTTPTFSDDLKDEVGSKRKRVFSPDDITRGAARARLFLEEFAALPMDEMDGSKILEMATKMKADLQKDAADNPWLQQFF

SEQ ID NO: 22912 - DNA, 21 bp, Artificial sequence
  primer
atggagggtaatttcgaggaa

SEQ ID NO: 22913 - DNA, 20 bp, Artificial sequence
  primer
tcacagaaactgcctgagcc

SEQ ID NO: 22914 - protein, 957 aa, Artificial sequence
  consensus sequence
  Variant (2)..(2): Xaa in position 2 is any amino acid
  Variant (4)..(6): Xaa in position 4 to 6 is any amino acid
  Variant (8)..(8): Xaa in position 8 is any amino acid
  Variant (10)..(11): Xaa in position 10 to 11 is any amino acid
  Variant (13)..(19): Xaa in position 13 to 19 is any amino acid
  Variant (20)..(21): Xaa in position 20 to 21 is any or no amino acid
  Variant (23)..(71): Xaa in position 23 to 71 is any amino acid
  Variant (72)..(98): Xaa in position 72 to 98 is any or no amino acid
  Variant (101)..(126): Xaa in position 101 to 126 is any amino acid
  Variant (127)..(143): Xaa in position 127 to 143 is any or no amino acid
  Variant (145)..(148): Xaa in position 145 to 148 is any amino acid
  Variant (150)..(175): Xaa in position 150 to 175 is any amino acid
  Variant (176)..(179): Xaa in position 176 to 179 is any or no amino acid
  Variant (182)..(206): Xaa in position 182 to 206 is any amino acid
  Variant (207)..(225): Xaa in position 207 to 225 is any or no amino acid
  Variant (227)..(233): Xaa in position 227 to 233 is any amino acid
  Variant (234)..(234): Xaa in position 234 is any or no amino acid
  Variant (236)..(263): Xaa in position 236 to 263 is any amino acid
  Variant (264)..(270): Xaa in position 264 to 270 is any or no amino acid
  Variant (272)..(293): Xaa in position 272 to 293 is any amino acid
  Variant (294)..(304): Xaa in position 294 to 304 is any or no amino acid
  Variant (307)..(312): Xaa in position 307 to 312 is any amino acid
  Variant (314)..(315): Xaa in position 314 to 315 is any amino acid
  Variant (316)..(344): Xaa in position 316 to 344 is any or no amino acid
  Variant (346)..(356): Xaa in position 346 to 356 is any amino acid
  Variant (357)..(358): Xaa in position 357 to 358 is any or no amino acid
  Variant (360)..(360): Xaa in position 360 is any amino acid
  Variant (364)..(365): Xaa in position 364 to 365 is any amino acid
  Variant (367)..(369): Xaa in position 367 to 369 is any amino acid
  Variant (372)..(376): Xaa in position 372 to 376 is any amino acid
  Variant (378)..(379): Xaa in position 378 to 379 is any amino acid
  Variant (381)..(383): Xaa in position 381 to 383 is any amino acid
  Variant (385)..(392): Xaa in position 385 to 392 is any amino acid
  Variant (393)..(393): Xaa in position 393 is any or no amino acid
  Variant (395)..(405): Xaa in position 395 to 405 is any amino acid
  Variant (406)..(408): Xaa in position 406 to 408 is any or no amino acid
  Variant (410)..(411): Xaa in position 410 to 411 is any amino acid
  Variant (414)..(422): Xaa in position 414 to 422 is any amino acid
  Variant (423)..(431): Xaa in position 423 to 431 is any or no amino acid
  Variant (433)..(437): Xaa in position 433 to 437 is any amino acid
  Variant (439)..(443): Xaa in position 439 to 443 is any amino acid
  Variant (445)..(494): Xaa in position 445 to 494 is any amino acid
  Variant (495)..(507): Xaa in position 495 to 507 is any or no amino acid
  Variant (509)..(538): Xaa in position 509 to 538 is any amino acid
  Variant (540)..(546): Xaa in position 540 to 546 is any amino acid
  Variant (547)..(550): Xaa in position 547 to 550 is any or no amino acid
  Variant (552)..(556): Xaa in position 552 to 556 is any amino acid
  Variant (558)..(567): Xaa in position 558 to 567 is any amino acid
  Variant (568)..(573): Xaa in position 568 to 573 is any or no amino acid
  Variant (575)..(578): Xaa in position 575 to 578 is any amino acid
  Variant (580)..(585): Xaa in position 580 to 585 is any amino acid
  Variant (587)..(590): Xaa in position 587 to 590 is any amino acid
  Variant (592)..(623): Xaa in position 592 to 623 is any amino acid
  Variant (624)..(637): Xaa in position 624 to 637 is any or no amino acid
  Variant (640)..(643): Xaa in position 640 to 643 is any amino acid
  Variant (645)..(651): Xaa in position 645 to 651 is any amino acid
  Variant (652)..(653): Xaa in position 652 to 653 is any or no amino acid
  Variant (655)..(655): Xaa in position 655 is any amino acid
  Variant (658)..(670): Xaa in position 658 to 670 is any amino acid
  Variant (671)..(707): Xaa in position 671 to 707 is any or no amino acid
  Variant (711)..(712): Xaa in position 711 to 712 is any amino acid
  Variant (714)..(714): Xaa in position 714 is any amino acid
  Variant (715)..(718): Xaa in position 715 to 718 is any or no amino acid
  Variant (720)..(720): Xaa in position 720 is any amino acid
  Variant (721)..(723): Xaa in position 721 to 723 is any or no amino acid
  Variant (726)..(726): Xaa in position 726 is any amino acid
  Variant (729)..(739): Xaa in position 729 to 739 is any amino acid
  Variant (740)..(745): Xaa in position 740 to 745 is any or no amino acid
  Variant (756)..(756): Xaa in position 756 is any amino acid
  Variant (760)..(765): Xaa in position 760 to 765 is any amino acid
  Variant (769)..(769): Xaa in position 769 is any amino acid
  Variant (771)..(771): Xaa in position 771 is any amino acid
  Variant (775)..(777): Xaa in position 775 to 777 is any amino acid
  Variant (778)..(778): Xaa in position 778 is any or no amino acid
  Variant (780)..(780): Xaa in position 780 is any amino acid
  Variant (782)..(784): Xaa in position 782 to 784 is any amino acid
  Variant (786)..(786): Xaa in position 786 is any amino acid
  Variant (788)..(789): Xaa in position 788 to 789 is any amino acid
  Variant (794)..(794): Xaa in position 794 is any amino acid
  Variant (796)..(799): Xaa in position 796 to 799 is any amino acid
  Variant (801)..(801): Xaa in position 801 is any amino acid
  Variant (806)..(806): Xaa in position 806 is any amino acid
  Variant (809)..(809): Xaa in position 809 is any amino acid
  Variant (813)..(813): Xaa in position 813 is any amino acid
  Variant (816)..(816): Xaa in position 816 is any amino acid
  Variant (817)..(817): Xaa in position 817 is any or no amino acid
  Variant (819)..(821): Xaa in position 819 to 821 is any amino acid
  Variant (824)..(824): Xaa in position 824 is any amino acid
  Variant (826)..(826): Xaa in position 826 is any amino acid
  Variant (829)..(829): Xaa in position 829 is any amino acid
  Variant (836)..(836): Xaa in position 836 is any amino acid
  Variant (839)..(840): Xaa in position 839 to 840 is any amino acid
  Variant (841)..(841): Xaa in position 841 is any or no amino acid
  Variant (845)..(846): Xaa in position 845 to 846 is any amino acid
  Variant (848)..(856): Xaa in position 848 to 856 is any amino acid
  Variant (857)..(859): Xaa in position 857 to 859 is any or no amino acid
  Variant (870)..(870): Xaa in position 870 is any amino acid
  Variant (872)..(878): Xaa in position 872 to 878 is any amino acid
  Variant (879)..(891): Xaa in position 879 to 891 is any or no amino acid
  Variant (893)..(893): Xaa in position 893 is any amino acid
  Variant (895)..(905): Xaa in position 895 to 905 is any amino acid
  Variant (906)..(918): Xaa in position 906 to 918 is any or no amino acid
  Variant (920)..(924): Xaa in position 920 to 924 is any amino acid
  Variant (926)..(927): Xaa in position 926 to 927 is any amino acid
  Variant (929)..(929): Xaa in position 929 is any amino acid
  Variant (931)..(931): Xaa in position 931 is any amino acid
  Variant (934)..(934): Xaa in position 934 is any amino acid
  Variant (937)..(941): Xaa in position 937 to 941 is any amino acid
  Variant (943)..(944): Xaa in position 943 to 944 is any amino acid
  Variant (946)..(948): Xaa in position 946 to 948 is any amino acid
  Variant (950)..(955): Xaa in position 950 to 955 is any amino acid
DXYXXXGXDXXAXXXXXXXXXTXXXXXXXXXXXXXXXXXXXXXXXXXXXXXXXXXXXXXXXXXXXXXXXXXXXXXXXXXXXXXXXXXXXXXXXXXXXXPGXXXXXXXXXXXXXXXXXXXXXXXXXXXXXXXXXXXXXXXXXXXGXXXXDXXXXXXXXXXXXXXXXXXXXXXXXXXXXXXECXXXXXXXXXXXXXXXXXXXXXXXXXXXXXXXXXXXXXXXXXXXXFXXXXXXXXLXXXXXXXXXXXXXXXXXXXXXXXXXXXXXXXXXXXYXXXXXXXXXXXXXXXXXXXXXXXXXXXXXXXXXLDXXXXXXLXXXXXXXXXXXXXXXXXXXXXXXXXXXXXXXSXXXXXXXXXXXXXGXRLLXXWXXXPLXXXXXIXXRXXXVXXXXXXXXXRXXXXXXXXXXXXXXDXXRLXXXXXXXXXXXXXXXXXXQXXXXXPXXXXXLXXXXXXXXXXXXXXXXXXXXXXXXXXXXXXXXXXXXXXXXXXXXXXXXXXXXXXXXXXXXXXXLXXXXXXXXXXXXXXXXXXXXXXXXXXXXXXKXXXXXXXXXXXGXXXXXTXXXXXXXXXXXXXXXXYXXXXTXXXXXXFXXXXLXXXXXXXXXXXXXXXXXXXXXXXXXXXXXXXXXXXXXXXXXXXXXXDVXXXXAXXXXXXXXXYXRPXXXXXXXXXXXXXXXXXXXXXXXXXXXXXXXXXXXXXXXXXXXXXXXXXXRHPXXEXXXXXQXXXXFIXNDXXXXXXXXXXXXXXXXXTGPNMGGKSTXIRQXXXXXXMAQXGXFVPXXXXAXIXXXDXIXXRVGAXDXXXXGXSTFMXEMXETAXILXXAXXXSLXIXDEXGRGTSTXDGXXXAWAXXEXXXXXXXXXXXXLFATHFHELTXLXXXXXXXXXXXXXXXXXXXXNXHXXXXXXXXXXXXXXXXXXXXXXXXLXXXXXGXXDXSXGIXVAXXXXXPXXVXXXAXXXXXXLE

SEQ ID NO: 22915 - protein, 38 aa, Artificial sequence
  protein pattern
  Variant (3)..(3): Xaa in position 3 is Ala or Gly
  Variant (8)..(8): Xaa in position 8 is Phe or Tyr
  Variant (9)..(9): Xaa in position 9 is Ile, Leu or Met
  Variant (11)..(11): Xaa in position 11 is Gln or Ser
  Variant (12)..(12): Xaa in position 12 is any amino acid
  Variant (13)..(13): Xaa in position 13 is Ala or Gly
  Variant (14)..(15): Xaa in position 14 to 15 is any amino acid
  Variant (16)..(16): Xaa in position 16 is Ala, Cys, Ser, Thr or Val
  Variant (17)..(17): Xaa in position 17 is Ile or Leu
  Variant (18)..(18): Xaa in position 18 is Leu or Met
  Variant (19)..(19): Xaa in position 19 is Ala or Asn
  Variant (20)..(21): Xaa in position 20 to 21 is any amino acid
  Variant (23)..(23): Xaa in position 23 is Ala, Cys or Ser
  Variant (27)..(27): Xaa in position 27 is Ala, Cys or Ser
  Variant (28)..(28): Xaa in position 28 is Ala, Asp, Glu, Ser or Thr
  Variant (29)..(29): Xaa in position 29 is any amino acid
  Variant (31)..(31): Xaa in position 31 is any amino acid
  Variant (32)..(33): Xaa in position 32 to 33 is any or no amino acid
  Variant (35)..(35): Xaa in position 35 is any amino acid
  Variant (36)..(37): Xaa in position 36 to 37 is any or no amino acid
NMXGKSTXXRXXXXXXXXXXXGXFVPXXXAXXXIXXXD

SEQ ID NO: 22916 - protein, 28 aa, Artificial sequence
  protein pattern
  Variant (2)..(2): Xaa in position 2 is any amino acid
  Variant (3)..(4): Xaa in position 3 to 4 is any or no amino acid
  Variant (6)..(7): Xaa in position 6 to 7 is any or no amino acid
  Variant (9)..(9): Xaa in position 9 is Cys, Asp, Asn or Ser
  Variant (10)..(10): Xaa in position 10 is any amino acid
  Variant (11)..(11): Xaa in position 11 is Ala, Ile or Leu
  Variant (12)..(12): Xaa in position 12 is any amino acid
  Variant (14)..(14): Xaa in position 14 is any amino acid
  Variant (19)..(19): Xaa in position 19 is any amino acid
  Variant (22)..(22): Xaa in position 22 is Ala, Ile, Leu or Val
  Variant (25)..(25): Xaa in position 25 is Ala or Ser
  Variant (26)..(26): Xaa in position 26 is Ala, Gly, Asn, Ser or Thr
  Variant (28)..(28): Xaa in position 28 is Ile or Leu
RXXXGXXDXXXXGXSTFMXEMXETXXIX

SEQ ID NO: 22917 - protein, 28 aa, Artificial sequence
  protein pattern
  Variant (3)..(3): Xaa in position 3 is Ile or Val
  Variant (5)..(5): Xaa in position 5 is Ile, Leu or Val
  Variant (8)..(8): Xaa in position 8 is Ile, Leu or Val
  Variant (13)..(13): Xaa in position 13 is Ala or Ser
  Variant (15)..(15): Xaa in position 15 is any amino acid
  Variant (16)..(16): Xaa in position 16 is Asp or Glu
  Variant (18)..(18): Xaa in position 18 is any amino acid
  Variant (19)..(19): Xaa in position 19 is Gly or Ser
  Variant (20)..(20): Xaa in position 20 is Ile or Leu
  Variant (22)..(22): Xaa in position 22 is Phe or Trp
  Variant (23)..(23): Xaa in position 23 is Ala or Ser
  Variant (24)..(24): Xaa in position 24 is Ala, Ile or Val
  Variant (25)..(25): Xaa in position 25 is Ala, Cys, Ser, Thr or Val
  Variant (27)..(27): Xaa in position 27 is any amino acid
  Variant (28)..(28): Xaa in position 28 is Ile or Leu
SLXIXDEXGRGTXTXXGXXXAXXXXEXX

SEQ ID NO: 22918 - protein, 40 aa, Artificial sequence
  protein pattern
  Variant (2)..(3): Xaa in position 2 to 3 is any amino acid
  Variant (4)..(4): Xaa in position 4 is any or no amino acid
  Variant (6)..(7): Xaa in position 6 to 7 is any amino acid
  Variant (9)..(11): Xaa in position 9 to 11 is any amino acid
  Variant (12)..(12): Xaa in position 12 is any or no amino acid
  Variant (14)..(14): Xaa in position 14 is any amino acid
  Variant (17)..(17): Xaa in position 17 is any amino acid
  Variant (18)..(18): Xaa in position 18 is Ala or Val
  Variant (20)..(20): Xaa in position 20 is Glu, Lys or Arg
  Variant (21)..(21): Xaa in position 21 is any amino acid
  Variant (22)..(22): Xaa in position 22 is Ala, Leu or Val
  Variant (23)..(23): Xaa in position 23 is any amino acid
  Variant (24)..(24): Xaa in position 24 is Phe, Ile, Leu, Met or Val
  Variant (26)..(27): Xaa in position 26 to 27 is any amino acid
  Variant (28)..(29): Xaa in position 28 to 29 is Ile or Val
  Variant (30)..(31): Xaa in position 30 to 31 is any amino acid
  Variant (33)..(33): Xaa in position 33 is any amino acid
  Variant (34)..(34): Xaa in position 34 is Asp, Glu, Asn, Gln, Arg or Ser
  Variant (35)..(36): Xaa in position 35 to 36 is any amino acid
  Variant (37)..(37): Xaa in position 37 is Ala, Asp, Glu, Asn, Ser or Thr
  Variant (38)..(38): Xaa in position 38 is any amino acid
  Variant (39)..(39): Xaa in position 39 is Phe or Leu
  Variant (40)..(40): Xaa in position 40 is Ala, Asp, Glu or Ser
LXXXVXXGXXXXSXGIXXAXXXXXPXXXXXXAXXXXXXXX

SEQ ID NO: 22919 - protein, 26 aa, Artificial sequence
  protein pattern
  Variant (2)..(2): Xaa in position 2 is any amino acid
  Variant (3)..(6): Xaa in position 3 to 6 is any or no amino acid
  Variant (9)..(9): Xaa in position 9 is Leu or Met
  Variant (10)..(12): Xaa in position 10 to 12 is any amino acid
  Variant (13)..(13): Xaa in position 13 is Ile, Leu or Val
  Variant (14)..(14): Xaa in position 14 is any amino acid
  Variant (15)..(15): Xaa in position 15 is Gln or Ser
  Variant (18)..(18): Xaa in position 18 is any amino acid
  Variant (19)..(19): Xaa in position 19 is Asp, Asn or Ser
  Variant (20)..(22): Xaa in position 20 to 22 is any amino acid
  Variant (23)..(23): Xaa in position 23 is Ile or Leu
  Variant (24)..(25): Xaa in position 24 to 25 is any amino acid
TXXXXXRLXXXXXXXPLXXXXXXXXR

SEQ ID NO: 22920 - protein, 13 aa, Artificial sequence
  protein pattern
  Variant (6)..(6): Xaa in position 6 is Phe or Tyr
  Variant (8)..(8): Xaa in position 8 is Glu or Gln
  Variant (9)..(9): Xaa in position 9 is Ile, Leu or Met
  Variant (11)..(11): Xaa in position 11 is any amino acid
  Variant (12)..(12): Xaa in position 12 is Ile or Leu
  Variant (13)..(13): Xaa in position 13 is Ala, Glu, Gly or Ser
LFATHXHXXTXXX

SEQ ID NO: 22921 - DNA, 912 bp, Arabidopsis thaliana
  CDS (1)..(912)
atgggaattgaagacatgcattcaaaatctgacagtggtgggaacaaggttgattcagaggttcatggtacagtatcgtcgtcgataaatagtttaaacccttggcatcgtgctgctgctgcttgcaatgcaaattctagtgtggaagctggagataaatcttctaagtcaatagcattagcattggaatcaaacggttccaaatcaccatccaatagagataatactgttaacaaggaatcacaagtcacaacgtctccacaatcagctggagattatagtgataaaaaccaagaatctctgcatcatggcatcacacaacctcctcctcaccctcaacttgttggccacacagttggatgggcatcctcaaatccataccaggatccatattatgcaggagtgatgggagcctatggacatcatcccctggggtttgttccatatggtgggatgcctcattcaagaatgccactgccgcctgagatggcacaagaaccagttttcgtgaatgctaaacagtaccaggcgattctgaggcgaaggcaggcacgcgccaaggcagagctagagaagaagctaataaaatccagaaagccttatctacatgaatctcggcatcaacatgctatgaggaggccaaggggtactggaggacggtttgcaaagaaaaccaacaccgaagcttcaaagcgtaaagctgaagaaaagagcaatggtcatgttactcagtccccgtcatcatctaattctgatcaaggtgaagcttggaatggtgactatagaacacctcagggagatgagatgcagagctcagcttataagagaagggaagaaggagagtgttcagggcagcaatggaacagcctttcctcaaaccatccttctcaagctcgtctagccattaaatga

SEQ ID NO: 22922 - protein, 303 aa, Arabidopsis thaliana [sequence omitted]

SEQ ID NO: 22923 - DNA, 1183 bp, Glycine max
  CDS (85)..(978)
cttcctctcctcagatcgttcctcttcgtctccttcaatcactcgtaagactcttccgagacggtgtgttcgctctttgattgaatggaaagtgaagacatgcattcgaaacctgacggtgggaatcagatcgtttcagagtcggttcatcatcactccataaatagtttaaacccttggcaacgtgctgctgctgcctgcaatgcaagttctttagtggaggaagctggagataagtctatagctttggagaaccaaaacaattgggaatcaactaatggttccaagtcaccatctcataaagatgaaaatggtaacaaggaatcaccacaagtcacatcctctccccaacaatcagctggagattacagtgaaaaaagtcaagaacttgtgcatgttggcgtcacaggacctcctcaccctcaacttgttagccacacaggatgggcatcctcaaatccataccaggatccttattatgctggaatgatgggagcctatcccatggcttatgttccatatggtgggatgcctcattcaagaatgccactgcctcctgaggtggcacaggaaccagtttatgtgaatgctaaacagtaccaggcgatacttaggcgaaggcaggcacgcgccaaggcagagcttgaaatgaagctaatcaaatccagaaagccttatctccatgaatctcggcatcagcatgctatgaggaggcctaggggcactggaggccggtttgcaaagaaaacaaacaccgaagtttcacagccgaaacctggagaaaagaacaatgctactcagtccccgacgtcatctcactctgaccaacctgaagcctggaatgatgagtgtagaaaacagtctgaagagatgcaaagctcagcttctaagagaagggaagaagcagactgttcagggcaacaatggaacagcatttcctcaaaccatacttctgaagctcgtctagccatcaaatgacatctccactggcaactcattcttggctctctctttgttggcttatttggtagcagccattgaagagtcccctgtacaaatacttctgtgtttttcttcttttgtgatatgtcaaatgttactgctttcttttgtcaactctctttagcacatttttgaatcaaaaactatgtgtttaaaattaaattccaaagtgtgcaaactg

SEQ ID NO: 22924 - protein, 297 aa, Glycine max
MESEDMHSKPDGGNQIVSESVHHHSINSLNPWQRAAAACNASSLVEEAGDKSIALENQNNWESTNGSKSPSHKDENGNKESPQVTSSPQQSAGDYSEKSQELVHVGVTGPPHPQLVSHTGWASSNPYQDPYYAGMMGAYPMAYVPYGGMPHSRMPLPPEVAQEPVYVNAKQYQAILRRRQARAKAELEMKLIKSRKPYLHESRHQHAMRRPRGTGGRFAKKTNTEVSQPKPGEKNNATQSPTSSHSDQPEAWNDECRKQSEEMQSSASKRREEADCSGQQWNSISSNHTSEARLAIK

SEQ ID NO: 22925 - DNA, 1482 bp, Glycine max
  CDS (30)..(1046)
tttctgttcttctctggggatctgaagacatgcagtccaagtctgaaactgcaaatcgactgagatcagatcctcattcctttcaacctggcagtgtttattctgagccttggtggcgtggtattgggtacaatcctgtggcccaaacaatggctggggcaaatgcatccaattcatcgtctcttgaatgccctaatggtgattctgaatccaatgaagaaggtcaatctttgtccaatagcgggatgaatgaggaagatgatgatgccactaaggattcacagcctgctgttcctaatggaacaggaaattatgggcaagaacagcaagggatgcagcatactgcatcatctgcaccctccatgcgtgaagaatgccttactcagacaccacagctggaacttgtcggtcattcaattgcatgtgctacaaatccttatcaggatccgtattatgggggcatgatggcagcttatggtcaccaacagttgggatatgctccttttataggaatgcctcatgccagaatgcctttgccccttgagatggctcaagaacctgtgtatgtgaatgccaaacagtaccaaggaattctgaggcgaagacaggctcgtgctaaagcagagcttgaaaggaagctcataaaatctagaaagccatatcttcatgaatctaggcatcagcatgctatgagaagggcaaggggtactggaggacgatttgcaaagaaaactgacggtgagggctcaaaccactcaggcaaggaaaaggataatggtactgattctgtcctatcatcacaatcaattagttcatctggttctgaacctttacattctgactctgccgaaacctggaattctcctaacatgcaacaagatgcaagagcatcaaaagtgcacaacaggttcaaagcaccctgttaccaaaatggcagtggctcctaccataatcataatggattgcaatcttcagtgtaccattcatcctcaggtgaaagactggaggaaagggattgttcgggtcagcaactgaaccacaattgatggggggttagaggccgaggttggtttgtatccaagtgacatatttggtgaataccttggttatctgtaaacactcttggcaatatatatgccaagcggcaaatcattcttggctttgttcttgtgtttgtggtgttaatgatactatggggggggtggggggggggggaatgattggtatttgagatttctgttgaagtcagtcaatcaatccttcgttcttttctcatttttgcattttgtaaagttttatagtggttaggatggtcacttcagaagattatggagtatggtgagaaacaaactcttgatgtgccaacactcgtttgactggtttatctttgtgtagttcaaccggttgttaatgttaacataagacatcataggataatgaacatgctgttagttacattacatcaaaaaaaaaaaaaaaaaa

SEQ ID NO: 22926 - protein, 338 aa, Glycine max
MQSKSETANRLRSDPHSFQPGSVYSEPWWRGIGYNPVAQTMAGANASNSSSLECPNGDSESNEEGQSLSNSGMNEEDDDATKDSQPAVPNGTGNYGQEQQGMQHTASSAPSMREECLTQTPQLELVGHSIACATNPYQDPYYGGMMAAYGHQQLGYAPFIGMPHARMPLPLEMAQEPVYVNAKQYQGILRRRQARAKAELERKLIKSRKPYLHESRHQHAMRRARGTGGRFAKKTDGEGSNHSGKEKDNGTDSVLSSQSISSSGSEPLHSDSAETWNSPNMQQDARASKVHNRFKAPCYQNGSGSYHNHNGLQSSVYHSSSGERLEERDCSGQQLNHN

SEQ ID NO: 22927 - DNA, 1401 bp, Glycine max
  CDS (86)..(1009)
gaagtctttatgtgacctgggtggaatgattctgtgtctgcatgtgtgaattctggcaagggaactagggatctgaagataagatatgcaatctaaatctgaaactgcaaatcaactgaggtctgatccacattcctttacacctaacaatgcttattctgaaccctggtggcgaggtattcagtacaatcctgtcccccaagcaatgttaggagtgaatgcatctaattcatcttcacttgaacgccctaatggtgattcggaatccagtgaagaggatgatgatgccactaaagaatcacaacccactgctcctaatcaatcaggaaattatggacaggaccaccaagcgatgcaacattcttcatcatctgcacctttggtacgtgatgattgccttacacaggctccacaagtggaacttgttggccactcaattggatacactccttttataggaatgccccatgccagaatggctttgccccttgagatggctcaagagcctgtttatgtgaatgccaaacaataccaaggaattctgagacgaagacaggctcgtgctaaagcagagcttgaaaagaaattaataaaagtcagaaagccatatcttcatgaatcccggcatcagcatgctataagaagagcacgaggtaatggagggcgttttgcaaagaaaactgaagttgaggcttcaaaccacatgaacaaggaaaaggatatgggtactggccaggtcccattgtcacggtcaattagttcatctggttttggatcactaccctctgactctgctgagacctggaattctcctagtgtgcaacaagatgcaagaggatctcaagtgcatgagagatttgaagaacgcaactatgcaaatgttttgcagtcatcatctactttttgtttgcactcgggtgaaagagtggaggaaggggactgttcaggtcaacaacggggaagcatcttgtcagagcacacctcacagaggcgtcttgctattcagtaaaccactgcatgtgttgatgctgaggttggtatatataattgagtgaactagtaggttgagtaccttggctatctatctgtaaacattggcaatttgcatgcatgtcaagcggcaaatcattcttggctgggtttcagctgttcatgatatggggagaagaatgattgattgggccatcatacttgtgttgttgaagtctaccagtccttcattatatcctctttttcattttttctgtttttgtacagagatagtagttagcaaagtcaagccaacggattagaagacttgatgaaacaaactactgactcactttcctctggcggctttattttatgttactcaccggttattaatgcttaatatgagacatcatatgagagatttgctgc

SEQ ID NO: 22928 - protein, 307 aa, Glycine max
MQSKSETANQLRSDPHSFTPNNAYSEPWWRGIQYNPVPQAMLGVNASNSSSLERPNGDSESSEEDDDATKESQPTAPNQSGNYGQDHQAMQHSSSSAPLVRDDCLTQAPQVELVGHSIGYTPFIGMPHARMALPLEMAQEPVYVNAKQYQGILRRRQARAKAELEKKLIKVRKPYLHESRHQHAIRRARGNGGRFAKKTEVEASNHMNKEKDMGTGQVPLSRSISSSGFGSLPSDSAETWNSPSVQQDARGSQVHERFEERNYANVLQSSSTFCLHSGERVEEGDCSGQQRGSILSEHTSQRRLAIQ

SEQ ID NO: 22929 - DNA, 816 bp, Arabidopsis thaliana
  CDS (1)..(816)
atgcaatcaaaaccgggaagagaaaacgaagaggaagtcaataatcaccatgctgttcagcagccgatgatgtatgcagagccctggtggaaaaacaactcctttggtgttgtacctcaagcgagaccttctggaattccatcaaattcctcttctttggattgccccaatggttccgagtcaaacgatgttcattcagcatctgaagacggtgcgttgaatggtgaaaacgatggcacttggaaggattcacaagctgcaacttcctctcgttcagataatcacggaatggaaggaaatgacccagcgctctctatccgtaacatgcatgatcagccacttgtacaaccaccagagcttgttggacactatatcgcttgtgtcccaaacccatatcaggatccatattatgggggattgatgggagcatatggtcatcagcaattgggttttcgtccatatcttggaatgcctcgtgaaagaacagctctgccacttgacatggcacaagagcccgtttatgtgaatgcaaagcagtacgagggaattctaaggcgaagaaaagcacgtgccaaggcagagctagagaggaaagtcatccgggacagaaagccatatcttcacgagtcaagacacaagcatgcaatgagaagggcacgagcgagtggaggccggtttgcgaagaaaagtgaggtagaagcgggagaggatgcaggagggagagacagagaaaggggttcagcaaccaactcatcaggctctgaacaagttgagacagactctaatgagaccctgaattcttctggtgcaccataa

SEQ ID NO: 22930 - protein, 271 aa, Arabidopsis thaliana
MQSKPGRENEEEVNNHHAVQQPMMYAEPWWKNNSFGVVPQARPSGIPSNSSSLDCPNGSESNDVHSASEDGALNGENDGTWKDSQAATSSRSDNHGMEGNDPALSIRNMHDQPLVQPPELVGHYIACVPNPYQDPYYGGLMGAYGHQQLGFRPYLGMPRERTALPLDMAQEPVYVNAKQYEGILRRRKARAKAELERKVIRDRKPYLHESRHKHAMRRARASGGRFAKKSEVEAGEDAGGRDRERGSATNSSGSEQVETDSNETLNSSGAP

SEQ ID NO: 22931 - DNA, 1341 bp, Vitis vinifera
  CDS (1)..(1341)
  misc_feature (41)..(41): k is g or t
  misc_feature (1004)..(1004): r is g or a
  misc_feature (1188)..(1188): w is a or t
  misc_feature (1209)..(1209): y is t or c
  misc_feature (1260)..(1260): k is g or t
  misc_feature (1326)..(1326): m is a or c
atggggaagcaggaaggagtcgaagtggagtgtgagccacktgtcactgcagaaatatggaggacctacgtgggtccccagctgggtgacacaatcactatcctgttgttgggtataaaagcccaaatctatttgctgtcactgttgcactcaattgggaatttgcaattgacttgcaaattcttctctccattcttcggggtttttcctctccaagtaagggaaacatttgagaatattacatttttattttggcatatataccgaatctttggttcatcacagaaaattgatcagtttatggtgaagtcaaattccaaaggtccaaatcaaataggacccccacatacagctccaccttcctctgtttattctgaaccttggtggcgtggtgttgggtataaccccatttccacaactatgacaggggggaatacaaacaattctccttcatctgaatgtccaaatggtggttcagaatccaatgatggtcagtcacattctaatggtggactgaatgaggaagatgatgatagtatcaaagaatcacaagctactgcatcctcacaatcaaatgggaactatggacaagaacatcagaatttgcagcatattgcacccaatatacagataggaagttctgaatgcctcacacagcctccacagcttgaacttgttggtcactcaattgcttgtgcgtcaaatccatatcaggatccatattatggggggatgatgacagcttatggacctcagcctttggttcatcctcatttacttggaatgcatgaagctagaatgcctttaccccttgagatgacacaagatcctgtttatgttaatccaaagcagtaccatgggattttgagacgaagacagtcccgtgccaaagcggaacttgaaaaaaagttgataaaagtccgaaagccatatctgcacgaatccagacaccagcacgcccttagaagggcaaggagtagtggaggccgttttgccaaaaagartgcagctgaagcttctaaacacgcttctgaagaaaaggtcacagctttaggctcagccccttcaccacaatctgtcagttcatcgggttcagagcggttgccatctgactctactgaaacctggaattcctccagtagacagcaagaagcaagagggcctcaagcacatgacacccatgaaccwcccaaatataaaaatggcagyggctactaccaaagtcctggtgactcacagacaacaaatcattcacacackagtgagagaggggaggaagaccagcaatggaaaagcttctctgctgaccagggttctcagaggccmcatgccttccagtga

SEQ ID NO: 22932 - protein, 446 aa, Vitis vinifera
  misc_feature (14)..(14): The Xaa at location 14 stands for Arg, or Leu.
  misc_feature (335)..(335): The Xaa at location 335 stands for Asn, or Ser.
MGKQEGVEVECEPXVTAEIWRTYVGPQLGDTITILLLGIKAQIYLLSLLHSIGNLQLTCKFFSPFFGVFPLQVRETFENITFLFWHIYRIFGSSQKIDQFMVKSNSKGPNQIGPPHTAPPSSVYSEPWWRGVGYNPISTTMTGGNTNNSPSSECPNGGSESNDGQSHSNGGLNEEDDDSIKESQATASSQSNGNYGQEHQNLQHIAPNIQIGSSECLTQPPQLELVGHSIACASNPYQDPYYGGMMTAYGPQPLVHPHLLGMHEARMPLPLEMTQDPVYVNPKQYHGILRRRQSRAKAELEKKLIKVRKPYLHESRHQHALRRARSSGGRFAKKXAAEASKHASEEKVTALGSAPSPQSVSSSGSERLPSDSTETWNSSSRQQEARGPQAHDTHEPPKYKNGSGYYQSPGDSQTTNHSHTSERGEEDQQWKSFSADQGSQRPHAFQ

SEQ ID NO: 22933 - DNA, 915 bp, Antirrhinum majus
  CDS (1)..(915)
atgcagtcaaagtcaaaaagtgtcagtcaaggggaatccaacctttataatgttgcgaactccaccgtatgttctgaaccatggtggagtaatactggatataactctttttcccctgcaatgatgcggggaaatgcttcagattcatcttcactagaacattctgtggatggccaatcacagtctgaaggtacaagaaatgaagaagctgatgatactgccaaacactcaccaagtaccatacatctgcagccagggtcagatagaaactataggcaggaaggttcaagtctccagcaagttccgcctaccttacatccaataaatgatgggagcctgacgcagcccccacagcttgagctcactgggcactcaatcgcctgtgcctcaaatccatatgatacatattatggaggcatgatggcagcttatggccaaccattggttccttctcatttatacgaaatgcaccaaacgaggatgccactgcccctggagatggcgcaggagcctgtttacgtgaatgccaaacaataccatggtattctgcgtaggcgacagtcacgtgctaaagcagagctggaaaagaagttgataaaagttcggaagccatatctccacgagtctaggcaccaacatgccttgaggagggagagaggttccggggggcgatttgcaaagaagactgatgcggaaactccaaaaggttcatcgggttctgaacctgtgcaatccgagtccaatggatcaaatatgcgcgaggctcaggatctgtacaacaacgatgctggaaatttcagaaagcaaagcaaccttcaggaaattcagccccgcccgagcaagaagggggatagaccgaattcaagtcagcagtggacgaatgtcccttctaaccatgcacttgctatgcagtaa

SEQ ID NO: 22934 - protein, 304 aa, Antirrhinum majus
MQSKSKSVSQGESNLYNVANSTVCSEPWWSNTGYNSFSPAMMRGNASDSSSLEHSVDGQSQSEGTRNEEADDTAKHSPSTIHLQPGSDRNYRQEGSSLQQVPPTLHPINDGSLTQPPQLELTGHSIACASNPYDTYYGGMMAAYGQPLVPSHLYEMHQTRMPLPLEMAQEPVYVNAKQYHGILRRRQSRAKAELEKKLIKVRKPYLHESRHQHALRRERGSGGRFAKKTDAETPKGSSGSEPVQSESNGSNMREAQDLYNNDAGNFRKQSNLQEIQPRPSKKGDRPNSSQQWTNVPSNHALAMQ

SEQ ID NO: 22935 - DNA, 945 bp, Brassica napus
  CDS (1)..(945)
atgatatctctgacagtgactacaccgagtttgagagaaactgaagacatgcattcaaaatctgaaagtgggaatcagatcgtttcagaggctcatcatcatacatcatcaacgtccattaacagtttaaacccttggctgcgtgctgctgcttcctgcaatgcaaactcttctgtggaagaagctggagataagtcgatagcattggagaaccaaaccaatttggaatcatcaaacgggtccaagtcaccatctaaccgagatgaaaatggtaacaaggagtcacaagtcacagcctctccccaacagtcagctgcggattacagtgaaaaaagccaagaacttgtgcatcctggcagtacaccacctcctcaccctcaacttgttagccacactgttggatgggcatcctcaaatccataccaggattcatattatgctggaatgatgggagcctatcccttgacttatgttccacacggtgggatgcctcattcaagaatgcaactgcctcctgagatggcacaagaacctgtttacgtgaatgctaaacagtaccaggcgattatgaggcgaaggcaggcacgcgccaaggctgagctagagaagaagcttatcaaatccagaaagcgttatctacatgaatctcggcatcagcatgctatgaggaggcctaggggtactggaggacggtttgcaaagaaaactaacaccgaagcttcacagcaaaaagatggagaaaagagaaatgcttgtgctactcagtccccgacgtcatctcattctgatcagcatgaaggttgtagtgatgagtatagaacaaatcagtccgatgagatgcagagttcagcttataagataagggaagaagcagactgttcagggcagcagtggaacaacatttcctcaaaccatccttctcaacctcttttagctatcaagtaa

SEQ ID NO: 22936 - protein, 314 aa, Brassica napus
MISLTVTTPSLRETEDMHSKSESGNQIVSEAHHHTSSTSINSLNPWLRAAASCNANSSVEEAGDKSIALENQTNLESSNGSKSPSNRDENGNKESQVTASPQQSAADYSEKSQELVHPGSTPPPHPQLVSHTVGWASSNPYQDSYYAGMMGAYPLTYVPHGGMPHSRMQLPPEMAQEPVYVNAKQYQAIMRRRQARAKAELEKKLIKSRKRYLHESRHQHAMRRPRGTGGRFAKKTNTEASQQKDGEKRNACATQSPTSSHSDQHEGCSDEYRTNQSDEMQSSAYKIREEADCSGQQWNNISSNHPSQPLLAIK

SEQ ID NO: 22937 - DNA, 912 bp, Brassica napus
  CDS (1)..(912)
atggaaactgaagacatgcattcaaaatctgaaagtgggaatcagatcgtttcagaggctcatcatcatacatcatcaacgtccattaacagtttaaacccttggctgcgtgctgctgcttcctgcaatgcaaactcttctgtggaagaagctggagataagtcgatagcattggagaaccaaaccaatttggaatcatcaaacgggtccaagtcaccatctaaccgagatgaaaatggtaacaaggagtcacaagtcacagcctctccccaacagtcagctgcggattacagtgaaaaaagccaagaacttgtgcatcctggcagtacaccacctcctcaccctcaacttgttagccacactgttggatgggcatcctcaaatccataccaggattcatattatgctggaatgatgggagcctatcccttgacttatgttccacacggtgggatgcctcattcaagaatgcaactgcctcctgagatggcacaagaacctgtttacgtgaatgctaaacagtaccaggcgattatgaggcgaaggcaggcacgcgccaaggctgagctagagaagaagcttatcaaatccagaaagcgttatctacatgaatctcggcatcagcatgctatgaggaggcctaggggtactggaggacggtttgcaaagaaaactaacaccgaagcttcacagcaaaaagatggagaaaagagaaatgcttgtgctactcagtccccgacgtcatctcattctgatcagcatgaaggttgtagtgatgagtatagaacaaatcagtccgatgagatgcagagttcagcttataagataagggaagaagcagactgttcagggcagcagtggaacaacatttcctcaaaccatccttctcaacctcttttagctatcaagtaa

SEQ ID NO: 22938 - protein, 303 aa, Brassica napus
METEDMHSKSESGNQIVSEAHHHTSSTSINSLNPWLRAAASCNANSSVEEAGDKSIALENQTNLESSNGSKSPSNRDENGNKESQVTASPQQSAADYSEKSQELVHPGSTPPPHPQLVSHTVGWASSNPYQDSYYAGMMGAYPLTYVPHGGMPHSRMQLPPEMAQEPVYVNAKQYQAIMRRRQARAKAELEKKLIKSRKRYLHESRHQHAMRRPRGTGGRFAKKTNTEASQQKDGEKRNACATQSPTSSHSDQHEGCSDEYRTNQSDEMQSSAYKIREEADCSGQQWNNISSNHPSQPLLAIK

SEQ ID NO: 22939 - DNA, 912 bp, Daucus carota
  CDS (1)..(912)
atgatgcacccaaaacctagatccagtaatcagctggaatacggttcatataatcttccacccatatcttcagaaccatggtggcagagcttgggcaagaactctaccaatactgatggaattcaggagaatggatctgattcatcttcacagtcggtagatggtagtgaagatgaggatgatggatccaatgagtcacagaatactggaaatatgccttctgatccaaattttgctcaagaacatcagaaccagcatgttgcaactaatgtgcctcctgggaatgctgaaaacccacctcaggcttcacaacttgaacttgctggtcaatcagtagcttatgatccaaatgcatactatgacccatattactatagaggaatgatggcggcctatggtcaacctctggttcaacctcacttgctcgatacacatcacaacagaatgcctttgcccattgatatgacacaagagcctgtttatgtgaatgccaagcagtaccgtgcaattctacggcgcagagaatcccgtgcaaaggccgaactcaaaaggaagttgattaaagatcgaaagccatatcttcatgaatctcggcataggcatgctattagaagggcaagggcttctggaggccgttttgcaaagaagtctgatactgatgcttcggagaacccgcagacaagtgaggtaaaaggggttaatattagctcctcagtttctgctcaatctgcaaattcgtccggatctcaagtatttccttccaattgcaatctgaattcccatcaagaagcaagagggccggatgctacatatgtcaataattctggaggctatgagaaccaagaagcgtttagggtgtcaacatatgacttgcactcgaacagagaggggggatctgtttgccagcagtaa

SEQ ID NO: 22940 - protein, 303 aa, Daucus carota
MMHPKPRSSNQLEYGSYNLPPISSEPWWQSLGKNSTNTDGIQENGSDSSSQSVDGSEDEDDGSNESQNTGNMPSDPNFAQEHQNQHVATNVPPGNAENPPQASQLELAGQSVAYDPNAYYDPYYYRGMMAAYGQPLVQPHLLDTHHNRMPLPIDMTQEPVYVNAKQYRAILRRRESRAKAELKRKLIKDRKPYLHESRHRHAIRRARASGGRFAKKSDTDASENPQTSEVKGVNISSSVSAQSANSSGSQVFPSNCNLNSHQEARGPDATYVNNSGGYENQEAFRVSTYDLHSNREGGSVCQQ

SEQ ID NO: 22941 - DNA, 1038 bp, Trichoderma reesei
  CDS (1)..(1038)
atgatggaatacgcgcaatatccacagcagcaacacaattcccacgcaggttacgcgagctctgccgccggtgcaagtatcacgtcgcccaccagccacggcatcaaccagcacgccgtgcaatcgtcgcccgtcaacgcatcgcagcagcagcagcaacaacaacagcaacagcaacaacaacaacaacaacagcaacaacagcagcagcagcaacaacaacagcagcagcagcagcagcagcagcagtctcagcagcaacaccagcctgctcaggccccagctcacggcatgtatcaaccacagtacggcgtgccccagcccagcatgcagcaggtgccgtatggcatccctggcatccaggctgccgcaatggccgccacagccgccgcctcaggctccggctacccttacatgcactcggatccgagcatgcctcacacgtcgccgcgcatgcccagcgctaagaaggatggccggccgtctcctcgcatgaacagcatttcccagatccccggccgccgcatgagccaagtcaccagcccgggcgtgccgagtgcccccggcatgatgaaccacggcggaccccggcccccgcccatgcctcccgcccctgccatgcagcacccacagtcgccagagatgcccgccggcgccgtcgaagagtcgccattgtacgtcaatgcgaaacagttccaccgaatcctcaagcggcgcgtcgcccgccagcgtctcgaagagcagttgcggttgacttccaaaggacgaaagccctacctgcacgagtccagacacaaccatgcgatgcgcaggcctcgtggacccggtggtcgattcttgacagcagaggaggtggccgccatggaatccaagggagggctagacggcaagggtgagggttcggacgatgtctcacctggcaagtcctcagatgccccgagcgggaagcgcaagtcggaatctggcccctcgacgtccagcaagaagcccaaaacacaaagcgacaacggcgaaggaaatgcagaagacgccagttaa

SEQ ID NO: 22942 - protein, 345 aa, Trichoderma reesei
MMEYAQYPQQQHNSHAGYASSAAGASITSPTSHGINQHAVQSSPVNASQQQQQQQQQQQQQQQQQQQQQQQQQQQQQQQQQQQSQQQHQPAQAPAHGMYQPQYGVPQPSMQQVPYGIPGIQAAAMAATAAASGSGYPYMHSDPSMPHTSPRMPSAKKDGRPSPRMNSISQIPGRRMSQVTSPGVPSAPGMMNHGGPRPPPMPPAPAMQHPQSPEMPAGAVEESPLYVNAKQFHRILKRRVARQRLEEQLRLTSKGRKPYLHESRHNHAMRRPRGPGGRFLTAEEVAAMESKGGLDGKGEGSDDVSPGKSSDAPSGKRKSESGPSTSSKKPKTQSDNGEGNAEDAS

SEQ ID NO: 22943 - DNA, 819 bp, Arabidopsis thaliana
  CDS (1)..(819)
atgcaatcaaaaccgggaagagaaaacgaagaggaagtcaataatcaccatgctgttcagcagccgatgatgtatgcagagccctggtggaaaaacaactcctttggtgttgtacctcaagcgagaccttctggaattccatcaaattcctcttctttggattgccccaatggttccgagtcaaacgatgttcattcagcatctgaagacggtgcgttgaatggtgaaaacgatggcacttggaaggattcacaagctgcaacttcctctcgttcagtagataatcacggaatggaaggaaatgacccagcgctctctatccgtaacatgcatgatcagccacttgtacaaccaccagagcttgttggacactatatcgcttgtgtcccaaacccatatcaggatccatattatgggggattgatgggagcatatggtcatcagcaattgggttttcgtccatatcttggaatgcctcgtgaaagaacagctctgccacttgacatggcacaagagcccgtttatgtgaatgcaaagcagtacgagggaattctaaggcgaagaaaagcacgtgccaaggcagagctagagaggaaagtcatccgggacagaaagccatatcttcacgagtcaagacacaagcatgcaatgagaagggcacgagcgagtggaggccggtttgcgaagaaaagtgaggtagaagcgggagaggatgcaggagggagagacagagaaaggggttcagcaaccaactcatcaggctctgaacaagttgagacagactctaatgagaccctgaattcttctggtgcaccataa

SEQ ID NO: 22944 - protein, 272 aa, Arabidopsis thaliana
MQSKPGRENEEEVNNHHAVQQPMMYAEPWWKNNSFGVVPQARPSGIPSNSSSLDCPNGSESNDVHSASEDGALNGENDGTWKDSQAATSSRSVDNHGMEGNDPALSIRNMHDQPLVQPPELVGHYIACVPNPYQDPYYGGLMGAYGHQQLGFRPYLGMPRERTALPLDMAQEPVYVNAKQYEGILRRRKARAKAELERKVIRDRKPYLHESRHKHAMRRARASGGRFAKKSEVEAGEDAGGRDRERGSATNSSGSEQVETDSNETLNSSGAP

SEQ ID NO: 22945 - DNA, 954 bp, Oryza sativa
  CDS (1)..(954)
atgataatgctgttgcaagaaatggagaatcatcctgtccaatgcatggccaagaccaactatgattttcttgccaggaataactatccaatgaaacagttagttcagaggaactctgatggtgactcgtcaccaacaaagtctggggagtctcaccaagaagcatctgcagtaagtgacagcagtctcaacggacaacacacctcaccacaatcagtgtttgtcccctcagatattaacaacaatgatagttgtggggagcgggaccatggcactaagtcggtattgtctttggggaacacagaagctgcctttcctccttcaaagttcgattacaaccagccttttgcatgtgtttcttatccatatggtactgatccatattatggtggagtattaacaggatacacttcacatgcatttgttcatcctcaaattactggtgctgcaaactctaggatgccattgcctgttgatccttctgtagaagagcccatatttgtcaatgcaaagcaatacaatgcgatccttagaagaaggcaaacgcgtgcaaaattggaggcccaaaataaggcggtgaaaggtcggaagccttacctccatgaatctcgacatcatcatgctatgaagcgagcccgtggatcaggtggtcggttccttaccaaaaaggagctgctggaacagcagcagcagcagcagcagcagaagccaccaccggcatcagctcagtctccaacaggtagagccagaacgagcggcggtgccgttgtccttggcaagaacctgtgcccagagaacagcacatcctgctcgccatcgacaccgacaggctccgagatctccagcatctcatttgggggcggcatgctggctcaccaagagcacatcagcttcgcatccgctgatcgccaccccacaatgaaccagaaccaccgtgtccccgtcatgaggtga

SEQ ID NO: 22946 - protein, 317 aa, Oryza sativa
MIMLLQEMENHPVQCMAKTNYDFLARNNYPMKQLVQRNSDGDSSPTKSGESHQEASAVSDSSLNGQHTSPQSVFVPSDINNNDSCGERDHGTKSVLSLGNTEAAFPPSKFDYNQPFACVSYPYGTDPYYGGVLTGYTSHAFVHPQITGAANSRMPLPVDPSVEEPIFVNAKQYNAILRRRQTRAKLEAQNKAVKGRKPYLHESRHHHAMKRARGSGGRFLTKKELLEQQQQQQQQKPPPASAQSPTGRARTSGGAVVLGKNLCPENSTSCSPSTPTGSEISSISFGGGMLAHQEHISFASADRHPTMNQNHRVPVMR

SEQ ID NO: 22947 - DNA, 939 bp, Oryza sativa
  CDS (1)..(939)
atgataatgctgttgcaagaaatggagaatcatcctgtccaatgcatggccaagaccaactatgattttcttgccaggaataactatccaatgaaacagttagttcagaggaactctgatggtgactcgtcaccaacaaagtctggggagtctcaccaagaagcatctgcagtaagtgacagcagtctcaacggacaacacacctcaccacaatcagatattaacaacaatgatagttgtggggagcgggaccatggcactaagtcggtattgtctttggggaacacagaagctgcctttcctccttcaaagttcgattacaaccagccttttgcatgtgtttcttatccatatggtactgatccatattatggtggagtattaacaggatacacttcacatgcatttgttcatcctcaaattactggtgctgcaaactctaggatgccattgcctgttgatccttctgtagaagagcccatatttgtcaatgcaaagcaatacaatgcgatccttagaagaaggcaaacgcgtgcaaaattggaggcccaaaataaggcggtgaaaggtcggaagccttacctccatgaatctcgacatcatcatgctatgaagcgagcccgtggatcaggtggtcggttccttaccaaaaaggagctgctggaacagcagcagcagcagcagcagcagaagccaccaccggcatcagctcagtctccaacaggtagagccagaacgagcggcggtgccgttgtccttggcaagaacctgtgcccagagaacagcacatcctgctcgccatcgacaccgacaggctccgagatctccagcatctcatttgggggcggcatgctggctcaccaagagcacatcagcttcgcatccgctgatcgccaccccacaatgaaccagaaccaccgtgtccccgtcatgaggtga

SEQ ID NO: 22948 - protein, 312 aa, Oryza sativa
MIMLLQEMENHPVQCMAKTNYDFLARNNYPMKQLVQRNSDGDSSPTKSGESHQEASAVSDSSLNGQHTSPQSDINNNDSCGERDHGTKSVLSLGNTEAAFPPSKFDYNQPFACVSYPYGTDPYYGGVLTGYTSHAFVHPQITGAANSRMPLPVDPSVEEPIFVNAKQYNAILRRRQTRAKLEAQNKAVKGRKPYLHESRHHHAMKRARGSGGRFLTKKELLEQQQQQQQQKPPPASAQSPTGRARTSGGAVVLGKNLCPENSTSCSPSTPTGSEISSISFGGGMLAHQEHISFASADRHPTMNQNHRVPVMR

SEQ ID NO: 22949 - DNA, 777 bp, Oryza sativa
  CDS (1)..(777)
atggagtcgaggccggggggaaccaacctcgtggagccgagggggcagggcgcgctgccgtccggcataccgatccagcagccgtggtggacgacctccgccggggtcggggcggtgtcgcccgccgtcgtggcgccggggagcggtgcggggatcagcctgtcgggcagggatggcggcggcgacgacgcggcagaggagagcagcgatgactcacgaagatcaggggagaccaaagatggaagcactgatcaagaaaagcatcatgcaacatcgcagatgactgctttggcatcagactatttaacaccattttcacagctggaactaaaccaaccaattgcttcggcagcataccagtaccctgactcttactatatgggcatggttggtccctatggacctcaagctatgtccgcacagactcatttccagctacctggattaactcactctcgtatgccgttgcctcttgaaatatctgaggagcctgtttatgtaaatgctaagcaatatcatggaattttaagacggaggcagtcacgtgcgaaggctgaacttgagaaaaaagttgttaaatcaagaaagccctatcttcatgagtctcgtcatcaacatgctatgcgaagggcaagaggaacgggtggacgcttcctgaacacaaagaaaaatgaagatggtgctcccagtgagaaagccgaaccaaacaaaggagagcagaactccgggtatcgccggatccctcctgacttacagctcctacagaaggaaacatga

SEQ ID NO: 22950 - protein, 258 aa, Oryza sativa
MESRPGGTNLVEPRGQGALPSGIPIQQPWWTTSAGVGAVSPAVVAPGSGAGISLSGRDGGGDDAAEESSDDSRRSGETKDGSTDQEKHHATSQMTALASDYLTPFSQLELNQPIASAAYQYPDSYYMGMVGPYGPQAMSAQTHFQLPGLTHSRMPLPLEISEEPVYVNAKQYHGILRRRQSRAKAELEKKVVKSRKPYLHESRHQHAMRRARGTGGRFLNTKKNEDGAPSEKAEPNKGEQNSGYRRIPPDLQLLQKET

SEQ ID NO: 22951 - DNA, 897 bp, Brassica napus
  CDS (1)..(897)
atggaaagtgaagacatgcattcgaaacctgacggtgggaatcagatcgtttcagagtcggttcatcatcactccataaatagtttaaacccttggcaacgtgctgctgctgcctgcaatgcaagttctttagtggaggaagctggagataagtctatagctttggagaaccaaaacaattgggaatcaactaatggttccaagtcaccatctcataaagatgaaaatggtaacaaggaatcaccacaagtcacatcctctccccaacaatcagctggagattacagtgaaaaaagtcaagaacttgtgcatgttggcgtcacaggacctcctcaccctcaacttgttagccacacagttggatgggcatcctcaaatccataccaggatccttattatgctggaatgatgggagcctatcccatggcttatgttccatatggtgggatgcctcattcaagaatgccactgcctcctgaggtggcacaggaaccagtttatgtgaatgctaaacagtaccaggcgatacttaggcgaaggcaggcacgcgccaaggcagagcttgaaatgaagctaatcaaatccagaaagccttatctccatgaatctcggcatcagcatgctatgaggaggcctaggggcactggaggccggtttgcaaagaaaacaaacaccgaagtttcacagccgaaacctggagaaaagaacaatgctactcagtccccgacgtcatctcactctgaccaacctgaagcctggaatgatgagtgtagaaaacagtctgaagagatgcaaagctcagcttctaagagaagggaagaagcagactgttcagggcaacaatggaacagcatttcctcaaaccatacttctgaagctcgtctagccatcaaatga

SEQ ID NO: 22952 - protein, 298 aa, Brassica napus
MESEDMHSKPDGGNQIVSESVHHHSINSLNPWQRAAAACNASSLVEEAGDKSIALENQNNWESTNGSKSPSHKDENGNKESPQVTSSPQQSAGDYSEKSQELVHVGVTGPPHPQLVSHTVGWASSNPYQDPYYAGMMGAYPMAYVPYGGMPHSRMPLPPEVAQEPVYVNAKQYQAILRRRQARAKAELEMKLIKSRKPYLHESRHQHAMRRPRGTGGRFAKKTNTEVSQPKPGEKNNATQSPTSSHSDQPEAWNDECRKQSEEMQSSASKRREEADCSGQQWNSISSNHTSEARLAIK

SEQ ID NO: 22953 - DNA, 768 bp, Zea mays
  CDS (1)..(768)
atgagcagcatggagtcgcggccgggccgaacgaacctggtggagcccatagggcacggcgccgcgctgccgtccggcggccaggcagtgcagccgtggtggacgagctccggggctgtgctcggtgcagtctcgccagccgtcgtggcggtggcgcccgggagcgggacggggattagcctgtcgagcagcccggcaggtggtagtggtggtggcggcgcggctaaaggagccgcgagtgacgagagcagcgaggattcacggagatctggggaaccaaaagatggaagcgctagtcaagaaaagaaccatgccacatcgcagatacccgctctggcgccagagtatttggcaccatactcgcagctggaactgaaccaatcaattgcttctgcagcatatcagtacccagatccttactatgcaggcatggttgctccctatggaagtcatgctgtggctcattttcagctacctggactaactcaatctcgaatgccattacctcttgaagtatccgaggagcctgtttatgtaaatgccaagcagtaccatggtatcttaagacgacggcagtcccgtgctaaggctgaacttgagaaaaaggtggtcaaagccagaaagccataccttcacgagtctcgtcatcagcacgcgatgaggagggcaagaggaaacgggggacgcttcctgaacacaaagaaaagtgacagtggtgctcccaatggtaaggctgaacctgagaaagctagtacaattgttgcataa

SEQ ID NO: 22954 - protein, 255 aa, Zea mays
MSSMESRPGRTNLVEPIGHGAALPSGGQAVQPWWTSSGAVLGAVSPAVVAVAPGSGTGISLSSSPAGGSGGGGAAKGAASDESSEDSRRSGEPKDGSASQEKNHATSQIPALAPEYLAPYSQLELNQSIASAAYQYPDPYYAGMVAPYGSHAVAHFQLPGLTQSRMPLPLEVSEEPVYVNAKQYHGILRRRQSRAKAELEKKVVKARKPYLHESRHQHAMRRARGNGGRFLNTKKSDSGAPNGKAEPEKASTIVA

SEQ ID NO: 22955 - DNA, 972 bp, Brassica napus
  CDS (1)..(972)
atgcatcagatgaataagaaagattcaactttgccgtacctgaacactagcatctcatggggtggtatgatttcaactgaacccctaagcctgaaggtggttgatgcaaggcctgaacatatgcatgccacaaagcaaatcagtttccaggaccaggattcaccttcaactcagtccacttgtcagtcttacactgaagttgctagtagtggagatgataaatcttgcagacaaatctccttttcaaccaaatcaggatctgaagaaactcagcggaaggtatctgcgactcatactaaaccatgcgcaatgacatcattccctaacatgcactttgctccaacgcagactaatttctcatttcactatgctgatccacattatggtggtttattagctacaacttatcttccacatgcaccgacatgcaatccccaaatggtgggtatggttcctggtcgagttccactaccagtggagatcactgaaactgagccagtctttgtcaatgcgaagcaataccacgcaatcatgaggagaaggcagcaacgtgccaagcttgaggctcagaacaaactaatcaaagcgaggaagccgtatcttcatgaatctcgacatgttcatgctcttaaaaggccaagaggatccggtggaagattcctaaacaccaaaaaacttcttcaagaatccgaacaggatgctgctaagcaagaacaacaagaaagcaaaaaggcaaacatgtctagattcaaagctcatatgctgcagcacaacaaagaccgtagcggctcaaccacctctggctctgacgttacatctgtttccgacggcgctgatgtctttggacacactgaattccagttttcaggtttcccaatcccaactcagactaaccgagccatgcttgttcatgatcagtccaatgacatgcatggaggtggggacttgcaccatttctctgtccatatctga

SEQ ID NO: 22956 - protein, 323 aa, Brassica napus
MHQMNKKDSTLPYLNTSISWGGMISTEPLSLKVVDARPEHMHATKQISFQDQDSPSTQSTCQSYTEVASSGDDKSCRQISFSTKSGSEETQRKVSATHTKPCAMTSFPNMHFAPTQTNFSFHYADPHYGGLLATTYLPHAPTCNPQMVGMVPGRVPLPVEITETEPVFVNAKQYHAIMRRRQQRAKLEAQNKLIKARKPYLHESRHVHALKRPRGSGGRFLNTKKLLQESEQDAAKQEQQESKKANMSRFKAHMLQHNKDRSGSTTSGSDVTSVSDGADVFGHTEFQFSGFPIPTQTNRAMLVHDQSNDMHGGGDLHHFSVHI

SEQ ID NO: 22957 - DNA, 813 bp, Brassica napus
  CDS (1)..(813)
atgcaatcgaaatcggggagagggaacgaagaggaagccaatcatcaccatgctgatcagcagcagcagcagcagccgatgatgtatcctgagccctggtggaagaccaacgcttttggcgttattccacaagagcgaccttctgtgcttccgtcgaactcctcgtctttggattgtcccaatggttctgaattaaacgatgttcattcagcttctgaagacggtggtggtgcgggtaatggcgaaaacgatgccgcttggaaggattcacaagctgtaacttcctccccttcagttgaccaacatggaatggaagggagtgatccgacacacgtggcggcttctatgcacggcatgcataatcagcaacctgtacaaccaccagagcttgttggacactacatggcttgtgtaccacctaatccgtaccaggatccatattatgcgggaatgatgggagcatatggacatcagccattgggttttcgtccatatcttggaatgcctcgtgagagaacagcactcccacttgacatcacacaagaacctgtttatgtgaatgcaaaacagtacgagggaattctaaggcgaagaaaagcacgtgccaaggccgagctagaaaggaaagtcatcaacagaaagccttatcttcatgagtcgagacacaagcatgcgatgaaaagggtgagggctagtggaggccggtttgcaaagaaaagtgaagcagaagcagcagaggatgcagcagcagcgaggagagaaaggagttcagcaaccaactcatcaggctctgaacaaccagttgattcttaa

SEQ ID NO: 22958 - protein, 270 aa, Brassica napus
MQSKSGRGNEEEANHHHADQQQQQQPMMYPEPWWKTNAFGVIPQERPSVLPSNSSSLDCPNGSELNDVHSASEDGGGAGNGENDAAWKDSQAVTSSPSVDQHGMEGSDPTHVAASMHGMHNQQPVQPPELVGHYMACVPPNPYQDPYYAGMMGAYGHQPLGFRPYLGMPRERTALPLDITQEPVYVNAKQYEGILRRRKARAKAELERKVINRKPYLHESRHKHAMKRVRASGGRFAKKSEAEAAEDAAAARRERSSATNSSGSEQPVDS

SEQ ID NO: 22959 - DNA, 894 bp, Brassica napus
  CDS (1)..(894)
atgcattcaaaatctgaaagtgggaatcagatcgtttcagaggctcatcatcatacatcatcatcgtccattaacagtttaaacccttggcaacgtgctgctgctgcctgcaatgcaagttctttagtggaggaagctggagataagtctatagcattggagaaccaaaacaattgggaatcaacaaacgggtccaagtcaccatctaatagagatgaaaatggtaacaaggaatcaccacaagtcacatcctctccccaacaatcagctggagattacagtgaaaaaagtcaagaacttgtgcatgttggcgtcacaggacctcctcaccctcaacttgttagccacacagttggatgggcatcctcaaatccataccaggatccttattatgctggaatgatgggagcctatcccatggcttatgttccatatggtgggatgcctcattcaagaatgcaactgcctcctgaggtggcacaagaaccagtttacgtgaatgctaaacagtaccaggcgataatgaggcgaaggcaagcacgcgccaaggcggagctagaaaagaagctaatcaaatccagaaagccttatctacatgaatctcggcatcagcatgctatgaggaggcctaggggtactggaggacggtttgcaaagaaaacaaacaccgaagcttcacagcaaaaagatggagaaaagaaaaatgctactcagtccccgacgtcatctcattctgatcaacctgaaggttgtagtgatgagtatagaacaaatcagtccgaagagatgcagagctcagcttataagagaagggaagaagcagactgttcagggcagcagtggaacaacatttcctcaaaccatccttctcaacctcttttagctatcaagtaa

SEQ ID NO: 22960 - protein, 297 aa, Brassica napus
MHSKSESGNQIVSEAHHHTSSSSINSLNPWQRAAAACNASSLVEEAGDKSIALENQNNWESTNGSKSPSNRDENGNKESPQVTSSPQQSAGDYSEKSQELVHVGVTGPPHPQLVSHTVGWASSNPYQDPYYAGMMGAYPMAYVPYGGMPHSRMQLPPEVAQEPVYVNAKQYQAIMRRRQARAKAELEKKLIKSRKPYLHESRHQHAMRRPRGTGGRFAKKTNTEASQQKDGEKKNATQSPTSSHSDQPEGCSDEYRTNQSEEMQSSAYKRREEADCSGQQWNNISSNHPSQPLLAIK

SEQ ID NO: 22961 - DNA, 861 bp, Brassica napus
  CDS (1)..(861)
atgcaatcgaaatcggggagagggaacgaagaggaagccaatcatcaccatgctgatcagcagcagcagcagcagccgatgatgtatccggagccctggtggaagaccaacgcttttggcgttattccacaagagcgaccttcttctgggattccgtcaaactcctcgtctttggattgtcccaatggttctgaatcaaacgatgttcattcagcttctgaagacggtggtggtccgggtaatggcgaaaacgatgccgcttggaaggattcacaagctgtaacttcctccccttcagttgaccaacatggaatggaagggagtgatccgacacacgtggcggcttctatgcacggcatgcataatcagcaacctgtacaaccaccagagcttgttggacactacatggcttgtgtaccacctaatccgtaccaggatccatattatgcgggaatgatgggagcatatggacatcagccattgggttttcgtccatatcttggaatgcctcgtgaaagaacagcactcccacttgacatcacacaagaacctgtttatgtgaatgcgaaacagtacgagggaattttaaggcgaagaaaagctcgtgccaaggccgagctagaaaggaaagtgatcaacagaaagccatatcttcatgagtcaagacacaagcacgcaatgagaagggcaagggctagtggaggccggtttgctaagaagactgaggcagaagcagcagcagaggatgcagcagcagcagctggtagagaaagagaaaaaggttcagcaaccaactcatctggctctgaaccagttgaaactgactctaatgaaaccctgaactcttcaggtgcaccataa

SEQ ID NO: 22962 - protein, 286 aa, Brassica napus
MQSKSGRGNEEEANHHHADQQQQQQPMMYPEPWWKTNAFGVIPQERPSSGIPSNSSSLDCPNGSESNDVHSASEDGGGPGNGENDAAWKDSQAVTSSPSVDQHGMEGSDPTHVAASMHGMHNQQPVQPPELVGHYMACVPPNPYQDPYYAGMMGAYGHQPLGFRPYLGMPRERTALPLDITQEPVYVNAKQYEGILRRRKARAKAELERKVINRKPYLHESRHKHAMRRARASGGRFAKKTEAEAAAEDAAAAAGREREKGSATNSSGSEPVETDSNETLNSSGAP

SEQ ID NO: 22963 - DNA, 846 bp, Brassica napus
  CDS (1)..(846)
atggctatgcaaactatgagagaaggtcttccctctgctccacagatttcttggtggaacgcttttggatctcagccgttgactccggagagtctctccggagattctgattcattggccggagttaaggtcagatctgctggagggatagaacaaggtgtgaataaacaaaacaactctgcaactcacttagctttctcacttggtgatgtaaagagtccaagagttgtgccaaagcctcatggagctgctttctcaatgcaaccaccttacttggaacttggatttactcagcaacagatgtacacaaagtatccatgtgtggaacaacaatactatggagttctctcaccctatggatctcagagcagagtaatgcttcctctaaacatggaaacagaagatggaacaatctacgtgaactcaaagcaataccatgcaatcatcaggcgacgccaatcacgtgcaaaggctgctgctgttcttgatcagaacaaaccgagtagcaaattccgtaagccatatatgcatcattcacgccatctccatgcattgcgccgtcctagaggatctggtgggaggttcttgaacactaaaagtcagaacaatgcaaagaaagctgatgggactaagccgactcagcctcagcaaagtaactctcaggattcagacgttcttcatcctgaaaacgtgaccatgaacttatcaaaccgactaggatcagaagttacaagcatgaactactttttaagctcttcggttcatccccttggtggcatggtaatgcctagcaagtggatcacagcagcagcaatggataatggctgctgcagtttcaaaacctga

SEQ ID NO: 22964 - protein, 281 aa, Brassica napus
MAMQTMREGLPSAPQISWWNAFGSQPLTPESLSGDSDSLAGVKVRSAGGIEQGVNKQNNSATHLAFSLGDVKSPRVVPKPHGAAFSMQPPYLELGFTQQQMYTKYPCVEQQYYGVLSPYGSQSRVMLPLNMETEDGTIYVNSKQYHAIIRRRQSRAKAAAVLDQNKPSSKFRKPYMHHSRHLHALRRPRGSGGRFLNTKSQNNAKKADGTKPTQPQQSNSQDSDVLHPENVTMNLSNRLGSEVTSMNYFLSSSVHPLGGMVMPSKWITAAAMDNGCCSFKT

SEQ ID NO: 22965 - DNA, 858 bp, Brassica napus
  CDS (1)..(858)
atgcaatcgaaatcggggagagggaacgaagaggaagccaatcatcaccatgctgatcagcagcagcagcagcagccgatgatgtatcctgagccctggtggaagaccaacgcttttggcgttattccacaagagcgaccttctgtgcttccgtcgaactcctcgtctttggattgtcccaatggttctgaattaaacgatgttcattcagcttctgaagacggtggtggtgcgggtaatggcgaaaacgatgccgcttggaaggattcacaagctgtgacttcctccccttcagttgaccaacatggaatggaagggagtgatccgacacatgtggcggcttctatgcacggcatgcataatcagcaacctgtacaaccaccagagcttgttggacactacatggcttgtgtaccacctaatccgtaccaggatccatattatgcgggaatgatgggagcatatggacatcagccattgggttttcgtccatatcttggaatgcctcgtgaaagaacagcactcccacttgacatcacacaagaacctgtttatgtgaatgcgaaacagtacgagggaattttaaggcgaagaaaagctcgtgccaaggccgagctagaaaggaaagtgatcaacagaaagccatatcttcatgagtcaagacacaagcacgcaatgagaagggcaagggctagtggaggccggtttgctaagaagactgaggcagaagcagcagcagaggatgcagcagcagcagctggtagagaaagagaaaaaggttcagcaaccaactcatctggctctgaaccagttgaaactgactctaatgaaaccctgaactcttcaggtgcaccataa

SEQ ID NO: 22966 - protein, 285 aa, Brassica napus
MQSKSGRGNEEEANHHHADQQQQQQPMMYPEPWWKTNAFGVIPQERPSVLPSNSSSLDCPNGSELNDVHSASEDGGGAGNGENDAAWKDSQAVTSSPSVDQHGMEGSDPTHVAASMHGMHNQQPVQPPELVGHYMACVPPNPYQDPYYAGMMGAYGHQPLGFRPYLGMPRERTALPLDITQEPVYVNAKQYEGILRRRKARAKAELERKVINRKPYLHESRHKHAMRRARASGGRFAKKTEAEAAAEDAAAAAGREREKGSATNSSGSEPVETDSNETLNSSGAP

SEQ ID NO: 22967 - DNA, 846 bp, Brassica napus
  CDS (1)..(846)
atggctatgcaaactatgagagaaggtcttccctctgctccacagatttcttggtggaacgcttttggatctcagccgttgactccggagagtctctccggagattctgattcattggccggagttaaggtcagatctgctggagggatagaacaaggtgtgaataaacaaagcaactctgcatctcacttttctttctcacttggtgatgtaaagagtccaagagttgtgccaaagcctcatggatctgctttctcgatgcaaccaccttacttggaacttggattttctcagccacagatgtacacaaagtatccatgtgtggaacaacaatactatggagttctttcaccctatggatctcatagcagtgtaatgcttcctctaaacatggaaacagaagatggaaccatctacgttaactcaaagcaataccatggaatcatcaggcgacgccagtcacgtgcaaaggctgctgctgttcttgatcagaacaaaccgagtagcaaattccgtaagccatatatgcatcattcacgccatctccatgcattgcgccgtcctagaggatctggtgggaggttcttgaacactaaaagtcagaacaatgcaaagaaagctgatgggactaagccgactcagcctcagcaaagtaactctcaggattcagacgttcttcatcctgaaaacgtgaccatgaacttatcaaaccgactaggatcagaagttacaagcatgaactactttttaagctcttcggttcatccccttggtggcatggtaatgcctagcaagtggatcacagcagcagcaatggataatggctgctgcagtttcaaaacctga

SEQ ID NO: 22968 - protein, 281 aa, Brassica napus
MAMQTMREGLPSAPQISWWNAFGSQPLTPESLSGDSDSLAGVKVRSAGGIEQGVNKQSNSASHFSFSLGDVKSPRVVPKPHGSAFSMQPPYLELGFSQPQMYTKYPCVEQQYYGVLSPYGSHSSVMLPLNMETEDGTIYVNSKQYHGIIRRRQSRAKAAAVLDQNKPSSKFRKPYMHHSRHLHALRRPRGSGGRFLNTKSQNNAKKADGTKPTQPQQSNSQDSDVLHPENVTMNLSNRLGSEVTSMNYFLSSSVHPLGGMVMPSKWITAAAMDNGCCSFKT

SEQ ID NO: 22969 - DNA, 747 bp, Brassica napus
  CDS (1)..(747)
atgcaatcagaatcgggaagtgggaatgaagtggaagtcaatcagcatcctggtgagcagccaatgatgtatgcagaggagccatggtggaagaagaataactcttttggtgtcgttcctcataagataccttctgtggttctttcaaagtcctcctctttagaatcaaacgatgttcactcagcgtctggagacgatggcgcttggaaggatacacaagctgctacttcgtccccttcagataaccatggagtggaagggaatgatccggcggcttctgtgggtaacatgcatgatcaccagcaacttgtacaaccaccagagcttgttggacactacattgcttgtgtcccaaatccgtatcaggatccgtattatgggggaatggtggaagcatatggacatcagcaattgggttttcgtccatatcttggaatgcctggtgaaagaacagcactaccgctggacatgacacaagagcctgtttatgtgaatgcgaaacagtaccagggaattctaaggcgaaggaaagcacgtgccaaggctgagctagagaggaaagtcatcaacagaaagccttatcttcatgagtcgagacacaagcatgcgatgaaaagggtgagggctagtggaggccggtttgcaaagaaaagtgaagcagaagcagcagaggatgcagcagcagcgaggagagaaaggagttcagcaaccaactcatcaggctctgaacaaccagttgattcttaa

SEQ ID NO: 22970 - protein, 248 aa, Brassica napus
MQSESGSGNEVEVNQHPGEQPMMYAEEPWWKKNNSFGVVPHKIPSVVLSKSSSLESNDVHSASGDDGAWKDTQAATSSPSDNHGVEGNDPAASVGNMHDHQQLVQPPELVGHYIACVPNPYQDPYYGGMVEAYGHQQLGFRPYLGMPGERTALPLDMTQEPVYVNAKQYQGILRRRKARAKAELERKVINRKPYLHESRHKHAMKRVRASGGRFAKKSEAEAAEDAAAARRERSSATNSSGSEQPVDS

SEQ ID NO: 22971 - DNA, 915 bp, Glycine max
  CDS (1)..(915)
atgccagggaaacctgacactgatgattggcgtgtagagcgtggggagcagattcagtttcagtcttccatttactctcatcatcagccttggtggcgcggagtgggggaaaatgcctccaaatcatcttcagatgatcagttaaatggttcaatcgtgaatggtatcacgcggtctgagaccaatgataagtcaggcggaggtgttgccaaagaataccaaaacatcaaacatgccatgttgtcaaccccatttaccatggacaaacatcttgctccaaatccccagatggaacttgttggtcattcagttgttttaacatctccttattcagatgcacagcatggtcaaatcttgactacttacgggcaacaagttatgataaaccctcaattgtacggaatgtatcatgctagaatgcctttgccacctgaaatggaagaggagcctgtttatgtcaatgcaaagcagtatcatggtattttgaggcgaagacagtcacgtgctaaggctgagcttgaaaagaaagtaatcaaaaacaggaagccatacctccatgaatcccgtcaccttcatgccatgagaagggctagaggcaatggtggtcgctttctcaacaaaaagaagctcgaaaattacaattctgatgccacttcagacattgggcaaaatactcgtgcaaacgcctcaacaaactcacctaacactcaacatttgttcaccaacaatgagaatctaggctcatcaaatgcgtcacaagccacggttcaggacatgcacagagtggagagtttcaatattggttaccataatggaaatggtcttgcagaactgtaccattcacaagcaaatggaaaaaaggagggaaactgctttggtaaagagagggaccctaataatggggctttcaaatga

SEQ ID NO: 22972 - protein, 304 aa, Glycine max
MPGKPDTDDWRVERGEQIQFQSSIYSHHQPWWRGVGENASKSSSDDQLNGSIVNGITRSETNDKSGGGVAKEYQNIKHAMLSTPFTMDKHLAPNPQMELVGHSVVLTSPYSDAQHGQILTTYGQQVMINPQLYGMYHARMPLPPEMEEEPVYVNAKQYHGILRRRQSRAKAELEKKVIKNRKPYLHESRHLHAMRRARGNGGRFLNKKKLENYNSDATSDIGQNTRANASTNSPNTQHLFTNNENLGSSNASQATVQDMHRVESFNIGYHNGNGLAELYHSQANGKKEGNCFGKERDPNNGAFK

SEQ ID NO: 22973 - DNA, 903 bp, Zea mays
  CDS (1)..(903)
atgcctgtgattttacgggaaatggaggatcattctgtccatcccatgtctaagtctaaccatggctccttgtcaggaaatggttatgagatgaaacattcaggccataaagtttgcgatagggattcatcatcggagtctgatcggtctcaccaagaagcatcagcagcaagtgaaagcagtccaaatgaacacacatcaactcaatcagacaatgatgaagatcatgggaaagataatcaggacacaatgaagccagtattgtccttggggaaggaaggctctgcctttttggccccaaaattacattacagcccatcttttgcttgtattccttatactgctgatgcttattatagtggggttggggtcttgacaggatatgctccacatgccattgtccatccccagcaaaatgatacaacgaacactccgggtatgttacctgtggaacctgcagaagaaccaatatatgttaatgcaaaacaataccatgcaatccttaggaggaggcaaacacgtgctaaattggaggcccagaacaagatggtgaaaaatcggaagccatatcttcatgagtcccgacatcgtcatgccatgaaacgggctcgtggatcaggaggacggttcctcaacacaaagcagctccaggagcagaaccagcagtatcaggcatcgagtggttcattgtgctcaaagatcattggcaacagcataatctcccaaagtggccccacctgcacgccctcttctggcactgcaggtgcttcaacagcctgccaggaccgcagctgcttgccctcagttggcttccgccccacaacgaacttcagtgaccaaggtcgaggaggcttgaagctggccgtgatcggcatgcagcagcgtgtttccaccataaggtga

SEQ ID NO: 22974 - protein, 300 aa, Zea mays
MPVILREMEDHSVHPMSKSNHGSLSGNGYEMKHSGHKVCDRDSSSESDRSHQEASAASESSPNEHTSTQSDNDEDHGKDNQDTMKPVLSLGKEGSAFLAPKLHYSPSFACIPYTADAYYSGVGVLTGYAPHAIVHPQQNDTTNTPGMLPVEPAEEPIYVNAKQYHAILRRRQTRAKLEAQNKMVKNRKPYLHESRHRHAMKRARGSGGRFLNTKQLQEQNQQYQASSGSLCSKIIGNSIISQSGPTCTPSSGTAGASTACQDRSCLPSVGFRPTTNFSDQGRGGLKLAVIGMQQRVSTIR

SEQ ID NO: 22975 - DNA, 915 bp, Glycine max
  CDS (1)..(915)
atgccggggaaagctgacactgatgattggcgagtagagcggggtgagcagattcagtttcagtcttccatttactctcatcatcagccttggtggtgtggagtgggggaaaatgcctctaaatcatcttcagctgatcagttaaatggttcaatcgtgaatggtatcacgcggtctgagaccaatgataagtcaggtgaaggtgttgccaaagaataccaaaacatcaaacatgccgtgttgtcaaccccatttaccatggacaaacatcttgctccaaatccccagatggaacttgttggtcattcagttgttttaacatctccttattcagatgcacagcatggtcaaatcttgactacttacgggcaacaagttatgataaaccctcaattgtacggaatgtatcatgctagaatgcctttgccacctgaaatggaagaggagcctgtttatgtcaatgcaaagcagtatcatggtattttgaggcgaagacagtcacgtgctaaggctgagcttgaaaagaaagtaatcaaaaacaggaagccatacctccatgaatcccgtcaccttcatgccatgagaagggctagaggcaatggtggtcgctttctcaacaaaaagaagctcgaaaattacaattctgatgccacttcagacattgggcaaaatactggtgcaaacccctcaacaaactcacctaacactcaacatttgttcaccaacaatgagaatctaggctcatcaaatgcgtcacaagccacggttcaggacatgcacagagtggagagtttcaatattggttaccataatggaaatggtcttgcagaactgtaccattcacaagcaaatggaaaaaaggagggaaactgctttggtaaagagagggaccctaataatggggctttcaaatga

SEQ ID NO: 22976 - protein, 304 aa, Glycine max
MPGKADTDDWRVERGEQIQFQSSIYSHHQPWWCGVGENASKSSSADQLNGSIVNGITRSETNDKSGEGVAKEYQNIKHAVLSTPFTMDKHLAPNPQMELVGHSVVLTSPYSDAQHGQILTTYGQQVMINPQLYGMYHARMPLPPEMEEEPVYVNAKQYHGILRRRQSRAKAELEKKVIKNRKPYLHESRHLHAMRRARGNGGRFLNKKKLENYNSDATSDIGQNTGANPSTNSPNTQHLFTNNENLGSSNASQATVQDMHRVESFNIGYHNGNGLAELYHSQANGKKEGNCFGKERDPNNGAFK

SEQ ID NO: 22977 - DNA, 867 bp, Glycine max
  CDS (1)..(867)
atgcaatctaaatctgaaactgcaaatcaactgaggtctgatccacattcctttacacctaacaatgcttattctgaaccctggtggcgaggtattcagtacaatcctgtcccccaagcaatgttaggagtgaatgcatctaattcatcttcacttgaacgccctaatggtgattcggaatccagtgaagaggatgatgatgccactaaagaatcacaacccactgctcctaatcaatcaggaaattatggacaggaccaccaagcgatgcaacattcttcatcatctgcacctttgggatacactccttttataggaatgccccatgccagaatggctttgccccttgagatggctcaagagcctgtttatgtgaatgccaaacaataccaaggaattctgagacgaagacaggctcgtgctaaagcagagcttgaaaagaaattaataaaagtcagaaagccatatcttcatgaatcccggcatcagcatgctataagaagagcacgaggtaatggagggcgttttgcaaagaaaactgaagttgaggcttcaaaccacatgaacaaggaaaaggatatgggtactggccaagtcccattgtcacggtcaattagttcatctggttttggatcactaccctctgactctgctgagacctggaattctcctagtgtgcaacaagatgcaagaggatctcaagtgcatgagagatttgaagaacgcaactatgcaaatgttttgcagtcatcatctactttttgtttgcactcgggtgaaagagtggaggaaggggactgttcaggtcaacaacggggaagcatcttgtcagagcacacctcacagaggcgtcttgctattcagtaa

SEQ ID NO: 22978 - protein, 288 aa, Glycine max
MQSKSETANQLRSDPHSFTPNNAYSEPWWRGIQYNPVPQAMLGVNASNSSSLERPNGDSESSEEDDDATKESQPTAPNQSGNYGQDHQAMQHSSSSAPLGYTPFIGMPHARMALPLEMAQEPVYVNAKQYQGILRRRQARAKAELEKKLIKVRKPYLHESRHQHAIRRARGNGGRFAKKTEVEASNHMNKEKDMGTGQVPLSRSISSSGFGSLPSDSAETWNSPSVQQDARGSQVHERFEERNYANVLQSSSTFCLHSGERVEEGDCSGQQRGSILSEHTSQRRLAIQ

SEQ ID NO: 22979 - DNA, 924 bp, Glycine max
  CDS (1)..(924)
atgcaatctaaatctgaaactgcaaatcaactgaggtctgatccacattcctttacacctaacaatgcttattctgaaccctggtggcgaggtattcagtacaatcctgtcccccaagcaatgttaggagtgaatgcatctaattcatcttcacttgaacgccctaatggtgattcggaatccagtgaagaggatgatgatgccactaaagaatcacaacccactgctcctaatcaatcaggaaattatggacaagaccaccaagcgttgcaacattcttcatcatctgcacctttggtgcgtgatgattgccttacacaggctccacaactggaacttgttggccactcaattggatacactccttttataggaatgccccatgccagaatggctttgccccttgagatggctcaagagcctgtttatgtgaatgccaaacaataccaaggaattctgagacgaagacaggctcgtgccaaagcagagcttgaaaagaaattaataaaagtcagaaagccatatcttcatgaatcccggcatcagcatgctataagaagagcacgaggtaatggagggcgttttgcaaagaaaactgaagttgaggcttcaaaccacatgaacaaggaaaaggatatgggtactggccaggtcccattgtcacggtcaattagttcatctggttttggatcactaccctctgactctgctgagacctggaattctcctagtgtgcaacaagatgcaagaggatctcaagtgcatgagagatttgaagaacgcaactatgcaaatgttttgcagtcatcatctactttttgtttgcactcgggtgaaagagtggaggaaggggactgttcaggtcaacaacggggaagcatcttgtcagagcacacctcacagaggcgtcttgctattcagtaa

SEQ ID NO: 22980 - protein, 307 aa, Glycine max
MQSKSETANQLRSDPHSFTPNNAYSEPWWRGIQYNPVPQAMLGVNASNSSSLERPNGDSESSEEDDDATKESQPTAPNQSGNYGQDHQALQHSSSSAPLVRDDCLTQAPQLELVGHSIGYTPFIGMPHARMALPLEMAQEPVYVNAKQYQGILRRRQARAKAELEKKLIKVRKPYLHESRHQHAIRRARGNGGRFAKKTEVEASNHMNKEKDMGTGQVPLSRSISSSGFGSLPSDSAETWNSPSVQQDARGSQVHERFEERNYANVLQSSSTFCLHSGERVEEGDCSGQQRGSILSEHTSQRRLAIQ

SEQ ID NO: 22981 - DNA, 993 bp, Glycine max
  CDS (1)..(993)
atggcgatgcaaactgtttatctaaaaaagcacgaaggaaatgcacacaattttgtgggcacgttgtcgtctgcagcttcagcaccctggtggagtgcttttggatcacaatccgttcatcagggagaatcttgtggccaaatgaaaccctttgcattggagctgcctaactgcatagaccaacttgctgccactaagctatcagcaagaggagctgagcaagtgttgggtgaagggcatacaactcagttcaccatttttccagatggttgtaaaatgtcagatgatgcgcaaaagcttcagacaaccatatcactgcagtcttcacttactgatccccactctcgttttgagataggatttagtcagcccatgttatgtgcaaaatatccttacacggatcaattttatggcctcttctcagcttatgcacctcaaatttcgggacgtataatgctgccacttaacatgtcatctgatgatggaccaatttacgtaaatgctaagcagtaccatggaatcattagacgtcggcagtcccgtgccaaagctgtacttgatcacaaattgactaaacgttgcaagccctatatgcacgaatctcgccatctccatgcaatgcggcgaccaagaggatctgggggtcgcttcttgaacactaggagttctattaacggaaatggtaaacttggaaatgaagtgcataaaactgttggtgaacaattgcagtctagtgactctcagagttctgaattccttcaatctgaggttggtactttgaattcatcaaaagagactaatggcagcagtccaaatatttctggttcagaggtgactagcatgtattcgcggggaggtctcgacagcttttctctcaatcatcttggatctgctgtccactcttttgcaaacatgatagatggtgggcgcggtatgatcataccccccaaatgggttgcagcagctggtaactgctacaaccttaaagtttga

SEQ ID NO: 22982 - protein, 330 aa, Glycine max
MAMQTVYLKKHEGNAHNFVGTLSSAASAPWWSAFGSQSVHQGESCGQMKPFALELPNCIDQLAATKLSARGAEQVLGEGHTTQFTIFPDGCKMSDDAQKLQTTISLQSSLTDPHSRFEIGFSQPMLCAKYPYTDQFYGLFSAYAPQISGRIMLPLNMSSDDGPIYVNAKQYHGIIRRRQSRAKAVLDHKLTKRCKPYMHESRHLHAMRRPRGSGGRFLNTRSSINGNGKLGNEVHKTVGEQLQSSDSQSSEFLQSEVGTLNSSKETNGSSPNISGSEVTSMYSRGGLDSFSLNHLGSAVHSFANMIDGGRGMIIPPKWVAAAGNCYNLKV

SEQ ID NO: 22983 - DNA, 903 bp, Glycine max
  CDS (1)..(903)
atgccagggaaacctgacactgatgattggcgtgtagagcgtggggagcagattcagttccattttcatcatcagccttggtggcgcggagtgggggaaaatgcctccaaatcatcttcagatgatcagttaaatggttcaatcgtgaatggtatcacgcggtctgagaccaatgataagtcaggcggaggtgttgccaaagaataccaaaacatcaaacatgccatgttgtcaaccccatttaccatggagaaacatcttgctccaaatccccagatggaacttgttggtcattcagttgttttaacatctccttattcagatgcacagtatggtcaaatcttgactacttacgggcaacaagttatgataaaccctcaattgtacggaatgtatcatgctagaatgcctttgccacctgaaatggaagaggagcctgtttatgtcaatgcaaagcagtatcatggtattttgaggcgaagacagtcacgtgctaaggctgagcttgaaaagaaagtaatcaaaaacaggaagccatacctccatgaatcccgtcaccttcatgccatgagaagggctagaggcaatggtggtcgctttctcaacaaaaagaagctcgaaaattacaattctgatgccacttcagacattgggcaaaatactggtgcaaacccctcaacaaactcacctaacactcaacatttgttcaccaacaatgagaatctaggctcatcaaatgcgtcacaagccacggttcaggacatgcacagagtggagagtttcaatattggttaccataatggaaatggtcttgcagaactgtaccattcacaagcaaatggaaaaaaggagggaaactgctttggtaaagagagggaccctaataatggggctttcaaatga

SEQ ID NO: 22984 - protein, 300 aa, Glycine max
MPGKPDTDDWRVERGEQIQFHFHHQPWWRGVGENASKSSSDDQLNGSIVNGITRSETNDKSGGGVAKEYQNIKHAMLSTPFTMEKHLAPNPQMELVGHSVVLTSPYSDAQYGQILTTYGQQVMINPQLYGMYHARMPLPPEMEEEPVYVNAKQYHGILRRRQSRAKAELEKKVIKNRKPYLHESRHLHAMRRARGNGGRFLNKKKLENYNSDATSDIGQNTGANPSTNSPNTQHLFTNNENLGSSNASQATVQDMHRVESFNIGYHNGNGLAELYHSQANGKKEGNCFGKERDPNNGAFK

SEQ ID NO: 22985 - DNA, 909 bp, Triticum aestivum
  CDS (1)..(909)
atgcacgagggagtgacgcggtcgaggaggggcgtgcggggggcagacagagagggagcgcaaagggacggcggaggcaagctagcttcccgggggcggacgcaccgagagagggcggcgggagggaggaggcgcgtgggagccatgcttctcccctcttcttcgtcttcctcctacgatcccaaaggtgactcctttgggaaatcggttgacgatcatatgaggtcaactttgacttttggtgataagcattctgtatatgcaggtcaaaacactgactatggccacccaatggcttgcatttcatacccgttcaacgattctggttctggagtttgggcggcctatgggtcacgggctatgttccagcccctcatggcgggcggaggggcatctgcaacggcaagagttccattgcccgtcgaactagcagcggatgagcccatatttgtcaatcccaaacaatataatgggattctccggcgaaggcagctgcgcgctaagttagaggcccagaataaactcaccaaaaacagaaagccctacctccacgagtcgcgccatcttcacgcgatgaagcgggcaagaggttccgggggacgtttcctcaattccaaacagctgaagcagcagcagcagtctggcagtgcctgcaccaaggccattgcggatggcgcgaattccctgggttcgacccatctacggctaggcagcggcgcagccggagaccgaaccaactcggtgtccaaggcgatgtcctcccaagagaacagcaagagagtcgccgccccggctcccgccttcaccatgattcaagcggcgcgcaaagacgacgacttcttccaccatcacgcccaccatctcagcttctccggtcattttggccagtcaagcgaccgatatacgtaa

SEQ ID NO: 22986 - protein, 302 aa, Triticum aestivum
MHEGVTRSRRGVRGADREGAQRDGGGKLASRGRTHRERAAGGRRRVGAMLLPSSSSSSYDPKGDSFGKSVDDHMRSTLTFGDKHSVYAGQNTDYGHPMACISYPFNDSGSGVWAAYGSRAMFQPLMAGGGASATARVPLPVELAADEPIFVNPKQYNGILRRRQLRAKLEAQNKLTKNRKPYLHESRHLHAMKRARGSGGRFLNSKQLKQQQQSGSACTKAIADGANSLGSTHLRLGSGAAGDRTNSVSKAMSSQENSKRVAAPAPAFTMIQAARKDDDFFHHHAHHLSFSGHFGQSSDRYT

SEQ ID NO: 22987 - DNA, 906 bp, Zea mays
  CDS (1)..(906)
atgtgccttttacgggaaatggaggatcattctgtccatcccaagtctaagtctaaccatggctccttgtcaggaaatggttatgagatgaaaaatccaggccatgaagtttgtgatagggattcatcatcagagtctgatcgatctcacccagaagcatcagcagtgagtgaaagcagtctagatgaacacacatcaactcaatcagacaatgatgaagatcatgggaaggataatcaggacacattgaagccagtattgtccttggggaaggaagggtctgcctttttggccccaaaaatagattacaacccgtcttttccttatattccttatactgctgacgcttactatggtggcgttggggtcttgacaggatatgctccgcatgccattgtccatccccagcaaaatgatacaacaaatagtccggttatgttgcctgcggaacctgcagaagaagaaccaatatatgtcaatgcaaaacaataccatgcaatccttaggaggaggcagacacgtgctaaactggaggcgcagaacaagatggtgaaaggtcggaagccataccttcatgagtctcgacaccgtcatgccatgaagcgggcccgtggctcaggagggcggttcctcaacacaaagcagcagccccaggagcagaaccagcagtaccaggcgtcgagtggttcaatgtgctcaaagaccattggcaacagcgtaatctcccaaagtggccccatttgcacgccctcttctgacgctgcaggtgcttcagcagccagccaggaccgcggctgcttgccctcggtgggcttccgccccacagccaacttcagtgagcaaggtggaggcggctcgaagctggtcgtgaacggcatgcagcagcgtgtttccaccataaggtga

SEQ ID NO: 22988 - protein, 301 aa, Zea mays
MCLLREMEDHSVHPKSKSNHGSLSGNGYEMKNPGHEVCDRDSSSESDRSHPEASAVSESSLDEHTSTQSDNDEDHGKDNQDTLKPVLSLGKEGSAFLAPKIDYNPSFPYIPYTADAYYGGVGVLTGYAPHAIVHPQQNDTTNSPVMLPAEPAEEEPIYVNAKQYHAILRRRQTRAKLEAQNKMVKGRKPYLHESRHRHAMKRARGSGGRFLNTKQQPQEQNQQYQASSGSMCSKTIGNSVISQSGPICTPSSDAAGASAASQDRGCLPSVGFRPTANFSEQGGGGSKLVVNGMQQRVSTIR

SEQ ID NO: 22989 - DNA, 903 bp, Zea mays
  CDS (1)..(903)
atgcctgtgattttacgggaaatggaggatcattctgtccatcccatgtctaagtctaaccatggctccttgtcaggaaatggttatgagatgaaacattcaggccataaagtttgcgatagggattcatcatcggagtctgatcggtctcaccaagaagcatcagcagcaagtgaaagcagtccaaatgaacacacatcaactcaatcagacaatgatgaagatcatgggaaagataatcaggacacaatgaagccagtattgtccttggggaaggaaggctctgcctttttggccccaaaattacattacagcccatcttttgcttgtattccttatactgctgatgcttattatagtgcggttggggtcttgacaggatatcctccacatgccattgtccatccccagcaaaatgatacaacgaacactccgggtatgttacctgtggaacctgcagaagaaccaatatatgttaatgcaaaacaataccatgcaatccttaggaggaggcaaacacgtgctaaattggaggcccagaacaagatggtgaaaaatcggaagccatatcttcatgagtcccgacatcgtcatgccatgaaacgggctcgtggatcaggaggacggttcctcaacacaaagcagctccaggagcagaaccagcagtatcaggcatcgagtggttcattgtgctcaaagatcattggcaacagcataatctcccaaagtggccccacctgcacgccctcttctggcactgcaggtgcttcaacagccggccaggaccgcagctgcttgccctcagttggcttccgccccacgacaaacttcagtgaccaaggtcgaggaggcttgaagctggccgtgatcggcatgcagcagcgtgtttccaccataaggtga

SEQ ID NO: 22990 - protein, 300 aa, Zea mays
MPVILREMEDHSVHPMSKSNHGSLSGNGYEMKHSGHKVCDRDSSSESDRSHQEASAASESSPNEHTSTQSDNDEDHGKDNQDTMKPVLSLGKEGSAFLAPKLHYSPSFACIPYTADAYYSAVGVLTGYPPHAIVHPQQNDTTNTPGMLPVEPAEEPIYVNAKQYHAILRRRQTRAKLEAQNKMVKNRKPYLHESRHRHAMKRARGSGGRFLNTKQLQEQNQQYQASSGSLCSKIIGNSIISQSGPTCTPSSGTAGASTAGQDRSCLPSVGFRPTTNFSDQGRGGLKLAVIGMQQRVSTIR

SEQ ID NO: 22991 - DNA, 906 bp, Zea mays
  CDS (1)..(906)
atgcctgtgattttacgggaaatggaggatcattctgtccatcccatgtctaagtctaaccatggctccttgtcaggaaatggttatgagatgaaacattcaggccataaagtttgcgatagggattcatcatcggagtctgatcggtctcaccaagaagcatcagcagcaagtgaaagcagtccaaatgaacacacatcaactcaatcagacaatgatgaagatcatgggaaagataatcaggacacaatgaagccagtattgtccttggggaaggaaggctctgcctttttggccccaaaattacattacagcccatcttttgcttgtattccttatactgctgatgcttattatagtgcggttggggtcttgacaggatatcctccacatgccattgtccatccccagcaaaatgatacaacgaacactccgggtatgttacctgtggaacctgcagaagaaccaatatatgttaatgcaaaacaataccatgcaatccttaggaggaggcaaacacgtgctaaattggaggcccagaacaagatggtgaaaggtcggaagccataccttcatgagtctcgacatcgtcatgccatgaaacgggcccgtggctcaggagggcggttcctcaacacaaagcagcagctccaggagcagaaccagcagtaccaggcatcgagtggttcaatgtgctcaaagaccattggcaacagcataatctcccaaagtggccccacctgcacgccctcttctgacactgcaggtgcttcaacagccagccaggaccgcagctgcttgccctcagttggcttccgccccacaacaaacttcagtgaccaaggtcgaggaggctcgaagctggccgtgaacggcatgcagcagcgtgtttccaccataaggtga

SEQ ID NO: 22992 - protein, 301 aa, Zea mays
MPVILREMEDHSVHPMSKSNHGSLSGNGYEMKHSGHKVCDRDSSSESDRSHQEASAASESSPNEHTSTQSDNDEDHGKDNQDTMKPVLSLGKEGSAFLAPKLHYSPSFACIPYTADAYYSAVGVLTGYPPHAIVHPQQNDTTNTPGMLPVEPAEEPIYVNAKQYHAILRRRQTRAKLEAQNKMVKGRKPYLHESRHRHAMKRARGSGGRFLNTKQQLQEQNQQYQASSGSMCSKTIGNSIISQSGPTCTPSSDTAGASTASQDRSCLPSVGFRPTTNFSDQGRGGSKLAVNGMQQRVSTIR

SEQ ID NO: 22993 - DNA, 903 bp, Zea mays
  CDS (1)..(903)
atgcctgtgattttacgggaaatggaggatcattctgtccatcccatgtctaagtctaaccatggctccttgtcaggaaatggttatgagatgaaacattcaggccataaagtttgcgatagggattcatcatcggagtctgatcggtctcaccaagaagcatcagcagcaagtgaaagcagtccaaatgaacacacatcaactcaatcagacaatgatgaagatcatgggaaagataatcaggacacaatgaagccagtattgtccttggggaaggaaggctctgcctttttggccccaaaattacattacagcccatcttttgcttgtattccttatacttctgatgcttattatagtgcggttggggtcttgacaggatatcctccacatgccattgtccatccccagcaaaatgatacaacgaacactccgggtatgttacctgtggaacctgcagaagaaccaatatatgttaatgcaaaacaataccatgcaatccttaggaggaggcaaacacgtgctaaattggaggcccagaacaagatggtgaaaaatcggaagccatatcttcatgagtcccgacatcgtcatgccatgaaacgggctcgtggatcaggaggacggttcctcaacacaaagcagctccaggagcagaaccagcagtatcaggcatcgagtggttcattgtgctcaaagatcattgccaacagcataatctcccaaagtggccccacctgcacgccctcttctggcactgcaggtgcttcaacagccggccaggaccgcagctgcttgccctcagttggcttccgccccacgacaaacttcagtgaccaaggtcgaggaggcttgaagctggccgtgatcggcatgcagcagcgtgtttccaccataaggtga

SEQ ID NO: 22994 - protein, 300 aa, Zea mays
MPVILREMEDHSVHPMSKSNHGSLSGNGYEMKHSGHKVCDRDSSSESDRSHQEASAASESSPNEHTSTQSDNDEDHGKDNQDTMKPVLSLGKEGSAFLAPKLHYSPSFACIPYTSDAYYSAVGVLTGYPPHAIVHPQQNDTTNTPGMLPVEPAEEPIYVNAKQYHAILRRRQTRAKLEAQNKMVKNRKPYLHESRHRHAMKRARGSGGRFLNTKQLQEQNQQYQASSGSLCSKIIANSIISQSGPTCTPSSGTAGASTAGQDRSCLPSVGFRPTTNFSDQGRGGLKLAVIGMQQRVSTIR

SEQ ID NO: 22995 - DNA, 795 bp, Zea mays
  CDS (1)..(795)
atgagcagcatggagtcgcggccgggccgaacgaacctggtggagcccatagggcacggcgccgcgctgccgtccggcggccaggcagtgcagccgtggtggacgagctccggggctgtgctcggtgcagtctcgccagccgtcgtggcggtggcgcccgggagcgggacggggattagcctgtcgagcagcccggcaggtggtagtggtggtggcggcgcggctaaaggagccgcgagtgacgagagcagcgaggattcacggagatctggggaaccaaaagatggaagcgctagtcaagaaaagaaccatgccacatcgcagatacccgctctggcgccagagtatttggcaccatactcgcagctggaactgaaccaatcaattgcttctgcagcatatcagtacccagatccttactatgcaggcatggttgctccctatggaagtcatgctgtggctcattttcagctacctggactaactcaatctcgaatgccattacctcttgaagtatccgaggagcctgtttatgtaaatgccaagcagtaccatggtatcttaagacgacggcagtcccgtgctaaggctgaacttgagaaaaaggtggtcaaagccagaaagccataccttcacgagtctcgtcatcagcacgcgatgaggagggcaagaggaaacgggggacgcttcctgaacacaaagaaaagtgacagtggtgctcccaatggaggcgaaaacgccgagcatctccatgtccctcccgacttactacagctacgacagaacgaggcttga

SEQ ID NO: 22996 - protein, 264 aa, Zea mays
MSSMESRPGRTNLVEPIGHGAALPSGGQAVQPWWTSSGAVLGAVSPAVVAVAPGSGTGISLSSSPAGGSGGGGAAKGAASDESSEDSRRSGEPKDGSASQEKNHATSQIPALAPEYLAPYSQLELNQSIASAAYQYPDPYYAGMVAPYGSHAVAHFQLPGLTQSRMPLPLEVSEEPVYVNAKQYHGILRRRQSRAKAELEKKVVKARKPYLHESRHQHAMRRARGNGGRFLNTKKSDSGAPNGGENAEHLHVPPDLLQLRQNEA

SEQ ID NO: 22997 - DNA, 23 bp, Artificial sequence
  primer
atgggaattgaagacatgcattc

SEQ ID NO: 22998 - DNA, 20 bp, Artificial sequence
  primer
tcatttaatggctagacgag

SEQ ID NO: 22999 - protein, 68 aa, Artificial sequence
  consensus sequence
  Variant (3)..(7): Xaa in position 3 to 7 is any amino acid
  Variant (8)..(8): Xaa in position 8 is any or no amino acid
  Variant (11)..(11): Xaa in position 11 is any amino acid
  Variant (19)..(20): Xaa in position 19 to 20 is any amino acid
  Variant (26)..(27): Xaa in position 26 to 27 is any amino acid
  Variant (31)..(31): Xaa in position 31 is any amino acid
  Variant (32)..(35): Xaa in position 32 to 35 is any or no amino acid
  Variant (37)..(38): Xaa in position 37 to 38 is any amino acid
  Variant (39)..(39): Xaa in position 39 is any or no amino acid
  Variant (41)..(42): Xaa in position 41 to 42 is any amino acid
  Variant (44)..(44): Xaa in position 44 is any amino acid
  Variant (55)..(55): Xaa in position 55 is any amino acid
  Variant (58)..(59): Xaa in position 58 to 59 is any amino acid
  Variant (61)..(61): Xaa in position 61 is any amino acid
  Variant (63)..(64): Xaa in position 63 to 64 is any amino acid
LPXXXXXXEPXYVNAKQYXXILRRRXXRAKXXXXXEXXXKXXKXRKPYLHESRHXHAXXRXRXXGGRF

SEQ ID NO: 23000 - protein, 27 aa, Artificial sequence
  protein pattern
  Variant (2)..(3): Xaa in position 2 to 3 is any or no amino acid
  Variant (13)..(13): Xaa in position 13 is any amino acid
  Variant (16)..(16): Xaa in position 16 is Ile, Leu or Met
  Variant (17)..(17): Xaa in position 17 is Lys or Arg
  Variant (19)..(19): Xaa in position 19 is Ala, Pro or Val
  Variant (21)..(21): Xaa in position 21 is Ala or Gly
  Variant (22)..(22): Xaa in position 22 is Asn, Pro, Ser or Thr
  Variant (27)..(27): Xaa in position 27 is Ala or Leu
RXXKPYLHESRHXHAXXRXRXXGGRFX

SEQ ID NO: 23001 - protein, 30 aa, Artificial sequence
  protein pattern
  Variant (3)..(4): Xaa in position 3 to 4 is any or no amino acid
  Variant (6)..(7): Xaa in position 6 to 7 is any or no amino acid
  Variant (13)..(13): Xaa in position 13 is any amino acid
  Variant (14)..(14): Xaa in position 14 is Ala or Gly
  Variant (16)..(16): Xaa in position 16 is Leu or Met
  Variant (20)..(20): Xaa in position 20 is any amino acid
  Variant (21)..(21): Xaa in position 21 is Ala, Ser or Thr
  Variant (25)..(25): Xaa in position 25 is Ala or Leu
  Variant (27)..(27): Xaa in position 27 is Ala or Leu
  Variant (28)..(29): Xaa in position 28 to 29 is any amino acid
EPXXVXXNAKQYXXIXRRRXXRAKXEXXXK

SEQ ID NO: 23002 - DNA, 1551 bp, Arabidopsis thaliana; identical to SEQ ID NO: 17249
  CDS (1)..(1551)

SEQ ID NO: 23003 - protein, 516 aa, Arabidopsis thaliana; identical to SEQ ID NO: 17250

SEQ ID NO: 23004 - DNA, 2012 bp, Oryza sativa; identical to SEQ ID NO: 16885
  CDS (177)..(1730)

SEQ ID NO: 23005 - protein, 517 aa, Oryza sativa; identical to SEQ ID NO: 16886

SEQ ID NO: 23006 - DNA, 2311 bp, Zea mays
  CDS (280)..(1833)
  misc_feature (2303)..(2303): n is a, g, c or t
tcgagccgggccccgggggggtcgggccccagtgcgatccctccctcccactccacccatcattacaaatccccctccctccgtaaacggcggtcgcgaagtcaaatctcacctcaccagtggctgccttctccgctccgcgctgcgcctcccccaaagcttcagtggctgctgcgacccttctgttctccgctcttggtcttgggtgatcgccggcggtacttgtagcgggcctttgtaggtatttatctgagggaagaagaaactatacaattcatcatgtcaggagggtcgtctgaatcttccccgttatctggacaaaatagccttagttctctatcaatttccaaggacaatgaactatcttcagagtctggctgcttgtccattgttgtactaggcgcttctggagaccttgctaagaagaaaactttcccagcgctctttcaccttttccagcagggatttctgcaatctggagaagtccatatatttgggtacgcaagatcaaatctttctgatgatggattaagagaacgcattcgtggatacctcaagggagcttcagatgaacatctttctcagtttttgcagttagtaaaatatgttagtggctcctatgatagggtggaaggatttgagttattaaataaggcaatctctgagtatgaaacttcaaaaaacaatgactcgggaagctaccgcagattattttatttggcattgcctccatcagtctacccatcagtatgcaaaatgataagatcatattgcatgagtccatcttcacacaccggttggacaagggttattgttgaaaagccctttggaaaggatttgaacactgcagaggaactgagtgctgaacttgggcagctgtttcaagaagaacaactctatagaattgaccactatttaggaaaagagcttgtccaaaacttgcttgtgcttcgttttgcaaaccgcttatttttgcctctctggaaccgtgataacatagctaacgtacagatcgtatttaaggaagactttggaactgaaggacgtggaggatattttgatcaatatggtatcattcgtgatatcattcagaaccacttgttgcaggtcttctgtttggtggctatggaaaagcctgtctctcttaaacccgagcacattagagatgaaaaagtcaaggttctgcaatcggtggagcctataaagcatgaagaggtagtcatcggacaatatgatggctacaaggatgaccctactgtgccagatgactccaacacccctacttttgcatctgttgtactgagggtacacaacgaaagatgggagggggttccattcatcctcaaggctggcaaagcactaaattcgaggaaagcagagatacgtgtacagttcaaggatgctcctggtgacatttttagatgcaagaaacaaggcaggaatgagtttgtcatacgcctgcagccatcagaagccatgtacatgaaactaacggtcaaaaaacccggactggaaatggcaaccgaacaaagcgaactggatctatcgtatgggatgcggtacaatggcgtcaaaatcccagaagcatacgagcgtctcatcttggatacgataagaggagaccagcagcacttcgttcgccgagatgagctgagggccgcatgggaaatcttcactcctttgcttcacgacatcgatggtggcaagctcaggtccgttccgtacaagccgggaacccgaggaccgcaggaagccgacgagttgagcaggaggatggggtatgtgcagacccatgggtatgtatgggttccgccgaccctttctaaggtttagctgtttgattatcagctgccgtgtaaccacagaatgacagaaagcggggaagatccctttgtaatacgtgggtcgtgtaataagagaaacttctgcttgttgtttgagtgaccctttacggtattggaataaaaaaagaatgtgatgttattatctcaaaaaaaaaaaaaaaaaaaaaaagtccgcccgcagtttctgaaggcacaccaaaacgatgagacctgtagacagtactctagtctctagtccacgaagtcctcgtacttgtgttggctggccctcgactagcgtgttgtagcacactagcgccacagtaatcgagagtgctctcccaggtcgaggttagtgtggcggagcagccggggcgttagaatctgaggaggtggtggtgctggtggtggcgacgtcgcgtccagcccgctcgccatgctccgcggatgtgagagtgaccctttacggtattggaatgnttcgatta

SEQ ID NO: 23007 - protein, 517 aa, Zea mays; identical to SEQ ID NO: 17344

SEQ ID NO: 23008 - DNA, 1867 bp, Glycine max; identical to SEQ ID NO: 16891
  CDS (106)..(1662)

SEQ ID NO: 23009 - protein, 518 aa, Glycine max; identical to SEQ ID NO: 16892

SEQ ID NO: 23010 - DNA, 1962 bp, Macropus robustus
  CDS (1)..(1548)
atggcagagcaggtggcactgagccggacccaagtgtgtggaattctccgggaagaattgtaccagggtgatgccttccaccagtcagacacacacatattcatcatcatgggagcctcgggtgacttagcaaagaagaaaatctaccctacaatctggtggctgttccgtgatgggcttctccccgaagacaccttcattgtgggctatgctcgctcaaacctcactgtggatgacatccgaaagcaaagcgagccctattttaaggccaccccggaagagaacctgaagctggaggagttcttctctcgaaattcctacgtggcaggccaatacgatgagccagcttcctttcagcgtctcaatgcccacatgaactccctgcatcatgggtcacaggccaaccgcctcttctacctggccttgccacccaccgtctatgaagctgtcactaagaacatcaaagagacttgcatgagccagataggttggaaccgggtcattgtggagaagccttttggaaaagatcttcagagctctgacaaactgtcaaaccacatttcctcactcttccatgaggaccagatctaccggatcgatcactacctgggcaaggaaatggtacagaacctcatggtgctaagatttggtaacaggatctttggaccgatctggaaccgagacaacattgcctgtgtcatcttcaccttcaaggagccctttggcactcttggccgagggggctattttgatgagtttgggatcattcgagacgtgatgcagaaccacctcttgcagatgctttgcctagtggccatggaaaaacctgcctccaccaactctgatgatgtccgggatgaaaaggtgaaggtcctgaagtgtatctcagaggtgagagcaactgatgtggtcttgggccagtatgtggggaacccagatggagaaggggaagccaccaaaggctatttggatgatcccacagtgccccggggctccaccactgccacctttgctgctgtggtcctctatgtggaaaatgaaagatgggacggagtcccctttatcctccgctgtggaaaggccctgaatgaacgcaaagcagaagtgaggttacagttccgggatgtggctggtgatatcttccagcgccagtgtaagcggaatgagctggtgatccgcgtgcagcccaacgaggctgtctacaccaagatgatgaccaagaagccagggatgttcttcaaccccgaagagtcagagctggacctgacctatggcaacagatacaaagatgtgaagctgcccgatgcttatgagcgccttatcctggatgtcttctgtggaagccagatgcactttgtgcgcagtgatgagcttcgggaagcctggaggatctttacgcccctgctgcaccacattgagaaggagaagacccagcccattgcctacgtctatggcagccgaggccctcctgaagcagacgaactgatgaagagagtgggcttccagtatgagggcacctacaagtgggtaaacccccacaagctctgaggcagcctggcagcccactagcttcctcccccttgtttcccatccccagcctccatgctcatccttttagccctttggcctcacttagggtctgtctctctgcccatcccctgttcatgttctactcaggcagaaactcttgggaccacaagaccaggagcccgtccctgggggagatggagggccccattgagagattccctgggccctttccactcccagaaggcccggggacccggccaccaacttctcagccctgtttacagctgcattaggtctgccattcagcagctaccagatacttcctcctgctttgagctcccagagccagctacattccaatagcagtcgctggaggtgtcctctgtttcccttcaggacagcagctttataaatacagagaattaccagtca

SEQ ID NO: 23011 - protein, 515 aa, Macropus robustus
MAEQVALSRTQVCGILREELYQGDAFHQSDTHIFIIMGASGDLAKKKIYPTIWWLFRDGLLPEDTFIVGYARSNLTVDDIRKQSEPYFKATPEENLKLEEFFSRNSYVAGQYDEPASFQRLNAHMNSLHHGSQANRLFYLALPPTVYEAVTKNIKETCMSQIGWNRVIVEKPFGKDLQSSDKLSNHISSLFHEDQIYRIDHYLGKEMVQNLMVLRFGNRIFGPIWNRDNIACVIFTFKEPFGTLGRGGYFDEFGIIRDVMQNHLLQMLCLVAMEKPASTNSDDVRDEKVKVLKCISEVRATDVVLGQYVGNPDGEGEATKGYLDDPTVPRGSTTATFAAVVLYVENERWDGVPFILRCGKALNERKAEVRLQFRDVAGDIFQRQCKRNELVIRVQPNEAVYTKMMTKKPGMFFNPEESELDLTYGNRYKDVKLPDAYERLILDVFCGSQMHFVRSDELREAWRIFTPLLHHIEKEKTQPIAYVYGSRGPPEADELMKRVGFQYEGTYKWVNPHKL

SEQ ID NO: 23012 - DNA, 1897 bp, Glycine max
  CDS (133)..(1689)
gaaaacaccaactgttttgagttttccaaccttaaaaagactctctcttctctctctctctttctctccctgaagcaaaacaacattagcatcaaaaccagagtggttctagtaatccggtgctgctagaggatgggaactagtgaatggcatatcgagcgaagatctagcttcggcactgaatcccccttagcaagagaggcaggaaatgtgcctgaaactgggtcactctctattgttgtgcttggcgcttctggggatcttgctaagaagaagacatttcctgcacttttccatctataccggcagggattcttaccagcagatgaagttcacatttttggctatgcaaggacaaaaatatctgatgatgaattgagaaaccggttgcgtggctatcttgttccaaacaaaggtgcttctccccaactgttggaggatgtagagaagtttttacagctgatcaaatatgtaagtggctcttatgattctgaggatggatttcgcttgttggataaagagatttcagagcatgaatatttgaaaaagagtgttgagggtttatctcggaggcttttctatcttgctcttccaccttcagtatatccatctgtttgcaagatgatcaagacttgttgcatgaataaatctgatcttggtggatggacacgtgttgttgtcgagaagccttttggtaaggatctagaatctgcagaggaactcagtactgagattggaaagttgtttgaggaaccacagatttatcgtattgatcactacttgggaaaggaactagtgcagaacttgttggtacttcgctttgcaaatcggtttttcttgccactttggaaccgcgacaacattgacaatgtacagatagttttcagagaggattttggaactgatggccgtggtggatattttgaccaatatggaattattcgagatattattcaaaaccatttgctgcaggttctttgcttggttgctatggaaaaaccagtttctctcaggcctgagcacattcgggatgagaaagtgaaggttcttgaatcagtgctccctattagagatgatgaggttgttcttggacaatacgaaggctataaagatgacccaacagtacctgacaagtcaaacaccccaacatttgcaactgttattctgcgaatacacaatgaaagatgggaaggtgttccgttcatactaaaagcagggaaggcactaaattctagaaaggcagagatcagggttcaattcaaggatgtccctggtgatattttcaagtgtaaaaagcaggggagaaatgagtttgttatccgcctacaacctttagaagctatgtacatgaagcttacggtcaagcaacctggactggagatgtcaacagttcaaagtgagctagacttgtcatatggacaacggtatcaaggagtaaccattcctgaggcttatgaacgcctaattcttgacacaattaaaggtgatcagcagcattttgttcgcagagatgagttgaaggcatcctggcagatcttcaccccacttttgcacagaattgatgaaggggaattcaagccactcccctacaaaccaggaagcagaggtcctgcagaagcagatcagttacttgaaaaagcaggctatgttcaaacacacggctacatatggatccctcctaccttgtagagtaatctaatgtaataacatgaggaatctttagttgctaatgaatacacaataagcttgagaggcttcccttggaaccactcctcatgaatgtgtaatcaagcatttgaactatgagagtgtttgacacggtttgtgtaactgatttgcctttaaatgcaaaataaatggaaaatgaagtctatttaccggcaaaaaaaaaaaaaaa

SEQ ID NO: 23013 - protein, 518 aa, Glycine max; identical to SEQ ID NO: 16884

SEQ ID NO: 23014 - DNA, 1476 bp, Klebsiella pneumoniae subsp. pneumoniae MGH 78578; identical to SEQ ID NO: 16899
  CDS (1)..(1476): transl_table=11

SEQ ID NO: 23015 - protein, 491 aa, Klebsiella pneumoniae subsp. pneumoniae MGH 78578; identical to SEQ ID NO: 16900

SEQ ID NO: 23016 - DNA, 1476 bp, Xanthobacter autotrophicus Py2; identical to SEQ ID NO: 16901
  CDS (1)..(1476): transl_table=11

SEQ ID NO: 23017 - protein, 491 aa, Xanthobacter autotrophicus Py2; identical to SEQ ID NO: 16902

SEQ ID NO: 23018 - DNA, 1476 bp, Xanthobacter autotrophicus Py2; identical to SEQ ID NO: 16903
  CDS (1)..(1476): transl_table=11

SEQ ID NO: 23019 - protein, 491 aa, Xanthobacter autotrophicus Py2; identical to SEQ ID NO: 16904

SEQ ID NO: 23020 - DNA, 1518 bp, Oryza sativa (japonica cultivar-group); identical to SEQ ID NO: 16905
  CDS (1)..(1518)

SEQ ID NO: 23021 - protein, 505 aa, Oryza sativa (japonica cultivar-group); identical to SEQ ID NO: 16906

SEQ ID NO: 23022 - DNA, 1470 bp, Mesorhizobium loti MAFF303099
  CDS (1)..(1470): transl_table=11
atgaccagccagatcattcccgtcgatcctttcgacttcatcattttcggcggcaccggcgacctgtcggaacgcaagcttctgccgtcgctctattatcgccagcgcgaccatcaattctccgagccgacgcgcatcatcggcacatcgcgctcgaaaatgagcgacgaggaattccgggccttcgccagccaggcgatctccgatcacgtcaagccggccgatatcgacgccaaggaattgaagaccttcctggcgcggctctcctatatctcggccgatgcgacgagcggcgctggcttcgacaagcttaagaaggcgatcggcgagagcgagagcatccgcgccttctatctggcggtggcgccggcgctgttcggcgatatctcgcacaagctgaaagagaacaagctgatcacgccgaactcgcgcatcgtgctggagaagccgatcggccgcgaccttgcctcggcgcgggcactcaacgatttggtcggcgacgacttccacgaaagccagattttccgcatcgaccactatctcggcaaggagacggtgcagaacctgatggcgctgcgctttgccaacgcgctctatgagccgctgtggaactccgcccatatcgaccacgtacagatcacggtggccgagaccgtcggcttggaagaccgcgtcacctactacgacaaggccggcgcgctgcgcgacatggtgcagaaccacatgctgcagttgctctgcctcgtggccatggaggcgccgtcgtcgatggacgccgacgccgtgcgcgacgagaagctcaaggtgctgcgggcgctgaagcgcatcaacggcaacgaggcgccgaagcacacggtgcgcggccagtatcgcgccggtgcatcggccggcgggccggtgaagggctatgtcgaggagctcggcaaggacagcaacaccgagaccttcgtcgccatcaaggccgagatcggcacctggcgctgggccggcgttccgttctacctcaggaccggcaagcgcttggcgacccgggtttcggaaatcgtcatcgagttcaagccgatcccgcattcgatcttcggcgacagcgccgggccgatcttcgccaaccagctggtcatccggctgcagccggacgagggcgtcaagcagttcatcatgatcaaggatccgggcccgggcggcatgcggctgcgccagatctcgctcgacatgagcttcgcgcaatccttcgacggccgcgcgcccgatgcctatgaacggctgatcatggacgtcatccgtggcaaccagacgctgttcatgcgccgtgacgaggtcgaggcggcgtggaaatggatcgacccgatccagaatgcctgggaaggcgccaagcaggaagcgcagggctatacggcaggcacatgggggccatctgcctcgatagcgctgatcgaacgtgacgggcggacatggcacgagagcaattga

SEQ ID NO: 23023 - protein, 489 aa, Mesorhizobium loti MAFF303099
MTSQIIPVDPFDFIIFGGTGDLSERKLLPSLYYRQRDHQFSEPTRIIGTSRSKMSDEEFRAFASQAISDHVKPADIDAKELKTFLARLSYISADATSGAGFDKLKKAIGESESIRAFYLAVAPALFGDISHKLKENKLITPNSRIVLEKPIGRDLASARALNDLVGDDFHESQIFRIDHYLGKETVQNLMALRFANALYEPLWNSAHIDHVQITVAETVGLEDRVTYYDKAGALRDMVQNHMLQLLCLVAMEAPSSMDADAVRDEKLKVLRALKRINGNEAPKHTVRGQYRAGASAGGPVKGYVEELGKDSNTETFVAIKAEIGTWRWAGVPFYLRTGKRLATRVSEIVIEFKPIPHSIFGDSAGPIFANQLVIRLQPDEGVKQFIMIKDPGPGGMRLRQISLDMSFAQSFDGRAPDAYERLIMDVIRGNQTLFMRRDEVEAAWKWIDPIQNAWEGAKQEAQGYTAGTWGPSASIALIERDGRTWHESN

SEQ ID NO: 23024 - DNA, 1506 bp, Vibrio cholerae O1 biovar eltor str. N16961; identical to SEQ ID NO: 16907
  CDS (1)..(1506): transl_table=11

SEQ ID NO: 23025 - protein, 501 aa, Vibrio cholerae O1 biovar eltor str. N16961; identical to SEQ ID NO: 16908

SEQ ID NO: 23026 - DNA, 1491 bp, Pasteurella multocida subsp. multocida str. Pm70; identical to SEQ ID NO: 16909
  CDS (1)..(1491): transl_table=11

SEQ ID NO: 23027 - protein, 496 aa, Pasteurella multocida subsp. multocida str. Pm70; identical to SEQ ID NO: 16910

SEQ ID NO: 23028 - DNA, 1512 bp, Lactococcus lactis subsp. lactis Il1403; identical to SEQ ID NO: 16911
  CDS (1)..(1512): transl_table=11

SEQ ID NO: 23029 - protein, 503 aa, Lactococcus lactis subsp. lactis Il1403; identical to SEQ ID NO: 16912

SEQ ID NO: 23030 - DNA, 1773 bp, Deinococcus radiodurans R1; identical to SEQ ID NO: 16915
  CDS (1)..(1773): transl_table=11

SEQ ID NO: 23031 - protein, 590 aa, Deinococcus radiodurans R1; identical to SEQ ID NO: 16916

SEQ ID NO: 23032 - DNA, 1512 bp, Agrobacterium tumefaciens str. C58; identical to SEQ ID NO: 16917
  CDS (1)..(1512): transl_table=11

SEQ ID NO: 23033 - protein, 503 aa, Agrobacterium tumefaciens str. C58; identical to SEQ ID NO: 16918

SEQ ID NO: 23034 - DNA, 1488 bp, Streptococcus pneumoniae R6; identical to SEQ ID NO: 16921
  CDS (1)..(1488): transl_table=11

SEQ ID NO: 23035 - protein, 495 aa, Streptococcus pneumoniae R6; identical to SEQ ID NO: 16922

SEQ ID NO: 23036 - DNA, 1422 bp, Caulobacter crescentus CB15
  CDS (1)..(1422): transl_table=11
ttggtgctgctgggcggagcgggcgatttggccctccggatgctgctgccttctctgtatttcctggagctcgaccgactgctgccgcacgatctgcggatcattggcgtcgcccgggccgaccatgacgcggccagctacaaggcgctggtccgcgagcaactgggcaagcgcgcgacagtggaggaggcggtttggaatcgcctcgccgcgcgcctcgactacgtgcctgcgaacatcaccagtgaggaagacaccaagaagctggccgaacggatcggtgcgcatggcacgctggtcatcttcttctcgctgtcgcccagcctctacggcccggcttgccaggctttgcaggccgccggcctgacggggcccaacacgcgcttgatcctcgaaaagccgcttggccgcgatctcgaaagctccaaggccaccaacgccgccgtcgccgctgtggtcgacgagagccaagtgttccgcatcgaccactatctgggcaaggaaaccgtccagaacctgacggccctgcgcttcgccaacgtgctgttcgagcccctgtgggatcgcaacacgatcgaccatgtgcagatcaccatcgccgagaccgaaaaggtcggcgaccgctggccctactacgacgaatacggcgcgctgcgggacatggtgcagaaccacatgctgcaactgctgtgtctggtcgccatggaagcgccctcaggcttcgatcccgatgcggtgcgcgacgagaaggtcaaggtgctgcgctccctgcggcccttcaccaaggagaccgtggcccacgacaccgtgcgtggccagtacgtcgccggtgtggtcgagggcggcgcgcgcgctggctatgtcgaggaagtgggcaagcccaccaagaccgagactttcgtggccatgaaggtcgcgatcgacaactggcgttgggacggcgtgccgttcttcctgcgcaccggcaagaacctgccggaccgccgcacccagatcgtcgtccagttcaagcctttgccgcacaacatcttcggtccggcgaccgatggcgagctgtgcgccaaccgcctagtcatcgacctgcagccggacgaagacatctcgctgacgatcatgaacaagcgtccgggtctctcggacgagggcatgcgactgcagtcgctgccgctgtcgctgtcgtttggccagaccggcgggcgccgtcgcatcgcttacgaaaagctgttcgtcgacgccttccgcggcgaccgtacgctgttcgtgcgtcgcgatgaggtcgagcaggcctggcgcttcatcgacggcgtctcggcggcctgggaagaggccagtatcgaaccggcgcactatgcggcgggcacctggggaccgcagtccgcccagggcctgatctcgcccggcggccgagcctggaaggcctga

SEQ ID NO: 23037 - protein, 473 aa, Caulobacter crescentus CB15
MVLLGGAGDLALRMLLPSLYFLELDRLLPHDLRIIGVARADHDAASYKALVREQLGKRATVEEAVWNRLAARLDYVPANITSEEDTKKLAERIGAHGTLVIFFSLSPSLYGPACQALQAAGLTGPNTRLILEKPLGRDLESSKATNAAVAAVVDESQVFRIDHYLGKETVQNLTALRFANVLFEPLWDRNTIDHVQITIAETEKVGDRWPYYDEYGALRDMVQNHMLQLLCLVAMEAPSGFDPDAVRDEKVKVLRSLRPFTKETVAHDTVRGQYVAGVVEGGARAGYVEEVGKPTKTETFVAMKVAIDNWRWDGVPFFLRTGKNLPDRRTQIVVQFKPLPHNIFGPATDGELCANRLVIDLQPDEDISLTIMNKRPGLSDEGMRLQSLPLSLSFGQTGGRRRIAYEKLFVDAFRGDRTLFVRRDEVEQAWRFIDGVSAAWEEASIEPAHYAAGTWGPQSAQGLISPGGRAWKA

SEQ ID NO: 23038 - DNA, 1476 bp, Salmonella typhimurium LT2; identical to SEQ ID NO: 16923
  CDS (1)..(1476): transl_table=11

SEQ ID NO: 23039 - protein, 491 aa, Salmonella typhimurium LT2; identical to SEQ ID NO: 16924

SEQ ID NO: 23040 - DNA, 1476 bp, Listeria innocua Clip11262
  CDS (1)..(1476): transl_table=11
atgacagatgagttagaacaaaaagcactgattactatttttggcggtacgggagatttggcaaatcgcaaactttacccttcgctatatcatttgtacagtaagggatctcttggcgacaattttgctgtaattggaacggctcgtcgtgaatggagtaacgatttcttccgtgataaagtaaaagagtctatcaaagacattgacggttccgaaaaagacgcggatgcatttgcttctcatttctactatcaatcccatgatgtaacaaataaagaatcttatgtaactttaaaagatttgtctgatgaattagacgctaaatatgaattaggtggtaatcgccttttctatcttgcaatggcaccgaacttctttggaacgattgctagccgcattaaatctgaaggttttgtagacacagacggtttccatcgtttaattatcgaaaaaccatttggtcatgatttagctagtgcggaagaattaaataattcgcttcgtcaagctttcaaggaagatgaaatttatcgtattgaccattatttaggaaaagaaatgatccaaaatatctcggttattcgttttgccaattctatcattgaatcgctttggaataatcgttacattgataacattcaagttactttgacagaagtgctcggcgttgaagaccgaggacgttattatgacgaaagtggcgcattacgagacatggttcaaaaccatattctccaaatcgtttctttacttgcgatggagccgccaattaacttaacgacacgcgagattcgtcatgaaaaagttcgcgcgcttcgttcgttacgcgtttttgaaggtaaagaagttcaccaaaactttattcgtggtcaatacgggcctggtgaagtaggtggcaaagaacttaaaggctatcgtcaagaagataatgtggatcctcattccaatacggaaaccttcgttgcagctaaacttgaaatcgataacttccgctgggctggtgttccattttatatccgtactggtaaacgtcttgcgaagaaaacaacccaaattgctattcagttcaaagatgtgccactgaatttattcgggcaacaacaatcgcttggtggtaacgtacttgttattcatatccaaccggacgaaggtattacacttcatttgaatgtaaaagaacctggtcaaggaatggttacaatgccagttaacttaaattacattcattcttctccagatggtatgaatacacctgaagcttatgaaaaattaattttagactgcctacgcggtgatgcaacttacttctctcactgggatgaagtatcgctatcatggaactttatcgaccatgtggcagatgtttggacaaatactaaagaccacttccctaactacaaatccggttcgatgggtccaaaagaagcagacgaccttatccaacgtgacggattccagtggttcccaatcgattaa

SEQ ID NO: 23041 - protein, 491 aa, Listeria innocua Clip11262
MTDELEQKALITIFGGTGDLANRKLYPSLYHLYSKGSLGDNFAVIGTARREWSNDFFRDKVKESIKDIDGSEKDADAFASHFYYQSHDVTNKESYVTLKDLSDELDAKYELGGNRLFYLAMAPNFFGTIASRIKSEGFVDTDGFHRLIIEKPFGHDLASAEELNNSLRQAFKEDEIYRIDHYLGKEMIQNISVIRFANSIIESLWNNRYIDNIQVTLTEVLGVEDRGRYYDESGALRDMVQNHILQIVSLLAMEPPINLTTREIRHEKVRALRSLRVFEGKEVHQNFIRGQYGPGEVGGKELKGYRQEDNVDPHSNTETFVAAKLEIDNFRWAGVPFYIRTGKRLAKKTTQIAIQFKDVPLNLFGQQQSLGGNVLVIHIQPDEGITLHLNVKEPGQGMVTMPVNLNYIHSSPDGMNTPEAYEKLILDCLRGDATYFSHWDEVSLSWNFIDHVADVWTNTKDHFPNYKSGSMGPKEADDLIQRDGFQWFPID

SEQ ID NO: 23042 - DNA, 1575 bp, Drosophila melanogaster; identical to SEQ ID NO: 16927
  CDS (1)..(1575)

SEQ ID NO: 23043 - protein, 524 aa, Drosophila melanogaster; identical to SEQ ID NO: 16928

SEQ ID NO: 23044 - DNA, 1476 bp, Agrobacterium tumefaciens str. C58; identical to SEQ ID NO: 16929
  CDS (1)..(1476): transl_table=11

SEQ ID NO: 23045 - protein, 491 aa, Agrobacterium tumefaciens str. C58; identical to SEQ ID NO: 16930

SEQ ID NO: 23046 - DNA, 1476 bp, Brucella melitensis 16M; identical to SEQ ID NO: 16931
  CDS (1)..(1476): transl_table=11

SEQ ID NO: 23047 - protein, 491 aa, Brucella melitensis 16M; identical to SEQ ID NO: 16932

SEQ ID NO: 23048 - DNA, 1428 bp, Schizosaccharomyces pombe 972h-; identical to SEQ ID NO: 16933
  CDS (1)..(1428)

SEQ ID NO: 23049 - protein, 475 aa, Schizosaccharomyces pombe 972h-; identical to SEQ ID NO: 16934

SEQ ID NO: 23050 - DNA, 1422 bp, Schizosaccharomyces pombe 972h-; identical to SEQ ID NO: 16935
  CDS (1)..(1422)

SEQ ID NO: 23051 - protein, 473 aa, Schizosaccharomyces pombe 972h-; identical to SEQ ID NO: 16936

SEQ ID NO: 23052 - DNA, 1305 bp, Encephalitozoon cuniculi GB-M1; identical to SEQ ID NO: 16937
  CDS (1)..(1305)

SEQ ID NO: 23053 - protein, 434 aa, Encephalitozoon cuniculi GB-M1; identical to SEQ ID NO: 16938

SEQ ID NO: 23054 - DNA, 1458 bp, Thermoanaerobacter tengcongensis MB4; identical to SEQ ID NO: 16941
  CDS (1)..(1458): transl_table=11

SEQ ID NO: 23055 - protein, 485 aa, Thermoanaerobacter tengcongensis MB4; identical to SEQ ID NO: 16942

SEQ ID NO: 23056 - DNA, 1524 bp, Streptomyces coelicolor A3(2); identical to SEQ ID NO: 16943
  CDS (1)..(1524): transl_table=11

SEQ ID NO: 23057 - protein, 507 aa, Streptomyces coelicolor A3(2); identical to SEQ ID NO: 16944

SEQ ID NO: 23058 - DNA, 1440 bp, Chlorobium tepidum TLS; identical to SEQ ID NO: 16951
  CDS (1)..(1440): transl_table=11

SEQ ID NO: 23059 - protein, 479 aa, Chlorobium tepidum TLS; identical to SEQ ID NO: 16952

SEQ ID NO: 23060 - DNA, 1530 bp, Thermosynechococcus elongatus BP-1; identical to SEQ ID NO: 16953
  CDS (1)..(1530): transl_table=11

SEQ ID NO: 23061 - protein, 509 aa, Thermosynechococcus elongatus BP-1; identical to SEQ ID NO: 16954

SEQ ID NO: 23062 - DNA, 1476 bp, Oceanobacillus iheyensis HTE831; identical to SEQ ID NO: 16955
  CDS (1)..(1476): transl_table=11

SEQ ID NO: 23063 - protein, 491 aa, Oceanobacillus iheyensis HTE831; identical to SEQ ID NO: 16956

SEQ ID NO: 23064 - DNA, 1668 bp, Bifidobacterium longum NCC2705; identical to SEQ ID NO: 16957
  CDS (1)..(1668): transl_table=11

SEQ ID NO: 23065 - protein, 555 aa, Bifidobacterium longum NCC2705; identical to SEQ ID NO: 16958

SEQ ID NO: 23066 - DNA, 1476 bp, Brucella suis 1330
  CDS (1)..(1476): transl_table=11
atgaccagtcagacaattccggtagatcccttcgactgcatcgtttttggtggcaccggcgatcttgccgagcgcaagcttattccggcgctttatcagcgccagcgcgcaggccagctttccgaccccacacgcatcatcggcgcctcgcgcagccagatgaccgacgacaaatatcgcaccttcgccggcaatgcgatcaaggaacatgtgaaaccggaagaggtggatcaggccgaagttgaaatcttcctcaagcggctgcactatgtggcggtggacgccaagtccgacgagggctgggatgcgctgaagaccctgatcggcaagaagccggaaaagatccgagccttttatctggccgtcagcccgaccctgttcggcgatatcgccacgcggctcaaggcgcatggcctcatcacgcgcgatacgcgcatcgtcgtggaaaagccgattggccgcgatctcgattccgccaaggcgctcaacgacacgctgggcagtgtgttccgcgaagaccagattttccgcatagaccactatctcggcaaggaaacggtgcagaacctgatggcgctgcgctttgccaatgcgctctacgagccgctgtggaactccgcccatatcgaccatgtgcagatcacggtggcggaagccgtgggccttgaaggccgcgcaggctattacgacaaggcgggcgcgctgcgcgacatggtgcagaaccacattctccagcttctctgccttgttgccatggaaccgccatcctcgattgaggccgacgccgtacacgacgagaaggtaaaggttctgcgctccctgcagccgatctccacgcataatgtcgaggaactgacggtccgcggacaatatcgcgcgggcgcttccgcaggcgggccggtcaagggctatctggaagaccttgaaagcgacaccagcaatacggaaacattcgtggcgctgaaggcggaaatcgccaactggcgctgggcgggtgtgccgttctatctgcgcaccggcaagcgccttgccacgcgtgtttcggaaatcgtcgtcacgttcaagcccattccgcattccatctttggcgaaagcgcgggcaaggtgattgccaatcagcttgtcatccgcctgcaaccggacgaaggcgtgaagcaatggctgatgatcaaggatcccggtccgggtggaatgcgcctgcgccacatgccgctcgacatgagctttgcggaatccttcgaggatcgcaacccggatgcctatgagcgcctcatcatggatgtggtgcgcggcaaccagaccctgttcatgcgccgcgacgaagtggaagcggcctggcgctggatcgacccgatccttcaggcatgggagttcaacagccagcccgtgcagggctatacggctggcacatgggggccttcgtcctccatcgcgctcattgagcgcgatggccgcacctggcacgaaagcctctaa

SEQ ID NO: 23067 - protein, 491 aa, Brucella suis 1330
MTSQTIPVDPFDCIVFGGTGDLAERKLIPALYQRQRAGQLSDPTRIIGASRSQMTDDKYRTFAGNAIKEHVKPEEVDQAEVEIFLKRLHYVAVDAKSDEGWDALKTLIGKKPEKIRAFYLAVSPTLFGDIATRLKAHGLITRDTRIVVEKPIGRDLDSAKALNDTLGSVFREDQIFRIDHYLGKETVQNLMALRFANALYEPLWNSAHIDHVQITVAEAVGLEGRAGYYDKAGALRDMVQNHILQLLCLVAMEPPSSIEADAVHDEKVKVLRSLQPISTHNVEELTVRGQYRAGASAGGPVKGYLEDLESDTSNTETFVALKAEIANWRWAGVPFYLRTGKRLATRVSEIVVTFKPIPHSIFGESAGKVIANQLVIRLQPDEGVKQWLMIKDPGPGGMRLRHMPLDMSFAESFEDRNPDAYERLIMDVVRGNQTLFMRRDEVEAAWRWIDPILQAWEFNSQPVQGYTAGTWGPSSSIALIERDGRTWHESL

SEQ ID NO: 23068 - DNA, 1473 bp, Shewanella oneidensis MR-1
  CDS (1)..(1473): transl_table=11
atgggcaaaacaacatcaggcgccaaagcttgtgacttcgtactctttggtactaaaggtgacttagcaagacgtaagttattaccttctttataccagttagataaggctgagcttctcgataaagatactaaggtgataggtgtcgcaaaagatgaattcagtcaggatgaatacagagacttagtcatccttgcgttaaaaaccttcgtcaaagaacccctctgcgaagacactctcaaccgattcgtgtcccgttgttattatgtaggcactaattttaccgaatcagcaggctacggtgccttccatgaattgctcaaaccagaagagcgtgtcatggtcagttactttgccacccctccatcgatttttggtgatatctgccgctgtttacatgaacaaaacctgatccacagtgactctcgcgtagtactcgaaaaacccattggctctgatctcgcatcttcccgtattattaacgatcaagtgtctgcctactttaaagaaagccaagtctaccgtatcgaccattatcttggtaaagagaccgttcaaaacttgattgcgctgcgttttgctaactccttatttgcctctaaatgggataaccggaccattgaccatgtccagatcacggttgcggaagaagtcggtattgaaggccgttggggttacttcgataaagccggtcaaatgcgcgatatgatccaaaaccacttgctacaggtgctgacgctcgtcgcaatggatccgccagtgaacttagatgctgatagtattcgcgatgaaaaggtgaaagtgcttaagtcgctgcggccgattaatgctgacaatgtgtatgaaaacactgtccgtggtcagtacagtgcgggcttcctgaaaggtagtccggtgccaggctatttagaggaagagggcgcgaacgtacagtcacacaccgaaacttttgtggcgttgcgggtcgatatcgataactggcgttgggctggggtgccgttttatctgcgcagcggtaagcgcatgccgtttaagagttctgaaattgtggtgtattttaaaaatcctccgcacaacctttaccgctctagctaccgtaacttgccacctaacaagttaaccatccgtctgcaaccacacgaaggggttgagatccagatgatgaacaaggtgccaggattagagcaaaaacaacgtttgcaaaccactaagctcgacttgagtttctcggatacctttaaaaacgagcgcattgccgatgcctacgagcgtttgttgcttgaagccatgctcggtaatcaagctttgttcgtgcgccgagatgaagtggagcaagcctggacatgggtggatggcatcatccaagcatgggaacagagcaatgagaaaccgaaaccttatcctgcgggcacttggggccctgtggcttcggtcgcgctgatcaccaaagatggtcgctcgtgggatgaatag

SEQ ID NO: 23069 - protein, 490 aa, Shewanella oneidensis MR-1
MGKTTSGAKACDFVLFGTKGDLARRKLLPSLYQLDKAELLDKDTKVIGVAKDEFSQDEYRDLVILALKTFVKEPLCEDTLNRFVSRCYYVGTNFTESAGYGAFHELLKPEERVMVSYFATPPSIFGDICRCLHEQNLIHSDSRVVLEKPIGSDLASSRIINDQVSAYFKESQVYRIDHYLGKETVQNLIALRFANSLFASKWDNRTIDHVQITVAEEVGIEGRWGYFDKAGQMRDMIQNHLLQVLTLVAMDPPVNLDADSIRDEKVKVLKSLRPINADNVYENTVRGQYSAGFLKGSPVPGYLEEEGANVQSHTETFVALRVDIDNWRWAGVPFYLRSGKRMPFKSSEIVVYFKNPPHNLYRSSYRNLPPNKLTIRLQPHEGVEIQMMNKVPGLEQKQRLQTTKLDLSFSDTFKNERIADAYERLLLEAMLGNQALFVRRDEVEQAWTWVDGIIQAWEQSNEKPKPYPAGTWGPVASVALITKDGRSWDE

SEQ ID NO: 23070 - DNA, 1509 bp, Drosophila melanogaster; identical to SEQ ID NO: 16959
  CDS (1)..(1509)

SEQ ID NO: 23071 - protein, 502 aa, Drosophila melanogaster; identical to SEQ ID NO: 16960

SEQ ID NO: 23072 - DNA, 1458 bp, Pseudomonas putida KT2440; identical to SEQ ID NO: 16965
  CDS (1)..(1458): transl_table=11

SEQ ID NO: 23073 - protein, 485 aa, Pseudomonas putida KT2440; identical to SEQ ID NO: 16966

SEQ ID NO: 23074 - DNA, 1506 bp, Vibrio vulnificus CMCP6
  CDS (1)..(1506): transl_table=11
atgatggtaataccagaaaacagcagcatcgtaatttttggtgcttcaggtgatttaacatatcgcaagttgatccctgctttataccacctctacgcaagtaagcagctaccagaaaactttgctattttaggtgtcagccgcactgaatacagcgatgaatcttatcgcgaaaagttaaagcgctctcttcaggaaatggagaaaacggaaccagctattctggattcatttatcgaccatcttcactatcaagccatcaacacgtcagacacaaaagactacgcgaagttggttgtacgtttagatgaattggccgctcaataccagttcgaacaacgtaatacactgttttatctggccacaccgccaagcctttacagtgttattcctgcaagccttgctcatcacggtctcaatagtgaagaggatggttggaagcgcctgatcattgaaaaaccgtttggttatgatttggcttcggcacgtcagctcgacaaagaaatacacgattgcttccaagagcatcagatctatcgcatcgaccactaccttggaaaagagaccgtacaaaacttacttgttttccgtttctctaacgccatgtttgaacctctgtggaaccgcaacttcattgattatgtggaaatcacaggtgccgaattccttggtgtggaagagcgcggtggttattacgacggctccggcgctgtgcgcgatatgttccaaaaccacctactgcaagtgttggcgatggtgggcatggagccgccagcacaaattaacgccgattccatgcgtgatgaagtagtgaaagttctgcagtgtttaaaaccgcttgaggaagatgatctgcgtaacaacctagttttgggtcaatacaccgcatcagacgtgcgcggacaacatctgcttggctaccgtgaagaaaacggcgtagcggacgattctcgtaccgagacttacattggtcttaaagcgtacatcaataactggcgttggaatggcgtaccattctacgtgcgcacgggtaagcgtcttccaactcgcgtgacagaagtggttatccacttcaaacaaacaccgcatccggtatttggccaaaacgctccagaaaacaaactgatcattcgtattcagcctgatgaaggcattcaaatgagcttcggtttgaaagaacccggtgcaggctttaaagccaaagaagtgaagatgaacttccattatgcttcgttgcaagagacgcaaatgctgaccgcctatgagcgtctgcttcttgatgcgttaaacggcgacgcaacgctgtttgctcgcagcgatgcggtcgaagcgtgttggaaatacgttcaacctatcctcgatttcaaacaagatccacaagcactctttggttatgcttgcggtacttgggggccaaaagagtcggacgatttgctgcagcgtgatgatcgcgcgtggcgtttcccatgcaaaaacctaacagatacggactactgcgaactatga

SEQ ID NO: 23075 - protein, 501 aa, Vibrio vulnificus CMCP6
MMVIPENSSIVIFGASGDLTYRKLIPALYHLYASKQLPENFAILGVSRTEYSDESYREKLKRSLQEMEKTEPAILDSFIDHLHYQAINTSDTKDYAKLVVRLDELAAQYQFEQRNTLFYLATPPSLYSVIPASLAHHGLNSEEDGWKRLIIEKPFGYDLASARQLDKEIHDCFQEHQIYRIDHYLGKETVQNLLVFRFSNAMFEPLWNRNFIDYVEITGAEFLGVEERGGYYDGSGAVRDMFQNHLLQVLAMVGMEPPAQINADSMRDEVVKVLQCLKPLEEDDLRNNLVLGQYTASDVRGQHLLGYREENGVADDSRTETYIGLKAYINNWRWNGVPFYVRTGKRLPTRVTEVVIHFKQTPHPVFGQNAPENKLIIRIQPDEGIQMSFGLKEPGAGFKAKEVKMNFHYASLQETQMLTAYERLLLDALNGDATLFARSDAVEACWKYVQPILDFKQDPQALFGYACGTWGPKESDDLLQRDDRAWRFPCKNLTDTDYCEL

SEQ ID NO: 23076 - DNA, 1464 bp, Tropheryma whipplei TW08/27
  CDS (1)..(1464): transl_table=11
atgccaaaggtgaattgcgcaacacagcagattgccctgcctggggcgcttgctatattcggggcaacgggtgacctgagctccaaaaaactattgccagcggtgtacgacttgtttcataactctcttctatcaaatgggttcgttttaattgctctgaatagagacttctcggcgcaagattttatctgtcacttccgccattgcgttaagtctttctctaggacgggatggtcagagtctgtttttcttgatctccaaaaaagggtacatcatgtaagtggcgacttttccgaccccgagacatatattgagctctctgagaaattagaaaccaccaaagaggaaactgggggtaattgtgttttttatctctcagttccgccaaatgtatttactcccatcatgaaaaacttgtctgctagtgggctgtctagaggatgtttgcataaaattgctgttgaaaaaccctttggtaatgaccttaaaagtgcaatacagcttaattcagtgcttaggtcagctttccctgagcgtgctatctttcgggttgatcactatcttggtaaagagaccattcaaaatattcttacttttcgttttggaaaccaaatctttgaccctatttggaataggaaacatgttgatcatgtgcagattacgatgtctgaagatataggggttgagggtcgcagtaagtactatgacggaatcggtgctgcacgtgatgtattacaaaatcatcttttgcagcttatggctctaattacgatggagagaccctcgaatttgaataacgcgagtgatataaggcacgagaagcagagagttttggaatgtgtgagtcttccgaaaaatatagctcaaaatgctgttcgtggccaatactcatccggctatctacgggatgagagggttgtatcttttttgcaagaagatggggttaatccatcttcaagaactgaaacattcgcggcgataaagctaaatgccgataatgaacgttggtatggtgtacctttctacgttagaactgggaaacggatggcaaaacgtagtgcatatataagtcttgtattcaagccaactgatatgagtattttgcaaaatgtgattgttataaggttgcaaccagacgagggtgtgtctatttggtttgcgtcgaaagtgcccggttatcgttctgatattcgacaggtgaattttgatttttcgtataaaagctcatttactgaatcaagtccagaggcttatgaacgcttaattctggatgcaatgaggggtgaggcctccttgtttccgcagcaaagagaagtggagttgtgttggggcataatagacccccttgaggaggtttgggaaaacgacaataccctgataccccaatacactccaggaagttgggggccagatacttcaaacgaccttttgctcagaacgtccaggcactggagaaattactga

SEQ ID NO: 23077 - protein, 487 aa, Tropheryma whipplei TW08/27
MPKVNCATQQIALPGALAIFGATGDLSSKKLLPAVYDLFHNSLLSNGFVLIALNRDFSAQDFICHFRHCVKSFSRTGWSESVFLDLQKRVHHVSGDFSDPETYIELSEKLETTKEETGGNCVFYLSVPPNVFTPIMKNLSASGLSRGCLHKIAVEKPFGNDLKSAIQLNSVLRSAFPERAIFRVDHYLGKETIQNILTFRFGNQIFDPIWNRKHVDHVQITMSEDIGVEGRSKYYDGIGAARDVLQNHLLQLMALITMERPSNLNNASDIRHEKQRVLECVSLPKNIAQNAVRGQYSSGYLRDERVVSFLQEDGVNPSSRTETFAAIKLNADNERWYGVPFYVRTGKRMAKRSAYISLVFKPTDMSILQNVIVIRLQPDEGVSIWFASKVPGYRSDIRQVNFDFSYKSSFTESSPEAYERLILDAMRGEASLFPQQREVELCWGIIDPLEEVWENDNTLIPQYTPGSWGPDTSNDLLLRTSRHWRNY

SEQ ID NO: 23078 - DNA, 1506 bp, Vibrio parahaemolyticus RIMD 2210633; identical to SEQ ID NO: 16975
  CDS (1)..(1506): transl_table=11

SEQ ID NO: 23079 - protein, 501 aa, Vibrio parahaemolyticus RIMD 2210633; identical to SEQ ID NO: 16976

SEQ ID NO: 23080 - DNA, 1497 bp, Bacteroides thetaiotaomicron VPI-5482; identical to SEQ ID NO: 16977
  CDS (1)..(1497): transl_table=11

SEQ ID NO: 23081 - protein, 498 aa, Bacteroides thetaiotaomicron VPI-5482; identical to SEQ ID NO: 16978

SEQ ID NO: 23082 - DNA, 1524 bp, Enterococcus faecalis V583; identical to SEQ ID NO: 16979
  CDS (1)..(1524): transl_table=11

SEQ ID NO: 23083 - protein, 507 aa, Enterococcus faecalis V583; identical to SEQ ID NO: 16980

SEQ ID NO: 23084 - DNA, 1524 bp, Streptomyces avermitilis MA-4680; identical to SEQ ID NO: 16983
  CDS (1)..(1524): transl_table=11

SEQ ID NO: 23085 - protein, 507 aa, Streptomyces avermitilis MA-4680; identical to SEQ ID NO: 16984

SEQ ID NO: 23086 - DNA, 1476 bp, Shigella flexneri 2a str. 2457T; identical to SEQ ID NO: 16985
  CDS (1)..(1476): transl_table=11

SEQ ID NO: 23087 - protein, 491 aa, Shigella flexneri 2a str. 2457T; identical to SEQ ID NO: 16986

SEQ ID NO: 23088 - DNA, 1491 bp, Nitrosomonas europaea ATCC 19718; identical to SEQ ID NO: 16987
  CDS (1)..(1491): transl_table=11

SEQ ID NO: 23089 - protein, 496 aa, Nitrosomonas europaea ATCC 19718; identical to SEQ ID NO: 16988

SEQ ID NO: 23090 - DNA, 1455 bp, Rhodopirellula baltica SH 1; identical to SEQ ID NO: 16989
  CDS (1)..(1455): transl_table=11

SEQ ID NO: 23091 - protein, 484 aa, Rhodopirellula baltica SH 1; identical to SEQ ID NO: 16990

SEQ ID NO: 23092 - DNA, 1488 bp, Haemophilus ducreyi 35000HP
  CDS (1)..(1488): transl_table=11
atgaatatagaaaatagttgtatcgtaatttttggtgcatcaggggacttaacattccgtaaacttatcccagcactatataatctttttaaagtaggtcggttaggcgaacatttttctgttttaggtgtttcacgatcagacctaactcacgattcttttagacaaaaaatgcgtgaagcattaatcaaatatgagcaagcaagcgggcagtttttagatgatttttgcaatcacttgtattatcaagcaatcaacaccgctgatccggacgattatgccaaactattaccttgtttagatgaattacacaataaatacggtagctgtggtaacactttatattacctttcaacaccgcctagtttatacggcattatccctgaatgcttggcggctcacggcttaaccactgaagaatatggttggaaacggattatcatcgaaaaaccatttggttacgatattaaaacagccaaacaactcgatgagaaaatacatcattattttgaagaacatcaaatttaccggatcgatcattatcttggtaaagaaaccgtgcaaaatttattagtactccgtttctcaaacggtttatttgaaccactttggaatcgtaattttattgaatatgtagaaattaccggtgcagaatcattaggtgttgaagatcgtggtggttattatgatggatctggtgcaatgcgtgatatgttccaaaaccatttactacaagtattagcaatggttgccatggaacctccggccattattaatgctaactcaatgcgtaatgaagtagcaaaagtcttatatagcttacgtccattaagcactgaagacgtcaaaaataatgtggtacttggtcaatatacctccggtgaaattgatgacttagttgtacccggttatactgaagaaaatggcgttcccaacgattcaaatacagaaacttatttagccgtaaaatgcgaaattgataactggcgttgggccggcgtgccattttatgtgcgaacaggtaagcgtttgcctactcgggtaactgaaatcgtaatccacttcaaaacgactccacatccagtctttagccaaaatgcgcctgaaaataaattaattatccgggtacaacctgatgaaggtatttctatgcggtttggtttgaaaaaacccggtgctggttttgaggcgaaagaagtctctatggattttcgctattctgatttaagctctgcttcaagtttattaaccgcttatgaacggttactattagatgcattaaaaggagatgcgaccctatttgcccgaaccgatgccgtacatgcctgttggcatttcgtacagccgattctagactataaggcagaacgtggccgagtgtatgaatatgaagcaagcagttgggggcctaaagaagctgataaactgattgcacgcaatggcaaagtatggcgtaaaccgtctggaatgatgaagaaaaaaatatag

SEQ ID NO: 23093 - protein, 495 aa, Haemophilus ducreyi 35000HP
MNIENSCIVIFGASGDLTFRKLIPALYNLFKVGRLGEHFSVLGVSRSDLTHDSFRQKMREALIKYEQASGQFLDDFCNHLYYQAINTADPDDYAKLLPCLDELHNKYGSCGNTLYYLSTPPSLYGIIPECLAAHGLTTEEYGWKRIIIEKPFGYDIKTAKQLDEKIHHYFEEHQIYRIDHYLGKETVQNLLVLRFSNGLFEPLWNRNFIEYVEITGAESLGVEDRGGYYDGSGAMRDMFQNHLLQVLAMVAMEPPAIINANSMRNEVAKVLYSLRPLSTEDVKNNVVLGQYTSGEIDDLVVPGYTEENGVPNDSNTETYLAVKCEIDNWRWAGVPFYVRTGKRLPTRVTEIVIHFKTTPHPVFSQNAPENKLIIRVQPDEGISMRFGLKKPGAGFEAKEVSMDFRYSDLSSASSLLTAYERLLLDALKGDATLFARTDAVHACWHFVQPILDYKAERGRVYEYEASSWGPKEADKLIARNGKVWRKPSGMMKKKI

SEQ ID NO: 23094 - DNA, 1521 bp, Prochlorococcus marinus subsp. marinus str. CCMP1375
  CDS (1)..(1521): transl_table=11
atgataccgactacaaacccattgagagttggtcttagacaagagagggtaatttcacctcagtgtttaattatttttggggccagtggagatttaactcataggaaacttgtccctgcccttttcaagctattcaaacaaagacgcttgcccagtgaatttgcattactaggttgcgctagaagaccttggagtgacattgagttccgaaaaaaaatgtcagtttctcttaaagatgaaatcaaattaaatccaaatgaatgggaagaattcataactcgtcttttctatgaaccagtcaatcttgaacgaccagaagatcttgtaaaactaggtacaaggctcgaagaaatagaccggataaaagctacccatgcaaatagaaccttttatttatctgttgcaccaaaattctatgcaagtggttgcaaagctttagcagatgcaggccttctcaaagacccacgaagaagcagagtggttatcgagaaacctttcgggagggattacagaagcgctcaaagtttaaatcgtattgttcagaattgtgctcttgaaagtcaaatctttcgcatcgatcattatctagggaaagagactgttcagaacattctggttctaagatttgcaaacacaatttttgaaccaatttggaacagaaattatatatctaatgttcaaataacttcagctgaaacagtaggagtcgaagatcgagcaggctattacgaaagttcaggagcattaagggatatggtgcagaatcatttaacgcaaatgcttgcaattactgcaatggaaccacctggtcattttgatccagaagccattaggaatgaaaaagccaaagtactgcaagctgctcatttagctaatgaacttgagccttgggaatgttgtgtaagaggccaatattcaaaaggtggctctaagaaaagaccattgattggttaccgagatgaacctggtgttaatccaaatagcacaactgaaacctatgttgctatgaagcttttcattaataattggcgatggcaaggagtccctttttatattcgtactgggaaaagattggcaaaaagaactagtgaagtagttttaacctttagagaggcacctgttcaccttttcgatgcggcaggggggacaccaacatctaatcaactagtcctaagaatccaacctgatgaaggagctgagttcaagtttgatgtgaagtctccaggttctggaatgaggagcaggcctgttgaaatggaattctcttatgatgaatcatttggagaaccttcagacgaaggatatgtaaggcttttagctgatgcaatgcttggagatcctactcttttcacgagaagcgatgaggtagaagccgcttggcgtttatatactcctcttttagaaataattgaagatagtccttggcaacttccaacttatccttatgaatccagaacttggggcccttcagaagctgatgcattactagctaaagatcaattactttggagaagaccctaa

SEQ ID NO: 23095 - protein, 506 aa, Prochlorococcus marinus subsp. marinus str. CCMP1375
MIPTTNPLRVGLRQERVISPQCLIIFGASGDLTHRKLVPALFKLFKQRRLPSEFALLGCARRPWSDIEFRKKMSVSLKDEIKLNPNEWEEFITRLFYEPVNLERPEDLVKLGTRLEEIDRIKATHANRTFYLSVAPKFYASGCKALADAGLLKDPRRSRVVIEKPFGRDYRSAQSLNRIVQNCALESQIFRIDHYLGKETVQNILVLRFANTIFEPIWNRNYISNVQITSAETVGVEDRAGYYESSGALRDMVQNHLTQMLAITAMEPPGHFDPEAIRNEKAKVLQAAHLANELEPWECCVRGQYSKGGSKKRPLIGYRDEPGVNPNSTTETYVAMKLFINNWRWQGVPFYIRTGKRLAKRTSEVVLTFREAPVHLFDAAGGTPTSNQLVLRIQPDEGAEFKFDVKSPGSGMRSRPVEMEFSYDESFGEPSDEGYVRLLADAMLGDPTLFTRSDEVEAAWRLYTPLLEIIEDSPWQLPTYPYESRTWGPSEADALLAKDQLLWRRP

SEQ ID NO: 23096 - DNA, 1497 bp, Candidatus Blochmannia floridanus
  CDS (1)..(1497): transl_table=11
atgcggtcaaaaacaactaccactcaagcttgtaatttcattatttttggagctaaaggagatttagctcgtaggaaattaattcctgcgctatatcaattagagaaaatcggttctatacatcctagaacttttatattaggagtaggtagagcggaatgggatttattaacatatattaaaattgtgcgttcttctttagagagatttatgaaagaatctattaatgaaaatatatggtgtcgtttttctaaaagatttgatttttgtaatttagatgttaatcaaacggaacaatttgtacatgtgctgaataaattaaaaaatttagatttattgacaataaattattttgcaatgcctcctcatacatttggatctatttgtaaaggattaagtttagtgggtttaaataaagaaagaaatagaatagtgatagaaaagccattaggaatgaactttgattctgctcgtgttattaattctcaagtatctaaatattttcatgaaactcaaatttatcgggtagatcattatttaggaaaagaagctattttaaatttgttggtattacgttttgcaaattctgtatttttttcaaattgggataacaataccattgatcatgtacaaattactgtttcagaagaggttggaattgaaggtcgttggggttattttgatgctatggggcaaatgcgtgatatggtacaaagtcatttattacaaattcttactatcattgctatgtctcctccttttgatttaagtgctgattgtattcgggacgaaaaagttaaagtgttacgttcattgcgtatgattaatactaatacgatacatgaaattgcggtacgaggtcaatatactgctggttttattaatggtcaaccagtaccaggatatttagaggaaataggttctaacaaggatagtaaaacggaaacatttgtatcgattaaagtgaatatagataattggaggtggtttggagtgcctttttatttacgtactggaaaaagattagcaatgaaatattctgaagttgttatatattttaaaaaaccaatattgaatttatttaaagattcttattcaattttacctaataataaattaattattcgattacaaccatatgaaggaatagatatgcagattctaagtaaaataccgggattaggtaataagaatcgtttaaaaattactaatttgaatttaaatttgaggaaaatattttccggagaatacatattagatgcttatgaacgattattattagaggtaatgcgtgggattcaagtattatttgtacgttatgacgaaatagaggattcatggaggtgggttgattctgttatagaggcatggtctttagttgatggtgttccaaaattatataaagctggtacatggggtccgagtgaatctacagaaatgattcgtaaaggaaatcatcattggaataaatgtacgttgaaatatacgaatatttga

SEQ ID NO: 23097 - protein, 498 aa, Candidatus Blochmannia floridanus
MRSKTTTTQACNFIIFGAKGDLARRKLIPALYQLEKIGSIHPRTFILGVGRAEWDLLTYIKIVRSSLERFMKESINENIWCRFSKRFDFCNLDVNQTEQFVHVLNKLKNLDLLTINYFAMPPHTFGSICKGLSLVGLNKERNRIVIEKPLGMNFDSARVINSQVSKYFHETQIYRVDHYLGKEAILNLLVLRFANSVFFSNWDNNTIDHVQITVSEEVGIEGRWGYFDAMGQMRDMVQSHLLQILTIIAMSPPFDLSADCIRDEKVKVLRSLRMINTNTIHEIAVRGQYTAGFINGQPVPGYLEEIGSNKDSKTETFVSIKVNIDNWRWFGVPFYLRTGKRLAMKYSEVVIYFKKPILNLFKDSYSILPNNKLIIRLQPYEGIDMQILSKIPGLGNKNRLKITNLNLNLRKIFSGEYILDAYERLLLEVMRGIQVLFVRYDEIEDSWRWVDSVIEAWSLVDGVPKLYKAGTWGPSESTEMIRKGNHHWNKCTLKYTNI

SEQ ID NO: 23098 - DNA, 1524 bp, Prochlorococcus marinus subsp. pastoris str. CCMP1986
  CDS (1)..(1524): transl_table=11
atgtcctcaaccttaagtaatcctcttagattaggtttgcgacaagaaagagtgatatctccacaatgcctaataatatttggagctagtggagatcttactcataggaaacttatacctgccttatttgaactttatctgcaaagaaggatcccaagtgaattcgccatagttggatgtgcaagaaggccttggagtgatcaagattttaaggaaaaaatgaagggtaagttagctgatcaaatatctgacaatgaaaaggaatgggaacagttttcaaattatctattctacgaaccagttgatttgcagcaaagtgatcatgtagtaagactttccaaaagattaaatgagattgataaattacaggctacacatggaaataacaccttttacttatcagtatctccaaacttttatggaagtggatgtaaggctctaaaggctgctggattactagatgatccgaagaaaagtcgaatcgttattgaaaaaccctttggaagagattattcaagtgcgaagaaattaaataagatcgttcaaagttgtgcagatgaaagtcagatatatcgaatagatcattatttggggaaagagactgttcaaaacatacttgttatgaggtttgctaatactatttttgaacctatatggaataggaattatatttcaagtgttcaaataacatcatcggaaactgttggggttgaagatagagctggttattatgaaagctctggggctttaagagatatgctccaaaatcatttaactcaaatgcttgctgtaacagcgatggagcctcctggtaaatttgaacctgaggcaataagaaatgaaaaagcaaaagttcttcaagcttcaaaacttgccgatgagaatgaaccctggaattgctgtgtcagaggtcagtatgcacaaggaggtaatagtcttaaaagacttaaaggttatagggatgaagatggagtaaatttgaacagtacaacagaaacttatattgcaacaaaagtatttattgataattggcgatggcaaggagttcctttcttcttaagaacaggtaaaagactaccgaaaagacttggggaaattgtattaacatttaaagatgtcccagtacatttatttgaatcaacaataattaatcctgcgccaaatcagcttattcttaggattcagcctaatgaaggagctacttttaaatttgaagtcaaatcacctggatctgggatgaaagcaagaccagttgaaatggaattttcttacgatgaatcttttggagagccttctgacgaaggttatgtaaggttgttggctgatgccatgctctcagatcctaccttgtttacaaggagtgatgaggtagaagctgcttggaaactttatacaccattaatagaattaatggaagacgctccttggaagttacctattcataaatacgaatcaatgacttggggacctcctgaatcagatcaattactttccaaagataatattttttggcgcagaccctaa

SEQ ID NO: 23099 - protein, 507 aa, Prochlorococcus marinus subsp. pastoris str. CCMP1986
MSSTLSNPLRLGLRQERVISPQCLIIFGASGDLTHRKLIPALFELYLQRRIPSEFAIVGCARRPWSDQDFKEKMKGKLADQISDNEKEWEQFSNYLFYEPVDLQQSDHVVRLSKRLNEIDKLQATHGNNTFYLSVSPNFYGSGCKALKAAGLLDDPKKSRIVIEKPFGRDYSSAKKLNKIVQSCADESQIYRIDHYLGKETVQNILVMRFANTIFEPIWNRNYISSVQITSSETVGVEDRAGYYESSGALRDMLQNHLTQMLAVTAMEPPGKFEPEAIRNEKAKVLQASKLADENEPWNCCVRGQYAQGGNSLKRLKGYRDEDGVNLNSTTETYIATKVFIDNWRWQGVPFFLRTGKRLPKRLGEIVLTFKDVPVHLFESTIINPAPNQLILRIQPNEGATFKFEVKSPGSGMKARPVEMEFSYDESFGEPSDEGYVRLLADAMLSDPTLFTRSDEVEAAWKLYTPLIELMEDAPWKLPIHKYESMTWGPPESDQLLSKDNIFWRRP

SEQ ID NO: 23100 - DNA, 1479 bp, Chromobacterium violaceum ATCC 12472; identical to SEQ ID NO: 16991
  CDS (1)..(1479): transl_table=11

SEQ ID NO: 23101 - protein, 492 aa, Chromobacterium violaceum ATCC 12472; identical to SEQ ID NO: 16992

SEQ ID NO: 23102 - DNA, 1539 bp, Gloeobacter violaceus PCC 7421; identical to SEQ ID NO: 16993
  CDS (1)..(1539): transl_table=11

SEQ ID NO: 23103 - protein, 512 aa, Gloeobacter violaceus PCC 7421; identical to SEQ ID NO: 16994

SEQ ID NO: 23104 - DNA, 1476 bp, Photorhabdus luminescens subsp. laumondii TTO1; identical to SEQ ID NO: 16995
  CDS (1)..(1476): transl_table=11

SEQ ID NO: 23105 - protein, 491 aa, Photorhabdus luminescens subsp. laumondii TTO1; identical to SEQ ID NO: 16996

SEQ ID NO: 23106 - DNA, 1581 bp, Vibrio vulnificus YJ016; identical to SEQ ID NO: 16997
  CDS (1)..(1581): transl_table=11

SEQ ID NO: 23107 - protein, 526 aa, Vibrio vulnificus YJ016; identical to SEQ ID NO: 16998

SEQ ID NO: 23108 - DNA, 1650 bp, Corynebacterium diphtheriae NCTC 13129; identical to SEQ ID NO: 16999
  CDS (1)..(1650): transl_table=11

SEQ ID NO: 23109 - protein, 549 aa, Corynebacterium diphtheriae NCTC 13129; identical to SEQ ID NO: 17000

SEQ ID NO: 23110 - DNA, 1545 bp, Mycobacterium avium subsp. paratuberculosis K-10
  CDS (1)..(1545): transl_table=11
atgagcccggctcgcaccgcgcagcaatggcataacccgttacgcgacaagcgcgacaagcggctcccgcgcatcgccgggccgtgcggaatggtgatcttcggcgtcaccggcgatctggcccgcaagaaggtcatgcccgccatctacgacctggccaaccgcgggctgctgccgcccagcttctcgctggtcggcttcgcccgaagggattggagcacccaggatttcggcaaggtggtatatgaggccgtcaaggagcactgccgcaccccgttccggcaggagaactgggatcggctggccgagggattccgtttcgtgccaggcgctttcgacgacgacgaggcgttcggccggctcgccgagacgctggacaaactcgacgccgagcggggcaccggcggtaatcacgccttctacctggccatcccgcccaagtccttccccgtcgtgtgcgaacaactgcacaagtccgggctggcccgcccgcagggcgaccgctggagccgagttgtcatcgagaagccgttcggccacgacctggagagcgcgcagagcctgaacaaggccgtcaacgccgtctttcccgaggagtcggtcttccgcatcgaccactacctgggcaaggagacggtccgcaacatcctggcgctgcggttcgccaaccagttgttcgacccgatctggaactcgcactacgtcgaccacgtgcagatcaccatggccgaggacatcggcctgggcgggcgggccggctactacgacggcatcggcgccgcgcgcgacgtcatccagaaccacctgatgcagctgctggcgctgaccgcgatggaagagccggtcagcttcagcccgttggcgctccaggccgagaagatcaaggtactctcggccacccacctcgcccacccgctcgacgagaccaccagccgcggccagtacaccgcgggctggcagggcggcgagaaggtggtcgggctgctcgacgaggagggcttcgccaaggactcgatcaccgagacgttcgccgccatcaccctcgaggtggacacccgccgctgggcgggggtgccgttctacctgcggaccggaaaacgcttgggccgcagggtgaccgagatagccctggtgttcaagcgcgcgccgcatctgccgttcgacgcgacgatgaccgatgagctgggcgccaacgccatggtgatccgggtgcagcccgacgagggtgtcacgctgcggttcggttccaaggtgccgggcaccgcgatggaggtccgcgacgtcaacatggacttctcctacgggtcggcgttcgccgaggaatcaccggaggcctacgagcagttgatcctcgacgtgctgctgggtgagccgtccctgttcccggtcaacgccgaagtcgaattggcttggcacatcctcgatcccgtgctcgacaactgggcgagcggcggcaggcccgagccctacgaggccggcacctggggcccggattcggcgttcgagatgctgcaccggacgggccgcgaatggcggcggccatga

SEQ ID NO: 23111 - protein, 514 aa, Mycobacterium avium subsp. paratuberculosis K-10
MSPARTAQQWHNPLRDKRDKRLPRIAGPCGMVIFGVTGDLARKKVMPAIYDLANRGLLPPSFSLVGFARRDWSTQDFGKVVYEAVKEHCRTPFRQENWDRLAEGFRFVPGAFDDDEAFGRLAETLDKLDAERGTGGNHAFYLAIPPKSFPVVCEQLHKSGLARPQGDRWSRVVIEKPFGHDLESAQSLNKAVNAVFPEESVFRIDHYLGKETVRNILALRFANQLFDPIWNSHYVDHVQITMAEDIGLGGRAGYYDGIGAARDVIQNHLMQLLALTAMEEPVSFSPLALQAEKIKVLSATHLAHPLDETTSRGQYTAGWQGGEKVVGLLDEEGFAKDSITETFAAITLEVDTRRWAGVPFYLRTGKRLGRRVTEIALVFKRAPHLPFDATMTDELGANAMVIRVQPDEGVTLRFGSKVPGTAMEVRDVNMDFSYGSAFAEESPEAYEQLILDVLLGEPSLFPVNAEVELAWHILDPVLDNWASGGRPEPYEAGTWGPDSAFEMLHRTGREWRRP

SEQ ID NO: 23112 - DNA, 1590 bp, Yersinia pestis biovar Microtus str. 91001; identical to SEQ ID NO: 17001
  CDS (1)..(1590): transl_table=11

SEQ ID NO: 23113 - protein, 529 aa, Yersinia pestis biovar Microtus str. 91001; identical to SEQ ID NO: 17002

SEQ ID NO: 23114 - DNA, 1557 bp, Apis mellifera; identical to SEQ ID NO: 17003
  CDS (1)..(1557)

SEQ ID NO: 23115 - protein, 518 aa, Apis mellifera; identical to SEQ ID NO: 17004

SEQ ID NO: 23116 - DNA, 1533 bp, Nasonia vitripennis; identical to SEQ ID NO: 17005
  CDS (1)..(1533)

SEQ ID NO: 23117 - protein, 510 aa, Nasonia vitripennis; identical to SEQ ID NO: 17006

SEQ ID NO: 23118 - DNA, 1524 bp, Magnaporthe grisea 70-15; identical to SEQ ID NO: 17007
  CDS (1)..(1524)

SEQ ID NO: 23119 - protein, 507 aa, Magnaporthe grisea 70-15; identical to SEQ ID NO: 17008

SEQ ID NO: 23120 - DNA, 1494 bp, Gibberella zeae PH-1; identical to SEQ ID NO: 17009
  CDS (1)..(1494)

SEQ ID NO: 23121 - protein, 497 aa, Gibberella zeae PH-1; identical to SEQ ID NO: 17010

SEQ ID NO: 23122 - DNA, 1503 bp, Candida glabrata CBS 138; identical to SEQ ID NO: 17011
  CDS (1)..(1503)

SEQ ID NO: 23123 - protein, 500 aa, Candida glabrata CBS 138; identical to SEQ ID NO: 17012

SEQ ID NO: 23124 - DNA, 1509 bp, Debaryomyces hansenii CBS767; identical to SEQ ID NO: 17013
  CDS (1)..(1509)

SEQ ID NO: 23125 - protein, 502 aa, Debaryomyces hansenii CBS767; identical to SEQ ID NO: 17014

SEQ ID NO: 23126 - DNA, 1497 bp, Yarrowia lipolytica CLIB122; identical to SEQ ID NO: 17015
  CDS (1)..(1497)

SEQ ID NO: 23127 - protein, 498 aa, Yarrowia lipolytica CLIB122; identical to SEQ ID NO: 17016

SEQ ID NO: 23128 - DNA, 1524 bp, Candida albicans SC5314
  CDS (1)..(1524): transl_table=12
atgtcatttgattcatttggagattatgctaccattgttgtttttggtgcttcaggagatttagctaaaaagaaaacctttccagcattatttggattatttagagaaaaacaattaccatcaacggttcaaatcattggttatgctagatcacatttagaagatgaagaatttaaacaaagaatttctgaacattttaaaggtggtgatgaaaaaactaaaactgaatttttaaaacttgtttcatatattagtggaccttatgatactgatgaaggttataaaaaattagaatcaagatgtcaagaatatgaaaaggccaataaagataaaaatgatagttatactcccgaaagattattttatttggcattaccaccatcagtgttcactactgtttgtgaaaaagttaaaaaaaatgtttatccaccagaagaaagtaaaggtaaacttagaattattattgaaaaaccttttggacgtgatttagatacttatcgtgaaatgcaaaaagaaatttccccattatttactgaagatgaaatttatagaattgatcattatttaggtaaagaaatggtgaaaaatttattggttttacgatttggtaatgaattatttagtggagtttggaataataaacatatttcttcaattcaagtttcatttaaagaagcttttggtactgaaggtagaggtggttattttgataccattggaatcattagagatgttatgcaaaatcatttattacaagttttaactttattaaccatggaaagaccagtttcatttgatcctgaagccgttagagatgaaaaagttaaagttttaaaagcatttgatgctattgatattaatgacgttatattgggtcaatatactaaatctgaagatggtaaaaaaccaggttatttagatgataaaaccgtcaatccggattcaaaagctgttacttatgctgctttccgtgtaaacattcataatgaaagatgggatggagttccaattgttttacgtgctggtaaagctttagatgaaagtaaagttgaaattagaattcaatttaaaccagtcgccaaggggatgtttaaagaaattcaaagaaatgaattagttattagagtacaaccaaatgaagccatttatttaaaaattaattccaaaatccctggaatttctactgaaacttcattaactgatttagatttaacttatgctactcgttattctaaagacttttggattcctgaagcttatgaagcattaattagagattgctatttaggtaatcattctaattttgttagagatgatgaattggatgtttcttggaaattatttactccattattgaatgccgttgaagatccagctaaaaaatttgaattacaatattatccttatggttcaaaaggtccaaaagatttaagaaaatatttgaatgaacatggttatatatttagtgatccaggtacttatcaatggccattaactagtcctaacgttaaagggaagatttag

SEQ ID NO: 23129 - protein, 507 aa, Candida albicans SC5314
MSFDSFGDYATIVVFGASGDLAKKKTFPALFGLFREKQLPSTVQIIGYARSHLEDEEFKQRISEHFKGGDEKTKTEFLKLVSYISGPYDTDEGYKKLESRCQEYEKANKDKNDSYTPERLFYLALPPSVFTTVCEKVKKNVYPPEESKGKLRIIIEKPFGRDLDTYREMQKEISPLFTEDEIYRIDHYLGKEMVKNLLVLRFGNELFSGVWNNKHISSIQVSFKEAFGTEGRGGYFDTIGIIRDVMQNHLLQVLTLLTMERPVSFDPEAVRDEKVKVLKAFDAIDINDVILGQYTKSEDGKKPGYLDDKTVNPDSKAVTYAAFRVNIHNERWDGVPIVLRAGKALDESKVEIRIQFKPVAKGMFKEIQRNELVIRVQPNEAIYLKINSKIPGISTETSLTDLDLTYATRYSKDFWIPEAYEALIRDCYLGNHSNFVRDDELDVSWKLFTPLLNAVEDPAKKFELQYYPYGSKGPKDLRKYLNEHGYIFSDPGTYQWPLTSPNVKGKI

SEQ ID NO: 23130 - DNA, 1509 bp, Ustilago maydis 521; identical to SEQ ID NO: 17019
  CDS (1)..(1509)

SEQ ID NO: 23131 - protein, 502 aa, Ustilago maydis 521; identical to SEQ ID NO: 17020

SEQ ID NO: 23132 - DNA, 1515 bp, Cryptococcus neoformans var. neoformans B-3501A; identical to SEQ ID NO: 17021
  CDS (1)..(1515)

SEQ ID NO: 23133 - protein, 504 aa, Cryptococcus neoformans var. neoformans B-3501A; identical to SEQ ID NO: 17022

SEQ ID NO: 23134 - DNA, 1578 bp, Tribolium castaneum; identical to SEQ ID NO: 17023
  CDS (1)..(1578)

SEQ ID NO: 23135 - protein, 525 aa, Tribolium castaneum; identical to SEQ ID NO: 17024

SEQ ID NO: 23136 - DNA, 1524 bp, Prochlorococcus marinus str. AS9601
  CDS (1)..(1524): transl_table=11
atgccttcaactttaagtaatcctctaagattaggtttacggcaggaaagagtcatatctccacaatctttagtaatttttggcgctagtggagaccttactcatagaaaattaataccagccttatttgaactctatttgcaaagaagaattcctagtgaatttggaatagttggttgtgcgagaagaccttggactgattatgagtttagagaaaagatgaaagtaaagttatcaaatcaaatatctggtaaagaaagggagtgggaacaattttctaattatcttttctatgaaccagttgacttacaagaaagtgatcatgtcgtaaggctttctagaagattaaatgaaattgataaaacacaagctactcatgggaatagaacattttatttatcagtatctccaaatttctatgcaagtggatgtaaagctctaaaaggagctggccttttagataaccctaagaaaagtcgtttggtaattgaaaaaccttttggcagagattattcaagtgcaaaaaaattgaataagattgttcaaagttgcgctgaagaaagtcagatttataggattgatcattatttaggtaaagagacagttcagaatattcttgttttgaggtttgctaatactatttttgaaccaatttggaacaggaattatatatcaagtgttcaaattacttcatctgaaacagttggtgttgaagatagagcaggttattacgaaagctctggtgctttgcgggatatgcttcaaaatcatatgactcaaatgcttgcagttactgcaatggaacctcctggaaaatttgaaccagaagcaataagaaatgaaaaagctaaggttcttcaagcttccaaacttgctgacgaaaatcaaccgtggaattgttgcataagaggacaatatggagagggagggaatatttcaaatcgactcaaaggatataggcaggaagatggtgttaatagtaacagcacaacagaaacttatatcgcgacaaaagttttcgttgataactggcgttggcaaggagtgcctttttatttgagaactggtaaaagactacctaaaagacttggagaaatagtcttgacttttaaagatgttcctgttcatttatttgaatcaacaataataaatcctgccccaaatcaacttatccttagaattcagccaaatgaaggtgctactttcaaatttgaggtaaaatctcctggttctggaatgaaatcaagacctgttgaaatggaattttcttatgatgaatcatttggagaaccatcagatgaaggctatgtaagattattagctgatgcaatgctttctgacccaacattatttacccgtagtgatgaggtagaggcagcctggaaactttatacgccattaatagaattgatggataattctccttggaagttacctatttataattatgaatctatgacatggggacctcctgagtcagatcaattaatttcaaaagataatattttctggcgtagaccctaa

SEQ ID NO: 23137 - protein, 507 aa, Prochlorococcus marinus str. AS9601
MPSTLSNPLRLGLRQERVISPQSLVIFGASGDLTHRKLIPALFELYLQRRIPSEFGIVGCARRPWTDYEFREKMKVKLSNQISGKEREWEQFSNYLFYEPVDLQESDHVVRLSRRLNEIDKTQATHGNRTFYLSVSPNFYASGCKALKGAGLLDNPKKSRLVIEKPFGRDYSSAKKLNKIVQSCAEESQIYRIDHYLGKETVQNILVLRFANTIFEPIWNRNYISSVQITSSETVGVEDRAGYYESSGALRDMLQNHMTQMLAVTAMEPPGKFEPEAIRNEKAKVLQASKLADENQPWNCCIRGQYGEGGNISNRLKGYRQEDGVNSNSTTETYIATKVFVDNWRWQGVPFYLRTGKRLPKRLGEIVLTFKDVPVHLFESTIINPAPNQLILRIQPNEGATFKFEVKSPGSGMKSRPVEMEFSYDESFGEPSDEGYVRLLADAMLSDPTLFTRSDEVEAAWKLYTPLIELMDNSPWKLPIYNYESMTWGPPESDQLISKDNIFWRRP

SEQ ID NO: 23138 - DNA, 1524 bp, Prochlorococcus marinus str. MIT 9515
  CDS (1)..(1524): transl_table=11
atgctaaaaactataagtaatcctcttagattaggattacgtcaagaaagagtgatatctccacaatgtctaataatctttggtgctagtggagatcttactcataggaaacttatacctgctttatttgaactgtatttacaaagaagaataccaagtgaatttgccatagttggttgtgctagaagaacttggactgatcaagagtttaaggagaaaatgaaagctaaattgggtgatcaaataactggtaatgaaaaagaatgggaacttttttctaattatcttttctatgagccagttgatctacaacaaagtgagcatgttgtaaggctctccaaaagattaaatgaaattgataaatcacaggctactcatggaaacaagaccttctacttatcagtatctccaaacttctacggaagtggctgtaaagcccttaagtctgctggattattggaagaccctaagaaaagtcgaatcgttattgaaaaaccttttggaagagattattcaagtgcaaaaaaactgaataaaattgttcaaagttgtgcagatgaaagtcagatatatcgtatagatcattatttaggaaaagagactgttcagaacatacttgttatgcgctttgctaatactatttttgaacccatatggaatagaaattatatttcaagtattcaaataacatcatcagagacagttggggttgaagatagagctggctattatgaaagctctggggctttaagagatatgctccaaaatcatttaactcaaatgcttgctgttactgcaatggagccaccaggtaaattcgaacctgaggcaataaggaatgaaaaagcgaaagttcttcaagcgtcaaaacttgctgatgagaatcaaccatggaattgctgtataagagggcagtatgcaaaaggaggaaatagtctaaaaagacttaaaggttacagggacgagaatggagtggatttaaatagtacaacagaaacttatatcgccacaaaagtttttattgataattggcgttggcaaggagttcctttttacttaagaacaggtaaaaggctacctaaaagacttggggagattgtattaacatttaaagatgttcctgtacacttgtttgaatcaacaataattaatccatctccaaatcagcttattcttagaattcagccaaatgaaggagctacttttaaatttgaagtcaaatcacccggttcagggatgaaatcaagaccagttgagatggaattttcttacgatgaatcttttggagaaccttctgatgaaggttatgtaagattgttggctgatgctatgctttctgatccaacattattcacaagaagtgatgaggtagaagctgcttggaaactttatacaccactaatagagttaatggagaatgctccttggaagttacctattcacaaatacgaatcaatgacttgggggcctcctgaatcagatcaattactttctaaagataatattttctggcgcagaccctaa

SEQ ID NO: 23139 - protein, 507 aa, Prochlorococcus marinus str. MIT 9515
MLKTISNPLRLGLRQERVISPQCLIIFGASGDLTHRKLIPALFELYLQRRIPSEFAIVGCARRTWTDQEFKEKMKAKLGDQITGNEKEWELFSNYLFYEPVDLQQSEHVVRLSKRLNEIDKSQATHGNKTFYLSVSPNFYGSGCKALKSAGLLEDPKKSRIVIEKPFGRDYSSAKKLNKIVQSCADESQIYRIDHYLGKETVQNILVMRFANTIFEPIWNRNYISSIQITSSETVGVEDRAGYYESSGALRDMLQNHLTQMLAVTAMEPPGKFEPEAIRNEKAKVLQASKLADENQPWNCCIRGQYAKGGNSLKRLKGYRDENGVDLNSTTETYIATKVFIDNWRWQGVPFYLRTGKRLPKRLGEIVLTFKDVPVHLFESTIINPSPNQLILRIQPNEGATFKFEVKSPGSGMKSRPVEMEFSYDESFGEPSDEGYVRLLADAMLSDPTLFTRSDEVEAAWKLYTPLIELMENAPWKLPIHKYESMTWGPPESDQLLSKDNIFWRRP

SEQ ID NO: 23140 - DNA, 1524 bp, Prochlorococcus marinus str. MIT 9301; identical to SEQ ID NO: 17025
  CDS (1)..(1524): transl_table=11

SEQ ID NO: 23141 - protein, 507 aa, Prochlorococcus marinus str. MIT 9301; identical to SEQ ID NO: 17026

SEQ ID NO: 23142 - DNA, 1470 bp, Herminiimonas arsenicoxydans; identical to SEQ ID NO: 17027
  CDS (1)..(1470): transl_table=11

SEQ ID NO: 23143 - protein, 489 aa, Herminiimonas arsenicoxydans; identical to SEQ ID NO: 17028

SEQ ID NO: 23144 - DNA, 1476 bp, Burkholderia vietnamiensis G4
  CDS (1)..(1476): transl_table=11
atgacgaacaagcccaaccagaccgaagccgagcagcccgtcgacatgatcatcttcggcggcggcggcgacctggccgcccgcaaactgctgcccgcgctctacatggcgcatctgcactgcaacctgccgccggacacgcgcatcatcgcggtcggccgccgcgactggggcatcgacggctaccgccagttcatggacgagcagtcgcgcccgttcatcgacgcgaaggcgttcgacgccgatgcctgggcgcgtttcctcgacctcttcaagtacgtgctgatcgacgtgaacgcgccgcaggactacgcgcggctcggcgaagcggcgcgtagcgacgcgatccgcgtgttctacctgtcgacgtcgccggagctgttcacgacgatctgcgacaacctgtcggccgcgcatctggtcgatgcgcgctcgcgcgtcgtcctcgaaaagccgctcggccacgacctcgcatcggcgcaggcgatcaacgatgcggtcggcaagcatttcgcggaatcgcagatctaccggatcgaccattacctcggcaaggagacggtgcagaacctgatggtgctgcgcttcggcaatccgatcttcgggccgctgtggcaggcgccgagcatccgcagcgtgcagatcacggtcgcggaaacggtcggcgtgggcagccgcgcgggcttctacgatcacaccggcgcgctgcgcgacatggtgcagaaccacctgctgcagctgctgtgcatcgtcgcgatggagccgcccgtgtcgctcgacccggacgcggtgcgcgacgagaagctcaaggtgctgcgctcgctgcggccgatggcgctgtcggacgtcgcgcgcgacacggtgcgcggccagtacacggccggcgccgtcgacggccagccggtcaagggctatctcgaggaagacaacgtgccggccgacagccacgccgagacgttcgtggcgctgcgcgcgtatgtgaacaactggcgctgggcgaacgtgccgttcttcctgcgcaccggcaagcggctgcagcgccgccagtcggagatcgtgatcgaattcgcggacatgccgttctcgatcatcccgagcggcccgcgccactacagcaaccgcctcgtgatccagctgcagccggaggaatcgatccagctgcagatgctcgcgaaggaaccgggcagcgggatgaagatggtgcccgtgagcctgaacctcgacctgcagcaggcgattccggaacggcgcgcggaagcatacgagcggctgctgatcgacgtgatccgcggccgcctcacgcacttcatgcgccgcgacgagctcgaagccgcgtggtcgtgggtcgagcccatcctcgacggctggaagcagctcggcgaccgcccgcgcctctatacggccggcacgttcgggccggccgcgtcgtcggcgctgctcgcgcgcgacaacatgtcgtggtccgaagaggcgtaa

SEQ ID NO: 23145 - protein, 491 aa, Burkholderia vietnamiensis G4
MTNKPNQTEAEQPVDMIIFGGGGDLAARKLLPALYMAHLHCNLPPDTRIIAVGRRDWGIDGYRQFMDEQSRPFIDAKAFDADAWARFLDLFKYVLIDVNAPQDYARLGEAARSDAIRVFYLSTSPELFTTICDNLSAAHLVDARSRVVLEKPLGHDLASAQAINDAVGKHFAESQIYRIDHYLGKETVQNLMVLRFGNPIFGPLWQAPSIRSVQITVAETVGVGSRAGFYDHTGALRDMVQNHLLQLLCIVAMEPPVSLDPDAVRDEKLKVLRSLRPMALSDVARDTVRGQYTAGAVDGQPVKGYLEEDNVPADSHAETFVALRAYVNNWRWANVPFFLRTGKRLQRRQSEIVIEFADMPFSIIPSGPRHYSNRLVIQLQPEESIQLQMLAKEPGSGMKMVPVSLNLDLQQAIPERRAEAYERLLIDVIRGRLTHFMRRDELEAAWSWVEPILDGWKQLGDRPRLYTAGTFGPAASSALLARDNMSWSEEA

SEQ ID NO: 23146 - DNA, 1470 bp, Dichelobacter nodosus VCS1703A; identical to SEQ ID NO: 17029
  CDS (1)..(1470): transl_table=11

SEQ ID NO: 23147 - protein, 489 aa, Dichelobacter nodosus VCS1703A; identical to SEQ ID NO: 17030

SEQ ID NO: 23148 - DNA, 1551 bp, Candidatus Protochlamydia amoebophila UWE25; identical to SEQ ID NO: 17031
  CDS (1)..(1551): transl_table=11

SEQ ID NO: 23149 - protein, 516 aa, Candidatus Protochlamydia amoebophila UWE25; identical to SEQ ID NO: 17032

SEQ ID NO: 23150 - DNA, 1476 bp, Listeria monocytogenes str. 4b F2365
  CDS (1)..(1476): transl_table=11
atgacagatgagttagaacaaaaagcactgattactatttttggcggtacgggagatttggcaaatcgcaaactttacccttcgctatatcatttgtacagtaagggatctcttggcgacaattttgctgttattggaacggctcgtcgtgaatggagtaacgatttcttccgtgataaagtaaaagagtctatcaaagacattgacggttccgaaaaagacgcggatgcatttgcttctcacttctactatcaatctcatgatgtgacaaataaagaatcttatgtaactttaaaagatttgtctgatgaattagatgcaaaatacgaattaggtggcaatcgcctcttctatcttgcaatggcgccgaatttctttggaactatcgcaagtcgcattaaatctgaaggatttgtagatacagatggctttcatcgtttaattatcgaaaaaccatttggtcacgatttagctagtgcagaagaattaaataattcgcttcgtcaagcatttaaagaagatgaaatttatcgtattgaccattatttaggaaaagaaatgatccaaaatatctcggttattcgttttgcaaattctatcattgaatcgctttggaataatcgttacatcgataacatccaagttactttaactgaggtgcttggggttgaagatcgtgggcgctattacgatgaaagtggcgcgcttcgagacatggttcaaaaccatattctccaaatcgtttctctacttgcgatggagccaccaattaacttaacgacacgcgagattcgtcatgaaaaagttcgcgcgcttcgttccttacgcgtttttgaaggtaaagaagttcaccaaaactttattcgtggtcagtacggtcctggtgaagtaggtggcaaagaactcaaaggctatcgtcaagaagataatgtggatcctcattccaatacggaaacgtttgttgcagccaaactagaaatcgataacttccgctgggctggcgttccattttatattcgcacgggtaaacgtcttgcgaagaaaacgacccaaattgcgattcagttcaaagatgtaccgctgaatttatttggtcaacaacaatcgcttggtggtaatgtgcttgttattcatatccaaccggacgaaggtattacacttcatttgaacgtcaaagaacctggtcaaggtatggttacaatgccagtcaacttaaattatattcattcctctccagacggcatgaacacacctgaggcttacgaaaaattgattctagactgtcttcgcggtgatgcgacttacttctctcactgggatgaagtatcactatcatggaactttattgaccatatagcagatgtttggacaaatacgaaagatcatttcccgaactacaaatccggttcgatggggcctaaagaagcagacgacctcattcaacgcgacggattccagtggttcccaatcgattaa

SEQ ID NO: 23151 - protein, 491 aa, Listeria monocytogenes str. 4b F2365
MTDELEQKALITIFGGTGDLANRKLYPSLYHLYSKGSLGDNFAVIGTARREWSNDFFRDKVKESIKDIDGSEKDADAFASHFYYQSHDVTNKESYVTLKDLSDELDAKYELGGNRLFYLAMAPNFFGTIASRIKSEGFVDTDGFHRLIIEKPFGHDLASAEELNNSLRQAFKEDEIYRIDHYLGKEMIQNISVIRFANSIIESLWNNRYIDNIQVTLTEVLGVEDRGRYYDESGALRDMVQNHILQIVSLLAMEPPINLTTREIRHEKVRALRSLRVFEGKEVHQNFIRGQYGPGEVGGKELKGYRQEDNVDPHSNTETFVAAKLEIDNFRWAGVPFYIRTGKRLAKKTTQIAIQFKDVPLNLFGQQQSLGGNVLVIHIQPDEGITLHLNVKEPGQGMVTMPVNLNYIHSSPDGMNTPEAYEKLILDCLRGDATYFSHWDEVSLSWNFIDHIADVWTNTKDHFPNYKSGSMGPKEADDLIQRDGFQWFPID

SEQ ID NO: 23152 - DNA, 1476 bp, Bartonella henselae str. Houston-1
  CDS (1)..(1476): transl_table=11
atggtgagtaaaattattccagtctctccctttgactgtattgtgtttggtggcaatggtgatttagcagcacgcaaacttatacctgctttataccattgtcagtgtgttgggcaattgagcgagccaacacgtattattggagtttcgcgctcttctttgagtggtgaagagtatcaaaattttgttcgtgcttctttagaaaaatatgttcatccaaaagatctcaatcgaattgaactcaatcgttttcttgcgcgtttaacctatatttctgttgatattacatcaaatcgagggtggagagatctcgctttaccgctctcagaagatccatctgatattcgagttttttatttagcagttggttcatccctttttggtgatattgcgatgagattgggacaaaatggtttagtaacgcaaaaaacacgaattattattgaaaaacctattggttgtaatgtaaaaacagcggttcagctcaatgatacatttgcaagcgtatttgatgaagatcagatttttcgcattgaccattatctgggcaaggagaccgttcaaaatttgatggcattgcggtttgttaatacactttatgagccgttatggaactccaattatattgatcatgtacagataacggtggctgaatctttaggattggaagggcgtatagaatattatgagagtgcaggtgcactgcgtgatatggtacaaaatcatatgctgcaattgctctgtttggttgctatggaagtaccatttaccaatagtgcgaatgctgtgcgtgatgaaaaactgaaagttttgcattctttaatgcctctcgatgttcgtaatgtagagcaatatactgtacgtgggcagtatctttctggtatattggatgatgtttgtgtaaaatcttatcttgatgatttggggaaagaagttagtaggagcgaaacatttgtggcgcttaaaattaaggttgataattggcggtgggcagatacgcctttttatttgcgaacaggtaaacgcatgtccacgcggatgtctgaaattgttatcgttttcaaacccattccccataatatttttgagacggattcaaatgaaattttttctaatcggctcgtcattcgtctccagcctgatgaaggcgtaaaacaatggttgatgattaaggatccaggtcctggtggtatacgatttcgtcatattccattggatatgagttttgcgtctacattttctcagcgtaatcctgatgcttatgaacgcttattaatggatgttattcgcggagatcaaacactctttatgcgtcgtgatgaagttgaagctgcttggcgttggattgatccaattctagagggatgggaagccataaagcagcctgttcatggttatagcgctggctcatggggaccatctgcttcgaaacttttgatggaacgtgatgggcgtatatggaacaatttggtttag

SEQ ID NO: 23153 - protein, 491 aa, Bartonella henselae str. Houston-1
MVSKIIPVSPFDCIVFGGNGDLAARKLIPALYHCQCVGQLSEPTRIIGVSRSSLSGEEYQNFVRASLEKYVHPKDLNRIELNRFLARLTYISVDITSNRGWRDLALPLSEDPSDIRVFYLAVGSSLFGDIAMRLGQNGLVTQKTRIIIEKPIGCNVKTAVQLNDTFASVFDEDQIFRIDHYLGKETVQNLMALRFVNTLYEPLWNSNYIDHVQITVAESLGLEGRIEYYESAGALRDMVQNHMLQLLCLVAMEVPFTNSANAVRDEKLKVLHSLMPLDVRNVEQYTVRGQYLSGILDDVCVKSYLDDLGKEVSRSETFVALKIKVDNWRWADTPFYLRTGKRMSTRMSEIVIVFKPIPHNIFETDSNEIFSNRLVIRLQPDEGVKQWLMIKDPGPGGIRFRHIPLDMSFASTFSQRNPDAYERLLMDVIRGDQTLFMRRDEVEAAWRWIDPILEGWEAIKQPVHGYSAGSWGPSASKLLMERDGRIWNNLV

SEQ ID NO: 23154 - DNA, 1485 bp, Bacillus thuringiensis serovar konkukian str. 97-27
  CDS (1)..(1485): transl_table=11
ttggaatcaatgacctttgttttatttggagcgacaggggacttagcgaaacgcaaaatttaccccgcactatataacttatatagagatcaaaagcttccaaagcaaatatccgttatcgggcttgggagacgtgaagtatctcatgtagatttccaaaaaagaataaaagaatcaatagagacgttttctcgtcatagagaagaaggtactccagaactcgaagattttttagataattttcgctattgtccattagatgtgagtaagccggaagactatgagagattattacaagtcgttcgtgaaagggaagaagagctacatataaaagggaatagaatgttctatctttctgttgctcctgaattttttgagacaatcgctttaaatattaaggaaagcggacttgataaaacggatggatggaaacgcctaatgattgagaaaccgttcgggcacgatcttacatctgctcgtgagctgaatgataagcttagtcgcacgtttgaagaagacgagatataccgtattgatcattatttaggtaagccgatgattcaaaaccttgaagcactagagtttgcaaatcctgttttacaatcgatttggaataaagaacatatagcgaatgtacaaatcacagcgagtgaaacagttggggttgaagaaagggcaggatattatgatcaggcaggagccattcgagatatggttcaaaatcatatgttacaaatattaatgatgactgctatgaatttgccggaaaaggttaatgcatgtgaaattcgagaggaaaagcgaaaggtaatggaggcgcttcgtaaagtgaaaaaagaagacgttcaaaaccatatcattcgcggacaatatggtgcaggtgagataaatggcgggcaagttgtagcatataaagaggagccaggagtaaatccttcttctaatatagacacatttgttgctgctcgcttgtggatcgataatccattttggactggcgttcccttttatatacgaacaggcaaacgaatgaaagaaaagtctactcgtattgtaatcgaatttaaaaatacgttaaaacagcaatatcaagatagtaatccaaatgcagcacctaacttgttaataattgaaattagcccaggtgagaacgtttcattacagttaaatagtaaaaatccattgaaaaatggagaaattgaaccgatccgtattaactttacttgtgagcaagcggatgtgggagtacctgaagcgtatgaaagactcattcatgatgctgtgagtggagacgctacattctttgcacattggagagaagttgaattgtcatgggaatgggtacaaccaattcttgaagcattcgaggaaaacttattaccacttcatgaatatgagtctggttcacatggtccagaggcatctaatgaattattgcaagaaagtggatttaaatggtggttagatcaagaaacgaaaaaataa

SEQ ID NO: 23155 - protein, 494 aa, Bacillus thuringiensis serovar konkukian str. 97-27
MESMTFVLFGATGDLAKRKIYPALYNLYRDQKLPKQISVIGLGRREVSHVDFQKRIKESIETFSRHREEGTPELEDFLDNFRYCPLDVSKPEDYERLLQVVREREEELHIKGNRMFYLSVAPEFFETIALNIKESGLDKTDGWKRLMIEKPFGHDLTSARELNDKLSRTFEEDEIYRIDHYLGKPMIQNLEALEFANPVLQSIWNKEHIANVQITASETVGVEERAGYYDQAGAIRDMVQNHMLQILMMTAMNLPEKVNACEIREEKRKVMEALRKVKKEDVQNHIIRGQYGAGEINGGQVVAYKEEPGVNPSSNIDTFVAARLWIDNPFWTGVPFYIRTGKRMKEKSTRIVIEFKNTLKQQYQDSNPNAAPNLLIIEISPGENVSLQLNSKNPLKNGEIEPIRINFTCEQADVGVPEAYERLIHDAVSGDATFFAHWREVELSWEWVQPILEAFEENLLPLHEYESGSHGPEASNELLQESGFKWWLDQETKK

SEQ ID NO: 23156 - DNA, 1476 bp, Erwinia carotovora subsp. atroseptica SCRI1043; identical to SEQ ID NO: 17033
  CDS (1)..(1476): transl_table=11

SEQ ID NO: 23157 - protein, 491 aa, Erwinia carotovora subsp. atroseptica SCRI1043; identical to SEQ ID NO: 17034

SEQ ID NO: 23158 - DNA, 1575 bp, Propionibacterium acnes KPA171202
  CDS (1)..(1575): transl_table=11
gtggcaggtcgagacgcatcaggaagcaccaccagagcgatcagcggactgcgtggcgaccgcgtcaacccattgcgggacccctcagaccgcagactgccacgcgtcgccgggccgtgcgttctagtcatgttcggggttaccggtgacctttcacgcaagaaactcatgccagctgtctacgatctggcgaaccgtggcctactcccaccaggttttggcctggtgggtttcgcccgtcgagattgggaggacgaggacttcgccaaggtcgtacacgacgccgtggccgagcatgcccgtacccccttccgcgaggaggtgtgggagcaactactcgaaggcattcggtttgtccgcggcgaattcgacgataacgacgccttcgagagattggctaacacgatccgcgaacttgatgaggaacgaggcactggtggtaatcacgccttctacctgtcgatcccgccgagatcttttgaagcggtcataagccagctcaaacgtcatggcatgaccggccacgactcctctcactggagcagagtcgtcattgagaaacccttcggacacgatctggaaagtgcccgcgatctcgacgagatcatcagcagcgccttcagcccagaatcggtattccgcattgaccactacttgggcaaagagaccgtccagaacatcatggcgtttcggttcgccaaccagattttcgagccgatttggaataaccattacgtttcgcacgtccagatcaccatggcagaggacattggcatcgctggccgggctggttattacgacggtatcggagcctcccgcgatgtcatccagaaccacttactgcaactcatggcactgaccgccatggaggagccgacgagtttcgacgccaagcaattgtgcgcggaaaagattaagatcttagctgcaattcaaccgcctgacaacatgttcgcccaaacctgccgcggccaatacgtggctggtcgccaaggaggcgaaagggtgcgcggctaccttgaggaagacggagtcgatcctcgctcccgcaccgaaacctatgccgctgtgcggctgaccatcgacaatcgacgctgggctggagttccgttctatctacgcactgccaaacgaatgcctcgacgagtcactgaggtcgccttgaatctgcaacgcgccccgcatctacccttctcagataccgcagctctcggcaccaacgccgtcgtactgcgtattcagcctgatgagggagttactctgaaattcggcgccaaagtgcccggcacccagatggaacttcgcgatgtcacgatggacttcgcgtatggatcttccttcaccgaggccagcccggaagcctacgagagactcattcttgatgttctcttgggcgatccgccactgttcccccaacatgaggaggtcgaattggcttggaagatccttgacccggtgctggatttctgggccgagtccaacactcccccgtgcgaatatccggccggtagttggggaccgtcggaggctgacgagatgatcgcccgcgacgagttcgtctggcgcaggccttga

SEQ ID NO: 23159 - protein, 524 aa, Propionibacterium acnes KPA171202
MAGRDASGSTTRAISGLRGDRVNPLRDPSDRRLPRVAGPCVLVMFGVTGDLSRKKLMPAVYDLANRGLLPPGFGLVGFARRDWEDEDFAKVVHDAVAEHARTPFREEVWEQLLEGIRFVRGEFDDNDAFERLANTIRELDEERGTGGNHAFYLSIPPRSFEAVISQLKRHGMTGHDSSHWSRVVIEKPFGHDLESARDLDEIISSAFSPESVFRIDHYLGKETVQNIMAFRFANQIFEPIWNNHYVSHVQITMAEDIGIAGRAGYYDGIGASRDVIQNHLLQLMALTAMEEPTSFDAKQLCAEKIKILAAIQPPDNMFAQTCRGQYVAGRQGGERVRGYLEEDGVDPRSRTETYAAVRLTIDNRRWAGVPFYLRTAKRMPRRVTEVALNLQRAPHLPFSDTAALGTNAVVLRIQPDEGVTLKFGAKVPGTQMELRDVTMDFAYGSSFTEASPEAYERLILDVLLGDPPLFPQHEEVELAWKILDPVLDFWAESNTPPCEYPAGSWGPSEADEMIARDEFVWRRP

SEQ ID NO: 23160 - DNA, 1542 bp, Leifsonia xyli subsp. xyli str. CTCB07; identical to SEQ ID NO: 17035
  CDS (1)..(1542): transl_table=11

SEQ ID NO: 23161 - protein, 513 aa, Leifsonia xyli subsp. xyli str. CTCB07; identical to SEQ ID NO: 17036

SEQ ID NO: 23162 - DNA, 1485 bp, Mannheimia succiniciproducens MBEL55E; identical to SEQ ID NO: 17039
  CDS (1)..(1485): transl_table=11

SEQ ID NO: 23163 - protein, 494 aa, Mannheimia succiniciproducens MBEL55E; identical to SEQ ID NO: 17040

SEQ ID NO: 23164 - DNA, 1485 bp, Methylococcus capsulatus str. Bath
  CDS (1)..(1485): transl_table=11
atgaccctgcagcaacctcctcaggcgctaccgtgccattttgtcattttcggagccacgggcgatctggctgcgctcaagctgcttcccgcgctctatcgcctggatgtcggggggcacttgccggctggcatgtcgatcatcgccctagggcggcggccttggagtgaggccgattggctccagcatctggaggaaagcatccggcggcgtacgggcgaacagttcaacgcccgcgtctatcggcgtttcgcggcacgtttcgcctatgtcgcgggcgacctgcatgatccggccatctatcagaccctgagcgacaggctctgcgccgaccagagctgcgcccacgcagcgttctatttgtctctcaaaccttccgatttcggggaggtcatccagcggctcgagcaggccggattgaaccggccacgcggtctgcatcggatcgtggtggaaaagcccttcggcgaagacatcgacagcgccaggcaactgaaccggttgttgcacgacgccttcgacgaggaacagatttaccggattgatcattatctgggtaaggaaacggtccagaatctcctggtgttccggttcgccaacacgctcatcgagccgctctggaaccgcaattacatcgatcacgtgcagatttccgtggcggaacaggcgggcgtttccactcgtgccgactactacgacaaagccggtgcgctccgtgacatgctgcagaaccatttactgcagttgcttacattggtggccatggagccgccgccggcactggaagccgatgcgctgcgcgacgagaaggtcaaagtgctgcgatcgatccgtcccatcgaagaccaggtgatcaatgcccatgcgttccgggcgcagtacggtcctggctcgattgacggtgtccccgtgccgggctatcaggacgaggccggggtggcgcctcattccatcgccgagaccttcgtcgccgccaagttctatgtcgacaactggcgctggcgcggcgtgcctttctatctgcgcaccggcaagcgactcgcgcagcagctctcgctcgtcgccatccgcttccgccatccgccccagcagttgttccgggagactccgctggaattcatcgagcccaactgggtcttgctttccctgcagccgtcggagagcatgcatatcgagctgcattccaagcagccgggtcttgggatggacacacggatcatccggctcgacgcgtcctatcggcgcggccgggagaaaacgctggaagcttacgaaacgctgctgctggatatcatggaaggcgaccgttcgctgttcctgcgtttcgatgaggtggaatgggcctggcgcgtggtcgatcccatactccggcattggacgcggcagcgcgatttcatccacacctatccggccggctcgtgggggccactggaagccgaccgtttgttcgacaaactcgagcagagctggcgcaaccagttatga

SEQ ID NO: 23165 - protein, 494 aa, Methylococcus capsulatus str. Bath
MTLQQPPQALPCHFVIFGATGDLAALKLLPALYRLDVGGHLPAGMSIIALGRRPWSEADWLQHLEESIRRRTGEQFNARVYRRFAARFAYVAGDLHDPAIYQTLSDRLCADQSCAHAAFYLSLKPSDFGEVIQRLEQAGLNRPRGLHRIVVEKPFGEDIDSARQLNRLLHDAFDEEQIYRIDHYLGKETVQNLLVFRFANTLIEPLWNRNYIDHVQISVAEQAGVSTRADYYDKAGALRDMLQNHLLQLLTLVAMEPPPALEADALRDEKVKVLRSIRPIEDQVINAHAFRAQYGPGSIDGVPVPGYQDEAGVAPHSIAETFVAAKFYVDNWRWRGVPFYLRTGKRLAQQLSLVAIRFRHPPQQLFRETPLEFIEPNWVLLSLQPSESMHIELHSKQPGLGMDTRIIRLDASYRRGREKTLEAYETLLLDIMEGDRSLFLRFDEVEWAWRVVDPILRHWTRQRDFIHTYPAGSWGPLEADRLFDKLEQSWRNQL

SEQ ID NO: 23166 - DNA, 1452 bp, Silicibacter pomeroyi DSS-3; identical to SEQ ID NO: 17043
  CDS (1)..(1452): transl_table=11

SEQ ID NO: 23167 - protein, 483 aa, Silicibacter pomeroyi DSS-3; identical to SEQ ID NO: 17044

SEQ ID NO: 23168 - DNA, 1488 bp, Bacillus clausii KSM-K16; identical to SEQ ID NO: 17045
  CDS (1)..(1488): transl_table=11

SEQ ID NO: 23169 - protein, 495 aa, Bacillus clausii KSM-K16; identical to SEQ ID NO: 17046

SEQ ID NO: 23170 - DNA, 1485 bp, Staphylococcus epidermidis RP62A
  CDS (1)..(1485): transl_table=11
ttgagtactaaacaaaaacacattccctgtttgattacaatattcggtgccacaggagatttgagtcatagaaagctatttccttctatattccatttatatcaacaagacaatttagatgaacatattgctattattggtataggacgtcgcgattataataacgaacaatttcgcgaccaagttaaagcgtcaattcaaacttatgttaaagatacagatagaattgatgagtttatgacgcatgttttttatcataaaactgacgtgagtgataaagaaagttatcagtcattacttcaatttagtgagcgactagattcagaatttgctttaggtgggaatcgtctgttttacttagcgatggcaccacaattttttggagtgatctcagattaccttaaatcttctggtcttactcaaactacaggatttaaacgcttagttatagagaaaccatttggcagtgatcttaaatctgctgaatcattaaataatcaaataagacgttcgtttaaagaagaagaaatttatcggatagatcactatcttggcaaagatatggtgcaaaatatagaagttttgcgattcgcaaacgcgatgtttgaacctttatggaataataaatacatttcaaatattcaagttacatcatcagaagtattaggtgtcgaagatcgtggtggctactatgaatctagtggtgcacttaaagacatggtacaaaatcacatgctacagatggttgctttacttgcaatggaagcaccgataagtttgaatagtgaagatatacgtgcagaaaaagtcaaagtacttaaatctcttagacaattaaaaccagaagaagttaaaaagaatttcgtgcgtggtcaatatgatcaaggcaatatagatggtaaacaggttaagtcatatcgagaagaagatcgcgtagcaaaggattcggttacaccgacatttgtatcgggtaaattaacaattgataactttagatgggctggagttcctttctacattagaacgggtaaacgtatgaaatcaaaaacgatacaagtcgtagtagaatttaaagaagtacctatgaatttatattatgaaactgacaatttactagattctaatttgctagtcattaatattcaaccaaatgaaggaatttcattgcatttaaatgctaaaaagaacattcaaggaattgatactgagccagtgcaattatcatacgcaatgagtgctcaagataaaatgaatacagttgatgcatatgaaaacttattgtttgattgtcttaaaggtgatgcgactaattttacacattgggaagaattaaaatctacttggaaatttgtagatgcaatccaagatcaatggacaatggttgaaccatgtttccctaactatgaagcgggtacgaatggacctcttgaaagtgatcttttattaagtcgtgatggaaatcattggtgggatgatatccactaa

SEQ ID NO: 23171 - protein, 494 aa, Staphylococcus epidermidis RP62A
MSTKQKHIPCLITIFGATGDLSHRKLFPSIFHLYQQDNLDEHIAIIGIGRRDYNNEQFRDQVKASIQTYVKDTDRIDEFMTHVFYHKTDVSDKESYQSLLQFSERLDSEFALGGNRLFYLAMAPQFFGVISDYLKSSGLTQTTGFKRLVIEKPFGSDLKSAESLNNQIRRSFKEEEIYRIDHYLGKDMVQNIEVLRFANAMFEPLWNNKYISNIQVTSSEVLGVEDRGGYYESSGALKDMVQNHMLQMVALLAMEAPISLNSEDIRAEKVKVLKSLRQLKPEEVKKNFVRGQYDQGNIDGKQVKSYREEDRVAKDSVTPTFVSGKLTIDNFRWAGVPFYIRTGKRMKSKTIQVVVEFKEVPMNLYYETDNLLDSNLLVINIQPNEGISLHLNAKKNIQGIDTEPVQLSYAMSAQDKMNTVDAYENLLFDCLKGDATNFTHWEELKSTWKFVDAIQDQWTMVEPCFPNYEAGTNGPLESDLLLSRDGNHWWDDIH

SEQ ID NO: 23172 - DNA, 1446 bp, Neisseria gonorrhoeae FA 1090; identical to SEQ ID NO: 17047
  CDS (1)..(1446): transl_table=11

SEQ ID NO: 23173 - protein, 481 aa, Neisseria gonorrhoeae FA 1090; identical to SEQ ID NO: 17048

SEQ ID NO: 23174 - DNA, 1497 bp, Bacteroides fragilis NCTC 9343; identical to SEQ ID NO: 17049
  CDS (1)..(1497): transl_table=11

SEQ ID NO: 23175 - protein, 498 aa, Bacteroides fragilis NCTC 9343; identical to SEQ ID NO: 17050

SEQ ID NO: 23176 - DNA, 1566 bp, Chlamydophila abortus S26/3; identical to SEQ ID NO: 17051
  CDS (1)..(1566): transl_table=11

SEQ ID NO: 23177 - protein, 521 aa, Chlamydophila abortus S26/3; identical to SEQ ID NO: 17052

SEQ ID NO: 23178 - DNA, 1485 bp, Haemophilus influenzae 86-028NP; identical to SEQ ID NO: 17053
  CDS (1)..(1485): transl_table=11

SEQ ID NO: 23179 - protein, 494 aa, Haemophilus influenzae 86-028NP; identical to SEQ ID NO: 17054

SEQ ID NO: 23180 - DNA, 1470 bp, Pseudomonas fluorescens Pf-5
  CDS (1)..(1470): transl_table=11
atgccttcgataacggttgaaccctgcacctttgccttgtttggcgcgctgggcgatctggcgctgcgtaagctgtttcctgccctgtaccaactcgatgccgccggtttgctgcatgacgacacgcgcatcctggccctggcccgcgagcctggcagcgagcaggaacacctggcgaatatcgaaaccgagctgcacaagtatgtcggcgacaaggatatcgatagccaggtcctgcagcgttttctcgtccgcctgagctacctgcatgtggacttcctcaaggccgaggactacgtcgccctggccgaacgtgtcggcagcgagcagcgcctgattgcctacttcgccacgccggcggcggtgtatggcgcgatctgcgaaaacctctcccgggtcgggctcaaccagcacacccgtgtggtcctggaaaaacccatcggctcggacctggattcatcacgcaaggtcaacgacgcggtggcgcagttcttcccggaaacccgcatctaccggatcgaccactacctgggcaaggaaacggtgcagaacctgattgccctgcgtttcgccaacagcctgttcgaaacccagtggaaccagaactacatctcccacgtggaaatcaccgtggccgagaaggtcggcatcgaaggtcgctggggctatttcgacaaggccggccaactgcgggacatgatccagaaccacttgctgcaactgctctgcctgatcgcgatggacccgccggccgacctttcggccgacagcatccgcgacgagaaggtcaaggtgctcaaggccctggcgcccatcagcccggaaggcctgaccacccaggtggtgcgcggccagtacatcgccggccacagcgaaggccagtcggtgccgggctacctggaggaagaaaactccaacacccagagcgacaccgagaccttcgtcgccctgcgcgccgatatccgcaactggcgctgggccggtgtgcctttctacctgcgcaccggcaagcgcatgccacagaagctgtcgcagatcgtcatccacttcaaggaaccctcgcactacatcttcgcccccgagcagcgcctgcagatcagcaacaagctgatcatccgcctgcagccggacgaaggtatctcgttgcgggtgatgaccaaggagcagggcctggacaagggcatgcaactgcgcagcggtccgttgcagctgaatttttccgatacctatcgcagtgcacggatccccgatgcctacgagcggttgttgctggaagtgatgcgcggcaatcagaacctgtttgtgcgcaaagatgaaatcgaagccgcgtggaagtggtgtgaccagttgattgccgggtggaagaaatccggcgatgcgcccaagccgtacgcggccgggtcctgggggccgatgagctccattgcactgatcacgcgggatgggaggtcttggtatggcgatatctga

SEQ ID NO: 23181 - protein, 489 aa, Pseudomonas fluorescens Pf-5
MPSITVEPCTFALFGALGDLALRKLFPALYQLDAAGLLHDDTRILALAREPGSEQEHLANIETELHKYVGDKDIDSQVLQRFLVRLSYLHVDFLKAEDYVALAERVGSEQRLIAYFATPAAVYGAICENLSRVGLNQHTRVVLEKPIGSDLDSSRKVNDAVAQFFPETRIYRIDHYLGKETVQNLIALRFANSLFETQWNQNYISHVEITVAEKVGIEGRWGYFDKAGQLRDMIQNHLLQLLCLIAMDPPADLSADSIRDEKVKVLKALAPISPEGLTTQVVRGQYIAGHSEGQSVPGYLEEENSNTQSDTETFVALRADIRNWRWAGVPFYLRTGKRMPQKLSQIVIHFKEPSHYIFAPEQRLQISNKLIIRLQPDEGISLRVMTKEQGLDKGMQLRSGPLQLNFSDTYRSARIPDAYERLLLEVMRGNQNLFVRKDEIEAAWKWCDQLIAGWKKSGDAPKPYAAGSWGPMSSIALITRDGRSWYGDI

SEQ ID NO: 23182 - DNA, 1470 bp, Colwellia psychrerythraea 34H; identical to SEQ ID NO: 17055
  CDS (1)..(1470): transl_table=11

SEQ ID NO: 23183 - protein, 489 aa, Colwellia psychrerythraea 34H; identical to SEQ ID NO: 17056

SEQ ID NO: 23184 - DNA, 1464 bp, Dechloromonas aromatica RCB; identical to SEQ ID NO: 17057
  CDS (1)..(1464): transl_table=11

SEQ ID NO: 23185 - protein, 487 aa, Dechloromonas aromatica RCB; identical to SEQ ID NO: 17058

SEQ ID NO: 23186 - DNA, 1605 bp, Thermobifida fusca YX; identical to SEQ ID NO: 17059
  CDS (1)..(1605): transl_table=11

SEQ ID NO: 23187 - protein, 534 aa, Thermobifida fusca YX; identical to SEQ ID NO: 17060

SEQ ID NO: 23188 - DNA, 1524 bp, Prochlorococcus marinus str. NATL2A
  CDS (1)..(1524): transl_table=11
atgagcatgccagtaacaaatccattgagaatagggcttcgccaagagcgagtagtacctcctcaatgtctggttatatttggggcctctggagatctaacacacaggaaactagttcctgctctatttgaactctttaagcaaagaagattaccaagtgagtttgccattttaggctgtgcgagaagaccttggactgatgaaatatttaaagaaaaaatggaagaagctctttcttctcaaataaaagaaagtccaaaagagtgggaattattttctcaaaatcttttttatgagcctgtagatctgcaacaacctgaacacctagtaaaacttggagaaagacttgaaataattgacaagctaaaagcgactcacggtcatcgaactttttacctttcagtatctccaaagttctatggaagtggatgcagagctttagctgcagctggattattgaaagatccaaaacgaagtagggtcgtaatcgaaaaaccctttggaagagatttcaatagcgctcagtcactcaattctctcgttcagggatgtgcccaagaaagtcaaatatttcgaatagatcattatttgggtaaagaaacagttcaaaatattcttgttctccgatttgcaaacacgatctttgaacctatttggaatagaaattatatatcgagtgttcaaattaccagttctgaaacagttggagttgaagatcgagctggatattacgaatcttcaggcgccttaagagatatggttcaaaatcatctaactcaaatgcttgctctaacagcaatggaaccacctgggcattttgatccagaagccataaggaatgaaaaagctaaggttcttcaggcagttaagcttgcgaatgaagaaaagccttgggaatgttgcgttagaggtcaatactcaaagggaggtagcgatgaagaaccactcctaggttacagagatgaaccaggtgttgatccaaacagcacaaccgaaacatatgtagctatgaagcttttcatagataattggagatggcagggggtccctttttatgtaaggactggaaaacgtttagctaaaaggcttagtgaggttgttctcacatttagagaagcacctgttcacctttttgatgctgcaggtgggtgcccaacttcaaaccaattaattcttagaattcaacccaacgaaggggctgaatttagttttgaggttaaatctccagggtcagggatgagaagtagacctgtaaatatggagttttcctatgatgaatcctttggagagccatcagatgaaggttatgtgagactccttgctgatgcaatgctcggagatccaacattgtttactcgaagcgatgaagtagaggctgcttggcgtttatatactcctctacttgaaaagattgaggattctccttgggaattacctatttatccttatgaatcaaggacatgggggccgactgaatcagacttacttattggcaaagatcaacttctatggagaagaccttga

SEQ ID NO: 23189 - protein, 507 aa, Prochlorococcus marinus str. NATL2A
MSMPVTNPLRIGLRQERVVPPQCLVIFGASGDLTHRKLVPALFELFKQRRLPSEFAILGCARRPWTDEIFKEKMEEALSSQIKESPKEWELFSQNLFYEPVDLQQPEHLVKLGERLEIIDKLKATHGHRTFYLSVSPKFYGSGCRALAAAGLLKDPKRSRVVIEKPFGRDFNSAQSLNSLVQGCAQESQIFRIDHYLGKETVQNILVLRFANTIFEPIWNRNYISSVQITSSETVGVEDRAGYYESSGALRDMVQNHLTQMLALTAMEPPGHFDPEAIRNEKAKVLQAVKLANEEKPWECCVRGQYSKGGSDEEPLLGYRDEPGVDPNSTTETYVAMKLFIDNWRWQGVPFYVRTGKRLAKRLSEVVLTFREAPVHLFDAAGGCPTSNQLILRIQPNEGAEFSFEVKSPGSGMRSRPVNMEFSYDESFGEPSDEGYVRLLADAMLGDPTLFTRSDEVEAAWRLYTPLLEKIEDSPWELPIYPYESRTWGPTESDLLIGKDQLLWRRP

SEQ ID NO: 23190 - DNA, 1449 bp, Ralstonia eutropha JMP134
  CDS (1)..(1449): transl_table=11
atgcctgatttcgacatggtgctgttcggcggcaccggcgacctggcccggcgcaagctgttgccgtcgctttatgaagcccaccatgccgggctgctgcacccgcgtgcgcgcattctcgcgacgggcagccagccactgagccaggaagactacattgcgtcgctggagcagggcgtacggccgggcctggcgcatgcgccgcccgagtcatgggccgcgttcctggcccgcatctgctacgtgcaggccgacgcacgcgtgcccgcgcacttcgatgcactcgccgaaaaggtgctgtcgcgccgccccgaagtggtggtgtgctaccttgcaacggcgccacatcttttcgtgccgatctgcgagcaactggcgcgtaccgggctgaacacgccgaatgtccggatcgtgctggaaaagccgctggggcacgatctcgaatcgtccgaagcgatcaacgccgcagtcgcgaaattctttgccgaggaccagatctaccgcatcgatcattacctcggcaaggagtcggtgcagaacctgatggcaatccgcttcggcaacgcgctgttcgagccgctgtggcggcgagagtgggtgcaggatgtgcagatcacgatcgccgaggaactcggcgtcgagacgcgcggggacttctacgatcgcacgggcgccttgcgcgacatggtgcagaaccacctgctgcagctgctgtgcatggtggccatggagcccccgagcagcctgtcggaagacgcgatccgcgacgagaagatcaagatcctcaaggcgctcaagccgattacgccgcaggccgtggccgagaagaccgtgcgcggccagtatcgcgccggcgccatcgggggcaagccggtgccgggctacctcgacgagaaaggcattgccgccgacagccggaccgagacctttgtcgcgatcaaggcggagatcgccaactggcgctgggaaggcgtgccgttctacctgcgcacgggcaagcgcatgcagtcgcgcgtggccgagatcgtggtgcatttccgcgatgtgccgcatgccatctttccgcggccgctgacgctgtcgccgcagaaccggctcgtgatccagctgcagcccgaggaaagcatccgcttgtacttcctggtcaagcagcctggcgacacgctggaactgacgcccacctcgctcgacctggacttcgccaactcgttcaaggtgcgccgcgcgggcgcctatgaacggctgctgctcgacgtgatccgcggcaggctgggcctgttcgtgcggcgtgacgagcaggtgcaggcgtggcgctgggtcgagccgattctcgacacatgggaagaaagcaacgtgccgcccaagccgtataccgcgggcacgtggggtccggcggcgtcgtcggcgctgatgtcgcgcgacgactcgctgtggcacgaggaagcctga

SEQ ID NO: 23191 - protein, 482 aa, Ralstonia eutropha JMP134
MPDFDMVLFGGTGDLARRKLLPSLYEAHHAGLLHPRARILATGSQPLSQEDYIASLEQGVRPGLAHAPPESWAAFLARICYVQADARVPAHFDALAEKVLSRRPEVVVCYLATAPHLFVPICEQLARTGLNTPNVRIVLEKPLGHDLESSEAINAAVAKFFAEDQIYRIDHYLGKESVQNLMAIRFGNALFEPLWRREWVQDVQITIAEELGVETRGDFYDRTGALRDMVQNHLLQLLCMVAMEPPSSLSEDAIRDEKIKILKALKPITPQAVAEKTVRGQYRAGAIGGKPVPGYLDEKGIAADSRTETFVAIKAEIANWRWEGVPFYLRTGKRMQSRVAEIVVHFRDVPHAIFPRPLTLSPQNRLVIQLQPEESIRLYFLVKQPGDTLELTPTSLDLDFANSFKVRRAGAYERLLLDVIRGRLGLFVRRDEQVQAWRWVEPILDTWEESNVPPKPYTAGTWGPAASSALMSRDDSLWHEEA

SEQ ID NO: 23192 - DNA, 1530 bp, Anabaena variabilis ATCC 29413; identical to SEQ ID NO: 17065
  CDS (1)..(1530): transl_table=11

SEQ ID NO: 23193 - protein, 509 aa, Anabaena variabilis ATCC 29413; identical to SEQ ID NO: 17066

SEQ ID NO: 23194 - DNA, 1452 bp, Rhodobacter sphaeroides 2.4.1; identical to SEQ ID NO: 17067
  CDS (1)..(1452): transl_table=11

SEQ ID NO: 23195 - protein, 483 aa, Rhodobacter sphaeroides 2.4.1; identical to SEQ ID NO: 17068

SEQ ID NO: 23196 - DNA, 1476 bp, Burkholderia sp. 383; identical to SEQ ID NO: 17069
  CDS (1)..(1476): transl_table=11

SEQ ID NO: 23197 - protein, 491 aa, Burkholderia sp. 383; identical to SEQ ID NO: 17070

SEQ ID NO: 23198 - DNA, 1539 bp, Geobacter metallireducens GS-15; identical to SEQ ID NO: 17071
  CDS (1)..(1539): transl_table=11

SEQ ID NO: 23199 - protein, 512 aa, Geobacter metallireducens GS-15; identical to SEQ ID NO: 17072

SEQ ID NO: 23200 - DNA, 1542 bp, Desulfovibrio desulfuricans G20; identical to SEQ ID NO: 17073
  CDS (1)..(1542): transl_table=11

SEQ ID NO: 23201 - protein, 513 aa, Desulfovibrio desulfuricans G20; identical to SEQ ID NO: 17074

SEQ ID NO: 23202 - DNA, 1515 bp, Moorella thermoacetica ATCC 39073; identical to SEQ ID NO: 17077
  CDS (1)..(1515): transl_table=11

SEQ ID NO: 23203 - protein, 504 aa, Moorella thermoacetica ATCC 39073; identical to SEQ ID NO: 17078

SEQ ID NO: 23204 - DNA, 1533 bp, Frankia sp. CcI3; identical to SEQ ID NO: 17079
  CDS (1)..(1533): transl_table=11

SEQ ID NO: 23205 - protein, 510 aa, Frankia sp. CcI3; identical to SEQ ID NO: 17080

SEQ ID NO: 23206 - DNA, 1449 bp, Novosphingobium aromaticivorans DSM 12444
  CDS (1)..(1449): transl_table=11
atgatcgagtccagctgttccgcactgctgctgttcggcgcgaccggcgacctttcccgccggatgcttctgccttcgctctacgcccttcacgaagacggcctgatccggccggacctgcgcatcgtgggcacggcccggtccgagcatgacgacgccgagttccgcgaattcgcccgcgaggcgcttgccgaattcctgcccgaggaccggcgggacgaggaaaagctcgcgagtttcctcgaacggctcgaataccagaccctcgatgcctcgaatgtcgatggcttcggcgaactggcccgcaagctgggcgacacctcgtgcggcctctcgattttcctgtccaccgcgccgttcctgttcgaaccgacgatcgaaggcctgcgccgggcgggcttggcccatgagaacgtgcggatcggccttgaaaagccgctcgggaacgaccttgcatcgtccacccgtatcaacgatgcggttgccgccgcctttgccgaggaacagatcttccggatcgaccattaccttggcaaggaaacggtccagaacctcatggcactgcgctttgccaacatgatgttcgagccgttgtggaacgcaggcggtatcgaccatgtgcagatcacggttagcgagacggtcggcctcgaagggcgcaagggcttctacgacgacaccggcgcactgcgcgacatggtgcagaaccacatgctccagttgctcgccctgaccgcaatggagccgccggcaagcctcgacgccacgtcgatccgcgacgaaaaggtcaaggtcctgcgcgcgcttcgcccggtcaaggcggaggaaatggtgcggggccagtaccgcgccggggcggtgaagggcacgtcggtcaccggataccaggaagaccttggcgaagtgtccgacacggagaccttcgtggcgatcaaggcccatgtcgacaactggcgttggaccggcgtgccgttctacctgcgcaccggcaagcgacttggcgagcggcgcagcgagatcgtggtcgagttcaagcctgttccgcacaacctctttgccgagcgcgggggaaggcttcgccccaaccgcctcgtcatccgcctccagcccgaggaatatgtgcggctgcaggtgatggcgaaggagccggggctcgaccgtggcggtattgtgctgcgcgacgtcaatctcgacctttcgttgaccgcagccttcgccaaggcgcgccgccgcattgcctacgaacgcctgctgctcgacctgatcgagggcgaacagaccttgttcgtccggcgagacgaagtggaagcgcagtggaagtgggtcgacgccatccgcaaggtctgggccgacaccgacatggaagccaagccctatgccgcaggaagctgggggccgaacgcaggcatcgcccttaccgagcgggacgggagaagctggaatgactga

SEQ ID NO: 23207 - protein, 482 aa, Novosphingobium aromaticivorans DSM 12444
MIESSCSALLLFGATGDLSRRMLLPSLYALHEDGLIRPDLRIVGTARSEHDDAEFREFAREALAEFLPEDRRDEEKLASFLERLEYQTLDASNVDGFGELARKLGDTSCGLSIFLSTAPFLFEPTIEGLRRAGLAHENVRIGLEKPLGNDLASSTRINDAVAAAFAEEQIFRIDHYLGKETVQNLMALRFANMMFEPLWNAGGIDHVQITVSETVGLEGRKGFYDDTGALRDMVQNHMLQLLALTAMEPPASLDATSIRDEKVKVLRALRPVKAEEMVRGQYRAGAVKGTSVTGYQEDLGEVSDTETFVAIKAHVDNWRWTGVPFYLRTGKRLGERRSEIVVEFKPVPHNLFAERGGRLRPNRLVIRLQPEEYVRLQVMAKEPGLDRGGIVLRDVNLDLSLTAAFAKARRRIAYERLLLDLIEGEQTLFVRRDEVEAQWKWVDAIRKVWADTDMEAKPYAAGSWGPNAGIALTERDGRSWND

SEQ ID NO: 23208 - DNA, 1476 bp, Saccharophagus degradans 2-40; identical to SEQ ID NO: 17081
  CDS (1)..(1476): transl_table=11

SEQ ID NO: 23209 - protein, 491 aa, Saccharophagus degradans 2-40; identical to SEQ ID NO: 17082

SEQ ID NO: 23210 - DNA, 1488 bp, Burkholderia xenovorans LB400; identical to SEQ ID NO: 17083
  CDS (1)..(1488): transl_table=11

SEQ ID NO: 23211 - protein, 495 aa, Burkholderia xenovorans LB400; identical to SEQ ID NO: 17084

SEQ ID NO: 23212 - DNA, 1545 bp, Acidobacteria bacterium Ellin345; identical to SEQ ID NO: 17085
  CDS (1)..(1545): transl_table=11

SEQ ID NO: 23213 - protein, 514 aa, Acidobacteria bacterium Ellin345; identical to SEQ ID NO: 17086

SEQ ID NO: 23214 - DNA, 1545 bp, Myxococcus xanthus DK 1622; identical to SEQ ID NO: 17089
  CDS (1)..(1545): transl_table=11

SEQ ID NO: 23215 - protein, 514 aa, Myxococcus xanthus DK 1622; identical to SEQ ID NO: 17090

SEQ ID NO: 23216 - DNA, 1572 bp, Mycobacterium sp. MCS; identical to SEQ ID NO: 17091
  CDS (1)..(1572): transl_table=11

SEQ ID NO: 23217 - protein, 523 aa, Mycobacterium sp. MCS; identical to SEQ ID NO: 17092

SEQ ID NO: 23218 - DNA, 1533 bp, Rubrobacter xylanophilus DSM 9941; identical to SEQ ID NO: 17093
  CDS (1)..(1533): transl_table=11

SEQ ID NO: 23219 - protein, 510 aa, Rubrobacter xylanophilus DSM 9941; identical to SEQ ID NO: 17094

SEQ ID NO: 23220 - DNA, 1473 bp, Mesorhizobium sp. BNC1; identical to SEQ ID NO: 17095
  CDS (1)..(1473): transl_table=11

SEQ ID NO: 23221 - protein, 490 aa, Mesorhizobium sp. BNC1; identical to SEQ ID NO: 17096

SEQ ID NO: 23222 - DNA, 1479 bp, Rhodococcus sp. RHA1; identical to SEQ ID NO: 17097
  CDS (1)..(1479): transl_table=11

SEQ ID NO: 23223 - protein, 492 aa, Rhodococcus sp. RHA1; identical to SEQ ID NO: 17098

SEQ ID NO: 23224 - DNA, 1491 bp, Haemophilus somnus 129PT
  CDS (1)..(1491): transl_table=11
atgaacgtaaatgcagaaaataattgtattgttatttttggagcttcgggagatttaactcaccgaaaattaatccccgcactttataatttatacaaaataggacgtttgacagaaaatttctctgtgttaggtgtttcccgaactgacttaagcgatgaagaatttcgtgaaaaaatgcgtaatgcgttgagaaaaacagaagatataacagaagaacatttggaaaaattttgttctcatctttattatcaggcgattgatacctcgaatgcttctgattatggaaaacttgttcctcgtttagatgagctacatgatacatatcagaccggaggcaatactctttattatatgtccacaccgccaagcctttacggtgtgattcctgaatgccttgccacacacggactaaatacggaagaatgcggttggaaacgtcttattgtagaaaaaccttttggttatgacataaaaaccgcaaaagaacttgatgtgcaaattcatcgtttttttgaagaacatcaaatttatcgtattgaccattatttgggtaaagaaactgttcaaaaccttctcgtattacgtttttccaacggcttatttgaaccgctatggaaccgcaactttattgactatgtagaaattacaggtgctgaagaaatcggtgttgaagaacgtggcggatactataatgattctggtgcaatgcgtgatatgttccaaaaccacttattacaagttttagccatggtagcaatggagccccctgctattattaatgctgattctatgcgtgacgaagtagcaaaagtgttacattgcttacacccgctcagcgaagacgatataaaaaacaatcttgttttaggtcaatacacatcttcaactatagatggtgaagtggtgaatggttatttacaagaaaaaggtgttccagcagactccaatacagaaacctacattgctttacgttgcgaaattgataactggcgttgggctggtgtgccattctatgtgcgtagcggtaaacggttaccaactcgtgttacggaaattgtcatacactttaaaacaacgccccatccagtcttcagtcaaaatgcaccagaaaataaattaattatccgaattcagcctgatgaagggatttcaatgcgtttcggcttgaaaaaaccgggtgctggctttgaagcaaaagaagtgtcaatggatttccgctatgctgatttagcaacaccaagcctactaagtgcctatgatcgtttattattagatgccataaaaggcgatgcgacactttttgcacggacagatgcagtacatgcctgctggaaatttgtacaacccatcttgaattataaaaaagatcaagggcgtgtttacgaatatgaagccggaacgtggggaccgacagaagcggataaattaattgctaaaacggggagagtatggcgtaaacctagtggaatgatgaagaaaaaagtctaa

SEQ ID NO: 23225 - protein, 496 aa, Haemophilus somnus 129PT
MNVNAENNCIVIFGASGDLTHRKLIPALYNLYKIGRLTENFSVLGVSRTDLSDEEFREKMRNALRKTEDITEEHLEKFCSHLYYQAIDTSNASDYGKLVPRLDELHDTYQTGGNTLYYMSTPPSLYGVIPECLATHGLNTEECGWKRLIVEKPFGYDIKTAKELDVQIHRFFEEHQIYRIDHYLGKETVQNLLVLRFSNGLFEPLWNRNFIDYVEITGAEEIGVEERGGYYNDSGAMRDMFQNHLLQVLAMVAMEPPAIINADSMRDEVAKVLHCLHPLSEDDIKNNLVLGQYTSSTIDGEVVNGYLQEKGVPADSNTETYIALRCEIDNWRWAGVPFYVRSGKRLPTRVTEIVIHFKTTPHPVFSQNAPENKLIIRIQPDEGISMRFGLKKPGAGFEAKEVSMDFRYADLATPSLLSAYDRLLLDAIKGDATLFARTDAVHACWKFVQPILNYKKDQGRVYEYEAGTWGPTEADKLIAKTGRVWRKPSGMMKKKV

SEQ ID NO: 23226 - DNA, 1530 bp, Trichodesmium erythraeum IMS101; identical to SEQ ID NO: 17101
  CDS (1)..(1530): transl_table=11

SEQ ID NO: 23227 - protein, 509 aa, Trichodesmium erythraeum IMS101; identical to SEQ ID NO: 17102

SEQ ID NO: 23228 - DNA, 1470 bp, Hyphomonas neptunium ATCC 15444
  CDS (1)..(1470): transl_table=11
gtggcaaagttcgttcctgttgaagccttcgacatcgtcatctttggcggcacgggcgatctgtcccgccgcaagctgcttcctgcgctctatcaccgctgggtggatggccagattccggaaaactcgacgatcgtcggaacggctcgctccgagctggatgcgcaggcttatcgggaccttgcgcgggaagcttgcgagaaagcctcaggcaaatcgtgggacgctgacgcttgggagaagtttgctcagatcctccattatgtcgcgatcgatgcgaccgatccggaaggggattgggaggggctcaaggccaggctgaaggcagaagatggccgtccacggatattctatctggcaacgtcgcctcacctttatgtcgatatctcccgcgcgctgggaaaggtcggccttgtggacggcatgtgcagggtcgtgctggaaaagcccatcggtacggaccttgcatccgcgcaggcgatcaatgacggcgtcggcgaggtgttcaccgaacggcaggtattccgtattgaccactatctgggcaaggaaaccgtccagaacctgatggttttgcgctttgccaatatcctgttcgaaccgctctggtcgcagaattatatcgatcacgttcagatcactgtcgctgaagatctcggccttgaagggcgggccgactattacgaccggtccggcgcgctgcgcgacatggtccagaaccacctgttgcagctcctgtgcctcacggcgatggagccccccaacgacatggatgacgacgatatacgcacagaaaagatcaaggttctgaaggccctgcggccggtatcgtctcaggatgcaaagcggctgaccgtgcgcgggcaatacgcggcaggcatgcatgcgggcaaaccggctaaaggctatgtcgaggagctctccgaaaccgggggcagcaagaccgaaacatttgtggccatcaaggcagagatcaacaactggcgctggacgggcgtgccattctatctgcgcaccggaaaacgcatgtcgtcgcgccattccgacatcgtgatccagttcaagcaggcgccccacaatctgttcggtgagcaatcgggaaatgtaaaccagcttgtaatccgtctgcagccggatgaagcggttcgcctgtatgttcagatcaaggaacccggccctggtggcctgcgcgtcaaatcgctcccactcaacctttcctatgcggaaagtttcaccctacgctatcccgacgcctatgagcggctgttgatggatgtcgttcgcggaaacctttccctgttcatgcgccgggacgaggttgaggccgcctggcgctgggttgatggcctgatcgatgcgtgggacaccagcggctatcagcctgaagcctatccggcgggtacggatggcccgatgtcggccgcgatgctgatggaccgtgacaatcgtagttggtggaaagaaagctga

SEQ ID NO: 23229 - protein, 489 aa, Hyphomonas neptunium ATCC 15444
MAKFVPVEAFDIVIFGGTGDLSRRKLLPALYHRWVDGQIPENSTIVGTARSELDAQAYRDLAREACEKASGKSWDADAWEKFAQILHYVAIDATDPEGDWEGLKARLKAEDGRPRIFYLATSPHLYVDISRALGKVGLVDGMCRVVLEKPIGTDLASAQAINDGVGEVFTERQVFRIDHYLGKETVQNLMVLRFANILFEPLWSQNYIDHVQITVAEDLGLEGRADYYDRSGALRDMVQNHLLQLLCLTAMEPPNDMDDDDIRTEKIKVLKALRPVSSQDAKRLTVRGQYAAGMHAGKPAKGYVEELSETGGSKTETFVAIKAEINNWRWTGVPFYLRTGKRMSSRHSDIVIQFKQAPHNLFGEQSGNVNQLVIRLQPDEAVRLYVQIKEPGPGGLRVKSLPLNLSYAESFTLRYPDAYERLLMDVVRGNLSLFMRRDEVEAAWRWVDGLIDAWDTSGYQPEAYPAGTDGPMSAAMLMDRDNRSWWKES

SEQ ID NO: 23230 - DNA, 1476 bp, Rhizobium leguminosarum bv. viciae 3841; identical to SEQ ID NO: 17107
  CDS (1)..(1476): transl_table=11

SEQ ID NO: 23231 - protein, 491 aa, Rhizobium leguminosarum bv. viciae 3841; identical to SEQ ID NO: 17108

SEQ ID NO: 23232 - DNA, 1467 bp, Pseudomonas aeruginosa UCBPP-PA14; identical to SEQ ID NO: 17109
  CDS (1)..(1467): transl_table=11

SEQ ID NO: 23233 - protein, 488 aa, Pseudomonas aeruginosa UCBPP-PA14; identical to SEQ ID NO: 17110

SEQ ID NO: 23234 - DNA, 1488 bp, Pediococcus pentosaceus ATCC 25745; identical to SEQ ID NO: 17111
  CDS (1)..(1488): transl_table=11

SEQ ID NO: 23235 - protein, 495 aa, Pediococcus pentosaceus ATCC 25745; identical to SEQ ID NO: 17112

SEQ ID NO: 23236 - DNA, 1473 bp, Oenococcus oeni PSU-1
  CDS (1)..(1473): transl_table=11
atggataataaacctactgaattaccattagttttgctgctttttggtggcacaggagatcttgcaaaacgcaagttatatccttcactgtttaatttatttaaaaaaggttatctgcaaaaacacttcgctgtgattgggactgctcgtcatcccttggacgacgaaaaattccaagaagtcgtccgccaatcaattgctaaaaatggaaccgaaggacaagttaaagaattcgctgcccacttccgttacagcagccatgacgttaccgacttaaaagattatggcaaattgaaaaatatgctggccaaacttgataaagagtttgatgccggcggtaaccggatcttttatatgtctgttgctcctcgtttctttggccaaatcgctcaagccatcaaatccgagggtctgatgtcggataccggttataaccgattaatggtcgaaaaaccttttggaacaagttataagacggccgaagaactacaaaatcaacttgaatcaggtttttccgatgaccaaattttccgaattgatcattaccttggtaaagaaatggtgcaaaatattcctgctgttcgtttcggtaatccgatcttagacgccacttggaacaaaaactacatcaaaaacgtccaagtaactttagcagaacagctcggagttgaggaacgtgctggatattacaacaccgccggggctctgcttgatatgattcaaaaccacgccttccaaatcgttggttggctggcaatggaaaaaccaagttcattttccgatacggatattcgagcagctaaaaatactgttttctcaaaactgaaaatgtatgacgaacgagaggttgtcgcaaactttgttcgtggacaatatggtcgaggaagagaagtttggcaaaagtcatatacggaagaacccaatgttccagcagattcaaagaacgatacttatgttgctggtcgtcttcaatttgaaaatgatcgttggaccggtgttcctttttacatcagaaccggaaagcgattagctgccaagcaaacgcgagtcgatattgtttataaaaaatcttcatttgattttggaaaattcaatcaagacaaactatccgaaccggttttgagtatcttaatcgatccggttgggggaattaatttctccttgaatggcaaaaatgttacaaccgaatttgaaacacgttccgatttgttaaaatggtcaatttccgatcaagacaaggttaagacaccggatccatacgaaagaatgcttcacgatgcgatgaatggcgatggatccaacttcgctgattggaatggcgtttctatctcctggaaatttgtcgatcaaattgccaaggtttgggctgaagacaaggctcctttggaaatttacgaatctgccacaatgggttcagttgccagtgatcgtttgttggctgagactggagatcgttggatttaccgcggataa

SEQ ID NO: 23237 - protein, 490 aa, Oenococcus oeni PSU-1
MDNKPTELPLVLLLFGGTGDLAKRKLYPSLFNLFKKGYLQKHFAVIGTARHPLDDEKFQEVVRQSIAKNGTEGQVKEFAAHFRYSSHDVTDLKDYGKLKNMLAKLDKEFDAGGNRIFYMSVAPRFFGQIAQAIKSEGLMSDTGYNRLMVEKPFGTSYKTAEELQNQLESGFSDDQIFRIDHYLGKEMVQNIPAVRFGNPILDATWNKNYIKNVQVTLAEQLGVEERAGYYNTAGALLDMIQNHAFQIVGWLAMEKPSSFSDTDIRAAKNTVFSKLKMYDEREVVANFVRGQYGRGREVWQKSYTEEPNVPADSKNDTYVAGRLQFENDRWTGVPFYIRTGKRLAAKQTRVDIVYKKSSFDFGKFNQDKLSEPVLSILIDPVGGINFSLNGKNVTTEFETRSDLLKWSISDQDKVKTPDPYERMLHDAMNGDGSNFADWNGVSISWKFVDQIAKVWAEDKAPLEIYESATMGSVASDRLLAETGDRWIYRG

SEQ ID NO: 23238 - DNA, 1545 bp, Solibacter usitatus Ellin6076; identical to SEQ ID NO: 17113
  CDS (1)..(1545): transl_table=11

SEQ ID NO: 23239 - protein, 514 aa, Solibacter usitatus Ellin6076; identical to SEQ ID NO: 17114

SEQ ID NO: 23240 - DNA, 1551 bp, Mycobacterium smegmatis str. MC2 155
  CDS (1)..(1551): transl_table=11
atgacagcggtcaacgaccggccggacaccacctggcacaacccccttcgcgacaaacgcgacaaacgcatgccccgcatcgcggggccatgcggggtggtgatcttcggtgtcacaggcgacctcgcgcgcaagaagctgatgccggccatctacgacctcgccaaccggggtctgctgccggcatccttcgcgctcgtcggcttcgcccggcgtgactgggaggacgaggacttcggtcaggtcgtctacgacgccgtgcgccagcacgccagaactccgttccgccaggaggtctgggaccgcctggccgagggcatccggttcgttcagggcacgttcgacgacgacaccgcgttcacgcgtctggccgagaccctcgacaagctcgacatcgagcgcggcacgggcggcaatcacgcgttctacctgtcgattccgccgaacgccttcccggtggtgtgcgagcagttgcgcaaatcgggcctggccaagccgcgcgacggccggtggagccgtgtggtcatcgagaagccgttcggccacgacctcggcagcgcacgcgagctcaactcggtggtcaacagcgtgttcccggaggagtcggtgttccgcatcgaccactacctgggcaaggagaccgtccagaacatcctggcgctgcgcttcgccaacgcgctctacgagccgatctggaacaacaactacgtcgaccacgtgcagatcaccatggccgaggacatcggcctcgggggccgggccggctactacgacggcatcggcgccgcgcgcgacgtgatccagaaccacctgctgcagttgctggcgctcaccgcactggaggagccggtcagcttcagcccgcacgagttgcagaccgagaagatcaagatcctctcggcggtgaaactcgccgagccgctcgatgagaccacggcgcggggccagtacgccgcgggctggcagggcggcgagaaggtcgtcggcctgctcgacgaggagggcttcgccaaggactcgaccaccgagacctacgcggccatcaccctcgaggtcaacaccaggcgctgggcgggcgtgccgttctacctgcgcaccggaaaacgcctgggccgcagggtcaccgagatcgcgctggtgttcaagcgggctccgcacctgccgttcgacgcgaccatgaccgaggaactcggccagaacgcgctggtgatccgcgtgcagcccgacgagggcatcacgctgcgcttcggctcgaaggtccccggcagtgccatggaggtccgtgacgtcaacatggacttctcgtacggttcggcgttcgccgaggattcccccgaggcctacgagcgcctgatcctcgacgtgctgctcggcgaaccgtcgttgttcccggtgaacgaagaagtcgaattgtcctgggagatcctggatccggtgctcgaatactgggcacagcacggcaagcccgaaccgtacgagtccggaacgtgggggccgccgtccgccgacgcgatgctgcggcgcacgggccgggaatggagacgtccgtga

SEQ ID NO: 23241 - protein, 516 aa, Mycobacterium smegmatis str. MC2 155
MTAVNDRPDTTWHNPLRDKRDKRMPRIAGPCGVVIFGVTGDLARKKLMPAIYDLANRGLLPASFALVGFARRDWEDEDFGQVVYDAVRQHARTPFRQEVWDRLAEGIRFVQGTFDDDTAFTRLAETLDKLDIERGTGGNHAFYLSIPPNAFPVVCEQLRKSGLAKPRDGRWSRVVIEKPFGHDLGSARELNSVVNSVFPEESVFRIDHYLGKETVQNILALRFANALYEPIWNNNYVDHVQITMAEDIGLGGRAGYYDGIGAARDVIQNHLLQLLALTALEEPVSFSPHELQTEKIKILSAVKLAEPLDETTARGQYAAGWQGGEKVVGLLDEEGFAKDSTTETYAAITLEVNTRRWAGVPFYLRTGKRLGRRVTEIALVFKRAPHLPFDATMTEELGQNALVIRVQPDEGITLRFGSKVPGSAMEVRDVNMDFSYGSAFAEDSPEAYERLILDVLLGEPSLFPVNEEVELSWEILDPVLEYWAQHGKPEPYESGTWGPPSADAMLRRTGREWRRP

SEQ ID NO: 23242 - DNA, 1551 bp, Nocardioides sp. JS614; identical to SEQ ID NO: 17119
  CDS (1)..(1551): transl_table=11

SEQ ID NO: 23243 - protein, 516 aa, Nocardioides sp. JS614; identical to SEQ ID NO: 17120

SEQ ID NO: 23244 - DNA, 1446 bp, Neisseria meningitidis FAM18
  CDS (1)..(1446): transl_table=11
atgagtacacaaacaaattttgatttggtgttgttcggtgcgaccggcgatttggcgatgcgcaagctgttgccctgtctgtaccaggcgcatgttgccggtctgcttcatcccgaagggcgtattttaggggtcagccgcagcgagttggataccgaaggttttctggcgaaggtggaaaccagttccaaaatccatgtgaaagaaaatttttccgatgaggcttgggcatcgtttgtcgaacgtctcgcatatctcaaagtcgatgttacgcagccggacgattttgccgctttgggcgatttggtcaaagcgcgcaaagaaaccgacaatgtcgtcatctatctttccaccgcgccgaaattcttcgcgcaaacatgtgaaaaccttgccaaaatcggtttgaacgccgacaacgtgcgtgtggttttggaaaaaccgttgggtacggatttggcttcttcccagcaaatcaataccgatgttgcgcgttatttcaaagaagggcaaatttaccgcatcgaccactaccttggcaaagaaagcctgcaaaacctgcttgcgctgcgttttgccaatgtaatgttcgagccgctgtggaacaataaatacatcgaaagcgtgcagttgaccatcgccgagcagttgggcgtggaagagcgcggcgagttttacgacattaccggcgcgttgcgcgatatggtgcaaaaccatttgatgcagatgctgtgcatgactgcgatggaagcccccgccagcttggatgccgacgcggtgcgcgatgaaaaagtcaaagtcatcaagtcattgaagccgctgaccgtcgagtctgtcaatgaaaacgtcgtgcgcggacaatataccgccgccagaggcatgaacggctatcttgaagaaatcaacgttccgcaagacagctttaccgaaacctacgtcgccattaaagccgaaatcgaaaacgaacgctggaagggcgttcccttctacctgcgtaccggcaaacgcatggcgggcaaagtggcggaaatcgttttgaacttcaaagatttgaacagccatatttttgaaggcagccgcaccgcgcccaaccggctcgttatcgagttgcaaccatatgaatccgtgcgcctctatacgcagatgaaaaccccgggggcaggaaataaggtcgaaaccgtgccgctggcaaccgatttgggcaaagcattggaaagccgccgcgcggaagcttacgagcgcctgctgctggatgtgattaacggcaaactcgctttgtttaaccgccgcgacgaactcgaagccgcgtgggaatatgtgatgccgattttggaaaactggacaaataacaccacgccgccgcacggctacggcgcacactcgtgggggcctgaagccgcgcgcgaactattggcgcgcgacggacacaagtggcacgaagagcagtaa

SEQ ID NO: 23245 - protein, 481 aa, Neisseria meningitidis FAM18
MSTQTNFDLVLFGATGDLAMRKLLPCLYQAHVAGLLHPEGRILGVSRSELDTEGFLAKVETSSKIHVKENFSDEAWASFVERLAYLKVDVTQPDDFAALGDLVKARKETDNVVIYLSTAPKFFAQTCENLAKIGLNADNVRVVLEKPLGTDLASSQQINTDVARYFKEGQIYRIDHYLGKESLQNLLALRFANVMFEPLWNNKYIESVQLTIAEQLGVEERGEFYDITGALRDMVQNHLMQMLCMTAMEAPASLDADAVRDEKVKVIKSLKPLTVESVNENVVRGQYTAARGMNGYLEEINVPQDSFTETYVAIKAEIENERWKGVPFYLRTGKRMAGKVAEIVLNFKDLNSHIFEGSRTAPNRLVIELQPYESVRLYTQMKTPGAGNKVETVPLATDLGKALESRRAEAYERLLLDVINGKLALFNRRDELEAAWEYVMPILENWTNNTTPPHGYGAHSWGPEAARELLARDGHKWHEEQ

SEQ ID NO: 23246 - DNA, 1476 bp, Acidovorax sp. JS42; identical to SEQ ID NO: 17121
  CDS (1)..(1476): transl_table=11

SEQ ID NO: 23247 - protein, 491 aa, Acidovorax sp. JS42; identical to SEQ ID NO: 17122

SEQ ID NO: 23248 - DNA, 1539 bp, Bifidobacterium longum DJO10A; identical to SEQ ID NO: 17123
  CDS (1)..(1539): transl_table=11

SEQ ID NO: 23249 - protein, 512 aa, Bifidobacterium longum DJO10A; identical to SEQ ID NO: 17124

SEQ ID NO: 23250 - DNA, 1563 bp, Haemophilus somnus 2336; identical to SEQ ID NO: 17125
  CDS (1)..(1563): transl_table=11

SEQ ID NO: 23251 - protein, 520 aa, Haemophilus somnus 2336; identical to SEQ ID NO: 17126

SEQ ID NO: 23252 - DNA, 1476 bp, Bacillus cereus G9241
  CDS (1)..(1476): transl_table=11
atgacctttgttttatttggagcgacaggggacttagcgaaacgcaaaatttaccccgcactatataacttatatagagatcaaaagcttccaaagcaaatatctgttatcgggcttggaagacgtcaagtatctcatgaagattttcaagaaagaataaaagaatcaatagagacgttttcccgtaagagggaagaaggtactccggaactcgaaggttttttagataattttcgctattgtccattagatgtgagtaagccggaagattatgagagattattacaagtcgttcgtgaaagggaagaagaactacatataaaaggaaatagaatgttctatctttcagttgctcctgaatttttcgagaccattgctttaaatattaaggaaagcggacttgataaaacggatggatggaaacgcctaatgattgagaaaccgtttgggcacgaccttacatctgctcgtgagctgaatgataagcttagtcgcacgtttgaagaagacgagatataccgtattgatcattatttaggtaaaccgatgattcaaaaccttgaagcattagaatttgcaaatcctgttctccagtctatttggaataaagaacatatagcgaatgtacaaatcacagctagtgaaacagttggggttgaagaaagagcaggatattatgatcaggcaggagccattcgagatatggttcaaaatcatatgttacaaatattaatgatgactgctatgaatctgccggaaaaggttaatgcatgtgaaattcgagaggaaaagcgaaaggtaatggagacgcttcgtaaagtgaaaaaagaagacgttcaaaaccatatcattcgcggacaatacgcttcaggagagataaaaggcgggcaagttgtagcatataaagaggaaccgggagtaaatccttcttctaacatagacacatttgttgctgctcgattgtggatcgataatccgttttggactggcgttccattttatatacgaacaggtaaacgaatgaaagaaaagtctactcgtattgtaattgaatttaaaaatacgttaaaacagcaatatcaagatagtaatccaaatgcagcacctaacttattaataattgaaattagtccaggtgagaacgtttcattacagttaaacagtaaaaatccattgaaaaatggagaaattgaaccgatgcgtattaactttacttgtgagcaagcagatgtgggagtacctgaagcgtatgaaagactcattcatgatgctgtgagtggagacgctacattctttgcacattggagagaagttgaattgtcatgggaatgggtacaaccaattcttgaagcgttcgaggaaaacttattgccgcttcatgaatatgagtctggttcatatggtccagaagcgtctaatgaactgttgcaagaaagtggatttaaatggtggttagatcaagagacggaaaaataa

SEQ ID NO: 23253 - protein, 491 aa, Bacillus cereus G9241
MTFVLFGATGDLAKRKIYPALYNLYRDQKLPKQISVIGLGRRQVSHEDFQERIKESIETFSRKREEGTPELEGFLDNFRYCPLDVSKPEDYERLLQVVREREEELHIKGNRMFYLSVAPEFFETIALNIKESGLDKTDGWKRLMIEKPFGHDLTSARELNDKLSRTFEEDEIYRIDHYLGKPMIQNLEALEFANPVLQSIWNKEHIANVQITASETVGVEERAGYYDQAGAIRDMVQNHMLQILMMTAMNLPEKVNACEIREEKRKVMETLRKVKKEDVQNHIIRGQYASGEIKGGQVVAYKEEPGVNPSSNIDTFVAARLWIDNPFWTGVPFYIRTGKRMKEKSTRIVIEFKNTLKQQYQDSNPNAAPNLLIIEISPGENVSLQLNSKNPLKNGEIEPMRINFTCEQADVGVPEAYERLIHDAVSGDATFFAHWREVELSWEWVQPILEAFEENLLPLHEYESGSYGPEASNELLQESGFKWWLDQETEK

SEQ ID NO: 23254 - DNA, 1605 bp, Crocosphaera watsonii WH 8501; identical to SEQ ID NO: 17127
  CDS (1)..(1605): transl_table=11

SEQ ID NO: 23255 - protein, 534 aa, Crocosphaera watsonii WH 8501; identical to SEQ ID NO: 17128

SEQ ID NO: 23256 - DNA, 1548 bp, Prosthecochloris aestuarii DSM 271
  CDS (1)..(1548): transl_table=11
atgcgctgttcagacgctaccgttcgcgctctcacgataatttttccgataaggtcgttgcagctcttcgtcatgagttcggtggccacggttttactcctaaatcctgactgtatggctcctgctgagagagaaatttcaaattttacgcttgtcctgttcggggcaaacggtgaccttgcgttaaggaagctgttcccttcaatgtatgaacttgcccgatgggggcagatgccggataaataccggattatcggtgtcggccgttctgatatcggtcacgatgggttccgcgagctggtccgggaggcaatggtcgctcatgcaccacatattgataccggttccggacatttcagtgattttattcagagtctgttctacgttcaggtcgatctgacaacggtcgagggctaccatcgtctcagggaagagatccggaccggtcatgggcgggaggggacttgcagtaatctgcttttttacctttcgactcccccgagtctggctccttttattgtccggtttctcgacgaggctggccttggcggcaaatcgccatcgtgccagggatggcggaaaatcattattgagaagccctatggtcacgatcttcagagtgcgcgtgaactcaatgtgattgtcggggaagtgtttcacgaggagcagatctatcgcatagatcattatctcggcaaggaaccggttcagaatatcctggtattccgcttttctaatggtatgttcgaaccgctctggaatcgtcattatatcgacaacgtcagcattaccatcgccgaagatttcggtatcagggggcgggggtcgttttatgaagaggccggactgcttcgcgatatcatccagaatcacggtctgcagcttctcgcctcggtggctatggagcctcctgtcgatctgagcgcagacgcagtcagagatgaaaaagagaaggtttttcgttcacttcgtcgcttcactgtcgagagtgccagagagcatgtcgtgcttggtcagtatgacggataccgtcaggaaaacaatgtggcttctgattcactggtcgaaacctttgcttccatacggttttttatcgataactggcgctggaaaggggttcctttttatatgaaggccggaaaaaatcttgccaggagcctgactgaaattgttatcaccttctcatgcccgcctcagaattttttcgggccgcctgaaagttgcagttataccgccaaccagatcgtcattcagatccagccggaacaaaccattgcgatccgtttcgggacaaagcgacccggtgaagcgctggttaccgacccggtgtttatgaaattcgattaccgcgcatcattcgaaaaggaggggatgacaccctatcaccgccttcttgtcgatgcgatggccggtgatcagatgcattttatccgtcaggactctgtcgagagcagctggtcggtgattgacagcatcaaatcgtctttgcagggaagcgtgccacagccctacgcggtgcattcctgggggcctgaaacaggtttctga

SEQ ID NO: 23257 - protein, 515 aa, Prosthecochloris aestuarii DSM 271
MRCSDATVRALTIIFPIRSLQLFVMSSVATVLLLNPDCMAPAEREISNFTLVLFGANGDLALRKLFPSMYELARWGQMPDKYRIIGVGRSDIGHDGFRELVREAMVAHAPHIDTGSGHFSDFIQSLFYVQVDLTTVEGYHRLREEIRTGHGREGTCSNLLFYLSTPPSLAPFIVRFLDEAGLGGKSPSCQGWRKIIIEKPYGHDLQSARELNVIVGEVFHEEQIYRIDHYLGKEPVQNILVFRFSNGMFEPLWNRHYIDNVSITIAEDFGIRGRGSFYEEAGLLRDIIQNHGLQLLASVAMEPPVDLSADAVRDEKEKVFRSLRRFTVESAREHVVLGQYDGYRQENNVASDSLVETFASIRFFIDNWRWKGVPFYMKAGKNLARSLTEIVITFSCPPQNFFGPPESCSYTANQIVIQIQPEQTIAIRFGTKRPGEALVTDPVFMKFDYRASFEKEGMTPYHRLLVDAMAGDQMHFIRQDSVESSWSVIDSIKSSLQGSVPQPYAVHSWGPETGF

SEQ ID NO: 23258 - DNA, 1503 bp, Xylella fastidiosa Ann-1; identical to SEQ ID NO: 17129
  CDS (1)..(1503): transl_table=11

SEQ ID NO: 23259 - protein, 500 aa, Xylella fastidiosa Ann-1; identical to SEQ ID NO: 17130

SEQ ID NO: 23260 - DNA, 1488 bp, Streptococcus suis 89/1591
  CDS (1)..(1488): transl_table=11
atgtcatcacatgtattgtttacaatttttggtgctagtggcgaccttgccaaacgcaaactttacccatctttatttcgcctctataaggctggacacatcaaggaaaactttgcagtaattggtacagctcgcagaccctggaccaaggaattttttgagcaaaccgtcattgaatcactaggtgatctgcctgacacaccacgtcaagctcatgaatttgcaagtcatttctactaccaaagccacgatgtcaatgacacggaacattatgtagctcttcgtaaattgcaggacgacttgtgtgaaaaatacaatacccagcacaacaaggtcttcttcctctctatggcgcctgaatttttcggaaccattgccaaacacctcaaatctgagcaaatcgttgatggacaaggttttgagcgtttgattatcgaaaaacctttcggaacaagccttgaaactgcaagcaaactcaatgatgaattagccgctgccttcaatgaagaccaaatctaccgtatcgaccattacctaggcaaggaaatggtacaaaatatctttgcggttcgctttgccaatattatttttgagcatatttggaaccgcgattacatcgataacgtccaaattacatttgctgaagcgattggtgttgaggatcgtgggggctactacgatcattctggcgccttaaaagacatggtgcaaaaccatgcccttcaagtcctatcccttctagcaatggataagccagccagcttcaaagaggaagatgtccgcgctgaaaagattaaggtcttccaacaccttcgtcagccttctgatgaggacctcaaacgcaacttcatccgtggtcaatatgcagcaggttccatcgacggaaaagactacgttagctacttggatgaaccaaatattgccgaaggttctcagacagaaacctttgcaggaggtgtcttcttcgttgatactgaccgtttccgtgatgtacctttcttcttccgtacaggtaaacgtctgacagaaaagggcacgcgcgtgaccatcaccttcaagcatgcggaagatatttttggtcagccttctgaggccaatgtattgaccatcttcatccagccaacagaaggcttcatgctctctatcaacggcaaggaagttggttcccactttgctcttactcctgccaaactcaacttccgccacaatgcaactgctcttggaaattcacccgaagcctacgaaaaactatttttcgatgtcttgaacggcgactctaccaactttagccattgggaagaagtgaaagcaagctggagcttgattgaccgcattgttgatttgtgggcaagcaaccaagtcccactccacacctatccagctggaactatgggacctgaggcaacctttgatttgctagaaagctacggttgcaagtgggtttggacaccagatgtatggtatcgtgaacgtggcttattgaaatag

SEQ ID NO: 23261 - protein, 495 aa, Streptococcus suis 89/1591
MSSHVLFTIFGASGDLAKRKLYPSLFRLYKAGHIKENFAVIGTARRPWTKEFFEQTVIESLGDLPDTPRQAHEFASHFYYQSHDVNDTEHYVALRKLQDDLCEKYNTQHNKVFFLSMAPEFFGTIAKHLKSEQIVDGQGFERLIIEKPFGTSLETASKLNDELAAAFNEDQIYRIDHYLGKEMVQNIFAVRFANIIFEHIWNRDYIDNVQITFAEAIGVEDRGGYYDHSGALKDMVQNHALQVLSLLAMDKPASFKEEDVRAEKIKVFQHLRQPSDEDLKRNFIRGQYAAGSIDGKDYVSYLDEPNIAEGSQTETFAGGVFFVDTDRFRDVPFFFRTGKRLTEKGTRVTITFKHAEDIFGQPSEANVLTIFIQPTEGFMLSINGKEVGSHFALTPAKLNFRHNATALGNSPEAYEKLFFDVLNGDSTNFSHWEEVKASWSLIDRIVDLWASNQVPLHTYPAGTMGPEATFDLLESYGCKWVWTPDVWYRERGLLK

SEQ ID NO: 23262 - DNA, 1455 bp, Roseovarius nubinhibens ISM; identical to SEQ ID NO: 17131
  CDS (1)..(1455): transl_table=11

SEQ ID NO: 23263 - protein, 484 aa, Roseovarius nubinhibens ISM; identical to SEQ ID NO: 17132

SEQ ID NO: 23264 - DNA, 1458 bp, Oceanicola batsensis HTCC2597
  CDS (1)..(1458): transl_table=11
atggtatcccgcgttattccagtcgaaccctttgatctcgttatattcggcggcaccggcgatctcgcgcgccgcaagatcctgccggcgctgttccgccgcttctgctcgggccagatgggagaggaatcgcgcatcatcggcgccgcccgctccgaccacaccgccggagagttccgccagatggtcagcgaggccatcgaggagttcaacacgacgacgcagtgcgaggggggcacgctcgacgcctttctcgagcgcatcgactatgtccatgtcgatgcgaggggagaggaggggtggcagaccctctcggatatgatgatccccggccgggtccgcgccttctacttttccgtggcgcccagcctcttcggcgatctcgccgagcgtctgcacgcccatggcatggccgacagcgacagccgcatcgtggtcgagaaacccttcgggcgcgatctcgagaccgcccgggcgctgaacgaaacgctggcccgccacttcgacgaaagccagatctaccggatcgaccactatctcggaaaggagacggtccagaacctgatggccgtccgcttcggcaatatgctgttcgagccgctgtggaactcgcaatacgtcgaccacatccagatcaccgtggccgaaaccgtgggcgtcgggggccggggcgagtattacgaccgctcgggcgcgatgcgcgacatggtacagaaccacctgatgcagcttctctgcctgatcgcgatggaaccgcccgccaagttcgaccccgacgccgtgcgcgacgaaaagctcaaggtgatccgcgcgctcgacccggtcgagacgggcaatatcgtgcgcggacagtacggaccggaacgcaagggcgggccggattacctcgacgatgtcgagaacccgcgcgccaccagcgaaagcttcatcgcgatgcgcaccaccatctcgaattggaggtgggcggggacgcccttctacctccgcacaggcaagaagctgaaggcgcgcgccagcgagatcgcggtgatcttcaaggaaaccccgcattccatcttcggtcccgaggccgggcggcaccgcaacatcctgacgatccggcttcagccgaacgagggcatggatctcgacgtcacgatcaaggaaccgggcccggggggaatgcggctggtcgacgtgccgctggacatgaccttcgctgaggcgctcggccccgatggcgaggacgtgccggatgcctatgaacggctgatcatggacgtcatccgcggcaaccagacgcttttcatgcgcggcgacgaggtcgaggccgcctgggcctggaccgatcccatcatcgaggggtgggaaagccgcggcgacaggcccgtcacctacgaacccggttcgtccggccccgaggacgccctggcccttgtgcatcgcgacgggcgccgctggcgggagatccgggcatga

SEQ ID NO: 23265 - protein, 485 aa, Oceanicola batsensis HTCC2597
MVSRVIPVEPFDLVIFGGTGDLARRKILPALFRRFCSGQMGEESRIIGAARSDHTAGEFRQMVSEAIEEFNTTTQCEGGTLDAFLERIDYVHVDARGEEGWQTLSDMMIPGRVRAFYFSVAPSLFGDLAERLHAHGMADSDSRIVVEKPFGRDLETARALNETLARHFDESQIYRIDHYLGKETVQNLMAVRFGNMLFEPLWNSQYVDHIQITVAETVGVGGRGEYYDRSGAMRDMVQNHLMQLLCLIAMEPPAKFDPDAVRDEKLKVIRALDPVETGNIVRGQYGPERKGGPDYLDDVENPRATSESFIAMRTTISNWRWAGTPFYLRTGKKLKARASEIAVIFKETPHSIFGPEAGRHRNILTIRLQPNEGMDLDVTIKEPGPGGMRLVDVPLDMTFAEALGPDGEDVPDAYERLIMDVIRGNQTLFMRGDEVEAAWAWTDPIIEGWESRGDRPVTYEPGSSGPEDALALVHRDGRRWREIRA

SEQ ID NO: 23266 - DNA, 1524 bp, Prochlorococcus marinus str. MIT 9211
  CDS (1)..(1524): transl_table=11
atgcggacccagcctacaaaccccttaaggataggtcttaggcaagaaagagttgtatcacctcagtgtttgataatttttggtgcaagtggagatttgacacacaggaaactaatccctgcactttttgaactctttaagcagagacgattacctagtgagtttgccatacttggatgcgcacgaagaccatggactgatgaagaattccgagaaaagatggcatttgctcttgaaagcaaagtcaaacaaagtaccaaggaatgggaacaattttcagccaatcttttctatgaacctgtagatcttcaaaggtcggaagatgtcctgaaactatcaacacgtttagaagagatagatcgtttaaaagcgactcatggcaatagaaccttttacctttctgtagcacctaagttttatgcaatggcttgcaaatcccttgcaggggtgggccttctaagtgatcccaaacgcaatcgaattgtcatagaaaagccttttgggcgtgactacgctagcgcgcaaactttgaatcaaatagttcaaagttgtgcgcttgagagtcaaatcttccgtatcgatcactatctggggaaagaaaccgtacagaatattttggtactaaggttcgcaaacactattttcgaaccgatttggaatagaaactacatctcaaatatccaaatcacatcagccgaaacagttggtgttgaagaccgagccggtttttacgaaagcgcaggtgctctaagagatatggtacagaatcatctgactcaaatgcttgcgataacagcgatggaaccacctggtcactttgacccggaagctatccgaaatgagaaagcgaaggttctacaagccgcacatcttgctaacgaaaaagagccctggaaatgttgcgtaagaggtcaatattctcaaggtggaaataaaaatagcccgattcttggatacagacaggaaccaggagtggacccaaatagcaccactgaaacttatgtcgcgatgaaactattcgtagacaattggcgatggcaaggagttcctttttacgttcgaactggtaaaaggttagccaaaaggacaagtgaagttgttcttactttcagagaagctcctgttcaccttttcgacgcagctggtggctctcccacgtcaaatcaactggttttaagaatccaaccaaatgagggggctgaatttcgatttgaggttaaatccccaggttctgggatgagaagtcgcccagttgaaatggaattttcttatgacgaatcttttggagaaccttctgacgaaggttatgtcagacttttggctgacgtaatgctcggcgatccaacactgtttaccagaagtgatgaagtagaagcagcatggaggttatatacccctttattggaattaatagaagatagcccctggcaactacctgtttaccaatatgaagctagaacatggggaccagccgaatctgatgccctattagctaaagaccaattgctttggcgtagaccctaa

SEQ ID NO: 23267 - protein, 507 aa, Prochlorococcus marinus str. MIT 9211
MRTQPTNPLRIGLRQERVVSPQCLIIFGASGDLTHRKLIPALFELFKQRRLPSEFAILGCARRPWTDEEFREKMAFALESKVKQSTKEWEQFSANLFYEPVDLQRSEDVLKLSTRLEEIDRLKATHGNRTFYLSVAPKFYAMACKSLAGVGLLSDPKRNRIVIEKPFGRDYASAQTLNQIVQSCALESQIFRIDHYLGKETVQNILVLRFANTIFEPIWNRNYISNIQITSAETVGVEDRAGFYESAGALRDMVQNHLTQMLAITAMEPPGHFDPEAIRNEKAKVLQAAHLANEKEPWKCCVRGQYSQGGNKNSPILGYRQEPGVDPNSTTETYVAMKLFVDNWRWQGVPFYVRTGKRLAKRTSEVVLTFREAPVHLFDAAGGSPTSNQLVLRIQPNEGAEFRFEVKSPGSGMRSRPVEMEFSYDESFGEPSDEGYVRLLADVMLGDPTLFTRSDEVEAAWRLYTPLLELIEDSPWQLPVYQYEARTWGPAESDALLAKDQLLWRRP

SEQ ID NO: 23268 - DNA, 1524 bp, Synechococcus sp. RS9917
  CDS (1)..(1524): transl_table=11
atgagcgcaacgatcacgaacccgctgcgggtcggcctgcgtcaggaacgggtcatcgccccccagtgcctgatcatctttggcgccagcggtgacctgacccaccgcaagctggtgccggccctgttcgaactgttccagcaacggcgtcttcccagcgaattcgccctgctcggctgtgcccgccgcccctggagcgacgaggagttccgccagaagatggcggaggccatgggcgcgaaagtcagcgacaaccggatggcctgggaccagttctcagccggcatgttttatgaaccggtcgacctgcagcagccggaggatctggtgaagctggggcatcgcctccaggagatcgatcggttgcgggcgacgcggagcaaccgcaccttttacctctcggtatcaccgaagttttacggcagcggctgccgcgccctggcggatgccgggctgctcaaggatccggatcgcagtcgcgtcgtgatcgagaagcccttcggccgcgactacagcagcgcccaggcgctcaacaaggtggtgcaggcctgcggccaggagaagcagatcttccgcatcgaccactacctgggcaaggagacggtgcagaacatcatggtgctgcgcttcgccaacaccatcttcgaaccgatctggaatcggaattacatctccagcgttcagatcaccgccgccgaaacggtgggggtggaggagcgggccgggtactacgagacctccggcgccctgcgcgacatggtgcagaaccacctcacccagatgctggcgatcaccgccatggaaaccccgggtcggtttgacccggaggcgatccgcagcgagaaggcgaaggtgctgcaggccgctcgcctcgccgacgaacaggaaccctggaactgctgcattcgtggtcagtacggaccgggcggcagccaggtcgctcccctggccggctaccgccaggaacctggcgtggatccgaacagcaccacggagacctacgtggcgatgaagctgttcatcgacaactggcgctggcagggggttcccttctacgtgcgcacgggcaaacgcctgcccaaacggctgagcgaagtggtgctcaccttccgggaggccccggtgcatctctttgatgccgccggtggcagccccacagccaatcagctgatcctgcgcatccagccggatgagggggcggaattccgcttcgatgtgaaatcccccggctcaggcatgcgcagccgtccggtggagatggagttctcctacgacgaatccttcggtgaaccctccgatgagggctacgtccgtctgctggccgacgcgatgctcggcgatcccaccctgttcacccgcagcgatgaggtggaagcagcctggcggctgtacacccccctgctggaactgattgaagacagtccctggcagctcccgatccatccctacgaatcgcgcacctggggaccggccgcatcggatgccctgctggcccgcgacggtctgctctggcgccgcccctga

SEQ ID NO: 23269 - protein, 507 aa, Synechococcus sp. RS9917
MSATITNPLRVGLRQERVIAPQCLIIFGASGDLTHRKLVPALFELFQQRRLPSEFALLGCARRPWSDEEFRQKMAEAMGAKVSDNRMAWDQFSAGMFYEPVDLQQPEDLVKLGHRLQEIDRLRATRSNRTFYLSVSPKFYGSGCRALADAGLLKDPDRSRVVIEKPFGRDYSSAQALNKVVQACGQEKQIFRIDHYLGKETVQNIMVLRFANTIFEPIWNRNYISSVQITAAETVGVEERAGYYETSGALRDMVQNHLTQMLAITAMETPGRFDPEAIRSEKAKVLQAARLADEQEPWNCCIRGQYGPGGSQVAPLAGYRQEPGVDPNSTTETYVAMKLFIDNWRWQGVPFYVRTGKRLPKRLSEVVLTFREAPVHLFDAAGGSPTANQLILRIQPDEGAEFRFDVKSPGSGMRSRPVEMEFSYDESFGEPSDEGYVRLLADAMLGDPTLFTRSDEVEAAWRLYTPLLELIEDSPWQLPIHPYESRTWGPAASDALLARDGLLWRRP

SEQ ID NO: 23270 - DNA, 1524 bp, Synechococcus sp. WH 5701
  CDS (1)..(1524): transl_table=11
atgaccgtcacgctcaccaatcctctgagggtcggactgcgccaggagcgcgtggtttcgccccagtgcctggtgattttcggagcaagcggagatctcacccaccgcaagctggtgcctgcactcttcgagctcttccgtcaacggcggctccccaccgagttcgccgtgctgggctgtgcccggcgcccgtggagcgatgaggacttccggggccacatggctgaaggcctcggcgacctggtcaatgagcaccgtggggcctgggagcaattcgcctccagcctgttctacgagccggtggatctgcagcaacccgagcacctggtgcgactggcccagcggctcgaggtgatcgactgccagcgggccacgcgcagcaaccgcaccttctacctctcggtgtcgcccaagttctacggcagtggctgcagcgcccttgccgcggccgggctgctgaacgaccccgagcgcagccgggtggtgatcgaaaagcccttcggccgagactacggcagtgcccaggagctcaaccggatcgtgcaggccagcgccaaggagagccaggtcttccgcatcgatcactacctcggcaaggaaacggttcagaacatcctcgttctccgcttcgccaacacgattttcgaaccgatctggaaccggaactacatcgccagcgtcgagatcaccgcggcagaaaccgtgggtgtggaggagcgggcgggttactacgaaagctccggcgccctgcgggacatggtgcagaaccacctcacccagatgctggccctcaccacgatggaagccccggggcacttcgatccggaggcgatccgcaatgagaaggccaaggtgctgcaatcggcgcggctggccgatgagctggaaccctggaactgctgtgtccgcggccagtacggccccggtggcaccgccagcagccccctggccggttaccgccaggaacccggtgtgaatcccaacagcaccacggaaacctatgtagccatgaagctgttcatcgacaactggcgctggcagggcgtgcccttctatctgcgtaccggcaaacgcctgcccaagcgcatgagcgaggtggtgctcaccttccgcgaggccccggtgcacctgttcgacgccgccggcggcagtcccaccgccaaccagctgatcctgcgcatccagcccgatgaaggggccggtttccgcttcgaagtgaagtccccggggtcggggatgcgcagccgtccggtcgacatgcacttctcctacgacgaatccttcggggaaccgtccgacgagggctacgtgcgcctgctcgccgacgccatgctgggggatcccactctcttcacccgcggagatgaggtggaggccgcctggcggctgtacaccccgttgctggagctgatcgaggacagcccctggcagctgcccgtccacccctacgaagcccgcacctggggccccgccgccgccgacaacctcctgggccgcgatggcctgatgtggcgccgtccctga

SEQ ID NO: 23271 - protein, 507 aa, Synechococcus sp. WH 5701
MTVTLTNPLRVGLRQERVVSPQCLVIFGASGDLTHRKLVPALFELFRQRRLPTEFAVLGCARRPWSDEDFRGHMAEGLGDLVNEHRGAWEQFASSLFYEPVDLQQPEHLVRLAQRLEVIDCQRATRSNRTFYLSVSPKFYGSGCSALAAAGLLNDPERSRVVIEKPFGRDYGSAQELNRIVQASAKESQVFRIDHYLGKETVQNILVLRFANTIFEPIWNRNYIASVEITAAETVGVEERAGYYESSGALRDMVQNHLTQMLALTTMEAPGHFDPEAIRNEKAKVLQSARLADELEPWNCCVRGQYGPGGTASSPLAGYRQEPGVNPNSTTETYVAMKLFIDNWRWQGVPFYLRTGKRLPKRMSEVVLTFREAPVHLFDAAGGSPTANQLILRIQPDEGAGFRFEVKSPGSGMRSRPVDMHFSYDESFGEPSDEGYVRLLADAMLGDPTLFTRGDEVEAAWRLYTPLLELIEDSPWQLPVHPYEARTWGPAAADNLLGRDGLMWRRP

SEQ ID NO: 23272 - DNA, 1524 bp, Synechococcus sp. WH 7805
  CDS (1)..(1524): transl_table=11
atgagcgcaacgatgacgaacccactgagggttggcctgcgtcaagagcgagtgatcgcgcctcagtgccttgtgatcttcggagcaagcggtgacctcacgcaccggaagcttgtcccagccttattcgaactgttcctgcagagacgattgccaagcgaattcgctcttctgggatgcgcccgtcggccctggagcgatgaagagttccgtcaaaagatggccgaggccatggagaagacggtgaacgagaaccgcgtggcatgggaccaattctcagctggaatgttctacgagccggtggatctgcagcagcctgaggatctcgtgaagctggggcaccgactcgacagcatcgaccgcctcagggcaacacgcagcaaccgcacgttctatttatcggtctcaccgaagttctacggcagtggatgccgtgcgctgtccgatgccggcctgctgaaggatccccagcgcagccgggtggtgattgaaaagccctttggacgggactacggcagcgcccaggctctgaaccgcatcgttcaaagctgtggtcaggagaaccagatcttccgcatcgaccactatctgggcaaggaaacagtccagaacatcatggttctgcgtttcgccaacaccattttcgaaccgatctggaaccggaattacatttccagcgttcagatcaccgccgctgaaaccgttggtgttgaagagcgagccggttattacgaaacctccggtgcactgcgcgacatggtgcagaaccacctgacgcaaatgctggcgatcaccgccatggagacacccgggcggttcgaccccgaggccattcgcagcgaaaaagccaaggtgcttcaggcagcccgtcttgcagatgaaaaggagccctggaactgctgtatccgcggtcagtacggccccggtggaaccctggacaacccccttgccggataccgacaggaacccggggtggatcccaacagcaccacggagacctacgtggccatgaagttgttcatcgacaactggcgctggcaaggggtgcccttttatgtccgcacgggcaagcggctgccgaaacgtctcagtgaagtggtcctcaccttccgagaggccccggttcacttattcgatgcagcaggcggcggtcccaccgcgaaccagctgattttgcgcatccaacccgacgagggcgctgaattccgtttcgaggtcaagtcccccggatccgggatgcgcagccgccctgttgagatggaattctcttacgacgaatccttcggtgaaccatcagacgagggttacgtccgtcttctggctgatgcgatgctcggcgacccgaccctctttacacgcagcgatgaagtggaagcggcctggcgcctctacacgcccctgcttgagctcatcgaagacagcccctggcagctgccgattcatccctacgagtcacgaacctggggacccgctgcttcggacgcgctcatggcccgtgatggcttgctctggcgccgtccctga

SEQ ID NO: 23273 - protein, 507 aa, Synechococcus sp. WH 7805
MSATMTNPLRVGLRQERVIAPQCLVIFGASGDLTHRKLVPALFELFLQRRLPSEFALLGCARRPWSDEEFRQKMAEAMEKTVNENRVAWDQFSAGMFYEPVDLQQPEDLVKLGHRLDSIDRLRATRSNRTFYLSVSPKFYGSGCRALSDAGLLKDPQRSRVVIEKPFGRDYGSAQALNRIVQSCGQENQIFRIDHYLGKETVQNIMVLRFANTIFEPIWNRNYISSVQITAAETVGVEERAGYYETSGALRDMVQNHLTQMLAITAMETPGRFDPEAIRSEKAKVLQAARLADEKEPWNCCIRGQYGPGGTLDNPLAGYRQEPGVDPNSTTETYVAMKLFIDNWRWQGVPFYVRTGKRLPKRLSEVVLTFREAPVHLFDAAGGGPTANQLILRIQPDEGAEFRFEVKSPGSGMRSRPVEMEFSYDESFGEPSDEGYVRLLADAMLGDPTLFTRSDEVEAAWRLYTPLLELIEDSPWQLPIHPYESRTWGPAASDALMARDGLLWRRP

SEQ ID NO: 23274 - DNA, 1470 bp, Pseudoalteromonas tunicata D2; identical to SEQ ID NO: 17135
  CDS (1)..(1470): transl_table=11

SEQ ID NO: 23275 - protein, 489 aa, Pseudoalteromonas tunicata D2; identical to SEQ ID NO: 17136

SEQ ID NO: 23276 - DNA, 1500 bp, Photobacterium sp. SKA34; identical to SEQ ID NO: 17137
  CDS (1)..(1500): transl_table=11

SEQ ID NO: 23277 - protein, 499 aa, Photobacterium sp. SKA34; identical to SEQ ID NO: 17138

SEQ ID NO: 23278 - DNA, 1563 bp, delta proteobacterium MLMS-1
  CDS (1)..(1563): transl_table=11
atgattgagaaccgggaaaatcctgagcggcggtcggacgatgcgggggactgcaccttgcttaatggggccgatctgccctcctgcaccatcgtgatcttcggggcatctggcgaccttaccgctcgtaagctgattcccgccctgcagaatcttttccgccagggctgtttgccaccccggtggaatatcgtgggctgcggccgcagccccatggaccatgaagagttccgccagagcctggtcgcgttccatgagcaggccaatcccgatgccgaggagtggcggcgggattggccccaattcgccgccaatattttctatcaggagctgagctacgaccgggccgaggattaccgggctctggccaccctccttgaccgcctggatcgagagcgcggcagcgcccccaaccgggtcttctacctggcggtgcccccggccctctatcccctgatcggcgaacaactgggggcggccgggctggcgacggcggccgataactgctggtcccggatcgtggtggaaaaaccattcggccatgatctgccctcggcggtggccctggacggggtgttgcacggcagcttcaccgagcagcagatcttccggatcgaccactacctggccaaggagacggtgcagaatatcctgatgctccgctttgccaacaccatcttcgagcccctctggaaccgcagctatatcgactatgtgggaattatcagctctgaaaagctgggggtggagcaccgagccgggttttacgagagcgccggggtgctgcgcgacatgttccagaatcacatgatgcaactgctggccctgaccgccatggaaccgccctcccgcttcgaggccgcccaggtccaggatgaaaaggtaaagatcttccgggccctcaagcccttcgaccgggccaacctggcggctcatctggttctaggccagtacgggcccggcacaatcgacggcaggccggtggcgggttatcggcaggagcccgaggtggcggccgactccgccacccccacctttgccgccatgaaactgctgatcgataactggcgttggcggggagtccccttctacctggtctccggcaaacggatgccggccaaggagacccggatcgtgattcagttcaaggaggtgccccactccatgtttcgccgggagctggccgccagtatcatggccaaccgcctggtgctggggatccatcccgaggagaagatctccctcaacttccaggccaaaaaccccggcaccaaggagtgcctgcaaccggtgaccatggatttcaactatgaacggcgccaaagcccacatccccacttcgatgcctacgagatggtgctgctcgactgtatcctgggcgaccacatgctcttctggcgccaggacgggatcgaactctcctggtccttcctcgatccgatcctgcgggcctgtgaagagtgcaacaacccggaaaagctgctgcaaagctacccggccggcagccccggccccgaagcggcccacccctggctgcggctcttaaacgattttaatgggtaa

SEQ ID NO: 23279 - protein, 520 aa, delta proteobacterium MLMS-1
MIENRENPERRSDDAGDCTLLNGADLPSCTIVIFGASGDLTARKLIPALQNLFRQGCLPPRWNIVGCGRSPMDHEEFRQSLVAFHEQANPDAEEWRRDWPQFAANIFYQELSYDRAEDYRALATLLDRLDRERGSAPNRVFYLAVPPALYPLIGEQLGAAGLATAADNCWSRIVVEKPFGHDLPSAVALDGVLHGSFTEQQIFRIDHYLAKETVQNILMLRFANTIFEPLWNRSYIDYVGIISSEKLGVEHRAGFYESAGVLRDMFQNHMMQLLALTAMEPPSRFEAAQVQDEKVKIFRALKPFDRANLAAHLVLGQYGPGTIDGRPVAGYRQEPEVAADSATPTFAAMKLLIDNWRWRGVPFYLVSGKRMPAKETRIVIQFKEVPHSMFRRELAASIMANRLVLGIHPEEKISLNFQAKNPGTKECLQPVTMDFNYERRQSPHPHFDAYEMVLLDCILGDHMLFWRQDGIELSWSFLDPILRACEECNNPEKLLQSYPAGSPGPEAAHPWLRLLNDFNG

SEQ ID NO: 23280 - DNA, 1464 bp, Oceanobacter sp. RED65; identical to SEQ ID NO: 17139
  CDS (1)..(1464): transl_table=11

SEQ ID NO: 23281 - protein, 487 aa, Oceanobacter sp. RED65; identical to SEQ ID NO: 17140

SEQ ID NO: 23282 - DNA, 1506 bp, Vibrio sp. Ex25; identical to SEQ ID NO: 17141
  CDS (1)..(1506): transl_table=11

SEQ ID NO: 23283 - protein, 501 aa, Vibrio sp. Ex25; identical to SEQ ID NO: 17142

SEQ ID NO: 23284 - DNA, 1473 bp, Alteromonadales bacterium TW-7; identical to SEQ ID NO: 17143
  CDS (1)..(1473): transl_table=11

SEQ ID NO: 23285 - protein, 490 aa, Alteromonadales bacterium TW-7; identical to SEQ ID NO: 17144

SEQ ID NO: 23286 - DNA, 1479 bp, marine gamma proteobacterium HTCC2143; identical to SEQ ID NO: 17145
  CDS (1)..(1479): transl_table=11

SEQ ID NO: 23287 - protein, 492 aa, marine gamma proteobacterium HTCC2143; identical to SEQ ID NO: 17146

SEQ ID NO: 23288 - DNA, 1446 bp, marine gamma proteobacterium HTCC2080; identical to SEQ ID NO: 17147
  CDS (1)..(1446): transl_table=11

SEQ ID NO: 23289 - protein, 481 aa, marine gamma proteobacterium HTCC2080; identical to SEQ ID NO: 17148

SEQ ID NO: 23290 - DNA, 1476 bp, Marinobacter sp. ELB17; identical to SEQ ID NO: 17155
  CDS (1)..(1476): transl_table=11

SEQ ID NO: 23291 - protein, 491 aa, Marinobacter sp. ELB17; identical to SEQ ID NO: 17156

SEQ ID NO: 23292 - DNA, 1449 bp, Erythrobacter sp. SD-21
  CDS (1)..(1449): transl_table=11
atgcccgaggtaatgttcgacgcggacgggctgctcctgttcggcgccacgggagatttgtcgcagcgcatgttgctgccttcgctctgcgccttgcacgccgacggcctcctcgatcccgatctgtgcatcgtggcgaccgcacgttcggaaatgaccacgaaggagttccgcgacttcgcccggcaggcgctggagaaatacctgcccaagaaccggcgtggcccgatggcggatttcctcaaccggctgagctatgtcccggtcgatgcgacgacgcctgaaggctatgacgaacttgcgaggcaagtcggcgagtacaagggtctcgcgatcttcctctcgaccgcgccgagcctgttcgagccgaccatcgccggcctgaaaagcgccggtctgaccaacggcaacgcgcgcatcgcgctcgaaaagccgctcggcaccgatcttgcctccagctgcgagatcaacgatgcggtcgccaaggccttcagcgaagaccgcatcttccgcatcgatcactatctcggcaaggaaacggtccagaacctcctcgccctgcggttcgccaacatcctgctcgagccggtgtggaattccaattacgtcgaccacgtccagatcaccgtcgccgagacggtcgggctcgaaagccgggtcgcctattacgacgacagcggtgcgcttcgcgacatggtccagaaccacatgctgcagctcctcgcgctcgtggcgatggagccgcccaccagcttcgacgccaccgccgtgcgcgacgagaaggtgaaggtcctgcgcgcgctgcgcccggcccagtcgaacgaggtcgtcaccggccagtaccgcgccggggccgtcgatgggaaaagcgtgcctggctatgacgaggagctgggcaagccaagcgacacggaaacctatgtcgcgctcaaagcccatgtcgacaactggcgctggcgcggcgtgccgttctacctgcgccacggcaagaggatgccgcgccgggtcacggaaatcgtgatccagttcaaatgcatcccgcattcgatcttcgaaggccgcggcgccaagaccgaacccaaccgcatggtcatcgaaatccagccggaagaaaacatccagctgaccatgatggcgaaggtccccggccttggcagcgacgggctgcgcctgcgccccgtcccgctcgacatcgccatgcccgacgccttttccgatgtggtccgccggatcgcctacgagcgcctgctgctcgatctcatccatggcgaccagacgctgttcgtccgccgcgacgaggtggaggcccagtgggacttcatcgaccacatccgcgcgctgtgggcggaaaacgagacacaacccaagacctatgccgcgggcacatggggacccagcgccgccgtggcgcttgccgaacgcgacggggtgacctggcacgatgactaa

SEQ ID NO: 23293 - protein, 482 aa, Erythrobacter sp. SD-21
MPEVMFDADGLLLFGATGDLSQRMLLPSLCALHADGLLDPDLCIVATARSEMTTKEFRDFARQALEKYLPKNRRGPMADFLNRLSYVPVDATTPEGYDELARQVGEYKGLAIFLSTAPSLFEPTIAGLKSAGLTNGNARIALEKPLGTDLASSCEINDAVAKAFSEDRIFRIDHYLGKETVQNLLALRFANILLEPVWNSNYVDHVQITVAETVGLESRVAYYDDSGALRDMVQNHMLQLLALVAMEPPTSFDATAVRDEKVKVLRALRPAQSNEVVTGQYRAGAVDGKSVPGYDEELGKPSDTETYVALKAHVDNWRWRGVPFYLRHGKRMPRRVTEIVIQFKCIPHSIFEGRGAKTEPNRMVIEIQPEENIQLTMMAKVPGLGSDGLRLRPVPLDIAMPDAFSDVVRRIAYERLLLDLIHGDQTLFVRRDEVEAQWDFIDHIRALWAENETQPKTYAAGTWGPSAAVALAERDGVTWHDD

SEQ ID NO: 23294 - DNA, 1482 bp, Moritella sp. PE36; identical to SEQ ID NO: 17159
  CDS (1)..(1482): transl_table=11

SEQ ID NO: 23295 - protein, 493 aa, Moritella sp. PE36; identical to SEQ ID NO: 17160

SEQ ID NO: 23296 - DNA, 1548 bp, Boophilus microplus; identical to SEQ ID NO: 17161
  CDS (1)..(1548)

SEQ ID NO: 23297 - protein, 515 aa, Boophilus microplus; identical to SEQ ID NO: 17162

SEQ ID NO: 23298 - DNA, 1623 bp, Oryza sativa subsp
  CDS (1)..(1623)
atgtcaggaggatctggtgattcttccccagcatctgggcgggctagcttcagttctttgtcagatttgaaggacctagaactgtcttcagaatctggttgcttgtccattgtggtcctaggtgcttctggagaccttgctaagaagaaaacattcccagcgctgtttcacctatttcagcagggatttctactatctggagaagtccatatatttgggtatgcaagatcaaatatttcggatgatggattaagagaacgcattcgtggatacctcaaaggagcttcagatgaacatatttcacaatttttgcaattaattaaatatgttagtggttcctacaatagcggggaaggatttgaatcattaaataacgccatttcagagaatgaaacttcgaagaacaacaaaccaggaagctcacgtagactattttatttggcattgcctccatcagtctacccctcagtatgcaaaatgataagatcatactgcatgaatccatcttctcattctggctggacaagggttattgttgaaaagccctttgggaaggacttggagtctgcagaggaactcagtgcccagcttggagagctgttcaatgaacaacagctgtacagaattgaccactatttaggaaaagaattggtccaaaatctgcttgtgcttcgctttgcaaaccgtttgttcctacctctctggaatcgtgataacattgctaatgtacagattgtattcagagaggactttgggactgaaggacgtggagggtactttgatcaatatggcatcattcgtgatatcattcagaaccatttgttgcaggtcttctgtttggtggctatggaaaagcctgtctctcttaagcctgagcacataagagatgaaaaagtcaaggttcttcagtcagtgacacctataaagcatgatgaggtggtccttgggcaatatgatggctacaaggatgactctacggtaccagatgactccaacacacctacttttgcatctcttgtattgagggtaaacaatgaaagatgggaaggagttcctttcattctcaaggctggcaaagcactgaacaataggaaagcagagatacgtgtgcagttcaaggatgctcctggtgacatttttaaatttctgtctgctattgttttgcttctgccaatggtgtctaaaactctgtttttatttcaccctgataaaggcaagaagcaaggaaggaatgaattcgttatacggttgcagccatcggaagccatgtatatgaaattaactgtcaagaaacccggactagaaatggcaaccgaacaaagcgagctggatctgtcatatgggctacgctaccaagacgtgaagatcccagaagcgtatgaacgcctcatcctggatacgataagaggggatcagcagcactttgttcgccgagacgaactgaaggctgcgtgggagatcttcactccgctgctgcacgacatcgacgacggcaaggtgaaggccctgccgtacaagccgggaacccggggacccccagaggcagacgagctgagcaagaggatgggctacgtgcagacccatggctacgtttggatacctccaaccctttcaaaattctag

SEQ ID NO: 23299 - protein, 540 aa, Oryza sativa subsp
MSGGSGDSSPASGRASFSSLSDLKDLELSSESGCLSIVVLGASGDLAKKKTFPALFHLFQQGFLLSGEVHIFGYARSNISDDGLRERIRGYLKGASDEHISQFLQLIKYVSGSYNSGEGFESLNNAISENETSKNNKPGSSRRLFYLALPPSVYPSVCKMIRSYCMNPSSHSGWTRVIVEKPFGKDLESAEELSAQLGELFNEQQLYRIDHYLGKELVQNLLVLRFANRLFLPLWNRDNIANVQIVFREDFGTEGRGGYFDQYGIIRDIIQNHLLQVFCLVAMEKPVSLKPEHIRDEKVKVLQSVTPIKHDEVVLGQYDGYKDDSTVPDDSNTPTFASLVLRVNNERWEGVPFILKAGKALNNRKAEIRVQFKDAPGDIFKFLSAIVLLLPMVSKTLFLFHPDKGKKQGRNEFVIRLQPSEAMYMKLTVKKPGLEMATEQSELDLSYGLRYQDVKIPEAYERLILDTIRGDQQHFVRRDELKAAWEIFTPLLHDIDDGKVKALPYKPGTRGPPEADELSKRMGYVQTHGYVWIPPTLSKF

SEQ ID NO: 23300 - DNA, 2133 bp, Oryza sativa subsp
  CDS (1)..(2133)
atggcggggctcgcggtgtcggcttccccagctccggcgccggcgtccttccggccggcggcggcggcctcgcgcttcggcccgtgtgcacaggttgcaggacctgctgccaattttagaacacgagtttgtggactgagatgtttgatcgctgcaaagctgaagttccggaagaccttgaagaggcatggatggcagcttcgaaggaatctagaagtccgagccaatgataaagtgcctgattggttggaggctacaccactgactgagaatataatgtctcgggacgtacaactcgcgtatgattctggaggtgaaacatcaaatacatgccctgatactttggacagttcagtcattgagcaaagttcaatgcatcacaaacttaacccctctgaaacccatcctcctgtgctgaaggaagaccctgttctattcgacgacccacctgaaagcgcagcgcctctttgcattgctgtaattggagcaactggtgaactggcaaaaaataaagtgttccctgcactatttgctctgtattacagtggttttcttcctcagaatgtcggtatatttgggtattctaggaagacactaacggatgaagatttaagatccatgattgaagccaatttgacctgccgggttgaccaccacgaaaactgtgatgaaaagttaaatgaatttcttaaaaggacatactatatagatgcaggatatgacaacaaagatgggatggtgaaactaaattccaaaatgtcacagatagagggcttacatggttcattaataggcctatttgtttcaaagggtaattgtgcagcaaacaggatattttaccttgctgttccccaagaggcacttcttgatgttgcactgtcactagctgacagtgcccaaactatgcaaggctggaataggataataattgagaaaccatttggcttcactggtttgtcttcacatcgggtaacacaatcactgctgtcaagatttgaggaggagcagatttacaggattgatcatcttttggggaaggatctgattgaaaatctcaccgtcttgagattttctaatttggtgtttgaacctttgtggagtcgcacctatatacgcaatgtacaggtcatattttctgaagaaacagcagcagaaatccaagggagatactttggaaattatggcataattcgtgacatagtgcatagtcacattcttcaaacaatagcactatttgcgatggaaccacctgtaagccttgatggagaggatatccgagatgaaaaggtgaaggtgctcagatcaattcgacaggtgaaccttgaggatgttgttcttggtcaactgaaagatacctctgtgaaagttgacagatatacaaaatcattgacaccaacctattttgctgctgccatgtacattgacaattcgcgttgggatggagtaccatttttgatcaagacaggaattgggctcatggaaaatagagctgagattcgtattcagtttcgccatgttcctggcaatatctatcgtgaacgctttggccatgacatagatcttgacacaaatgagctgatcttgcgtgatcaacctgaagaagccatccttttgaaagtcaacaataaggtcccaggacttgggctccagttagatgcttcagaactcaacctgctttacagggataggtacaatgtcgaactgccagattcgtatgagcatcttcttcttgatgtgcttgatggagacagtcatctattcatgcgcagtgatgaagtagctgctgcatggaacgtgctaactccactaatccatgagattgatcagaatagaatagctcctgagctctacgaggctgggggtagaggacccgttaatgcgtactaccttgctgctaaacatgggattgttaaaattgtttccccagattgcaccacccggggcagcggaggcggagaaatgcatgtaacacctaaggttcatttagtgactactaccgtagtattggaaagcttgcccttttcaaattcttccgttggcaagatattgtttgtaaacaagtcgcatggactgttcgcgattgcaggtggccaggtggggatatgggcacggaaatttggcttaagggtctaa

SEQ ID NO: 23301 - protein, 710 aa, Oryza sativa subsp
MAGLAVSASPAPAPASFRPAAAASRFGPCAQVAGPAANFRTRVCGLRCLIAAKLKFRKTLKRHGWQLRRNLEVRANDKVPDWLEATPLTENIMSRDVQLAYDSGGETSNTCPDTLDSSVIEQSSMHHKLNPSETHPPVLKEDPVLFDDPPESAAPLCIAVIGATGELAKNKVFPALFALYYSGFLPQNVGIFGYSRKTLTDEDLRSMIEANLTCRVDHHENCDEKLNEFLKRTYYIDAGYDNKDGMVKLNSKMSQIEGLHGSLIGLFVSKGNCAANRIFYLAVPQEALLDVALSLADSAQTMQGWNRIIIEKPFGFTGLSSHRVTQSLLSRFEEEQIYRIDHLLGKDLIENLTVLRFSNLVFEPLWSRTYIRNVQVIFSEETAAEIQGRYFGNYGIIRDIVHSHILQTIALFAMEPPVSLDGEDIRDEKVKVLRSIRQVNLEDVVLGQLKDTSVKVDRYTKSLTPTYFAAAMYIDNSRWDGVPFLIKTGIGLMENRAEIRIQFRHVPGNIYRERFGHDIDLDTNELILRDQPEEAILLKVNNKVPGLGLQLDASELNLLYRDRYNVELPDSYEHLLLDVLDGDSHLFMRSDEVAAAWNVLTPLIHEIDQNRIAPELYEAGGRGPVNAYYLAAKHGIVKIVSPDCTTRGSGGGEMHVTPKVHLVTTTVVLESLPFSNSSVGKILFVNKSHGLFAIAGGQVGIWARKFGLRV

SEQ ID NO: 23302 - DNA, 1605 bp, Boophilus microplus; identical to SEQ ID NO: 17165
  CDS (1)..(1605)

SEQ ID NO: 23303 - protein, 534 aa, Boophilus microplus; identical to SEQ ID NO: 17166

SEQ ID NO: 23304 - DNA, 1506 bp, Pichia guilliermondii; identical to SEQ ID NO: 17167
  CDS (1)..(1506)

SEQ ID NO: 23305 - protein, 501 aa, Pichia guilliermondii; identical to SEQ ID NO: 17168

SEQ ID NO: 23306 - DNA, 1815 bp, Petroselinum crispum; identical to SEQ ID NO: 17169
  CDS (1)..(1815)

SEQ ID NO: 23307 - protein, 604 aa, Petroselinum crispum; identical to SEQ ID NO: 17170

SEQ ID NO: 23308 - DNA, 1488 bp, Petroselinum crispum; identical to SEQ ID NO: 17171
  CDS (1)..(1488)

SEQ ID NO: 23309 - protein, 495 aa, Petroselinum crispum; identical to SEQ ID NO: 17172

SEQ ID NO: 23310 - DNA, 1605 bp, Petroselinum crispum; identical to SEQ ID NO: 17173
  CDS (1)..(1605)

SEQ ID NO: 23311 - protein, 534 aa, Petroselinum crispum; identical to SEQ ID NO: 17174

SEQ ID NO: 23312 - DNA, 1533 bp, Nicotiana tabacum; identical to SEQ ID NO: 17175
  CDS (1)..(1533)

SEQ ID NO: 23313 - protein, 510 aa, Nicotiana tabacum; identical to SEQ ID NO: 17176

SEQ ID NO: 23314 - DNA, 1536 bp, Nicotiana tabacum; identical to SEQ ID NO: 17177
  CDS (1)..(1536)

SEQ ID NO: 23315 - protein, 511 aa, Nicotiana tabacum; identical to SEQ ID NO: 17178

SEQ ID NO: 23316 - DNA, 1767 bp, Nicotiana tabacum; identical to SEQ ID NO: 17179
  CDS (1)..(1767)

SEQ ID NO: 23317 - protein, 588 aa, Nicotiana tabacum; identical to SEQ ID NO: 17180

SEQ ID NO: 23318 - DNA, 1539 bp, Chlamydia trachomatis
  CDS (1)..(1539): transl_table=11
atactaggttgtaccttggaagaaattaaagactttggccccacattaccagcctgccctccctgtatcgtggttatttttggtgctacaggagacttgacctctaggaagctctttcctgctttatacaatttaacaaaggaaggacgtctatccgaaaactttgtttgtgttgggtttgctaggcgacctaagtctcatgagcaatttctcgaagaaatgaagcttgccgttcagcatttctctcactcatcggaaatagatattcgagtttgggaaagtctggaaaatagaatcttttaccaccaagctaatttttctgatgccgaaggctactctgctctgaaagcttatttggagcaactagatcaacaatatggaacacaagggaatcgtcttttttatttatcaacaccaccagattatttccaggaaatcatccgcaatttaaatcggcatcagctattctatcatgaacaaggagcacaacagccttggtctcggctaattatagaaaagccttttggagttaatttagaaacagctcgagagcttcaacaatgcattgatgccaatattgatgaagagtcggtttatcgaatagaccattatttaggaaaagaaacggttcaaaacattctgactattcgttttgctaatactctctttgagtcttgctggaattctcagtacatagatcatgtgcaaatcagcgttagcgaatcaattggtataggatctcgagggaatttcttcgaaaagtcgggcatgctacgagacatggtacagaatcatttgacgcagctgctatgtctactgactatggaacctccttctgaattttcttcagaagaaataaaaaaagaaaaaattaaaattctaaagaaaattcttcctatccgcgaagaagatgctgttcgtggccaatatggtgaagggattgtgcaagatgtttcagttctgggctatcgggaggaagaaaatgtcgatccgaattcttcagtagaaacctacgttgcattaaaattatttatcgacaatcctcgctggaaaggggttcccttttacttacaagcagggaaacgtcttactaaaagaacaacagatatcgctgtgatctttaaaaaatccagctacaatttattcaatgcagagaattgtcctttgtgtccgttagaaaatgatttacttattattcgtattcaaccggatgaaggtgttgcgctacaatttaactgcaaggttccaggaacaaataagctcgtacgtcctgtaaaaatggacttccgttacgacagctattttaatactgttactcccgaagcttatgaacggttactgtgcgactgtatccttggggacagaacgctattcactagcaatgaagaagtcttagcatcttgggaactattttctcctctattagaaaaatggtctcaagtacaccctatattccctaactatatggccggatctttacgtcctcaagaagctgatgaactattatctagagatggaaaagcttggcggccctattaa

SEQ ID NO: 23319 - protein, 512 aa, Chlamydia trachomatis
MLGCTLEEIKDFGPTLPACPPCIVVIFGATGDLTSRKLFPALYNLTKEGRLSENFVCVGFARRPKSHEQFLEEMKLAVQHFSHSSEIDIRVWESLENRIFYHQANFSDAEGYSALKAYLEQLDQQYGTQGNRLFYLSTPPDYFQEIIRNLNRHQLFYHEQGAQQPWSRLIIEKPFGVNLETARELQQCIDANIDEESVYRIDHYLGKETVQNILTIRFANTLFESCWNSQYIDHVQISVSESIGIGSRGNFFEKSGMLRDMVQNHLTQLLCLLTMEPPSEFSSEEIKKEKIKILKKILPIREEDAVRGQYGEGIVQDVSVLGYREEENVDPNSSVETYVALKLFIDNPRWKGVPFYLQAGKRLTKRTTDIAVIFKKSSYNLFNAENCPLCPLENDLLIIRIQPDEGVALQFNCKVPGTNKLVRPVKMDFRYDSYFNTVTPEAYERLLCDCILGDRTLFTSNEEVLASWELFSPLLEKWSQVHPIFPNYMAGSLRPQEADELLSRDGKAWRPY

SEQ ID NO: 23320 - DNA, 1614 bp, Ostreococcus tauri; identical to SEQ ID NO: 17181
  CDS (1)..(1614)

SEQ ID NO: 23321 - protein, 537 aa, Ostreococcus tauri; identical to SEQ ID NO: 17182

SEQ ID NO: 23322 - DNA, 1479 bp, Phaeosphaeria nodorum
  CDS (1)..(1479)
atggagctcaaggacaacaccatcatagtcgttctaggcgcgtccggcgatctggcaaagaagaagactttccctgcgctcttcggccttcaccgcaacaacttcctccccaagaacattcgcatcgtcggatatgcacgaacgaagatggaccacgaggagtacctcaagcgcgtcaagtcgtacatcaagacccccacaaaagagcttgagaagcaactcgaggagttctgcggcttctgcacatatgtatctggccagtatgacaaggatgagtccttccaggagctcgagaagcacctccaagacctcgagaagggtcgcaaggagaccaacaggattttctacatggcgctccctcccagcgtcttcatcacagtctcgcagcacttgaagcgcaactgctacccaaagaacggcatttctcgtgttatcgtcgagaagcccttcggtaaagatcttcccagctcccgagagcttcagactgcgctcgcaccagactggaccgaagatgagctctaccgtatcgatcactacctgggcaaggagatggtcaagaacatcctcattctccgattcggcaacgagttctttggcgccacatggaacaggaaccacatcgacaacattcagatcacattcaaggagccttttggcacagagggacgaggaggctactttgacgagtttggcatcattcgtgacgttatgcaaaaccatttgttgcaagtcctcaccctcctcgccatggagcgaccaatctccttctccgccgaagacatccgtgacgagaaggtccgcgttcttcgtggcatggccgcgatcgagccaaagaacgtgatcattggccagtacggaaagtcccttgacggcacgaagcccggctacaaggaggatgacactgtccctaaggactctcgatgccctacctttgcctcgatggtcgcatacatcaagaacgagaggtgggatggtgtacctttcattctgaaggcaggaaaggcccttaacgagcagaagaccgaggtgcgcatccaattcaaggatgtcacttcaggcatcttcaaggacattccccgaaacgagcttgtcattcgcgtacagccgaacgagagtgtgtacatcaagatgaactcgaagctgcccggtctcagcatgcagactgttctcacagagctcgatctcacctacaggcggcgcttctccgatttgaagatcccagaggcctacgaatcactcattttggatgcgctcaagggtgaccactccaactttgtccgtgacgatgagctcgatgccagctggaggatcttcactcctctgctacactacctcgatgacaacaaggagatcattcctatggagtacccttacggatctcgcggccctgccgtgcttgacgacttcacctcatcttacggctacaaattcagcgacgcagcaggctactcatggcccatgaacgagcagaagctgtaa

SEQ ID NO: 23323 - protein, 492 aa, Phaeosphaeria nodorum
MELKDNTIIVVLGASGDLAKKKTFPALFGLHRNNFLPKNIRIVGYARTKMDHEEYLKRVKSYIKTPTKELEKQLEEFCGFCTYVSGQYDKDESFQELEKHLQDLEKGRKETNRIFYMALPPSVFITVSQHLKRNCYPKNGISRVIVEKPFGKDLPSSRELQTALAPDWTEDELYRIDHYLGKEMVKNILILRFGNEFFGATWNRNHIDNIQITFKEPFGTEGRGGYFDEFGIIRDVMQNHLLQVLTLLAMERPISFSAEDIRDEKVRVLRGMAAIEPKNVIIGQYGKSLDGTKPGYKEDDTVPKDSRCPTFASMVAYIKNERWDGVPFILKAGKALNEQKTEVRIQFKDVTSGIFKDIPRNELVIRVQPNESVYIKMNSKLPGLSMQTVLTELDLTYRRRFSDLKIPEAYESLILDALKGDHSNFVRDDELDASWRIFTPLLHYLDDNKEIIPMEYPYGSRGPAVLDDFTSSYGYKFSDAAGYSWPMNEQKL

SEQ ID NO: 23324 - DNA, 1548 bp, Medicago truncatula; identical to SEQ ID NO: 17185
  CDS (1)..(1548)

SEQ ID NO: 23325 - protein, 515 aa, Medicago truncatula; identical to SEQ ID NO: 17186

SEQ ID NO: 23326 - DNA, 1524 bp, Populus trichocarpa; identical to SEQ ID NO: 17187
  CDS (1)..(1524)

SEQ ID NO: 23327 - protein, 507 aa, Populus trichocarpa; identical to SEQ ID NO: 17188

SEQ ID NO: 23328 - DNA, 1536 bp, Populus trichocarpa; identical to SEQ ID NO: 17189
  CDS (1)..(1536)

SEQ ID NO: 23329 - protein, 511 aa, Populus trichocarpa; identical to SEQ ID NO: 17190

SEQ ID NO: 23330 - DNA, 1536 bp, Populus trichocarpa; identical to SEQ ID NO: 17191
  CDS (1)..(1536)

SEQ ID NO: 23331 - protein, 511 aa, Populus trichocarpa; identical to SEQ ID NO: 17192

SEQ ID NO: 23332 - DNA, 1578 bp, Ips typographus; identical to SEQ ID NO: 17193
  CDS (1)..(1578)

SEQ ID NO: 23333 - protein, 525 aa, Ips typographus; identical to SEQ ID NO: 17194

SEQ ID NO: 23334 - DNA, 1623 bp, Ips typographus; identical to SEQ ID NO: 17195
  CDS (1)..(1623)

SEQ ID NO: 23335 - protein, 540 aa, Ips typographus; identical to SEQ ID NO: 17196

SEQ ID NO: 23336 - DNA, 1536 bp, Solanum tuberosum; identical to SEQ ID NO: 17197
  CDS (1)..(1536)

SEQ ID NO: 23337 - protein, 511 aa, Solanum tuberosum; identical to SEQ ID NO: 17198

SEQ ID NO: 23338 - DNA, 1530 bp, Boophilus microplus; identical to SEQ ID NO: 17199
  CDS (1)..(1530)

SEQ ID NO: 23339 - protein, 509 aa, Boophilus microplus; identical to SEQ ID NO: 17200

SEQ ID NO: 23340 - DNA, 1482 bp, Lactobacillus sanfranciscensis; identical to SEQ ID NO: 17201
  CDS (1)..(1482): transl_table=11

SEQ ID NO: 23341 - protein, 493 aa, Lactobacillus sanfranciscensis; identical to SEQ ID NO: 17202

SEQ ID NO: 23342 - DNA, 1800 bp, Arabidopsis thaliana; identical to SEQ ID NO: 17203
  CDS (1)..(1800)

SEQ ID NO: 23343 - protein, 599 aa, Arabidopsis thaliana; identical to SEQ ID NO: 17204

SEQ ID NO: 23344 - DNA, 1533 bp, Populus suaveolens; identical to SEQ ID NO: 17207
  CDS (1)..(1533)

SEQ ID NO: 23345 - protein, 510 aa, Populus suaveolens; identical to SEQ ID NO: 17208

SEQ ID NO: 23346 - DNA, 1602 bp, Nonomuraea sp; identical to SEQ ID NO: 17209
  CDS (1)..(1602): transl_table=11

SEQ ID NO: 23347 - protein, 533 aa, Nonomuraea sp; identical to SEQ ID NO: 17210

SEQ ID NO: 23348 - DNA, 1467 bp, Gluconobacter oxydans; identical to SEQ ID NO: 17211
  CDS (1)..(1467): transl_table=11

SEQ ID NO: 23349 - protein, 488 aa, Gluconobacter oxydans; identical to SEQ ID NO: 17212

SEQ ID NO: 23350 - DNA, 1746 bp, Solanum tuberosum; identical to SEQ ID NO: 17215
  CDS (1)..(1746)

SEQ ID NO: 23351 - protein, 581 aa, Solanum tuberosum; identical to SEQ ID NO: 17216

SEQ ID NO: 23352 - DNA, 1566 bp, Chlorella vulgaris; identical to SEQ ID NO: 17217
  CDS (1)..(1566)

SEQ ID NO: 23353 - protein, 521 aa, Chlorella vulgaris; identical to SEQ ID NO: 17218

SEQ ID NO: 23354 - DNA, 1518 bp, Oryza sativa subsp; identical to SEQ ID NO: 17221
  CDS (1)..(1518)

SEQ ID NO: 23355 - protein, 505 aa, Oryza sativa subsp; identical to SEQ ID NO: 17222

SEQ ID NO: 23356 - DNA, 1521 bp, Enterococcus mundtii; identical to SEQ ID NO: 17223
  CDS (1)..(1521): transl_table=11

SEQ ID NO: 23357 - protein, 506 aa, Enterococcus mundtii; identical to SEQ ID NO: 17224

SEQ ID NO: 23358 - DNA, 1782 bp, Nicotiana tabacum; identical to SEQ ID NO: 17227
  CDS (1)..(1782)

SEQ ID NO: 23359 - protein, 593 aa, Nicotiana tabacum; identical to SEQ ID NO: 17228

SEQ ID NO: 23360 - DNA, 1530 bp, Triticum aestivum; identical to SEQ ID NO: 17229
  CDS (1)..(1530)

SEQ ID NO: 23361 - protein, 509 aa, Triticum aestivum; identical to SEQ ID NO: 17230

SEQ ID NO: 23362 - DNA, 1542 bp, Triticum aestivum; identical to SEQ ID NO: 17231
  CDS (1)..(1542)

SEQ ID NO: 23363 - protein, 513 aa, Triticum aestivum; identical to SEQ ID NO: 17232

SEQ ID NO: 23364 - DNA, 1530 bp, Triticum aestivum; identical to SEQ ID NO: 17233
  CDS (1)..(1530)

SEQ ID NO: 23365 - protein, 509 aa, Triticum aestivum; identical to SEQ ID NO: 17234

SEQ ID NO: 23366 - DNA, 1749 bp, Solanum tuberosum; identical to SEQ ID NO: 17235
  CDS (1)..(1749)

SEQ ID NO: 23367 - protein, 582 aa, Solanum tuberosum; identical to SEQ ID NO: 17236

SEQ ID NO: 23368 - DNA, 1773 bp, Dunaliella bioculata; identical to SEQ ID NO: 17237
  CDS (1)..(1773)

SEQ ID NO: 23369 - protein, 590 aa, Dunaliella bioculata; identical to SEQ ID NO: 17238

SEQ ID NO: 23370 - DNA, 1551 bp, Mesembryanthemum crystallinum; identical to SEQ ID NO: 17239
  CDS (1)..(1551)

SEQ ID NO: 23371 - protein, 516 aa, Mesembryanthemum crystallinum; identical to SEQ ID NO: 17240

SEQ ID NO: 23372 - DNA, 1731 bp, Arabidopsis thaliana; identical to SEQ ID NO: 17241
  CDS (1)..(1731)

SEQ ID NO: 23373 - protein, 576 aa, Arabidopsis thaliana; identical to SEQ ID NO: 17242

SEQ ID NO: 23374 - DNA, 2112 bp, Arabidopsis thaliana; identical to SEQ ID NO: 17243
  CDS (142)..(1932)

SEQ ID NO: 23375 - protein, 596 aa, Arabidopsis thaliana; identical to SEQ ID NO: 17244

SEQ ID NO: 23376 - DNA, 1878 bp, Arabidopsis thaliana; identical to SEQ ID NO: 17247
  CDS (1)..(1878)

SEQ ID NO: 23377 - protein, 625 aa, Arabidopsis thaliana; identical to SEQ ID NO: 17248

SEQ ID NO: 23378 - DNA, 1548 bp, Arabidopsis thaliana; identical to SEQ ID NO: 17251
  CDS (1)..(1548)

SEQ ID NO: 23379 - protein, 515 aa, Arabidopsis thaliana [sequence omitted]

SEQ ID NO: 23380 - DNA, 1734 bp, Solanum tuberosum; identical to SEQ ID NO: 17253
  CDS (1)..(1734)

SEQ ID NO: 23381 - protein, 577 aa, Solanum tuberosum; identical to SEQ ID NO: 17254

SEQ ID NO: 23382 - DNA, 1725 bp, Spinacia oleracea; identical to SEQ ID NO: 17255
  CDS (1)..(1725)

SEQ ID NO: 23383 - protein, 574 aa, Spinacia oleracea; identical to SEQ ID NO: 17256

SEQ ID NO: 23384 - DNA, 1782 bp, Nicotiana tabacum; identical to SEQ ID NO: 17257
  CDS (1)..(1782)

SEQ ID NO: 23385 - protein, 593 aa, Nicotiana tabacum; identical to SEQ ID NO: 17258

SEQ ID NO: 23386 - DNA, 1485 bp, Actinobacillus actinomycetemcomitans; identical to SEQ ID NO: 17259
  CDS (1)..(1485): transl_table=11

SEQ ID NO: 23387 - protein, 494 aa, Actinobacillus actinomycetemcomitans; identical to SEQ ID NO: 17260

SEQ ID NO: 23388 - DNA, 1533 bp, Aspergillus niger; identical to SEQ ID NO: 17261
  CDS (1)..(1533)

SEQ ID NO: 23389 - protein, 510 aa, Aspergillus niger; identical to SEQ ID NO: 17262

SEQ ID NO: 23390 - DNA, 1437 bp, Borrelia burgdorferi
  CDS (1)..(1437): transl_table=11
atgaaagaaagaagtgtttctaattttgatattgtaatttttggggttaccgggaatttgtctagaaaaaagcttattccttcactttttaatttatttaaaaataaatgtattagcaattttagggttattggtttttctcgtaagatttttacagataaagaatttagattgtatattaaagattctttatggcaggaagagaccgattcgttgattgagatttttttaaatttttttgtttatgtatttggcgattttaatgaaaaggagtcttataaaaatttatttaaatttttagatagaagtcgagaaacgatatattatctttcgacgtctcctgcattttatggacctataattaatcatttgaaaaagtattttttaagcgaaaaattgactttgtcaaaaatagttcttgagaagccttttggctctagtcttgagacagcaaaaaaattaaatagtttgctttattctgcttttaaagaagatcaaatttatagaatagatcactatttgggtaaagaaacggttcaaaatatttttacatttagattcggcaattctatttttgaaaatatttggaataatcgttatgtagattttgttcagattacggtagcagaagaattaggtcttgatggaagagtagagtattacgattctgttggcgctttgaaggatatggttcaaaatcatattttacaattgttaagccttgttgcaatggagtctcctattaaatttgattctgagtttattcatgatgaaaaagtaaaagttttaaaaagtttgaggaaaattagcaaagaagatattaagaattacattgttaagggtcaatatataggctcacaagttcaaggggtttttaaaaaaggctataaagatgaaacagaatttttgggaaattcaaataccgaaacttatttagctatgaaagtgtttattaataattggcgttggtctggggttcctttttatcttagaactgggaaaggtcttgctaggaaattttcagaaatatatattcaatttaaaaaaccgagctttactctttttaacaatagttctgttgatttttctaatgctttgatatttagaattcagccaagggatggaattgaaatcaaattcaataccaagaagcccggatataattatgaaattcaaactgctaatatggagttttcatatcacggagcatttaaaagattgtttgatgaggcttatgagcgtttattgttagacgcttttttaggagatggtactttatatgcgacaagtgatgagattgaaagttcttgggaatttgtttcagatattgcaaataaatgggcagatattgaaatttgtaattatttttatggctctgaaggaccaaaagagatagactctattttagaaaaagatcatttttggcgtaaaatttaa

SEQ ID NO: 23391 - protein, 478 aa, Borrelia burgdorferi
MKERSVSNFDIVIFGVTGNLSRKKLIPSLFNLFKNKCISNFRVIGFSRKIFTDKEFRLYIKDSLWQEETDSLIEIFLNFFVYVFGDFNEKESYKNLFKFLDRSRETIYYLSTSPAFYGPIINHLKKYFLSEKLTLSKIVLEKPFGSSLETAKKLNSLLYSAFKEDQIYRIDHYLGKETVQNIFTFRFGNSIFENIWNNRYVDFVQITVAEELGLDGRVEYYDSVGALKDMVQNHILQLLSLVAMESPIKFDSEFIHDEKVKVLKSLRKISKEDIKNYIVKGQYIGSQVQGVFKKGYKDETEFLGNSNTETYLAMKVFINNWRWSGVPFYLRTGKGLARKFSEIYIQFKKPSFTLFNNSSVDFSNALIFRIQPRDGIEIKFNTKKPGYNYEIQTANMEFSYHGAFKRLFDEAYERLLLDAFLGDGTLYATSDEIESSWEFVSDIANKWADIEICNYFYGSEGPKEIDSILEKDHFWRKI

SEQ ID NO: 23392 - DNA, 1473 bp, Buchnera aphidicola subsp
  CDS (1)..(1473): transl_table=11
atgattatagaaactaatcaagcttgcgatctagtgatttttggaacaaaaggagatttagcaagaagaaaattgttaccagctttatataaattagaaaaatctcaaaaaatacatccagatacacgtataattggtacaggtcgtgctgattggaatacagaagattatataaagatagtaaaaaaagcaataaaaatgtttttaaatgaaaaaattgatgaaaaaatttggaaaaaattacgttcacgtttaaattttttttatattgatgtatttcaagatcttcactttttagaattaaaaaatatattaaatcaaaaaaaaaacattattatttattattgtgcagttccttcaaatacatttaatgctatttttacaggattaggaaaagttaatttaaattcttttccatcaagaatcataatcgaaaaaccactcggtgtatctttagaaacatcaaaaaaaatcaataatcaaattgctaaatattttttagaatcgcaaatctttcgtattgatcactatcttggaaaagaatcaatattaaatcttttagcattacgtttctcaaattcatttttttttcatagttggaataataaaattattgatcatattcaaattactgtatctgaagaagttggtattgaaaatagatggaattattttgatcaaatgggacaaacacgagatatggtacaaaatcatctcctgcaaattcttacaatcgtttctatggataaaccaaaaaatattacacctgaaggcataagagatgaaaaattaaaaatattgcgttctcttaaaaaaattgacttaaatgaaattcatattaagacagcacgaggtcaatatgcatctggaattataaatggtaaaaaggtaccttcttacatagaagaaaatggtgcaaacaaacatagtaaaacagaaacatttgtttcaattaaagttgatattaataatgatcgatggtttggagttccattttatttaagaacgggtaaacgtttagcatataaatactctgaaatagttattgtctttaaaaaaatatctaagaacttgtttcaagaattcaataaaaatttatcacctaacaaattgattatacgtctagaacctaatgaaagtattaaaatatattttttaaataaagtaccaggactcagtaaggaatataaattaaaaagtgataaaatggaatttaattttaatataaataatactaaaaattttgtcgacgcttatgaaaggctattatttgaaagtatgagaggaatacaatcattatttgtatgtcgagaagaagtagaagaagcgtggaaatggattgatccaataataaacggttggaaaaaaacaaatataaatactgtacagttatataaatctggtacatgggggccaaaaagttcggacgaaatcattatgcgagatggtcgattttgggaaacatttaattaa

SEQ ID NO: 23393 - protein, 490 aa, Buchnera aphidicola subsp
MIIETNQACDLVIFGTKGDLARRKLLPALYKLEKSQKIHPDTRIIGTGRADWNTEDYIKIVKKAIKMFLNEKIDEKIWKKLRSRLNFFYIDVFQDLHFLELKNILNQKKNIIIYYCAVPSNTFNAIFTGLGKVNLNSFPSRIIIEKPLGVSLETSKKINNQIAKYFLESQIFRIDHYLGKESILNLLALRFSNSFFFHSWNNKIIDHIQITVSEEVGIENRWNYFDQMGQTRDMVQNHLLQILTIVSMDKPKNITPEGIRDEKLKILRSLKKIDLNEIHIKTARGQYASGIINGKKVPSYIEENGANKHSKTETFVSIKVDINNDRWFGVPFYLRTGKRLAYKYSEIVIVFKKISKNLFQEFNKNLSPNKLIIRLEPNESIKIYFLNKVPGLSKEYKLKSDKMEFNFNINNTKNFVDAYERLLFESMRGIQSLFVCREEVEEAWKWIDPIINGWKKTNINTVQLYKSGTWGPKSSDEIIMRDGRFWETFN

SEQ ID NO: 23394 - DNA, 1581 bp, Ceratitis capitata; identical to SEQ ID NO: 17265
  CDS (1)..(1581)

SEQ ID NO: 23395 - protein, 526 aa, Ceratitis capitata; identical to SEQ ID NO: 17266

SEQ ID NO: 23396 - DNA, 1476 bp, Dickeya dadantii
  CDS (1)..(1476): transl_table=11
atggcggtaacgtcaacagcccaggcgtgtgacctggttattttcggtgcaaagggcgaccttgcgcgccgcaaattgctgccttcactgtatcaactggaaaaagcaggccatattcatccggaaacccgcattatcggcgtgggacgggcggagtgggaccgagacgcctatatcaaagtggtgcgcgaagcgctggaaacctttctcaaggagccgctcgacccggcattgtggacaaccctgagcaatcggctcgacttttgcaaccttgatgtggaagacaccgagggattcaaacggttgggtacgatgctcgatcagcaaaatcgcaccaccatcaattatttcgccatgccgccgagcaccttcggcgctatctgccgcggtctggggcaggccggcctgaacaaggagccggcacgcgtggtgatggaaaaaccgctgggcaccaatctggcgtcgtcacgggtgatcaacaatcaggtagcggagtttttcaacgaatgtcaggtctaccgcatcgaccactatctcggcaaggaaaccgtgctgaacctgctggcactgcgtttcgccaactccctgttcgccaacaactgggataaccgcactatcgatcacgtgcagattaccgtggcggaagaggtgggtattgaagggcgctgggggtatttcgatcaggccgggcaaatgcgcgacatgatccagaaccacctgttgcagattctgaccatgattgccatgtcgccgccggcggatctgagcaccgatcgcattcgtgatgaaaaggtgaaagtcctgcgttcgctgcgccgtatcgatcgttccaatgtgcatgaagtgacggtccgtgggcagtacaccagcggttttgtgcagggcaagaaagtgccgggctacctggaagaagaaggggccaacaagaccagtaataccgaaaccttcgtggccattcgcgtcgatatcgacgactggcgctggtccggcgtgccgttttatctgcgcaccggcaagcgtctgccgtcaaaatgttcggaagtggtggtctactttaaaaacccggcgctcaacctgttccatgattcctatcagcagttgccgcagaataagctgatcatccgcctgcagccggacgaaggggtagaaattcagattctgaacaagattccggggctggaccacaaacatcggttgcagaccaccaagctcgacctgagcttctcggaaacttttaaccagcaacatctggcggacgcctatgagcgcctgttgctggaaaccatgcgtggtattcaggcgctgttcgtgcgccgcgacgaagtggaagaagcctggaaatgggtggattccattatggatgcctgggcaatggacaatgattcccccaaaccttatcaggccgggacctgggggccggtcgcgtccgtcgccatgattacccgcgatgggcgttcctggaacgaagtggaataa

SEQ ID NO: 23397 - protein, 491 aa, Dickeya dadantii
MAVTSTAQACDLVIFGAKGDLARRKLLPSLYQLEKAGHIHPETRIIGVGRAEWDRDAYIKVVREALETFLKEPLDPALWTTLSNRLDFCNLDVEDTEGFKRLGTMLDQQNRTTINYFAMPPSTFGAICRGLGQAGLNKEPARVVMEKPLGTNLASSRVINNQVAEFFNECQVYRIDHYLGKETVLNLLALRFANSLFANNWDNRTIDHVQITVAEEVGIEGRWGYFDQAGQMRDMIQNHLLQILTMIAMSPPADLSTDRIRDEKVKVLRSLRRIDRSNVHEVTVRGQYTSGFVQGKKVPGYLEEEGANKTSNTETFVAIRVDIDDWRWSGVPFYLRTGKRLPSKCSEVVVYFKNPALNLFHDSYQQLPQNKLIIRLQPDEGVEIQILNKIPGLDHKHRLQTTKLDLSFSETFNQQHLADAYERLLLETMRGIQALFVRRDEVEEAWKWVDSIMDAWAMDNDSPKPYQAGTWGPVASVAMITRDGRSWNEVE

SEQ ID NO: 23398 - DNA, 1575 bp, Drosophila melanogaster; identical to SEQ ID NO: 17267
  CDS (1)..(1575)

SEQ ID NO: 23399 - protein, 524 aa, Drosophila melanogaster; identical to SEQ ID NO: 17268

SEQ ID NO: 23400 - DNA, 1476 bp, Escherichia coli O157; identical to SEQ ID NO: 17269
  CDS (1)..(1476): transl_table=11

SEQ ID NO: 23401 - protein, 491 aa, Escherichia coli O157; identical to SEQ ID NO: 17270

SEQ ID NO: 23402 - DNA, 1536 bp, Emericella nidulans; identical to SEQ ID NO: 17271
  CDS (1)..(1536)

SEQ ID NO: 23403 - protein, 511 aa, Emericella nidulans; identical to SEQ ID NO: 17272

SEQ ID NO: 23404 - DNA, 1494 bp, Kluyveromyces lactis; identical to SEQ ID NO: 17273
  CDS (1)..(1494)

SEQ ID NO: 23405 - protein, 497 aa, Kluyveromyces lactis; identical to SEQ ID NO: 17274

SEQ ID NO: 23406 - DNA, 1548 bp, Medicago sativa; identical to SEQ ID NO: 17277
  CDS (1)..(1548)

SEQ ID NO: 23407 - protein, 515 aa, Medicago sativa; identical to SEQ ID NO: 17278

SEQ ID NO: 23408 - DNA, 1476 bp, Rhizobium meliloti; identical to SEQ ID NO: 17281
  CDS (1)..(1476): transl_table=11

SEQ ID NO: 23409 - protein, 491 aa, Rhizobium meliloti; identical to SEQ ID NO: 17282

SEQ ID NO: 23410 - DNA, 1503 bp, Schizosaccharomyces pombe; identical to SEQ ID NO: 17283
  CDS (1)..(1503)

SEQ ID NO: 23411 - protein, 500 aa, Schizosaccharomyces pombe; identical to SEQ ID NO: 17284

SEQ ID NO: 23412 - DNA, 1536 bp, Solanum tuberosum; identical to SEQ ID NO: 17285
  CDS (1)..(1536)

SEQ ID NO: 23413 - protein, 511 aa, Solanum tuberosum; identical to SEQ ID NO: 17286

SEQ ID NO: 23414 - DNA, 1530 bp, Synechocystis sp
  CDS (1)..(1530): transl_table=11
atggtaacgctactcgaaaatcccttccgcactggactccgtcaagaacgcactccagaacccctcattttgaccatttttggtgcatccggggaccttacccaacggaaattggtgccagccatctaccaaatgaaacgagagcgccgcttgcctccagagttaacggtggtcggttttgcgagaagggactggagccacgaccattttcgtgagcagatgcgtaagggcatcgaagaattttccaccggcattggcagtgaagacctgtggaatgagtttgcccagggtttattctactgctctggcaatatggatgacccagaaagctatctcaaattgaaaaacttcctgggggaattggatgaaaaacgtaacaccagaggcaatcgagtcttttatttagctgtttcccccaacttctttcccccgggtattaaacaattgggggcagcgggtatgctgagtgacccggttaaaagtcgcattgtgatcgaaaagccctttggtcgggatttgagttcagcccaaagcttgaaccgggtagtgcagagtgtctgcaaagaaaatcaggtgtatcgcatcgatcattacctgggcaaagaaacggtgcaaaatctgatggtgttccgctttgccaacgctatttttgagccactgtggaaccgtcagtttgttgatcatgtgcaaattaccgtagcagaaacggtaggggtagaagaacgagccggttattacgaatccgccggggctttacgagatatggtgcagaatcacctcatgcaactgttttgtctcaccgccatggacccccccaatgccattgacgcggacagcattcgcaacgaaaaggttaaagtgttgcaggctacccgtttagcggatattaataatttggaaaatgccggtatccggggccaatataaagctggttggatgggaggcaaaccagtgccgggttatcgagaagaaccgggggtagatccaagttccaccactcctacctttgcggccctcaaactgatggtggataactggcgttggcagggggtgcccttctatctacgcacgggtaagcgcatgcctaaaaaagtgagtgaaatcgcaattcaattccggcaagtacctctgttaatttttcaatcggtggcccaccaagctaatcccaatgtgttgagtctaagaattcagcccaacgaaggcatttccctgcgttttgaggcaaaaatgcccggttcagaactgcgtacccgcactgtagatatggattttagttatggttcatcctttggagtggccgcagcggatgcctatcaccgccttttattagattgtatgttgggagaccaaaccctgttcacaagagccgacgaggtagaagaagcttggcgagtagtaactccggtgttgtcggcttgggatgcccccagtgatcctctttccatgcccttgtacgaagctggaacctgggaaccagcggaggcagaatggttaattaataaagatggccgtcgctggcgccgactttag

SEQ ID NO: 23415 - protein, 509 aa, Synechocystis sp
MVTLLENPFRTGLRQERTPEPLILTIFGASGDLTQRKLVPAIYQMKRERRLPPELTVVGFARRDWSHDHFREQMRKGIEEFSTGIGSEDLWNEFAQGLFYCSGNMDDPESYLKLKNFLGELDEKRNTRGNRVFYLAVSPNFFPPGIKQLGAAGMLSDPVKSRIVIEKPFGRDLSSAQSLNRVVQSVCKENQVYRIDHYLGKETVQNLMVFRFANAIFEPLWNRQFVDHVQITVAETVGVEERAGYYESAGALRDMVQNHLMQLFCLTAMDPPNAIDADSIRNEKVKVLQATRLADINNLENAGIRGQYKAGWMGGKPVPGYREEPGVDPSSTTPTFAALKLMVDNWRWQGVPFYLRTGKRMPKKVSEIAIQFRQVPLLIFQSVAHQANPNVLSLRIQPNEGISLRFEAKMPGSELRTRTVDMDFSYGSSFGVAAADAYHRLLLDCMLGDQTLFTRADEVEEAWRVVTPVLSAWDAPSDPLSMPLYEAGTWEPAEAEWLINKDGRRWRRL

SEQ ID NO: 23416 - DNA, 1491 bp, Thermotoga maritima; identical to SEQ ID NO: 17289
  CDS (1)..(1491): transl_table=11

SEQ ID NO: 23417 - protein, 496 aa, Thermotoga maritima; identical to SEQ ID NO: 17290

SEQ ID NO: 23418 - DNA, 1548 bp, Treponema pallidum; identical to SEQ ID NO: 17291
  CDS (1)..(1548): transl_table=11

SEQ ID NO: 23419 - protein, 515 aa, Treponema pallidum; identical to SEQ ID NO: 17292

SEQ ID NO: 23420 - DNA, 1518 bp, Saccharomyces cerevisiae; identical to SEQ ID NO: 17293
  CDS (1)..(1518)

SEQ ID NO: 23421 - protein, 505 aa, Saccharomyces cerevisiae; identical to SEQ ID NO: 17294

SEQ ID NO: 23422 - DNA, 1554 bp, Oryza sativa; identical to SEQ ID NO: 17295
  CDS (1)..(1554)

SEQ ID NO: 23423 - protein, 517 aa, Oryza sativa; identical to SEQ ID NO: 17296

SEQ ID NO: 23424 - DNA, 1890 bp, Oryza sativa; identical to SEQ ID NO: 17297
  CDS (1)..(1890)

SEQ ID NO: 23425 - protein, 629 aa, Oryza sativa; identical to SEQ ID NO: 17298

SEQ ID NO: 23426 - DNA, 1734 bp, Oryza sativa; identical to SEQ ID NO: 17299
  CDS (1)..(1734)

SEQ ID NO: 23427 - protein, 577 aa, Oryza sativa; identical to SEQ ID NO: 17300

SEQ ID NO: 23428 - DNA, 1767 bp, Oryza sativa; identical to SEQ ID NO: 17301
  CDS (1)..(1767)

SEQ ID NO: 23429 - protein, 588 aa, Oryza sativa; identical to SEQ ID NO: 17302

SEQ ID NO: 23430 - DNA, 1551 bp, Brassica napus; identical to SEQ ID NO: 17303
  CDS (1)..(1551)

SEQ ID NO: 23431 - protein, 516 aa, Brassica napus; identical to SEQ ID NO: 17304

SEQ ID NO: 23432 - DNA, 1713 bp, Brassica napus; identical to SEQ ID NO: 17305
  CDS (1)..(1713)

SEQ ID NO: 23433 - protein, 570 aa, Brassica napus; identical to SEQ ID NO: 17306

SEQ ID NO: 23434 - DNA, 1869 bp, Hordeum vulgare; identical to SEQ ID NO: 17307
  CDS (1)..(1869)

SEQ ID NO: 23435 - protein, 622 aa, Hordeum vulgare; identical to SEQ ID NO: 17308

SEQ ID NO: 23436 - DNA, 1800 bp, Brassica napus; identical to SEQ ID NO: 17309
  CDS (1)..(1800)

SEQ ID NO: 23437 - protein, 599 aa, Brassica napus; identical to SEQ ID NO: 17310

SEQ ID NO: 23438 - DNA, 1800 bp, Brassica napus; identical to SEQ ID NO: 17311
  CDS (1)..(1800)

SEQ ID NO: 23439 - protein, 599 aa, Brassica napus; identical to SEQ ID NO: 17312

SEQ ID NO: 23440 - DNA, 1551 bp, Brassica napus; identical to SEQ ID NO: 17313
  CDS (1)..(1551)

SEQ ID NO: 23441 - protein, 516 aa, Brassica napus; identical to SEQ ID NO: 17314

SEQ ID NO: 23442 - DNA, 1551 bp, Brassica napus; identical to SEQ ID NO: 17315
  CDS (1)..(1551)

SEQ ID NO: 23443 - protein, 516 aa, Brassica napus; identical to SEQ ID NO: 17316

SEQ ID NO: 23444 - DNA, 1713 bp, Brassica napus; identical to SEQ ID NO: 17317
  CDS (1)..(1713)

SEQ ID NO: 23445 - protein, 570 aa, Brassica napus; identical to SEQ ID NO: 17318

SEQ ID NO: 23446 - DNA, 1842 bp, Glycine max; identical to SEQ ID NO: 17319
  CDS (1)..(1842)

SEQ ID NO: 23447 - protein, 613 aa, Glycine max; identical to SEQ ID NO: 17320

SEQ ID NO: 23448 - DNA, 1557 bp, Glycine max; identical to SEQ ID NO: 17321
  CDS (1)..(1557)

SEQ ID NO: 23449 - protein, 518 aa, Glycine max; identical to SEQ ID NO: 17322

SEQ ID NO: 23450 - DNA, 1557 bp, Glycine max; identical to SEQ ID NO: 17323
  CDS (1)..(1557)

SEQ ID NO: 23451 - protein, 518 aa, Glycine max; identical to SEQ ID NO: 17324

SEQ ID NO: 23452 - DNA, 1557 bp, Glycine max; identical to SEQ ID NO: 17325
  CDS (1)..(1557)

SEQ ID NO: 23453 - protein, 518 aa, Glycine max; identical to SEQ ID NO: 17326

SEQ ID NO: 23454 - DNA, 1530 bp, Hordeum vulgare; identical to SEQ ID NO: 17327
  CDS (1)..(1530)

SEQ ID NO: 23455 - protein, 509 aa, Hordeum vulgare; identical to SEQ ID NO: 17328

SEQ ID NO: 23456 - DNA, 1530 bp, Triticum aestivum; identical to SEQ ID NO: 17329
  CDS (1)..(1530)

SEQ ID NO: 23457 - protein, 509 aa, Triticum aestivum; identical to SEQ ID NO: 17330

SEQ ID NO: 23458 - DNA, 1788 bp, Triticum aestivum; identical to SEQ ID NO: 17331
  CDS (1)..(1788)

SEQ ID NO: 23459 - protein, 595 aa, Triticum aestivum; identical to SEQ ID NO: 17332

SEQ ID NO: 23460 - DNA, 1797 bp, Zea mays; identical to SEQ ID NO: 17333
  CDS (1)..(1797)

SEQ ID NO: 23461 - protein, 598 aa, Zea mays; identical to SEQ ID NO: 17334

SEQ ID NO: 23462 - DNA, 1554 bp, Zea mays; identical to SEQ ID NO: 17335
  CDS (1)..(1554)

SEQ ID NO: 23463 - protein, 517 aa, Zea mays; identical to SEQ ID NO: 17336

SEQ ID NO: 23464 - DNA, 1554 bp, Zea mays; identical to SEQ ID NO: 17337
  CDS (1)..(1554)

SEQ ID NO: 23465 - protein, 517 aa, Zea mays; identical to SEQ ID NO: 17338

SEQ ID NO: 23466 - DNA, 1524 bp, Zea mays
  CDS (1)..(1524)
atgtcaggaggatcttcaccatcatcaaggcgaaacagctttaattctttgtctaaggacctagaccttccttcagagcaaggttgtctctccattgttgtacttggggcttctggtgaccttgctaagaagaaaacattcccagccctctaccacctctttgagcagggattcatacaatctggagaagtccatatatttggttatgctagatcaaatctttctgatgatgggttaagagaacgcattcgtgggtatctcaaaggagccccagaagatctttcagaatttttgcaactaataaaatatgtcagtggttcctatgatactggagaaggatttgagaaactgaacagggcaatatcagagtatgaggtgtcaaagagttcaggaagctatcgcaggctcttttatttggcattgcctccatctgtctacccttcagtgtgcaaaatgatcagaacatattgcatgaatccatcttctcaccctggatggaccagagtcattgttgagaagccctttggaaaggacttggattccgctgaagaattaagtgcccaacttggggagctattcgaggaacaccaactatacaggatagaccattacctgggaaaagagttggtccaaaacttgcttgttcttcgttttgccaaccgattattcttgcctctttggaaccgcgacaatattgataatatacagattgtattcagggaagactttggtactgaagggcgtggaggatattttgaccaatatggaatcattcgtgatatcattcagaatcatttactgcaggttttctgtttggttgcaatggaaaagcctgtctcccttaagcctgagcacatcagagatgagaaagtcaaggttctgcaatctgtgaaccctattaagcctgaagaggtagtccttgggcaatacgatggctacaaggatgaccctacagtgccagatgactcgaataccccaacttttgcatctgttgttcttcgggtacacaatgaaagatgggaaggtgttcctttcattcttaaagctggtaaagcattgagttcaaagaaagcagaagttcgggtgcaattcaaggatgtccctggtgacatttttagaagcaagaagcaaggaagaaatgagtttgttatacgcctccaaccatcagaagccatgtacatgaaactaactgttaagaagcctgggttagaaatggctactgaacaaagtgaacttgatctgtcatatgggatgcggtaccaaaatgtcaaaattcctgaggcatatgaacgccttatcttggatacaataagaggtgatcagcagcactttgttcgcagagatgagctacaggctgcttggaagatcttcactcctttgctgcatgacattgacgacggcaagctgaaggccctcccgtatgaacctggcagccggggacccaaggaagccgacgaattgagcgcgagagttggatacgtgcagacccacggttacatatgggtaccgccgacccttgcatag

SEQ ID NO: 23467 - protein, 507 aa, Zea mays; identical to SEQ ID NO: 16896

SEQ ID NO: 23468 - DNA, 1797 bp, Zea mays; identical to SEQ ID NO: 17339
  CDS (1)..(1797)

SEQ ID NO: 23469 - protein, 598 aa, Zea mays; identical to SEQ ID NO: 17340

SEQ ID NO: 23470 - DNA, 1818 bp, Zea mays; identical to SEQ ID NO: 17341
  CDS (1)..(1818)

SEQ ID NO: 23471 - protein, 605 aa, Zea mays; identical to SEQ ID NO: 17342

SEQ ID NO: 23472 - DNA, 24 bp, Artificial sequence
  primer
atgggttctggtcaatggcatatg

SEQ ID NO: 23473 - DNA, 20 bp, Artificial sequence
  primer
ttacaatgtaggagggatcc

SEQ ID NO: 23474 - protein, 532 aa, Artificial sequence
  consensus sequence
  Variant (2)..(3): Xaa in position 2 to 3 is any amino acid
  Variant (7)..(9): Xaa in position 7 to 9 is any amino acid
  Variant (11)..(12): Xaa in position 11 to 12 is any amino acid
  Variant (14)..(14): Xaa in position 14 is any amino acid
  Variant (16)..(17): Xaa in position 16 to 17 is any amino acid
  Variant (19)..(22): Xaa in position 19 to 22 is any amino acid
  Variant (23)..(23): Xaa in position 23 is any or no amino acid
  Variant (25)..(28): Xaa in position 25 to 28 is any amino acid
  Variant (29)..(32): Xaa in position 29 to 32 is any or no amino acid
  Variant (34)..(35): Xaa in position 34 to 35 is any amino acid
  Variant (37)..(53): Xaa in position 37 to 53 is any amino acid
  Variant (54)..(72): Xaa in position 54 to 72 is any or no amino acid
  Variant (74)..(78): Xaa in position 74 to 78 is any amino acid
  Variant (80)..(88): Xaa in position 80 to 88 is any amino acid
  Variant (89)..(93): Xaa in position 89 to 93 is any or no amino acid
  Variant (95)..(105): Xaa in position 95 to 105 is any amino acid
  Variant (106)..(124): Xaa in position 106 to 124 is any or no amino acid
  Variant (126)..(129): Xaa in position 126 to 129 is any amino acid
  Variant (131)..(149): Xaa in position 131 to 149 is any amino acid
  Variant (150)..(158): Xaa in position 150 to 158 is any or no amino acid
  Variant (160)..(160): Xaa in position 160 is any amino acid
  Variant (161)..(162): Xaa in position 161 to 162 is any or no amino acid
  Variant (166)..(166): Xaa in position 166 is any amino acid
  Variant (168)..(168): Xaa in position 168 is any amino acid
  Variant (170)..(171): Xaa in position 170 to 171 is any amino acid
  Variant (173)..(180): Xaa in position 173 to 180 is any amino acid
  Variant (181)..(185): Xaa in position 181 to 185 is any or no amino acid
  Variant (187)..(190): Xaa in position 187 to 190 is any amino acid
  Variant (200)..(200): Xaa in position 200 is any amino acid
  Variant (202)..(202): Xaa in position 202 is any amino acid
  Variant (204)..(207): Xaa in position 204 to 207 is any amino acid
  Variant (210)..(210): Xaa in position 210 is any amino acid
  Variant (212)..(217): Xaa in position 212 to 217 is any amino acid
  Variant (218)..(218): Xaa in position 218 is any or no amino acid
  Variant (220)..(222): Xaa in position 220 to 222 is any amino acid
  Variant (223)..(223): Xaa in position 223 is any or no amino acid
  Variant (225)..(226): Xaa in position 225 to 226 is any amino acid
  Variant (227)..(227): Xaa in position 227 is any or no amino acid
  Variant (230)..(232): Xaa in position 230 to 232 is any amino acid
  Variant (234)..(234): Xaa in position 234 is any amino acid
  Variant (235)..(235): Xaa in position 235 is any or no amino acid
  Variant (237)..(239): Xaa in position 237 to 239 is any amino acid
  Variant (241)..(241): Xaa in position 241 is any amino acid
  Variant (244)..(244): Xaa in position 244 is any amino acid
  Variant (246)..(247): Xaa in position 246 to 247 is any amino acid
  Variant (249)..(250): Xaa in position 249 to 250 is any amino acid
  Variant (251)..(251): Xaa in position 251 is any or no amino acid
  Variant (254)..(255): Xaa in position 254 to 255 is any amino acid
  Variant (259)..(259): Xaa in position 259 is any amino acid
  Variant (262)..(265): Xaa in position 262 to 265 is any amino acid
  Variant (266)..(266): Xaa in position 266 is any or no amino acid
  Variant (270)..(270): Xaa in position 270 is any amino acid
  Variant (272)..(275): Xaa in position 272 to 275 is any amino acid
  Variant (276)..(280): Xaa in position 276 to 280 is any or no amino acid
  Variant (282)..(282): Xaa in position 282 is any amino acid
  Variant (285)..(285): Xaa in position 285 is any amino acid
  Variant (289)..(305): Xaa in position 289 to 305 is any amino acid
  Variant (306)..(320): Xaa in position 306 to 320 is any or no amino acid
  Variant (323)..(327): Xaa in position 323 to 327 is any amino acid
  Variant (328)..(335): Xaa in position 328 to 335 is any or no amino acid
  Variant (337)..(337): Xaa in position 337 is any amino acid
  Variant (339)..(339): Xaa in position 339 is any amino acid
  Variant (341)..(349): Xaa in position 341 to 349 is any amino acid
  Variant (351)..(351): Xaa in position 351 is any amino acid
  Variant (354)..(354): Xaa in position 354 is any amino acid
  Variant (359)..(362): Xaa in position 359 to 362 is any amino acid
  Variant (365)..(371): Xaa in position 365 to 371 is any amino acid
  Variant (373)..(376): Xaa in position 373 to 376 is any amino acid
  Variant (378)..(386): Xaa in position 378 to 386 is any amino acid
  Variant (387)..(415): Xaa in position 387 to 415 is any or no amino acid
  Variant (417)..(420): Xaa in position 417 to 420 is any amino acid
  Variant (422)..(422): Xaa in position 422 is any amino acid
  Variant (423)..(423): Xaa in position 423 is any or no amino acid
  Variant (426)..(426): Xaa in position 426 is any amino acid
  Variant (428)..(435): Xaa in position 428 to 435 is any amino acid
  Variant (436)..(439): Xaa in position 436 to 439 is any or no amino acid
  Variant (441)..(441): Xaa in position 441 is any amino acid
  Variant (443)..(465): Xaa in position 443 to 465 is any amino acid
  Variant (466)..(474): Xaa in position 466 to 474 is any or no amino acid
  Variant (480)..(481): Xaa in position 480 to 481 is any amino acid
  Variant (483)..(485): Xaa in position 483 to 485 is any amino acid
  Variant (487)..(490): Xaa in position 487 to 490 is any amino acid
  Variant (492)..(492): Xaa in position 492 is any amino acid
  Variant (494)..(494): Xaa in position 494 is any amino acid
  Variant (497)..(500): Xaa in position 497 to 500 is any amino acid
  Variant (502)..(505): Xaa in position 502 to 505 is any amino acid
  Variant (507)..(517): Xaa in position 507 to 517 is any amino acid
  Variant (518)..(524): Xaa in position 518 to 524 is any or no amino acid
  Variant (526)..(527): Xaa in position 526 to 527 is any amino acid
  Variant (529)..(529): Xaa in position 529 is any amino acid
  Variant (530)..(530): Xaa in position 530 is any or no amino acid
GXXGDLXXXKXXPXLXXLXXXXXLXXXXXXXXGXXRXXXXXXXXXXXXXXXXXXXXXXXXXXXXXXXXXXXXFXXXXXYXXXXXXXXXXXXXXLXXXXXXXXXXXXXXXXXXXXXXXXXXXXXXYXXXXPXXXXXXXXXXXXXXXXXXXXXXXXXXXXRXXXEKPXGXDXXSXXXXXXXXXXXXXEXXXXRIDHYLGKEXVXNXXXXRFXNXXXXXXXWXXXXIXXXQIXXXEXXGXXXRXGYXDXXGXXXRDXXQNHXLQXXXXXAMEXPXXXXXXXXXRXEKXKVLXXXXXXXXXXXXXXXXXXXXXXXXXXXXXXXXGYXXXXXXXXXXXXXSXTXTXXXXXXXXXNXRWXGVPFXXXXGKXXXXXXXEXXXXFXXXXXXXXXXXXXXXXXXXXXXXXXXXXXXXXXXXXXXNXXXXRXXQPXEXXXXXXXXXXXXKXPXXXXXXXXXXXXXXXXXXXXXXXXXXXXXXXXAYERLXXDXXXGXXXXFXRXDEXXXXWXXXXPXXXXXXXXXXXXXXXXXXYXXGXXGP

SEQ ID NO: 23475 - protein, 14 aa, Artificial sequence
  protein pattern
  Variant (10)..(10): Xaa in position 10 is any amino acid
  Variant (12)..(12): Xaa in position 12 is any amino acid
  Variant (14)..(14): Xaa in position 14 is Ile, Leu or Met
RIDHYLGKEXVXNX

SEQ ID NO: 23476 - protein, 13 aa, Artificial sequence
  protein pattern
  Variant (3)..(3): Xaa in position 3 is any amino acid
  Variant (8)..(8): Xaa in position 8 is any amino acid
  Variant (9)..(9): Xaa in position 9 is Ile, Leu, Met or Val
  Variant (10)..(10): Xaa in position 10 is Lys or Arg
  Variant (11)..(11): Xaa in position 11 is Ala, Cys, Ser or Thr
RWXGVPFXXXXGK

SEQ ID NO: 23477 - protein, 14 aa, Artificial sequence
  protein pattern
  Variant (2)..(3): Xaa in position 2 to 3 is any amino acid
  Variant (6)..(6): Xaa in position 6 is Ile, Met or Val
  Variant (7)..(7): Xaa in position 7 is Phe, Ile, Leu, Met or Val
  Variant (11)..(11): Xaa in position 11 is any or no amino acid
  Variant (13)..(13): Xaa in position 13 is any or no amino acid
GXXRDXXQNHXLXQ

SEQ ID NO: 23478 - protein, 26 aa, Artificial sequence
  protein pattern
  Variant (3)..(3): Xaa in position 3 is any amino acid
  Variant (5)..(5): Xaa in position 5 is Phe, Ile, Leu, Met or Val
  Variant (6)..(6): Xaa in position 6 is any amino acid
  Variant (7)..(7): Xaa in position 7 is Asp or Glu
  Variant (8)..(10): Xaa in position 8 to 10 is any amino acid
  Variant (12)..(15): Xaa in position 12 to 15 is any amino acid
  Variant (17)..(20): Xaa in position 17 to 20 is any amino acid
  Variant (21)..(21): Xaa in position 21 is Ala, Asp, Glu, Gly or Gln
  Variant (22)..(25): Xaa in position 22 to 25 is any amino acid
YEXLXXXXXXGXXXXFXXXXXXXXXW

SEQ ID NO: 23479 - protein, 19 aa, Artificial sequence
  protein pattern
  Variant (2)..(2): Xaa in position 2 is Ala or Gly
  Variant (3)..(3): Xaa in position 3 is any amino acid
  Variant (7)..(7): Xaa in position 7 is Ala, Ser, Thr or Val
  Variant (8)..(9): Xaa in position 8 to 9 is any amino acid
  Variant (11)..(14): Xaa in position 11 to 14 is any or no amino acid
  Variant (16)..(17): Xaa in position 16 to 17 is any amino acid
  Variant (18)..(18): Xaa in position 18 is any or no amino acid
GXXGDLXXXKXXXXLXXXL

SEQ ID NO: 23480 - protein, 14 aa, Artificial sequence
  protein pattern
  Variant (2)..(2): Xaa in position 2 is Ile, Leu or Val
  Variant (3)..(3): Xaa in position 3 is Ile, Met or Val
  Variant (4)..(4): Xaa in position 4 is Phe, Ile, Leu, Met or Val
  Variant (8)..(8): Xaa in position 8 is Phe, Ile or Leu
  Variant (10)..(10): Xaa in position 10 is any amino acid
  Variant (12)..(13): Xaa in position 12 to 13 is any amino acid
  Variant (14)..(14): Xaa in position 14 is Asn, Pro, Ser or Thr
RXXXEKPXGXDXXX

SEQ ID NO: 23481 - protein, 20 aa, Artificial sequence
  protein pattern
  Variant (2)..(2): Xaa in position 2 is Asp, Glu, Asn or Ser
  Variant (3)..(3): Xaa in position 3 is any amino acid
  Variant (5)..(11): Xaa in position 5 to 11 is any amino acid
  Variant (12)..(12): Xaa in position 12 is Ile, Leu or Val
  Variant (14)..(14): Xaa in position 14 is any amino acid
  Variant (17)..(17): Xaa in position 17 is any amino acid
  Variant (18)..(18): Xaa in position 18 is Lys or Arg
  Variant (19)..(19): Xaa in position 19 is Ala, Ile or Val
  Variant (20)..(20): Xaa in position 20 is Phe, Ile, Leu, Met or Val
MXXPXXXXXXXXRXEKXXXX

SEQ ID NO: 23482 - DNA, 309 bp, Arabidopsis thaliana; identical to SEQ ID NO: 2749
  CDS (1)..(309)

SEQ ID NO: 23483 - protein, 102 aa, Arabidopsis thaliana; identical to SEQ ID NO: 2750

SEQ ID NO: 23484 - DNA, 309 bp, Glycine max; identical to SEQ ID NO: 3656
  CDS (1)..(309)

SEQ ID NO: 23485 - protein, 102 aa, Glycine max; identical to SEQ ID NO: 2906

SEQ ID NO: 23486 - DNA, 511 bp, Glycine max; identical to SEQ ID NO: 2575
  CDS (108)..(416)

SEQ ID NO: 23487 - protein, 102 aa, Glycine max; identical to SEQ ID NO: 2576

SEQ ID NO: 23488 - DNA, 309 bp, Glycine max; identical to SEQ ID NO: 2577
  CDS (1)..(309)

SEQ ID NO: 23489 - protein, 102 aa, Glycine max; identical to SEQ ID NO: 2578

SEQ ID NO: 23490 - DNA, 312 bp, Sorghum bicolor; identical to SEQ ID NO: 2581
  CDS (1)..(312)

SEQ ID NO: 23491 - protein, 103 aa, Sorghum bicolor; identical to SEQ ID NO: 2582

SEQ ID NO: 23492 - DNA, 315 bp, Zea mays; identical to SEQ ID NO: 3668
  CDS (1)..(315)

SEQ ID NO: 23493 - protein, 104 aa, Zea mays; identical to SEQ ID NO: 3669

SEQ ID NO: 23494 - DNA, 315 bp, Zea mays; identical to SEQ ID NO: 2583
  CDS (1)..(315)

SEQ ID NO: 23495 - protein, 104 aa, Zea mays; identical to SEQ ID NO: 2584

SEQ ID NO: 23496 - DNA, 312 bp, Zea mays; identical to SEQ ID NO: 2585
  CDS (1)..(312)

SEQ ID NO: 23497 - protein, 103 aa, Zea mays; identical to SEQ ID NO: 2586

SEQ ID NO: 23498 - DNA, 315 bp, Zea mays; identical to SEQ ID NO: 2587
  CDS (1)..(315)

SEQ ID NO: 23499 - protein, 104 aa, Zea mays; identical to SEQ ID NO: 2588

SEQ ID NO: 23500 - DNA, 351 bp, Bombyx mori; identical to SEQ ID NO: 2591
  CDS (1)..(351)

SEQ ID NO: 23501 - protein, 116 aa, Bombyx mori; identical to SEQ ID NO: 2592

SEQ ID NO: 23502 - DNA, 405 bp, Oryza sativa (japonica cultivar-group); identical to SEQ ID NO: 2593
  CDS (1)..(405)

SEQ ID NO: 23503 - protein, 134 aa, Oryza sativa (japonica cultivar-group); identical to SEQ ID NO: 2594

SEQ ID NO: 23504 - DNA, 477 bp, Oryza sativa (japonica cultivar-group); identical to SEQ ID NO: 2595
  CDS (1)..(477)

SEQ ID NO: 23505 - protein, 158 aa, Oryza sativa (japonica cultivar-group); identical to SEQ ID NO: 2596

SEQ ID NO: 23506 - DNA, 309 bp, Arabidopsis thaliana; identical to SEQ ID NO: 2597
  CDS (1)..(309)

SEQ ID NO: 23507 - protein, 102 aa, Arabidopsis thaliana; identical to SEQ ID NO: 2598

SEQ ID NO: 23508 - DNA, 351 bp, Drosophila melanogaster; identical to SEQ ID NO: 2599
  CDS (1)..(351)

SEQ ID NO: 23509 - protein, 116 aa, Drosophila melanogaster; identical to SEQ ID NO: 2600

SEQ ID NO: 23510 - DNA, 345 bp, Drosophila melanogaster; identical to SEQ ID NO: 2967
  CDS (1)..(345)

SEQ ID NO: 23511 - protein, 114 aa, Drosophila melanogaster; identical to SEQ ID NO: 2968

SEQ ID NO: 23512 - DNA, 480 bp, Arabidopsis thaliana; identical to SEQ ID NO: 3688
  CDS (1)..(480)

SEQ ID NO: 23513 - protein, 159 aa, Arabidopsis thaliana; identical to SEQ ID NO: 3689

SEQ ID NO: 23514 - DNA, 297 bp, Apis mellifera; identical to SEQ ID NO: 2601
  CDS (1)..(297)

SEQ ID NO: 23515 - protein, 98 aa, Apis mellifera; identical to SEQ ID NO: 2602

SEQ ID NO: 23516 - DNA, 312 bp, Strongylocentrotus purpuratus; identical to SEQ ID NO: 2603
  CDS (1)..(312)

SEQ ID NO: 23517 - protein, 103 aa, Strongylocentrotus purpuratus; identical to SEQ ID NO: 2604

SEQ ID NO: 23518 - DNA, 381 bp, Strongylocentrotus purpuratus; identical to SEQ ID NO: 2605
  CDS (1)..(381)

SEQ ID NO: 23519 - protein, 126 aa, Strongylocentrotus purpuratus; identical to SEQ ID NO: 2606

SEQ ID NO: 23520 - DNA, 321 bp, Strongylocentrotus purpuratus; identical to SEQ ID NO: 2607
  CDS (1)..(321)

SEQ ID NO: 23521 - protein, 106 aa, Strongylocentrotus purpuratus; identical to SEQ ID NO: 2608

SEQ ID NO: 23522 - DNA, 297 bp, Nasonia vitripennis; identical to SEQ ID NO: 2609
  CDS (1)..(297)

SEQ ID NO: 23523 - protein, 98 aa, Nasonia vitripennis; identical to SEQ ID NO: 2610

SEQ ID NO: 23524 - DNA, 339 bp, Anopheles gambiae str. PEST; identical to SEQ ID NO: 2611
  CDS (1)..(339)

SEQ ID NO: 23525 - protein, 112 aa, Anopheles gambiae str. PEST; identical to SEQ ID NO: 2612

SEQ ID NO: 23526 - DNA, 309 bp, Magnaporthe grisea 70-15; identical to SEQ ID NO: 2613
  CDS (1)..(309)

SEQ ID NO: 23527 - protein, 102 aa, Magnaporthe grisea 70-15; identical to SEQ ID NO: 2614

SEQ ID NO: 23528 - DNA, 321 bp, Gibberella zeae PH-1; identical to SEQ ID NO: 2617
  CDS (1)..(321)

SEQ ID NO: 23529 - protein, 106 aa, Gibberella zeae PH-1; identical to SEQ ID NO: 2618

SEQ ID NO: 23530 - DNA, 324 bp, Kluyveromyces lactis NRRL Y-1140; identical to SEQ ID NO: 3321
  CDS (1)..(324)

SEQ ID NO: 23531 - protein, 107 aa, Kluyveromyces lactis NRRL Y-1140; identical to SEQ ID NO: 3322

SEQ ID NO: 23532 - DNA, 636 bp, Kluyveromyces lactis NRRL Y-1140; identical to SEQ ID NO: 2619
  CDS (1)..(636)

SEQ ID NO: 23533 - protein, 211 aa, Kluyveromyces lactis NRRL Y-1140; identical to SEQ ID NO: 2620

SEQ ID NO: 23534 - DNA, 315 bp, Debaryomyces hansenii CBS767; identical to SEQ ID NO: 2623
  CDS (1)..(315)

SEQ ID NO: 23535 - protein, 104 aa, Debaryomyces hansenii CBS767; identical to SEQ ID NO: 2624

SEQ ID NO: 23536 - DNA, 318 bp, Yarrowia lipolytica CLIB122; identical to SEQ ID NO: 2625
  CDS (1)..(318)

SEQ ID NO: 23537 - protein, 105 aa, Yarrowia lipolytica CLIB122; identical to SEQ ID NO: 2626

SEQ ID NO: 23538 - DNA, 309 bp, Aspergillus nidulans FGSC A4; identical to SEQ ID NO: 2629
  CDS (1)..(309)

SEQ ID NO: 23539 - protein, 102 aa, Aspergillus nidulans FGSC A4; identical to SEQ ID NO: 2630

SEQ ID NO: 23540 - DNA, 690 bp, Candida albicans SC5314; identical to SEQ ID NO: 2631
  CDS (1)..(690): transl_table=12

SEQ ID NO: 23541 - protein, 229 aa, Candida albicans SC5314; identical to SEQ ID NO: 2632

SEQ ID NO: 23542 - DNA, 360 bp, Candida albicans SC5314; identical to SEQ ID NO: 2633
  CDS (1)..(360): transl_table=12

SEQ ID NO: 23543 - protein, 119 aa, Candida albicans SC5314; identical to SEQ ID NO: 2634

SEQ ID NO: 23544 - DNA, 309 bp, Ustilago maydis 521; identical to SEQ ID NO: 2635
  CDS (1)..(309)

SEQ ID NO: 23545 - protein, 102 aa, Ustilago maydis 521; identical to SEQ ID NO: 2636

SEQ ID NO: 23546 - DNA, 471 bp, Candida albicans SC5314; identical to SEQ ID NO: 2639
  CDS (1)..(471): transl_table=12

SEQ ID NO: 23547 - protein, 156 aa, Candida albicans SC5314; identical to SEQ ID NO: 2640

SEQ ID NO: 23548 - DNA, 309 bp, Tribolium castaneum; identical to SEQ ID NO: 2641
  CDS (1)..(309)

SEQ ID NO: 23549 - protein, 102 aa, Tribolium castaneum; identical to SEQ ID NO: 2642

SEQ ID NO: 23550 - DNA, 384 bp, Medicago truncatula; identical to SEQ ID NO: 2643
  CDS (1)..(384)

SEQ ID NO: 23551 - protein, 127 aa, Medicago truncatula; identical to SEQ ID NO: 2644

SEQ ID NO: 23552 - DNA, 306 bp, Vitis vinifera; identical to SEQ ID NO: 2645
  CDS (1)..(306)
  misc_feature (225)..(225): r is g or a
  misc_feature (273)..(273): y is t or c

SEQ ID NO: 23553 - protein, 101 aa, Vitis vinifera; identical to SEQ ID NO: 2646

SEQ ID NO: 23554 - DNA, 324 bp, Vitis vinifera; identical to SEQ ID NO: 2647
  CDS (1)..(324)

SEQ ID NO: 23555 - protein, 107 aa, Vitis vinifera; identical to SEQ ID NO: 2648

SEQ ID NO: 23556 - DNA, 321 bp, Vitis vinifera; identical to SEQ ID NO: 2649
  CDS (1)..(321)

SEQ ID NO: 23557 - protein, 106 aa, Vitis vinifera; identical to SEQ ID NO: 2650

SEQ ID NO: 23558 - DNA, 345 bp, Vitis vinifera; identical to SEQ ID NO: 2651
  CDS (1)..(345)

SEQ ID NO: 23559 - protein, 114 aa, Vitis vinifera; identical to SEQ ID NO: 2652

SEQ ID NO: 23560 - DNA, 414 bp, Vitis vinifera; identical to SEQ ID NO: 2653
  CDS (1)..(414)
  misc_feature (18)..(18): y is t or c
  misc_feature (63)..(63): m is a or c

SEQ ID NO: 23561 - protein, 137 aa, Vitis vinifera; identical to SEQ ID NO: 2654

SEQ ID NO: 23562 - DNA, 315 bp, Fritillaria agrestis; identical to SEQ ID NO: 2655
  CDS (1)..(315)

SEQ ID NO: 23563 - protein, 104 aa, Fritillaria agrestis; identical to SEQ ID NO: 2656

SEQ ID NO: 23564 - DNA, 405 bp, Mesembryanthemum crystallinum; identical to SEQ ID NO: 3017
  CDS (1)..(405)

SEQ ID NO: 23565 - protein, 134 aa, Mesembryanthemum crystallinum; identical to SEQ ID NO: 3018

SEQ ID NO: 23566 - DNA, 402 bp, Thellungiella halophila; identical to SEQ ID NO: 2657
  CDS (1)..(402)

SEQ ID NO: 23567 - protein, 133 aa, Thellungiella halophila; identical to SEQ ID NO: 2658

SEQ ID NO: 23568 - DNA, 309 bp, Plantago major; identical to SEQ ID NO: 2659
  CDS (1)..(309)

SEQ ID NO: 23569 - protein, 102 aa, Plantago major; identical to SEQ ID NO: 2660

SEQ ID NO: 23570 - DNA, 312 bp, Musa acuminata; identical to SEQ ID NO: 3023
  CDS (1)..(312)

SEQ ID NO: 23571 - protein, 103 aa, Musa acuminata; identical to SEQ ID NO: 3024

SEQ ID NO: 23572 - DNA, 312 bp, Musa acuminata; identical to SEQ ID NO: 2661
  CDS (1)..(312)

SEQ ID NO: 23573 - protein, 103 aa, Musa acuminata; identical to SEQ ID NO: 2662

SEQ ID NO: 23574 - DNA, 450 bp, Medicago truncatula; identical to SEQ ID NO: 2663
  CDS (1)..(450)

SEQ ID NO: 23575 - protein, 149 aa, Medicago truncatula; identical to SEQ ID NO: 2664

SEQ ID NO: 23576 - DNA, 357 bp, Medicago truncatula; identical to SEQ ID NO: 2665
  CDS (1)..(357)

SEQ ID NO: 23577 - protein, 118 aa, Medicago truncatula; identical to SEQ ID NO: 2666

SEQ ID NO: 23578 - DNA, 384 bp, Medicago truncatula; identical to SEQ ID NO: 2667
  CDS (1)..(384)

SEQ ID NO: 23579 - protein, 127 aa, Medicago truncatula; identical to SEQ ID NO: 2668

SEQ ID NO: 23580 - DNA, 366 bp, Medicago truncatula; identical to SEQ ID NO: 2669
  CDS (1)..(366)

SEQ ID NO: 23581 - protein, 121 aa, Medicago truncatula; identical to SEQ ID NO: 2670

SEQ ID NO: 23582 - DNA, 399 bp, Beta vulgaris; identical to SEQ ID NO: 2671
  CDS (1)..(399)

SEQ ID NO: 23583 - protein, 132 aa, Beta vulgaris; identical to SEQ ID NO: 2672

SEQ ID NO: 23584 - DNA, 321 bp, Beta vulgaris; identical to SEQ ID NO: 2673
  CDS (1)..(321)

SEQ ID NO: 23585 - protein, 106 aa, Beta vulgaris; identical to SEQ ID NO: 2674

SEQ ID NO: 23586 - DNA, 309 bp, Beta vulgaris; identical to SEQ ID NO: 2675
  CDS (1)..(309)

SEQ ID NO: 23587 - protein, 102 aa, Beta vulgaris; identical to SEQ ID NO: 2676

SEQ ID NO: 23588 - DNA, 309 bp, Beta vulgaris; identical to SEQ ID NO: 2677
  CDS (1)..(309)

SEQ ID NO: 23589 - protein, 102 aa, Beta vulgaris; identical to SEQ ID NO: 2678

SEQ ID NO: 23590 - DNA, 309 bp, Beta vulgaris; identical to SEQ ID NO: 2679
  CDS (1)..(309)

SEQ ID NO: 23591 - protein, 102 aa, Beta vulgaris; identical to SEQ ID NO: 2680

SEQ ID NO: 23592 - DNA, 492 bp, Aspergillus oryzae; identical to SEQ ID NO: 2681
  CDS (1)..(492)

SEQ ID NO: 23593 - protein, 163 aa, Aspergillus oryzae; identical to SEQ ID NO: 2682

SEQ ID NO: 23594 - DNA, 309 bp, Aspergillus oryzae; identical to SEQ ID NO: 2683
  CDS (1)..(309)

SEQ ID NO: 23595 - protein, 102 aa, Aspergillus oryzae; identical to SEQ ID NO: 2684

SEQ ID NO: 23596 - DNA, 381 bp, Populus tremula x Populus tremuloides; identical to SEQ ID NO: 2685
  CDS (1)..(381)

SEQ ID NO: 23597 - protein, 126 aa, Populus tremula x Populus tremuloides; identical to SEQ ID NO: 2686

SEQ ID NO: 23598 - DNA, 318 bp, Plantago major; identical to SEQ ID NO: 2687
  CDS (1)..(318)

SEQ ID NO: 23599 - protein, 105 aa, Plantago major; identical to SEQ ID NO: 2688

SEQ ID NO: 23600 - DNA, 342 bp, Triticum aestivum; identical to SEQ ID NO: 2689
  CDS (1)..(342)

SEQ ID NO: 23601 - protein, 113 aa, Triticum aestivum; identical to SEQ ID NO: 2690

SEQ ID NO: 23602 - DNA, 420 bp, Populus tremula x Populus tremuloides; identical to SEQ ID NO: 2691
  CDS (1)..(420)

SEQ ID NO: 23603 - protein, 139 aa, Populus tremula x Populus tremuloides; identical to SEQ ID NO: 2692

SEQ ID NO: 23604 - DNA, 348 bp, Tilia platyphyllos; identical to SEQ ID NO: 2693
  CDS (1)..(348)

SEQ ID NO: 23605 - protein, 115 aa, Tilia platyphyllos; identical to SEQ ID NO: 2694

SEQ ID NO: 23606 - DNA, 342 bp, Deschampsia antarctica; identical to SEQ ID NO: 2695
  CDS (1)..(342)

SEQ ID NO: 23607 - protein, 113 aa, Deschampsia antarctica; identical to SEQ ID NO: 2696

SEQ ID NO: 23608 - DNA, 333 bp, Schizosaccharomyces pombe; identical to SEQ ID NO: 2699
  CDS (1)..(333)

SEQ ID NO: 23609 - protein, 110 aa, Schizosaccharomyces pombe; identical to SEQ ID NO: 2700

SEQ ID NO: 23610 - DNA, 327 bp, Solanum lycopersicum; identical to SEQ ID NO: 2701
  CDS (1)..(327)

SEQ ID NO: 23611 - protein, 108 aa, Solanum lycopersicum; identical to SEQ ID NO: 2702

SEQ ID NO: 23612 - DNA, 315 bp, Vernicia fordii; identical to SEQ ID NO: 2703
  CDS (1)..(315)

SEQ ID NO: 23613 - protein, 104 aa, Vernicia fordii; identical to SEQ ID NO: 2704

SEQ ID NO: 23614 - DNA, 447 bp, Arabidopsis thaliana; identical to SEQ ID NO: 2705
  CDS (1)..(447)

SEQ ID NO: 23615 - protein, 148 aa, Arabidopsis thaliana; identical to SEQ ID NO: 2706

SEQ ID NO: 23616 - DNA, 312 bp, Arabidopsis thaliana; identical to SEQ ID NO: 2707
  CDS (1)..(312)

SEQ ID NO: 23617 - protein, 103 aa, Arabidopsis thaliana; identical to SEQ ID NO: 2708

SEQ ID NO: 23618 - DNA, 312 bp, Arabidopsis thaliana; identical to SEQ ID NO: 2709
  CDS (1)..(312)

SEQ ID NO: 23619 - protein, 103 aa, Arabidopsis thaliana; identical to SEQ ID NO: 2710

SEQ ID NO: 23620 - DNA, 309 bp, Arabidopsis thaliana; identical to SEQ ID NO: 2711
  CDS (1)..(309)

SEQ ID NO: 23621 - protein, 102 aa, Arabidopsis thaliana; identical to SEQ ID NO: 2712

SEQ ID NO: 23622 - DNA, 309 bp, Arabidopsis thaliana; identical to SEQ ID NO: 2713
  CDS (1)..(309)

SEQ ID NO: 23623 - protein, 102 aa, Arabidopsis thaliana; identical to SEQ ID NO: 2714

SEQ ID NO: 23624 - DNA, 300 bp, Arabidopsis thaliana; identical to SEQ ID NO: 2715
  CDS (1)..(300)

SEQ ID NO: 23625 - protein, 99 aa, Arabidopsis thaliana; identical to SEQ ID NO: 2716

SEQ ID NO: 23626 - DNA, 540 bp, Arabidopsis thaliana; identical to SEQ ID NO: 2717
  CDS (1)..(540)

SEQ ID NO: 23627 - protein, 179 aa, Arabidopsis thaliana; identical to SEQ ID NO: 2718

SEQ ID NO: 23628 - DNA, 453 bp, Arabidopsis thaliana; identical to SEQ ID NO: 2719
  CDS (1)..(453)

SEQ ID NO: 23629 - protein, 150 aa, Arabidopsis thaliana; identical to SEQ ID NO: 2720

SEQ ID NO: 23630 - DNA, 378 bp, Arabidopsis thaliana; identical to SEQ ID NO: 2721
  CDS (1)..(378)

SEQ ID NO: 23631 - protein, 125 aa, Arabidopsis thaliana; identical to SEQ ID NO: 2722

SEQ ID NO: 23632 - DNA, 336 bp, Arabidopsis thaliana; identical to SEQ ID NO: 2723
  CDS (1)..(336)

SEQ ID NO: 23633 - protein, 111 aa, Arabidopsis thaliana; identical to SEQ ID NO: 2724

SEQ ID NO: 23634 - DNA, 393 bp, Arabidopsis thaliana; identical to SEQ ID NO: 2725
  CDS (1)..(393)

SEQ ID NO: 23635 - protein, 130 aa, Arabidopsis thaliana; identical to SEQ ID NO: 2726

SEQ ID NO: 23636 - DNA, 408 bp, Arabidopsis thaliana; identical to SEQ ID NO: 2727
  CDS (1)..(408)

SEQ ID NO: 23637 - protein, 135 aa, Arabidopsis thaliana; identical to SEQ ID NO: 2728

SEQ ID NO: 23638 - DNA, 402 bp, Oryza sativa subsp; identical to SEQ ID NO: 2763
  CDS (1)..(402)

SEQ ID NO: 23639 - protein, 133 aa, Oryza sativa subsp; identical to SEQ ID NO: 2764

SEQ ID NO: 23640 - DNA, 525 bp, Arabidopsis thaliana; identical to SEQ ID NO: 2729
  CDS (1)..(525)

SEQ ID NO: 23641 - protein, 174 aa, Arabidopsis thaliana; identical to SEQ ID NO: 2730

SEQ ID NO: 23642 - DNA, 435 bp, Arabidopsis thaliana; identical to SEQ ID NO: 2731
  CDS (1)..(435)

SEQ ID NO: 23643 - protein, 144 aa, Arabidopsis thaliana; identical to SEQ ID NO: 2732

SEQ ID NO: 23644 - DNA, 411 bp, Arabidopsis thaliana; identical to SEQ ID NO: 2733
  CDS (1)..(411)

SEQ ID NO: 23645 - protein, 136 aa, Arabidopsis thaliana; identical to SEQ ID NO: 2734

SEQ ID NO: 23646 - DNA, 423 bp, Arabidopsis thaliana; identical to SEQ ID NO: 2735
  CDS (1)..(423)

SEQ ID NO: 23647 - protein, 140 aa, Arabidopsis thaliana; identical to SEQ ID NO: 2736

SEQ ID NO: 23648 - DNA, 414 bp, Arabidopsis thaliana; identical to SEQ ID NO: 2737
  CDS (1)..(414)

SEQ ID NO: 23649 - protein, 137 aa, Arabidopsis thaliana; identical to SEQ ID NO: 2738

SEQ ID NO: 23650 - DNA, 309 bp, Arabidopsis thaliana; identical to SEQ ID NO: 2739
  CDS (1)..(309)

SEQ ID NO: 23651 - protein, 102 aa, Arabidopsis thaliana; identical to SEQ ID NO: 2740

SEQ ID NO: 23652 - DNA, 309 bp, Arabidopsis thaliana; identical to SEQ ID NO: 2741
  CDS (1)..(309)

SEQ ID NO: 23653 - protein, 102 aa, Arabidopsis thaliana; identical to SEQ ID NO: 2742

SEQ ID NO: 23654 - DNA, 309 bp, Arabidopsis thaliana; identical to SEQ ID NO: 2743
  CDS (1)..(309)

SEQ ID NO: 23655 - protein, 102 aa, Arabidopsis thaliana; identical to SEQ ID NO: 2744

SEQ ID NO: 23656 - DNA, 309 bp, Arabidopsis thaliana; identical to SEQ ID NO: 2745
  CDS (1)..(309)

SEQ ID NO: 23657 - protein, 102 aa, Arabidopsis thaliana; identical to SEQ ID NO: 2746

SEQ ID NO: 23658 - DNA, 444 bp, Oryza sativa subsp; identical to SEQ ID NO: 2757
  CDS (1)..(444)

SEQ ID NO: 23659 - protein, 147 aa, Oryza sativa subsp; identical to SEQ ID NO: 2758

SEQ ID NO: 23660 - DNA, 309 bp, Arabidopsis thaliana; identical to SEQ ID NO: 2573
  CDS (1)..(309)

SEQ ID NO: 23661 - protein, 102 aa, Arabidopsis thaliana; identical to SEQ ID NO: 2574

SEQ ID NO: 23662 - DNA, 309 bp, Arabidopsis thaliana; identical to SEQ ID NO: 2747
  CDS (1)..(309)

SEQ ID NO: 23663 - protein, 102 aa, Arabidopsis thaliana; identical to SEQ ID NO: 2748

SEQ ID NO: 23664 - DNA, 309 bp, Arabidopsis thaliana; identical to SEQ ID NO: 2751
  CDS (1)..(309)

SEQ ID NO: 23665 - protein, 102 aa, Arabidopsis thaliana; identical to SEQ ID NO: 2752

SEQ ID NO: 23666 - DNA, 378 bp, Oryza sativa; identical to SEQ ID NO: 2753
  CDS (1)..(378)

SEQ ID NO: 23667 - protein, 125 aa, Oryza sativa; identical to SEQ ID NO: 2754

SEQ ID NO: 23668 - DNA, 312 bp, Oryza sativa; identical to SEQ ID NO: 2755
  CDS (1)..(312)

SEQ ID NO: 23669 - protein, 103 aa, Oryza sativa; identical to SEQ ID NO: 2756

SEQ ID NO: 23670 - DNA, 378 bp, Oryza sativa; identical to SEQ ID NO: 2759
  CDS (1)..(378)

SEQ ID NO: 23671 - protein, 125 aa, Oryza sativa; identical to SEQ ID NO: 2760

SEQ ID NO: 23672 - DNA, 408 bp, Oryza sativa; identical to SEQ ID NO: 2761
  CDS (1)..(408)

SEQ ID NO: 23673 - protein, 135 aa, Oryza sativa; identical to SEQ ID NO: 2762

SEQ ID NO: 23674 - DNA, 396 bp, Oryza sativa; identical to SEQ ID NO: 3111
  CDS (1)..(396)

SEQ ID NO: 23675 - protein, 131 aa, Oryza sativa; identical to SEQ ID NO: 3112

SEQ ID NO: 23676 - DNA, 408 bp, Oryza sativa; identical to SEQ ID NO: 2765
  CDS (1)..(408)

SEQ ID NO: 23677 - protein, 135 aa, Oryza sativa; identical to SEQ ID NO: 2766

SEQ ID NO: 23678 - DNA, 384 bp, Oryza sativa; identical to SEQ ID NO: 2767
  CDS (1)..(384)

SEQ ID NO: 23679 - protein, 127 aa, Oryza sativa; identical to SEQ ID NO: 2768

SEQ ID NO: 23680 - DNA, 345 bp, Oryza sativa; identical to SEQ ID NO: 2769
  CDS (1)..(345)

SEQ ID NO: 23681 - protein, 114 aa, Oryza sativa; identical to SEQ ID NO: 2770

SEQ ID NO: 23682 - DNA, 417 bp, Oryza sativa; identical to SEQ ID NO: 2771
  CDS (1)..(417)

SEQ ID NO: 23683 - protein, 138 aa, Oryza sativa; identical to SEQ ID NO: 2772

SEQ ID NO: 23684 - DNA, 399 bp, Oryza sativa; identical to SEQ ID NO: 2773
  CDS (1)..(399)

SEQ ID NO: 23685 - protein, 132 aa, Oryza sativa; identical to SEQ ID NO: 2774

SEQ ID NO: 23686 - DNA, 411 bp, Oryza sativa; identical to SEQ ID NO: 2775
  CDS (1)..(411)

SEQ ID NO: 23687 - protein, 136 aa, Oryza sativa; identical to SEQ ID NO: 2776

SEQ ID NO: 23688 - DNA, 579 bp, Oryza sativa; identical to SEQ ID NO: 2777
  CDS (1)..(579)

SEQ ID NO: 23689 - protein, 192 aa, Oryza sativa; identical to SEQ ID NO: 2778

SEQ ID NO: 23690 - DNA, 495 bp, Oryza sativa; identical to SEQ ID NO: 2779
  CDS (1)..(495)

SEQ ID NO: 23691 - protein, 164 aa, Oryza sativa; identical to SEQ ID NO: 2780

SEQ ID NO: 23692 - DNA, 327 bp, Oryza sativa; identical to SEQ ID NO: 2781
  CDS (1)..(327)

SEQ ID NO: 23693 - protein, 108 aa, Oryza sativa; identical to SEQ ID NO: 2782

SEQ ID NO: 23694 - DNA, 330 bp, Oryza sativa; identical to SEQ ID NO: 2783
  CDS (1)..(330)

SEQ ID NO: 23695 - protein, 109 aa, Oryza sativa; identical to SEQ ID NO: 2784

SEQ ID NO: 23696 - DNA, 330 bp, Oryza sativa; identical to SEQ ID NO: 2785
  CDS (1)..(330)

SEQ ID NO: 23697 - protein, 109 aa, Oryza sativa; identical to SEQ ID NO: 2786

SEQ ID NO: 23698 - DNA, 330 bp, Oryza sativa; identical to SEQ ID NO: 2787
  CDS (1)..(330)

SEQ ID NO: 23699 - protein, 109 aa, Oryza sativa; identical to SEQ ID NO: 2788

SEQ ID NO: 23700 - DNA, 312 bp, Oryza sativa; identical to SEQ ID NO: 2789
  CDS (1)..(312)

SEQ ID NO: 23701 - protein, 103 aa, Oryza sativa; identical to SEQ ID NO: 2790

SEQ ID NO: 23702 - DNA, 315 bp, Oryza sativa; identical to SEQ ID NO: 2791
  CDS (1)..(315)

SEQ ID NO: 23703 - protein, 104 aa, Oryza sativa; identical to SEQ ID NO: 2792

SEQ ID NO: 23704 - DNA, 309 bp, Brassica napus; identical to SEQ ID NO: 2793
  CDS (1)..(309)

SEQ ID NO: 23705 - protein, 102 aa, Brassica napus; identical to SEQ ID NO: 2794

SEQ ID NO: 23706 - DNA, 537 bp, Brassica napus; identical to SEQ ID NO: 3157
  CDS (1)..(537)

SEQ ID NO: 23707 - protein, 178 aa, Brassica napus; identical to SEQ ID NO: 3158

SEQ ID NO: 23708 - DNA, 309 bp, Brassica napus; identical to SEQ ID NO: 2795
  CDS (1)..(309)

SEQ ID NO: 23709 - protein, 102 aa, Brassica napus; identical to SEQ ID NO: 2796

SEQ ID NO: 23710 - DNA, 309 bp, Brassica napus; identical to SEQ ID NO: 2797
  CDS (1)..(309)

SEQ ID NO: 23711 - protein, 102 aa, Brassica napus; identical to SEQ ID NO: 2798

SEQ ID NO: 23712 - DNA, 309 bp, Brassica napus; identical to SEQ ID NO: 2799
  CDS (1)..(309)

SEQ ID NO: 23713 - protein, 102 aa, Brassica napus; identical to SEQ ID NO: 2800

SEQ ID NO: 23714 - DNA, 309 bp, Brassica napus; identical to SEQ ID NO: 2801
  CDS (1)..(309)

SEQ ID NO: 23715 - protein, 102 aa, Brassica napus; identical to SEQ ID NO: 2802

SEQ ID NO: 23716 - DNA, 318 bp, Brassica napus; identical to SEQ ID NO: 2803
  CDS (1)..(318)

SEQ ID NO: 23717 - protein, 105 aa, Brassica napus; identical to SEQ ID NO: 2804

SEQ ID NO: 23718 - DNA, 300 bp, Brassica napus; identical to SEQ ID NO: 2805
  CDS (1)..(300)

SEQ ID NO: 23719 - protein, 99 aa, Brassica napus; identical to SEQ ID NO: 2806

SEQ ID NO: 23720 - DNA, 309 bp, Brassica napus; identical to SEQ ID NO: 2807
  CDS (1)..(309)

SEQ ID NO: 23721 - protein, 102 aa, Brassica napus; identical to SEQ ID NO: 2808

SEQ ID NO: 23722 - DNA, 519 bp, Brassica napus; identical to SEQ ID NO: 2809
  CDS (1)..(519)

SEQ ID NO: 23723 - protein, 172 aa, Brassica napus; identical to SEQ ID NO: 2810

SEQ ID NO: 23724 - DNA, 306 bp, Glycine max; identical to SEQ ID NO: 2811
  CDS (1)..(306)

SEQ ID NO: 23725 - protein, 101 aa, Glycine max; identical to SEQ ID NO: 2812

SEQ ID NO: 23726 - DNA, 315 bp, Triticum aestivum; identical to SEQ ID NO: 2813
  CDS (1)..(315)

SEQ ID NO: 23727 - protein, 104 aa, Triticum aestivum; identical to SEQ ID NO: 2814

SEQ ID NO: 23728 - DNA, 306 bp, Glycine max; identical to SEQ ID NO: 2815
  CDS (1)..(306)

SEQ ID NO: 23729 - protein, 101 aa, Glycine max; identical to SEQ ID NO: 2816

SEQ ID NO: 23730 - DNA, 309 bp, Brassica napus; identical to SEQ ID NO: 2817
  CDS (1)..(309)

SEQ ID NO: 23731 - protein, 102 aa, Brassica napus; identical to SEQ ID NO: 2818

SEQ ID NO: 23732 - DNA, 309 bp, Brassica napus; identical to SEQ ID NO: 2819
  CDS (1)..(309)

SEQ ID NO: 23733 - protein, 102 aa, Brassica napus; identical to SEQ ID NO: 2820

SEQ ID NO: 23734 - DNA, 399 bp, Glycine max; identical to SEQ ID NO: 2821
  CDS (1)..(399)

SEQ ID NO: 23735 - protein, 132 aa, Glycine max; identical to SEQ ID NO: 2822

SEQ ID NO: 23736 - DNA, 312 bp, Triticum aestivum; identical to SEQ ID NO: 2823
  CDS (1)..(312)

SEQ ID NO: 23737 - protein, 103 aa, Triticum aestivum; identical to SEQ ID NO: 2824

SEQ ID NO: 23738 - DNA, 414 bp, Triticum aestivum; identical to SEQ ID NO: 2825
  CDS (1)..(414)

SEQ ID NO: 23739 - protein, 137 aa, Triticum aestivum; identical to SEQ ID NO: 2826

SEQ ID NO: 23740 - DNA, 414 bp, Zea mays; identical to SEQ ID NO: 2827
  CDS (1)..(414)

SEQ ID NO: 23741 - protein, 137 aa, Zea mays; identical to SEQ ID NO: 2828

SEQ ID NO: 23742 - DNA, 504 bp, Zea mays; identical to SEQ ID NO: 2831
  CDS (1)..(504)

SEQ ID NO: 23743 - protein, 167 aa, Zea mays; identical to SEQ ID NO: 2832

SEQ ID NO: 23744 - DNA, 312 bp, Hordeum vulgare; identical to SEQ ID NO: 2833
  CDS (1)..(312)

SEQ ID NO: 23745 - protein, 103 aa, Hordeum vulgare; identical to SEQ ID NO: 2834

SEQ ID NO: 23746 - DNA, 393 bp, Hordeum vulgare; identical to SEQ ID NO: 2835
  CDS (1)..(393)

SEQ ID NO: 23747 - protein, 130 aa, Hordeum vulgare; identical to SEQ ID NO: 2836

SEQ ID NO: 23748 - DNA, 378 bp, Brassica napus; identical to SEQ ID NO: 2837
  CDS (1)..(378)

SEQ ID NO: 23749 - protein, 125 aa, Brassica napus; identical to SEQ ID NO: 2838

SEQ ID NO: 23750 - DNA, 522 bp, Brassica napus; identical to SEQ ID NO: 2839
  CDS (1)..(522)

SEQ ID NO: 23751 - protein, 173 aa, Brassica napus; identical to SEQ ID NO: 2840

SEQ ID NO: 23752 - DNA, 525 bp, Brassica napus; identical to SEQ ID NO: 2841
  CDS (1)..(525)

SEQ ID NO: 23753 - protein, 174 aa, Brassica napus; identical to SEQ ID NO: 2842

SEQ ID NO: 23754 - DNA, 309 bp, Brassica napus; identical to SEQ ID NO: 2843
  CDS (1)..(309)

SEQ ID NO: 23755 - protein, 102 aa, Brassica napus; identical to SEQ ID NO: 2844

SEQ ID NO: 23756 - DNA, 309 bp, Brassica napus; identical to SEQ ID NO: 2845
  CDS (1)..(309)

SEQ ID NO: 23757 - protein, 102 aa, Brassica napus; identical to SEQ ID NO: 2846

SEQ ID NO: 23758 - DNA, 522 bp, Brassica napus; identical to SEQ ID NO: 2847
  CDS (1)..(522)

SEQ ID NO: 23759 - protein, 173 aa, Brassica napus; identical to SEQ ID NO: 2848

SEQ ID NO: 23760 - DNA, 435 bp, Brassica napus; identical to SEQ ID NO: 2849
  CDS (1)..(435)

SEQ ID NO: 23761 - protein, 144 aa, Brassica napus; identical to SEQ ID NO: 2850

SEQ ID NO: 23762 - DNA, 435 bp, Brassica napus; identical to SEQ ID NO: 2851
  CDS (1)..(435)

SEQ ID NO: 23763 - protein, 144 aa, Brassica napus; identical to SEQ ID NO: 2852

SEQ ID NO: 23764 - DNA, 309 bp, Brassica napus; identical to SEQ ID NO: 2853
  CDS (1)..(309)

SEQ ID NO: 23765 - protein, 102 aa, Brassica napus; identical to SEQ ID NO: 2854

SEQ ID NO: 23766 - DNA, 300 bp, Brassica napus; identical to SEQ ID NO: 2855
  CDS (1)..(300)

SEQ ID NO: 23767 - protein, 99 aa, Brassica napus; identical to SEQ ID NO: 2856

SEQ ID NO: 23768 - DNA, 363 bp, Brassica napus; identical to SEQ ID NO: 2857
  CDS (1)..(363)

SEQ ID NO: 23769 - protein, 120 aa, Brassica napus; identical to SEQ ID NO: 2858

SEQ ID NO: 23770 - DNA, 336 bp, Brassica napus; identical to SEQ ID NO: 2859
  CDS (1)..(336)

SEQ ID NO: 23771 - protein, 111 aa, Brassica napus; identical to SEQ ID NO: 2860

SEQ ID NO: 23772 - DNA, 309 bp, Brassica napus; identical to SEQ ID NO: 2861
  CDS (1)..(309)

SEQ ID NO: 23773 - protein, 102 aa, Brassica napus; identical to SEQ ID NO: 2862

SEQ ID NO: 23774 - DNA, 522 bp, Brassica napus; identical to SEQ ID NO: 2863
  CDS (1)..(522)

SEQ ID NO: 23775 - protein, 173 aa, Brassica napus; identical to SEQ ID NO: 2864

SEQ ID NO: 23776 - DNA, 309 bp, Brassica napus; identical to SEQ ID NO: 2865
  CDS (1)..(309)

SEQ ID NO: 23777 - protein, 102 aa, Brassica napus; identical to SEQ ID NO: 2866

SEQ ID NO: 23778 - DNA, 300 bp, Brassica napus; identical to SEQ ID NO: 2867
  CDS (1)..(300)

SEQ ID NO: 23779 - protein, 99 aa, Brassica napus; identical to SEQ ID NO: 2868

SEQ ID NO: 23780 - DNA, 309 bp, Brassica napus; identical to SEQ ID NO: 2869
  CDS (1)..(309)

SEQ ID NO: 23781 - protein, 102 aa, Brassica napus; identical to SEQ ID NO: 2870

SEQ ID NO: 23782 - DNA, 309 bp, Brassica napus; identical to SEQ ID NO: 2871
  CDS (1)..(309)

SEQ ID NO: 23783 - protein, 102 aa, Brassica napus; identical to SEQ ID NO: 2872

SEQ ID NO: 23784 - DNA, 309 bp, Brassica napus; identical to SEQ ID NO: 2873
  CDS (1)..(309)

SEQ ID NO: 23785 - protein, 102 aa, Brassica napus; identical to SEQ ID NO: 2874

SEQ ID NO: 23786 - DNA, 312 bp, Brassica napus; identical to SEQ ID NO: 2875
  CDS (1)..(312)

SEQ ID NO: 23787 - protein, 103 aa, Brassica napus; identical to SEQ ID NO: 2876

SEQ ID NO: 23788 - DNA, 426 bp, Brassica napus; identical to SEQ ID NO: 2877
  CDS (1)..(426)

SEQ ID NO: 23789 - protein, 141 aa, Brassica napus; identical to SEQ ID NO: 2878

SEQ ID NO: 23790 - DNA, 309 bp, Brassica napus; identical to SEQ ID NO: 2879
  CDS (1)..(309)

SEQ ID NO: 23791 - protein, 102 aa, Brassica napus; identical to SEQ ID NO: 2880

SEQ ID NO: 23792 - DNA, 333 bp, Glycine max; identical to SEQ ID NO: 2881
  CDS (1)..(333)

SEQ ID NO: 23793 - protein, 110 aa, Glycine max; identical to SEQ ID NO: 2882

SEQ ID NO: 23794 - DNA, 324 bp, Glycine max; identical to SEQ ID NO: 2883
  CDS (1)..(324)

SEQ ID NO: 23795 - protein, 107 aa, Glycine max; identical to SEQ ID NO: 2884

SEQ ID NO: 23796 - DNA, 501 bp, Glycine max; identical to SEQ ID NO: 2885
  CDS (1)..(501)

SEQ ID NO: 23797 - protein, 166 aa, Glycine max; identical to SEQ ID NO: 2886

SEQ ID NO: 23798 - DNA, 399 bp, Glycine max; identical to SEQ ID NO: 2887
  CDS (1)..(399)

SEQ ID NO: 23799 - protein, 132 aa, Glycine max; identical to SEQ ID NO: 2888

SEQ ID NO: 23800 - DNA, 309 bp, Glycine max; identical to SEQ ID NO: 2889
  CDS (1)..(309)

SEQ ID NO: 23801 - protein, 102 aa, Glycine max; identical to SEQ ID NO: 2890

SEQ ID NO: 23802 - DNA, 525 bp, Glycine max; identical to SEQ ID NO: 2891
  CDS (1)..(525)

SEQ ID NO: 23803 - protein, 174 aa, Glycine max; identical to SEQ ID NO: 2892

SEQ ID NO: 23804 - DNA, 483 bp, Glycine max; identical to SEQ ID NO: 2893
  CDS (1)..(483)

SEQ ID NO: 23805 - protein, 160 aa, Glycine max; identical to SEQ ID NO: 2894

SEQ ID NO: 23806 - DNA, 522 bp, Glycine max; identical to SEQ ID NO: 2895
  CDS (1)..(522)

SEQ ID NO: 23807 - protein, 173 aa, Glycine max; identical to SEQ ID NO: 2896

SEQ ID NO: 23808 - DNA, 411 bp, Glycine max; identical to SEQ ID NO: 2897
  CDS (1)..(411)

SEQ ID NO: 23809 - protein, 136 aa, Glycine max; identical to SEQ ID NO: 2898

SEQ ID NO: 23810 - DNA, 309 bp, Glycine max; identical to SEQ ID NO: 2899
  CDS (1)..(309)

SEQ ID NO: 23811 - protein, 102 aa, Glycine max; identical to SEQ ID NO: 2900

SEQ ID NO: 23812 - DNA, 423 bp, Glycine max; identical to SEQ ID NO: 2901
  CDS (1)..(423)

SEQ ID NO: 23813 - protein, 140 aa, Glycine max; identical to SEQ ID NO: 2902

SEQ ID NO: 23814 - DNA, 306 bp, Glycine max; identical to SEQ ID NO: 2903
  CDS (1)..(306)

SEQ ID NO: 23815 - protein, 101 aa, Glycine max; identical to SEQ ID NO: 2904

SEQ ID NO: 23816 - DNA, 318 bp, Glycine max; identical to SEQ ID NO: 2907
  CDS (1)..(318)

SEQ ID NO: 23817 - protein, 105 aa, Glycine max; identical to SEQ ID NO: 2908

SEQ ID NO: 23818 - DNA, 402 bp, Glycine max; identical to SEQ ID NO: 2909
  CDS (1)..(402)

SEQ ID NO: 23819 - protein, 133 aa, Glycine max; identical to SEQ ID NO: 2910

SEQ ID NO: 23820 - DNA, 309 bp, Glycine max; identical to SEQ ID NO: 2911
  CDS (1)..(309)

SEQ ID NO: 23821 - protein, 102 aa, Glycine max; identical to SEQ ID NO: 2912

SEQ ID NO: 23822 - DNA, 402 bp, Glycine max; identical to SEQ ID NO: 2913
  CDS (1)..(402)

SEQ ID NO: 23823 - protein, 133 aa, Glycine max; identical to SEQ ID NO: 2914

SEQ ID NO: 23824 - DNA, 480 bp, Zea mays; identical to SEQ ID NO: 2915
  CDS (1)..(480)

SEQ ID NO: 23825 - protein, 159 aa, Zea mays; identical to SEQ ID NO: 2916

SEQ ID NO: 23826 - DNA, 393 bp, Zea mays; identical to SEQ ID NO: 2917
  CDS (1)..(393)

SEQ ID NO: 23827 - protein, 130 aa, Zea mays; identical to SEQ ID NO: 2918

SEQ ID NO: 23828 - DNA, 345 bp, Zea mays; identical to SEQ ID NO: 2919
  CDS (1)..(345)

SEQ ID NO: 23829 - protein, 114 aa, Zea mays; identical to SEQ ID NO: 2920

SEQ ID NO: 23830 - DNA, 312 bp, Zea mays; identical to SEQ ID NO: 2921
  CDS (1)..(312)

SEQ ID NO: 23831 - protein, 103 aa, Zea mays; identical to SEQ ID NO: 2922

SEQ ID NO: 23832 - DNA, 342 bp, Zea mays; identical to SEQ ID NO: 2923
  CDS (1)..(342)

SEQ ID NO: 23833 - protein, 113 aa, Zea mays; identical to SEQ ID NO: 2924

SEQ ID NO: 23834 - DNA, 537 bp, Zea mays; identical to SEQ ID NO: 2925
  CDS (1)..(537)

SEQ ID NO: 23835 - protein, 178 aa, Zea mays; identical to SEQ ID NO: 2926

SEQ ID NO: 23836 - DNA, 399 bp, Zea mays; identical to SEQ ID NO: 2927
  CDS (1)..(399)

SEQ ID NO: 23837 - protein, 132 aa, Zea mays; identical to SEQ ID NO: 2928

SEQ ID NO: 23838 - DNA, 315 bp, Zea mays; identical to SEQ ID NO: 2929
  CDS (1)..(315)

SEQ ID NO: 23839 - protein, 104 aa, Zea mays; identical to SEQ ID NO: 2930

SEQ ID NO: 23840 - DNA, 21 bp, Artificial sequence
  primer
atggagaagatacaaaagatg

SEQ ID NO: 23841 - DNA, 22 bp, Artificial sequence
  primer
tcaaagccataaagccccaaag

SEQ ID NO: 23842 - protein, 102 aa, Artificial sequence
  consensus sequence
  Variant (2)..(3): Xaa in position 2 to 3 is any amino acid
  Variant (5)..(8): Xaa in position 5 to 8 is any amino acid
  Variant (9)..(9): Xaa in position 9 is any or no amino acid
  Variant (11)..(18): Xaa in position 11 to 18 is any amino acid
  Variant (20)..(30): Xaa in position 20 to 30 is any amino acid
  Variant (31)..(34): Xaa in position 31 to 34 is any or no amino acid
  Variant (36)..(36): Xaa in position 36 is any amino acid
  Variant (38)..(45): Xaa in position 38 to 45 is any amino acid
  Variant (46)..(49): Xaa in position 46 to 49 is any or no amino acid
  Variant (51)..(53): Xaa in position 51 to 53 is any amino acid
  Variant (54)..(70): Xaa in position 54 to 70 is any or no amino acid
  Variant (73)..(73): Xaa in position 73 is any amino acid
  Variant (76)..(77): Xaa in position 76 to 77 is any amino acid
  Variant (79)..(81): Xaa in position 79 to 81 is any amino acid
  Variant (82)..(83): Xaa in position 82 to 83 is any or no amino acid
  Variant (85)..(94): Xaa in position 85 to 94 is any amino acid
  Variant (95)..(95): Xaa in position 95 is any or no amino acid
  Variant (97)..(97): Xaa in position 97 is any amino acid
  Variant (99)..(100): Xaa in position 99 to 100 is any amino acid
  Variant (101)..(101): Xaa in position 101 is any or no amino acid
VXXFXXXXXCXXXXXXXXLXXXXXXXXXXXXXXXEXDXXXXXXXXXXXXLXXXXXXXXXXXXXXXXXXXXVPXVFXXGXXXXXGXXXXXXXXXXXGXLXXXL

SEQ ID NO: 23843 - protein, 30 aa, Artificial sequence
  protein pattern
  Variant (2)..(2): Xaa in position 2 is any amino acid
  Variant (5)..(5): Xaa in position 5 is any amino acid
  Variant (6)..(6): Xaa in position 6 is any or no amino acid
  Variant (8)..(10): Xaa in position 8 to 10 is any amino acid
  Variant (11)..(11): Xaa in position 11 is any or no amino acid
  Variant (13)..(13): Xaa in position 13 is Ala, Gly, Pro, Ser or Thr
  Variant (14)..(25): Xaa in position 14 to 25 is any amino acid
  Variant (27)..(28): Xaa in position 27 to 28 is any amino acid
  Variant (29)..(29): Xaa in position 29 is any or no amino acid
PXVFXXGXXXXGXXXXXXXXXXXXXLXXXL

SEQ ID NO: 23844 - DNA, 309 bp, Arabidopsis thaliana; identical to SEQ ID NO: 2745
  CDS (1)..(309)

SEQ ID NO: 23845 - protein, 102 aa, Arabidopsis thaliana; identical to SEQ ID NO: 2746

SEQ ID NO: 23846 - DNA, 309 bp, Glycine max; identical to SEQ ID NO: 3656
  CDS (1)..(309)

SEQ ID NO: 23847 - protein, 102 aa, Glycine max; identical to SEQ ID NO: 2906

SEQ ID NO: 23848 - DNA, 603 bp, Glycine max; identical to SEQ ID NO: 2937
  CDS (114)..(419)

SEQ ID NO: 23849 - protein, 101 aa, Glycine max; identical to SEQ ID NO: 2904

SEQ ID NO: 23850 - DNA, 306 bp, Glycine max; identical to SEQ ID NO: 2811
  CDS (1)..(306)

SEQ ID NO: 23851 - protein, 101 aa, Glycine max; identical to SEQ ID NO: 2812

SEQ ID NO: 23852 - DNA, 511 bp, Glycine max; identical to SEQ ID NO: 2575
  CDS (108)..(416)

SEQ ID NO: 23853 - protein, 102 aa, Glycine max; identical to SEQ ID NO: 2576

SEQ ID NO: 23854 - DNA, 306 bp, Glycine max; identical to SEQ ID NO: 2815
  CDS (1)..(306)

SEQ ID NO: 23855 - protein, 101 aa, Glycine max; identical to SEQ ID NO: 2816

SEQ ID NO: 23856 - DNA, 309 bp, Glycine max; identical to SEQ ID NO: 2577
  CDS (1)..(309)

SEQ ID NO: 23857 - protein, 102 aa, Glycine max; identical to SEQ ID NO: 2578

SEQ ID NO: 23858 - DNA, 312 bp, Sorghum bicolor; identical to SEQ ID NO: 2581
  CDS (1)..(312)

SEQ ID NO: 23859 - protein, 103 aa, Sorghum bicolor; identical to SEQ ID NO: 2582

SEQ ID NO: 23860 - DNA, 315 bp, Zea mays; identical to SEQ ID NO: 3668
  CDS (1)..(315)

SEQ ID NO: 23861 - protein, 104 aa, Zea mays; identical to SEQ ID NO: 3669

SEQ ID NO: 23862 - DNA, 315 bp, Zea mays; identical to SEQ ID NO: 2583
  CDS (1)..(315)

SEQ ID NO: 23863 - protein, 104 aa, Zea mays; identical to SEQ ID NO: 2584

SEQ ID NO: 23864 - DNA, 312 bp, Zea mays; identical to SEQ ID NO: 2585
  CDS (1)..(312)

SEQ ID NO: 23865 - protein, 103 aa, Zea mays; identical to SEQ ID NO: 2586

SEQ ID NO: 23866 - DNA, 315 bp, Zea mays; identical to SEQ ID NO: 2587
  CDS (1)..(315)

SEQ ID NO: 23867 - protein, 104 aa, Zea mays; identical to SEQ ID NO: 2588

SEQ ID NO: 23868 - DNA, 441 bp, Aedes aegypti; identical to SEQ ID NO: 3281
  CDS (1)..(441)

SEQ ID NO: 23869 - protein, 146 aa, Aedes aegypti; identical to SEQ ID NO: 3282

SEQ ID NO: 23870 - DNA, 339 bp, Aedes aegypti; identical to SEQ ID NO: 3283
  CDS (1)..(339)

SEQ ID NO: 23871 - protein, 112 aa, Aedes aegypti; identical to SEQ ID NO: 3284

SEQ ID NO: 23872 - DNA, 351 bp, Bombyx mori; identical to SEQ ID NO: 2591
  CDS (1)..(351)

SEQ ID NO: 23873 - protein, 116 aa, Bombyx mori; identical to SEQ ID NO: 2592

SEQ ID NO: 23874 - DNA, 405 bp, Oryza sativa (japonica cultivar-group); identical to SEQ ID NO: 2593
  CDS (1)..(405)

SEQ ID NO: 23875 - protein, 134 aa, Oryza sativa (japonica cultivar-group); identical to SEQ ID NO: 2594

SEQ ID NO: 23876 - DNA, 477 bp, Oryza sativa (japonica cultivar-group); identical to SEQ ID NO: 2595
  CDS (1)..(477)

SEQ ID NO: 23877 - protein, 158 aa, Oryza sativa (japonica cultivar-group); identical to SEQ ID NO: 2596

SEQ ID NO: 23878 - DNA, 309 bp, Arabidopsis thaliana; identical to SEQ ID NO: 2597
  CDS (1)..(309)

SEQ ID NO: 23879 - protein, 102 aa, Arabidopsis thaliana; identical to SEQ ID NO: 2598

SEQ ID NO: 23880 - DNA, 351 bp, Drosophila melanogaster; identical to SEQ ID NO: 2599
  CDS (1)..(351)

SEQ ID NO: 23881 - protein, 116 aa, Drosophila melanogaster; identical to SEQ ID NO: 2600

SEQ ID NO: 23882 - DNA, 345 bp, Drosophila melanogaster; identical to SEQ ID NO: 2967
  CDS (1)..(345)

SEQ ID NO: 23883 - protein, 114 aa, Drosophila melanogaster; identical to SEQ ID NO: 2968

SEQ ID NO: 23884 - DNA, 480 bp, Arabidopsis thaliana; identical to SEQ ID NO: 3688
  CDS (1)..(480)

SEQ ID NO: 23885 - protein, 159 aa, Arabidopsis thaliana; identical to SEQ ID NO: 3689

SEQ ID NO: 23886 - DNA, 306 bp, Bdellovibrio bacteriovorus HD100
  CDS (1)..(306): transl_table=11
atggcaacgactcacgaaagaattgatcagattgttaaaggtaacaaaatcgtattgttcatgaaagggactcaacagttccctatgtgcggattctctgctcgtgcatgcgcaatccttcaggatatgggcgttcagttccacgatgtgaacgtacttgatgacgacgaaatccgtcagggcatcaaagagtacggcaactggccgacaattccacagctttacatcaaccaccagttggttggcggcagcgacatcatgatggaaatgtaccagtccggcgaacttcaggaacttctgaagtag

SEQ ID NO: 23887 - protein, 101 aa, Bdellovibrio bacteriovorus HD100
MATTHERIDQIVKGNKIVLFMKGTQQFPMCGFSARACAILQDMGVQFHDVNVLDDDEIRQGIKEYGNWPTIPQLYINHQLVGGSDIMMEMYQSGELQELLK

SEQ ID NO: 23888 - DNA, 297 bp, Apis mellifera; identical to SEQ ID NO: 2601
  CDS (1)..(297)

SEQ ID NO: 23889 - protein, 98 aa, Apis mellifera; identical to SEQ ID NO: 2602

SEQ ID NO: 23890 - DNA, 312 bp, Strongylocentrotus purpuratus; identical to SEQ ID NO: 2603
  CDS (1)..(312)

SEQ ID NO: 23891 - protein, 103 aa, Strongylocentrotus purpuratus; identical to SEQ ID NO: 2604

SEQ ID NO: 23892 - DNA, 381 bp, Strongylocentrotus purpuratus; identical to SEQ ID NO: 2605
  CDS (1)..(381)

SEQ ID NO: 23893 - protein, 126 aa, Strongylocentrotus purpuratus; identical to SEQ ID NO: 2606

SEQ ID NO: 23894 - DNA, 321 bp, Strongylocentrotus purpuratus; identical to SEQ ID NO: 2607
  CDS (1)..(321)

SEQ ID NO: 23895 - protein, 106 aa, Strongylocentrotus purpuratus; identical to SEQ ID NO: 2608

SEQ ID NO: 23896 - DNA, 297 bp, Nasonia vitripennis; identical to SEQ ID NO: 2609
  CDS (1)..(297)

SEQ ID NO: 23897 - protein, 98 aa, Nasonia vitripennis; identical to SEQ ID NO: 2610

SEQ ID NO: 23898 - DNA, 429 bp, Nasonia vitripennis; identical to SEQ ID NO: 3311
  CDS (1)..(429)

SEQ ID NO: 23899 - protein, 142 aa, Nasonia vitripennis; identical to SEQ ID NO: 3312

SEQ ID NO: 23900 - DNA, 339 bp, Anopheles gambiae str. PEST; identical to SEQ ID NO: 2611
  CDS (1)..(339)

SEQ ID NO: 23901 - protein, 112 aa, Anopheles gambiae str. PEST; identical to SEQ ID NO: 2612

SEQ ID NO: 23902 - DNA, 438 bp, Anopheles gambiae str. PEST; identical to SEQ ID NO: 3315
  CDS (1)..(438)

SEQ ID NO: 23903 - protein, 145 aa, Anopheles gambiae str. PEST; identical to SEQ ID NO: 3316

SEQ ID NO: 23904 - DNA, 309 bp, Magnaporthe grisea 70-15; identical to SEQ ID NO: 2613
  CDS (1)..(309)

SEQ ID NO: 23905 - protein, 102 aa, Magnaporthe grisea 70-15; identical to SEQ ID NO: 2614

SEQ ID NO: 23906 - DNA, 321 bp, Gibberella zeae PH-1; identical to SEQ ID NO: 2617
  CDS (1)..(321)

SEQ ID NO: 23907 - protein, 106 aa, Gibberella zeae PH-1; identical to SEQ ID NO: 2618

SEQ ID NO: 23908 - DNA, 324 bp, Kluyveromyces lactis NRRL Y-1140; identical to SEQ ID NO: 3321
  CDS (1)..(324)

SEQ ID NO: 23909 - protein, 107 aa, Kluyveromyces lactis NRRL Y-1140; identical to SEQ ID NO: 3322

SEQ ID NO: 23910 - DNA, 315 bp, Debaryomyces hansenii CBS767; identical to SEQ ID NO: 2623
  CDS (1)..(315)

SEQ ID NO: 23911 - protein, 104 aa, Debaryomyces hansenii CBS767; identical to SEQ ID NO: 2624

SEQ ID NO: 23912 - DNA, 318 bp, Yarrowia lipolytica CLIB122; identical to SEQ ID NO: 2625
  CDS (1)..(318)

SEQ ID NO: 23913 - protein, 105 aa, Yarrowia lipolytica CLIB122; identical to SEQ ID NO: 2626

SEQ ID NO: 23914 - DNA, 309 bp, Aspergillus nidulans FGSC A4; identical to SEQ ID NO: 2629
  CDS (1)..(309)

SEQ ID NO: 23915 - protein, 102 aa, Aspergillus nidulans FGSC A4; identical to SEQ ID NO: 2630

SEQ ID NO: 23916 - DNA, 360 bp, Candida albicans SC5314; identical to SEQ ID NO: 2633
  CDS (1)..(360): transl_table=12

SEQ ID NO: 23917 - protein, 119 aa, Candida albicans SC5314; identical to SEQ ID NO: 2634

SEQ ID NO: 23918 - DNA, 309 bp, Ustilago maydis 521; identical to SEQ ID NO: 2635
  CDS (1)..(309)

SEQ ID NO: 23919 - protein, 102 aa, Ustilago maydis 521; identical to SEQ ID NO: 2636

SEQ ID NO: 23920 - DNA, 384 bp, Candida albicans SC5314; identical to SEQ ID NO: 3720
  CDS (1)..(384): transl_table=12

SEQ ID NO: 23921 - protein, 127 aa, Candida albicans SC5314; identical to SEQ ID NO: 3721

SEQ ID NO: 23922 - DNA, 471 bp, Candida albicans SC5314; identical to SEQ ID NO: 2639
  CDS (1)..(471): transl_table=12

SEQ ID NO: 23923 - protein, 156 aa, Candida albicans SC5314; identical to SEQ ID NO: 2640

SEQ ID NO: 23924 - DNA, 309 bp, Tribolium castaneum; identical to SEQ ID NO: 2641
  CDS (1)..(309)

SEQ ID NO: 23925 - protein, 102 aa, Tribolium castaneum; identical to SEQ ID NO: 2642

SEQ ID NO: 23926 - DNA, 450 bp, Tribolium castaneum; identical to SEQ ID NO: 3337
  CDS (1)..(450)

SEQ ID NO: 23927 - protein, 149 aa, Tribolium castaneum; identical to SEQ ID NO: 3338

SEQ ID NO: 23928 - DNA, 330 bp, Azoarcus sp. EbN1; identical to SEQ ID NO: 3726
  CDS (1)..(330): transl_table=11

SEQ ID NO: 23929 - protein, 109 aa, Azoarcus sp. EbN1; identical to SEQ ID NO: 3727

SEQ ID NO: 23930 - DNA, 384 bp, Medicago truncatula; identical to SEQ ID NO: 2643
  CDS (1)..(384)

SEQ ID NO: 23931 - protein, 127 aa, Medicago truncatula; identical to SEQ ID NO: 2644

SEQ ID NO: 23932 - DNA, 384 bp, Oryza sativa subsp; identical to SEQ ID NO: 3343
  CDS (1)..(384)

SEQ ID NO: 23933 - protein, 127 aa, Oryza sativa subsp; identical to SEQ ID NO: 3344

SEQ ID NO: 23934 - DNA, 315 bp, Oryza sativa subsp; identical to SEQ ID NO: 3345
  CDS (1)..(315)

SEQ ID NO: 23935 - protein, 104 aa, Oryza sativa subsp; identical to SEQ ID NO: 3346

SEQ ID NO: 23936 - DNA, 306 bp, Vitis vinifera; identical to SEQ ID NO: 2645
  CDS (1)..(306)
  misc_feature (225)..(225): r is g or a
  misc_feature (273)..(273): y is t or c

SEQ ID NO: 23937 - protein, 101 aa, Vitis vinifera; identical to SEQ ID NO: 2646

SEQ ID NO: 23938 - DNA, 324 bp, Vitis vinifera; identical to SEQ ID NO: 2647
  CDS (1)..(324)

SEQ ID NO: 23939 - protein, 107 aa, Vitis vinifera; identical to SEQ ID NO: 2648

SEQ ID NO: 23940 - DNA, 321 bp, Vitis vinifera; identical to SEQ ID NO: 2649
  CDS (1)..(321)

SEQ ID NO: 23941 - protein, 106 aa, Vitis vinifera; identical to SEQ ID NO: 2650

SEQ ID NO: 23942 - DNA, 345 bp, Vitis vinifera; identical to SEQ ID NO: 2651
  CDS (1)..(345)

SEQ ID NO: 23943 - protein, 114 aa, Vitis vinifera; identical to SEQ ID NO: 2652

SEQ ID NO: 23944 - DNA, 414 bp, Vitis vinifera; identical to SEQ ID NO: 2653
  CDS (1)..(414)
  misc_feature (18)..(18): y is t or c
  misc_feature (63)..(63): m is a or c

SEQ ID NO: 23945 - protein, 137 aa, Vitis vinifera; identical to SEQ ID NO: 2654

SEQ ID NO: 23946 - DNA, 342 bp, Pichia guilliermondii; identical to SEQ ID NO: 3359
  CDS (1)..(342)

SEQ ID NO: 23947 - protein, 113 aa, Pichia guilliermondii; identical to SEQ ID NO: 3360

SEQ ID NO: 23948 - DNA, 315 bp, Fritillaria agrestis; identical to SEQ ID NO: 2655
  CDS (1)..(315)

SEQ ID NO: 23949 - protein, 104 aa, Fritillaria agrestis; identical to SEQ ID NO: 2656

SEQ ID NO: 23950 - DNA, 405 bp, Mesembryanthemum crystallinum; identical to SEQ ID NO: 3017
  CDS (1)..(405)

SEQ ID NO: 23951 - protein, 134 aa, Mesembryanthemum crystallinum; identical to SEQ ID NO: 3018

SEQ ID NO: 23952 - DNA, 402 bp, Thellungiella halophila; identical to SEQ ID NO: 2657
  CDS (1)..(402)

SEQ ID NO: 23953 - protein, 133 aa, Thellungiella halophila; identical to SEQ ID NO: 2658

SEQ ID NO: 23954 - DNA, 309 bp, Plantago major; identical to SEQ ID NO: 2659
  CDS (1)..(309)

SEQ ID NO: 23955 - protein, 102 aa, Plantago major; identical to SEQ ID NO: 2660

SEQ ID NO: 23956 - DNA, 312 bp, Musa acuminata; identical to SEQ ID NO: 3023
  CDS (1)..(312)

SEQ ID NO: 23957 - protein, 103 aa, Musa acuminata; identical to SEQ ID NO: 3024

SEQ ID NO: 23958 - DNA, 312 bp, Musa acuminata; identical to SEQ ID NO: 2661
  CDS (1)..(312)

SEQ ID NO: 23959 - protein, 103 aa, Musa acuminata; identical to SEQ ID NO: 2662

SEQ ID NO: 23960 - DNA, 450 bp, Medicago truncatula; identical to SEQ ID NO: 2663
  CDS (1)..(450)

SEQ ID NO: 23961 - protein, 149 aa, Medicago truncatula; identical to SEQ ID NO: 2664

SEQ ID NO: 23962 - DNA, 357 bp, Medicago truncatula; identical to SEQ ID NO: 2665
  CDS (1)..(357)

SEQ ID NO: 23963 - protein, 118 aa, Medicago truncatula; identical to SEQ ID NO: 2666

SEQ ID NO: 23964 - DNA, 384 bp, Medicago truncatula; identical to SEQ ID NO: 2667
  CDS (1)..(384)

SEQ ID NO: 23965 - protein, 127 aa, Medicago truncatula; identical to SEQ ID NO: 2668

SEQ ID NO: 23966 - DNA, 366 bp, Medicago truncatula; identical to SEQ ID NO: 2669
  CDS (1)..(366)

SEQ ID NO: 23967 - protein, 121 aa, Medicago truncatula; identical to SEQ ID NO: 2670

SEQ ID NO: 23968 - DNA, 399 bp, Beta vulgaris; identical to SEQ ID NO: 2671
  CDS (1)..(399)

SEQ ID NO: 23969 - protein, 132 aa, Beta vulgaris; identical to SEQ ID NO: 2672

SEQ ID NO: 23970 - DNA, 321 bp, Beta vulgaris; identical to SEQ ID NO: 2673
  CDS (1)..(321)

SEQ ID NO: 23971 - protein, 106 aa, Beta vulgaris; identical to SEQ ID NO: 2674

SEQ ID NO: 23972 - DNA, 309 bp, Beta vulgaris; identical to SEQ ID NO: 2675
  CDS (1)..(309)

SEQ ID NO: 23973 - protein, 102 aa, Beta vulgaris; identical to SEQ ID NO: 2676

SEQ ID NO: 23974 - DNA, 309 bp, Beta vulgaris; identical to SEQ ID NO: 2677
  CDS (1)..(309)

SEQ ID NO: 23975 - protein, 102 aa, Beta vulgaris; identical to SEQ ID NO: 2678

SEQ ID NO: 23976 - DNA, 309 bp, Beta vulgaris; identical to SEQ ID NO: 2679
  CDS (1)..(309)

SEQ ID NO: 23977 - protein, 102 aa, Beta vulgaris; identical to SEQ ID NO: 2680

SEQ ID NO: 23978 - DNA, 456 bp, Aspergillus oryzae; identical to SEQ ID NO: 5060
  CDS (1)..(456)

SEQ ID NO: 23979 - protein, 151 aa, Aspergillus oryzae; identical to SEQ ID NO: 5061

SEQ ID NO: 23980 - DNA, 492 bp, Aspergillus oryzae; identical to SEQ ID NO: 2681
  CDS (1)..(492)

SEQ ID NO: 23981 - protein, 163 aa, Aspergillus oryzae; identical to SEQ ID NO: 2682

SEQ ID NO: 23982 - DNA, 309 bp, Aspergillus oryzae; identical to SEQ ID NO: 2683
  CDS (1)..(309)

SEQ ID NO: 23983 - protein, 102 aa, Aspergillus oryzae; identical to SEQ ID NO: 2684

SEQ ID NO: 23984 - DNA, 381 bp, Populus tremula x Populus tremuloides; identical to SEQ ID NO: 2685
  CDS (1)..(381)

SEQ ID NO: 23985 - protein, 126 aa, Populus tremula x Populus tremuloides; identical to SEQ ID NO: 2686

SEQ ID NO: 23986 - DNA, 318 bp, Plantago major; identical to SEQ ID NO: 2687
  CDS (1)..(318)

SEQ ID NO: 23987 - protein, 105 aa, Plantago major; identical to SEQ ID NO: 2688

SEQ ID NO: 23988 - DNA, 342 bp, Triticum aestivum; identical to SEQ ID NO: 2689
  CDS (1)..(342)

SEQ ID NO: 23989 - protein, 113 aa, Triticum aestivum; identical to SEQ ID NO: 2690

SEQ ID NO: 23990 - DNA, 420 bp, Populus tremula x Populus tremuloides; identical to SEQ ID NO: 2691
  CDS (1)..(420)

SEQ ID NO: 23991 - protein, 139 aa, Populus tremula x Populus tremuloides; identical to SEQ ID NO: 2692

SEQ ID NO: 23992 - DNA, 348 bp, Tilia platyphyllos; identical to SEQ ID NO: 2693
  CDS (1)..(348)

SEQ ID NO: 23993 - protein, 115 aa, Tilia platyphyllos; identical to SEQ ID NO: 2694

SEQ ID NO: 23994 - DNA, 342 bp, Deschampsia antarctica; identical to SEQ ID NO: 2695
  CDS (1)..(342)

SEQ ID NO: 23995 - protein, 113 aa, Deschampsia antarctica; identical to SEQ ID NO: 2696

SEQ ID NO: 23996 - DNA, 336 bp, Rickettsia typhi
  CDS (1)..(336): transl_table=11
atgatggaaaataaaaatttaaaatttatacaaaatgcaataaaaaagaacaaagtagtattgttcatgaaaggtactaaggaaatgcctgcatgcgggttttcaggtactgtagtagctattttgaataaattaggtgtagaatttagtgatattaatgtactttttgatacttcattacgtgaagatttaaaaaaatttagcgattggccgacatttccacagttatatatcaatggtgaattagtaggtgggtgtgatattgttaaagagttataccaaaatggtgaacttgagaagatgcttaaagatgagactaagttgattaaaaattga

SEQ ID NO: 23997 - protein, 111 aa, Rickettsia typhi
MMENKNLKFIQNAIKKNKVVLFMKGTKEMPACGFSGTVVAILNKLGVEFSDINVLFDTSLREDLKKFSDWPTFPQLYINGELVGGCDIVKELYQNGELEKMLKDETKLIKN

SEQ ID NO: 23998 - DNA, 333 bp, Schizosaccharomyces pombe; identical to SEQ ID NO: 2699
  CDS (1)..(333)

SEQ ID NO: 23999 - protein, 110 aa, Schizosaccharomyces pombe; identical to SEQ ID NO: 2700

SEQ ID NO: 24000 - DNA, 612 bp, Saccharomyces cerevisiae; identical to SEQ ID NO: 3796
  CDS (1)..(612)

SEQ ID NO: 24001 - protein, 203 aa, Saccharomyces cerevisiae; identical to SEQ ID NO: 3797

SEQ ID NO: 24002 - DNA, 327 bp, Solanum lycopersicum; identical to SEQ ID NO: 2701
  CDS (1)..(327)

SEQ ID NO: 24003 - protein, 108 aa, Solanum lycopersicum; identical to SEQ ID NO: 2702

SEQ ID NO: 24004 - DNA, 315 bp, Vernicia fordii; identical to SEQ ID NO: 2703
  CDS (1)..(315)

SEQ ID NO: 24005 - protein, 104 aa, Vernicia fordii; identical to SEQ ID NO: 2704

SEQ ID NO: 24006 - DNA, 447 bp, Arabidopsis thaliana; identical to SEQ ID NO: 2705
  CDS (1)..(447)

SEQ ID NO: 24007 - protein, 148 aa, Arabidopsis thaliana; identical to SEQ ID NO: 2706

SEQ ID NO: 24008 - DNA, 312 bp, Arabidopsis thaliana; identical to SEQ ID NO: 2707
  CDS (1)..(312)

SEQ ID NO: 24009 - protein, 103 aa, Arabidopsis thaliana; identical to SEQ ID NO: 2708

SEQ ID NO: 24010 - DNA, 312 bp, Arabidopsis thaliana; identical to SEQ ID NO: 2709
  CDS (1)..(312)

SEQ ID NO: 24011 - protein, 103 aa, Arabidopsis thaliana; identical to SEQ ID NO: 2710

SEQ ID NO: 24012 - DNA, 309 bp, Arabidopsis thaliana; identical to SEQ ID NO: 2711
  CDS (1)..(309)

SEQ ID NO: 24013 - protein, 102 aa, Arabidopsis thaliana; identical to SEQ ID NO: 2712

SEQ ID NO: 24014 - DNA, 309 bp, Arabidopsis thaliana; identical to SEQ ID NO: 2713
  CDS (1)..(309)

SEQ ID NO: 24015 - protein, 102 aa, Arabidopsis thaliana; identical to SEQ ID NO: 2714

SEQ ID NO: 24016 - DNA, 495 bp, Oryza sativa subsp; identical to SEQ ID NO: 2779
  CDS (1)..(495)

SEQ ID NO: 24017 - protein, 164 aa, Oryza sativa subsp; identical to SEQ ID NO: 2780

SEQ ID NO: 24018 - DNA, 300 bp, Arabidopsis thaliana; identical to SEQ ID NO: 2715
  CDS (1)..(300)

SEQ ID NO: 24019 - protein, 99 aa, Arabidopsis thaliana; identical to SEQ ID NO: 2716

SEQ ID NO: 24020 - DNA, 540 bp, Arabidopsis thaliana; identical to SEQ ID NO: 2717
  CDS (1)..(540)

SEQ ID NO: 24021 - protein, 179 aa, Arabidopsis thaliana; identical to SEQ ID NO: 2718

SEQ ID NO: 24022 - DNA, 453 bp, Arabidopsis thaliana; identical to SEQ ID NO: 2719
  CDS (1)..(453)

SEQ ID NO: 24023 - protein, 150 aa, Arabidopsis thaliana; identical to SEQ ID NO: 2720

SEQ ID NO: 24024 - DNA, 378 bp, Arabidopsis thaliana; identical to SEQ ID NO: 2721
  CDS (1)..(378)

SEQ ID NO: 24025 - protein, 125 aa, Arabidopsis thaliana; identical to SEQ ID NO: 2722

SEQ ID NO: 24026 - DNA, 336 bp, Arabidopsis thaliana; identical to SEQ ID NO: 2723
  CDS (1)..(336)

SEQ ID NO: 24027 - protein, 111 aa, Arabidopsis thaliana; identical to SEQ ID NO: 2724

SEQ ID NO: 24028 - DNA, 408 bp, Arabidopsis thaliana; identical to SEQ ID NO: 2727
  CDS (1)..(408)

SEQ ID NO: 24029 - protein, 135 aa, Arabidopsis thaliana; identical to SEQ ID NO: 2728

SEQ ID NO: 24030 - DNA, 525 bp, Arabidopsis thaliana; identical to SEQ ID NO: 2729
  CDS (1)..(525)

SEQ ID NO: 24031 - protein, 174 aa, Arabidopsis thaliana; identical to SEQ ID NO: 2730

SEQ ID NO: 24032 - DNA, 435 bp, Arabidopsis thaliana; identical to SEQ ID NO: 2731
  CDS (1)..(435)

SEQ ID NO: 24033 - protein, 144 aa, Arabidopsis thaliana; identical to SEQ ID NO: 2732

SEQ ID NO: 24034 - DNA, 411 bp, Arabidopsis thaliana; identical to SEQ ID NO: 2733
  CDS (1)..(411)

SEQ ID NO: 24035 - protein, 136 aa, Arabidopsis thaliana; identical to SEQ ID NO: 2734

SEQ ID NO: 24036 - DNA, 423 bp, Arabidopsis thaliana; identical to SEQ ID NO: 2735
  CDS (1)..(423)

SEQ ID NO: 24037 - protein, 140 aa, Arabidopsis thaliana; identical to SEQ ID NO: 2736

SEQ ID NO: 24038 - DNA, 414 bp, Arabidopsis thaliana; identical to SEQ ID NO: 2737
  CDS (1)..(414)

SEQ ID NO: 24039 - protein, 137 aa, Arabidopsis thaliana; identical to SEQ ID NO: 2738

SEQ ID NO: 24040 - DNA, 309 bp, Arabidopsis thaliana; identical to SEQ ID NO: 2739
  CDS (1)..(309)

SEQ ID NO: 24041 - protein, 102 aa, Arabidopsis thaliana; identical to SEQ ID NO: 2740

SEQ ID NO: 24042 - DNA, 309 bp, Arabidopsis thaliana; identical to SEQ ID NO: 2741
  CDS (1)..(309)

SEQ ID NO: 24043 - protein, 102 aa, Arabidopsis thaliana; identical to SEQ ID NO: 2742

SEQ ID NO: 24044 - DNA, 309 bp, Arabidopsis thaliana; identical to SEQ ID NO: 2743
  CDS (1)..(309)

SEQ ID NO: 24045 - protein, 102 aa, Arabidopsis thaliana; identical to SEQ ID NO: 2744

SEQ ID NO: 24046 - DNA, 444 bp, Oryza sativa subsp; identical to SEQ ID NO: 2757
  CDS (1)..(444)

SEQ ID NO: 24047 - protein, 147 aa, Oryza sativa subsp; identical to SEQ ID NO: 2758

SEQ ID NO: 24048 - DNA, 309 bp, Arabidopsis thaliana; identical to SEQ ID NO: 2573
  CDS (1)..(309)

SEQ ID NO: 24049 - protein, 102 aa, Arabidopsis thaliana; identical to SEQ ID NO: 2574

SEQ ID NO: 24050 - DNA, 309 bp, Arabidopsis thaliana; identical to SEQ ID NO: 2747
  CDS (1)..(309)

SEQ ID NO: 24051 - protein, 102 aa, Arabidopsis thaliana; identical to SEQ ID NO: 2748

SEQ ID NO: 24052 - DNA, 309 bp, Arabidopsis thaliana; identical to SEQ ID NO: 2749
  CDS (1)..(309)

SEQ ID NO: 24053 - protein, 102 aa, Arabidopsis thaliana; identical to SEQ ID NO: 2750

SEQ ID NO: 24054 - DNA, 309 bp, Arabidopsis thaliana; identical to SEQ ID NO: 2751
  CDS (1)..(309)

SEQ ID NO: 24055 - protein, 102 aa, Arabidopsis thaliana; identical to SEQ ID NO: 2752

SEQ ID NO: 24056 - DNA, 696 bp, Saccharomyces cerevisiae; identical to SEQ ID NO: 5138
  CDS (1)..(696)

SEQ ID NO: 24057 - protein, 231 aa, Saccharomyces cerevisiae; identical to SEQ ID NO: 5139

SEQ ID NO: 24058 - DNA, 378 bp, Oryza sativa; identical to SEQ ID NO: 2753
  CDS (1)..(378)

SEQ ID NO: 24059 - protein, 125 aa, Oryza sativa; identical to SEQ ID NO: 2754

SEQ ID NO: 24060 - DNA, 411 bp, Oryza sativa; identical to SEQ ID NO: 3119
  CDS (1)..(411)

SEQ ID NO: 24061 - protein, 136 aa, Oryza sativa; identical to SEQ ID NO: 3120

SEQ ID NO: 24062 - DNA, 312 bp, Oryza sativa; identical to SEQ ID NO: 2755
  CDS (1)..(312)

SEQ ID NO: 24063 - protein, 103 aa, Oryza sativa; identical to SEQ ID NO: 2756

SEQ ID NO: 24064 - DNA, 378 bp, Oryza sativa; identical to SEQ ID NO: 2759
  CDS (1)..(378)

SEQ ID NO: 24065 - protein, 125 aa, Oryza sativa; identical to SEQ ID NO: 2760

SEQ ID NO: 24066 - DNA, 408 bp, Oryza sativa; identical to SEQ ID NO: 2761
  CDS (1)..(408)

SEQ ID NO: 24067 - protein, 135 aa, Oryza sativa; identical to SEQ ID NO: 2762

SEQ ID NO: 24068 - DNA, 402 bp, Oryza sativa; identical to SEQ ID NO: 2763
  CDS (1)..(402)

SEQ ID NO: 24069 - protein, 133 aa, Oryza sativa; identical to SEQ ID NO: 2764

SEQ ID NO: 24070 - DNA, 396 bp, Oryza sativa; identical to SEQ ID NO: 3111
  CDS (1)..(396)

SEQ ID NO: 24071 - protein, 131 aa, Oryza sativa; identical to SEQ ID NO: 3112

SEQ ID NO: 24072 - DNA, 408 bp, Oryza sativa; identical to SEQ ID NO: 2765
  CDS (1)..(408)

SEQ ID NO: 24073 - protein, 135 aa, Oryza sativa; identical to SEQ ID NO: 2766

SEQ ID NO: 24074 - DNA, 384 bp, Oryza sativa; identical to SEQ ID NO: 2767
  CDS (1)..(384)

SEQ ID NO: 24075 - protein, 127 aa, Oryza sativa; identical to SEQ ID NO: 2768

SEQ ID NO: 24076 - DNA, 345 bp, Oryza sativa; identical to SEQ ID NO: 2769
  CDS (1)..(345)

SEQ ID NO: 24077 - protein, 114 aa, Oryza sativa; identical to SEQ ID NO: 2770

SEQ ID NO: 24078 - DNA, 417 bp, Oryza sativa; identical to SEQ ID NO: 2771
  CDS (1)..(417)

SEQ ID NO: 24079 - protein, 138 aa, Oryza sativa; identical to SEQ ID NO: 2772

SEQ ID NO: 24080 - DNA, 399 bp, Oryza sativa; identical to SEQ ID NO: 2773
  CDS (1)..(399)

SEQ ID NO: 24081 - protein, 132 aa, Oryza sativa; identical to SEQ ID NO: 2774

SEQ ID NO: 24082 - DNA, 411 bp, Oryza sativa; identical to SEQ ID NO: 2775
  CDS (1)..(411)

SEQ ID NO: 24083 - protein, 136 aa, Oryza sativa; identical to SEQ ID NO: 2776

SEQ ID NO: 24084 - DNA, 327 bp, Oryza sativa; identical to SEQ ID NO: 2781
  CDS (1)..(327)

SEQ ID NO: 24085 - protein, 108 aa, Oryza sativa; identical to SEQ ID NO: 2782

SEQ ID NO: 24086 - DNA, 330 bp, Oryza sativa; identical to SEQ ID NO: 2783
  CDS (1)..(330)

SEQ ID NO: 24087 - protein, 109 aa, Oryza sativa; identical to SEQ ID NO: 2784

SEQ ID NO: 24088 - DNA, 330 bp, Oryza sativa; identical to SEQ ID NO: 2785
  CDS (1)..(330)

SEQ ID NO: 24089 - protein, 109 aa, Oryza sativa; identical to SEQ ID NO: 2786

SEQ ID NO: 24090 - DNA, 330 bp, Oryza sativa; identical to SEQ ID NO: 2787
  CDS (1)..(330)

SEQ ID NO: 24091 - protein, 109 aa, Oryza sativa; identical to SEQ ID NO: 2788

SEQ ID NO: 24092 - DNA, 312 bp, Oryza sativa; identical to SEQ ID NO: 2789
  CDS (1)..(312)

SEQ ID NO: 24093 - protein, 103 aa, Oryza sativa; identical to SEQ ID NO: 2790

SEQ ID NO: 24094 - DNA, 315 bp, Oryza sativa; identical to SEQ ID NO: 2791
  CDS (1)..(315)

SEQ ID NO: 24095 - protein, 104 aa, Oryza sativa; identical to SEQ ID NO: 2792

SEQ ID NO: 24096 - DNA, 309 bp, Brassica napus; identical to SEQ ID NO: 2793
  CDS (1)..(309)

SEQ ID NO: 24097 - protein, 102 aa, Brassica napus; identical to SEQ ID NO: 2794

SEQ ID NO: 24098 - DNA, 537 bp, Brassica napus; identical to SEQ ID NO: 3157
  CDS (1)..(537)

SEQ ID NO: 24099 - protein, 178 aa, Brassica napus; identical to SEQ ID NO: 3158

SEQ ID NO: 24100 - DNA, 309 bp, Brassica napus; identical to SEQ ID NO: 2795
  CDS (1)..(309)

SEQ ID NO: 24101 - protein, 102 aa, Brassica napus; identical to SEQ ID NO: 2796

SEQ ID NO: 24102 - DNA, 309 bp, Brassica napus; identical to SEQ ID NO: 2797
  CDS (1)..(309)

SEQ ID NO: 24103 - protein, 102 aa, Brassica napus; identical to SEQ ID NO: 2798

SEQ ID NO: 24104 - DNA, 309 bp, Brassica napus; identical to SEQ ID NO: 2799
  CDS (1)..(309)

SEQ ID NO: 24105 - protein, 102 aa, Brassica napus; identical to SEQ ID NO: 2800

SEQ ID NO: 24106 - DNA, 309 bp, Brassica napus; identical to SEQ ID NO: 2801
  CDS (1)..(309)

SEQ ID NO: 24107 - protein, 102 aa, Brassica napus; identical to SEQ ID NO: 2802

SEQ ID NO: 24108 - DNA, 318 bp, Brassica napus; identical to SEQ ID NO: 2803
  CDS (1)..(318)

SEQ ID NO: 24109 - protein, 105 aa, Brassica napus; identical to SEQ ID NO: 2804

SEQ ID NO: 24110 - DNA, 300 bp, Brassica napus; identical to SEQ ID NO: 2805
  CDS (1)..(300)

SEQ ID NO: 24111 - protein, 99 aa, Brassica napus; identical to SEQ ID NO: 2806

SEQ ID NO: 24112 - DNA, 309 bp, Brassica napus; identical to SEQ ID NO: 2807
  CDS (1)..(309)

SEQ ID NO: 24113 - protein, 102 aa, Brassica napus; identical to SEQ ID NO: 2808

SEQ ID NO: 24114 - DNA, 519 bp, Brassica napus; identical to SEQ ID NO: 2809
  CDS (1)..(519)

SEQ ID NO: 24115 - protein, 172 aa, Brassica napus; identical to SEQ ID NO: 2810

SEQ ID NO: 24116 - DNA, 315 bp, Triticum aestivum; identical to SEQ ID NO: 2813
  CDS (1)..(315)

SEQ ID NO: 24117 - protein, 104 aa, Triticum aestivum; identical to SEQ ID NO: 2814

SEQ ID NO: 24118 - DNA, 309 bp, Brassica napus; identical to SEQ ID NO: 2817
  CDS (1)..(309)

SEQ ID NO: 24119 - protein, 102 aa, Brassica napus; identical to SEQ ID NO: 2818

SEQ ID NO: 24120 - DNA, 309 bp, Brassica napus; identical to SEQ ID NO: 2819
  CDS (1)..(309)

SEQ ID NO: 24121 - protein, 102 aa, Brassica napus; identical to SEQ ID NO: 2820

SEQ ID NO: 24122 - DNA, 399 bp, Glycine max; identical to SEQ ID NO: 2821
  CDS (1)..(399)

SEQ ID NO: 24123 - protein, 132 aa, Glycine max; identical to SEQ ID NO: 2822

SEQ ID NO: 24124 - DNA, 312 bp, Triticum aestivum; identical to SEQ ID NO: 2823
  CDS (1)..(312)

SEQ ID NO: 24125 - protein, 103 aa, Triticum aestivum; identical to SEQ ID NO: 2824

SEQ ID NO: 24126 - DNA, 414 bp, Triticum aestivum; identical to SEQ ID NO: 2825
  CDS (1)..(414)

SEQ ID NO: 24127 - protein, 137 aa, Triticum aestivum; identical to SEQ ID NO: 2826

SEQ ID NO: 24128 - DNA, 414 bp, Zea mays; identical to SEQ ID NO: 2827
  CDS (1)..(414)

SEQ ID NO: 24129 - protein, 137 aa, Zea mays; identical to SEQ ID NO: 2828

SEQ ID NO: 24130 - DNA, 468 bp, Zea mays; identical to SEQ ID NO: 2829
  CDS (1)..(468)

SEQ ID NO: 24131 - protein, 155 aa, Zea mays; identical to SEQ ID NO: 2830

SEQ ID NO: 24132 - DNA, 504 bp, Zea mays; identical to SEQ ID NO: 2831
  CDS (1)..(504)

SEQ ID NO: 24133 - protein, 167 aa, Zea mays; identical to SEQ ID NO: 2832

SEQ ID NO: 24134 - DNA, 312 bp, Hordeum vulgare; identical to SEQ ID NO: 2833
  CDS (1)..(312)

SEQ ID NO: 24135 - protein, 103 aa, Hordeum vulgare; identical to SEQ ID NO: 2834

SEQ ID NO: 24136 - DNA, 393 bp, Hordeum vulgare; identical to SEQ ID NO: 2835
  CDS (1)..(393)

SEQ ID NO: 24137 - protein, 130 aa, Hordeum vulgare; identical to SEQ ID NO: 2836

SEQ ID NO: 24138 - DNA, 378 bp, Brassica napus; identical to SEQ ID NO: 2837
  CDS (1)..(378)

SEQ ID NO: 24139 - protein, 125 aa, Brassica napus; identical to SEQ ID NO: 2838

SEQ ID NO: 24140 - DNA, 522 bp, Brassica napus; identical to SEQ ID NO: 2839
  CDS (1)..(522)

SEQ ID NO: 24141 - protein, 173 aa, Brassica napus; identical to SEQ ID NO: 2840

SEQ ID NO: 24142 - DNA, 525 bp, Brassica napus; identical to SEQ ID NO: 2841
  CDS (1)..(525)

SEQ ID NO: 24143 - protein, 174 aa, Brassica napus; identical to SEQ ID NO: 2842

SEQ ID NO: 24144 - DNA, 309 bp, Brassica napus; identical to SEQ ID NO: 2843
  CDS (1)..(309)

SEQ ID NO: 24145 - protein, 102 aa, Brassica napus; identical to SEQ ID NO: 2844

SEQ ID NO: 24146 - DNA, 309 bp, Brassica napus; identical to SEQ ID NO: 2845
  CDS (1)..(309)

SEQ ID NO: 24147 - protein, 102 aa, Brassica napus; identical to SEQ ID NO: 2846

SEQ ID NO: 24148 - DNA, 522 bp, Brassica napus; identical to SEQ ID NO: 2847
  CDS (1)..(522)

SEQ ID NO: 24149 - protein, 173 aa, Brassica napus; identical to SEQ ID NO: 2848

SEQ ID NO: 24150 - DNA, 435 bp, Brassica napus; identical to SEQ ID NO: 2849
  CDS (1)..(435)

SEQ ID NO: 24151 - protein, 144 aa, Brassica napus; identical to SEQ ID NO: 2850

SEQ ID NO: 24152 - DNA, 435 bp, Brassica napus; identical to SEQ ID NO: 2851
  CDS (1)..(435)

SEQ ID NO: 24153 - protein, 144 aa, Brassica napus; identical to SEQ ID NO: 2852

SEQ ID NO: 24154 - DNA, 309 bp, Brassica napus; identical to SEQ ID NO: 2853
  CDS (1)..(309)

SEQ ID NO: 24155 - protein, 102 aa, Brassica napus; identical to SEQ ID NO: 2854

SEQ ID NO: 24156 - DNA, 300 bp, Brassica napus; identical to SEQ ID NO: 2855
  CDS (1)..(300)

SEQ ID NO: 24157 - protein, 99 aa, Brassica napus; identical to SEQ ID NO: 2856

SEQ ID NO: 24158 - DNA, 363 bp, Brassica napus; identical to SEQ ID NO: 2857
  CDS (1)..(363)

SEQ ID NO: 24159 - protein, 120 aa, Brassica napus; identical to SEQ ID NO: 2858

SEQ ID NO: 24160 - DNA, 336 bp, Brassica napus; identical to SEQ ID NO: 2859
  CDS (1)..(336)

SEQ ID NO: 24161 - protein, 111 aa, Brassica napus; identical to SEQ ID NO: 2860

SEQ ID NO: 24162 - DNA, 309 bp, Brassica napus; identical to SEQ ID NO: 2861
  CDS (1)..(309)

SEQ ID NO: 24163 - protein, 102 aa, Brassica napus; identical to SEQ ID NO: 2862

SEQ ID NO: 24164 - DNA, 522 bp, Brassica napus; identical to SEQ ID NO: 2863
  CDS (1)..(522)

SEQ ID NO: 24165 - protein, 173 aa, Brassica napus; identical to SEQ ID NO: 2864

SEQ ID NO: 24166 - DNA, 309 bp, Brassica napus; identical to SEQ ID NO: 2865
  CDS (1)..(309)

SEQ ID NO: 24167 - protein, 102 aa, Brassica napus; identical to SEQ ID NO: 2866

SEQ ID NO: 24168 - DNA, 300 bp, Brassica napus; identical to SEQ ID NO: 2867
  CDS (1)..(300)

SEQ ID NO: 24169 - protein, 99 aa, Brassica napus; identical to SEQ ID NO: 2868

SEQ ID NO: 24170 - DNA, 309 bp, Brassica napus; identical to SEQ ID NO: 2869
  CDS (1)..(309)

SEQ ID NO: 24171 - protein, 102 aa, Brassica napus; identical to SEQ ID NO: 2870

SEQ ID NO: 24172 - DNA, 309 bp, Brassica napus; identical to SEQ ID NO: 2871
  CDS (1)..(309)

SEQ ID NO: 24173 - protein, 102 aa, Brassica napus; identical to SEQ ID NO: 2872

SEQ ID NO: 24174 - DNA, 309 bp, Brassica napus; identical to SEQ ID NO: 2873
  CDS (1)..(309)

SEQ ID NO: 24175 - protein, 102 aa, Brassica napus; identical to SEQ ID NO: 2874

SEQ ID NO: 24176 - DNA, 312 bp, Brassica napus; identical to SEQ ID NO: 2875
  CDS (1)..(312)

SEQ ID NO: 24177 - protein, 103 aa, Brassica napus; identical to SEQ ID NO: 2876

SEQ ID NO: 24178 - DNA, 426 bp, Brassica napus; identical to SEQ ID NO: 2877
  CDS (1)..(426)

SEQ ID NO: 24179 - protein, 141 aa, Brassica napus; identical to SEQ ID NO: 2878

SEQ ID NO: 24180 - DNA, 309 bp, Brassica napus; identical to SEQ ID NO: 2879
  CDS (1)..(309)

SEQ ID NO: 24181 - protein, 102 aa, Brassica napus; identical to SEQ ID NO: 2880

SEQ ID NO: 24182 - DNA, 333 bp, Glycine max; identical to SEQ ID NO: 2881
  CDS (1)..(333)

SEQ ID NO: 24183 - protein, 110 aa, Glycine max; identical to SEQ ID NO: 2882

SEQ ID NO: 24184 - DNA, 324 bp, Glycine max; identical to SEQ ID NO: 2883
  CDS (1)..(324)

SEQ ID NO: 24185 - protein, 107 aa, Glycine max; identical to SEQ ID NO: 2884

SEQ ID NO: 24186 - DNA, 501 bp, Glycine max; identical to SEQ ID NO: 2885
  CDS (1)..(501)

SEQ ID NO: 24187 - protein, 166 aa, Glycine max; identical to SEQ ID NO: 2886

SEQ ID NO: 24188 - DNA, 399 bp, Glycine max; identical to SEQ ID NO: 2887
  CDS (1)..(399)

SEQ ID NO: 24189 - protein, 132 aa, Glycine max; identical to SEQ ID NO: 2888

SEQ ID NO: 24190 - DNA, 309 bp, Glycine max; identical to SEQ ID NO: 2889
  CDS (1)..(309)

SEQ ID NO: 24191 - protein, 102 aa, Glycine max; identical to SEQ ID NO: 2890

SEQ ID NO: 24192 - DNA, 525 bp, Glycine max; identical to SEQ ID NO: 2891
  CDS (1)..(525)

SEQ ID NO: 24193 - protein, 174 aa, Glycine max; identical to SEQ ID NO: 2892

SEQ ID NO: 24194 - DNA, 483 bp, Glycine max; identical to SEQ ID NO: 2893
  CDS (1)..(483)

SEQ ID NO: 24195 - protein, 160 aa, Glycine max; identical to SEQ ID NO: 2894

SEQ ID NO: 24196 - DNA, 522 bp, Glycine max; identical to SEQ ID NO: 2895
  CDS (1)..(522)

SEQ ID NO: 24197 - protein, 173 aa, Glycine max; identical to SEQ ID NO: 2896

SEQ ID NO: 24198 - DNA, 411 bp, Glycine max; identical to SEQ ID NO: 2897
  CDS (1)..(411)

SEQ ID NO: 24199 - protein, 136 aa, Glycine max; identical to SEQ ID NO: 2898

SEQ ID NO: 24200 - DNA, 309 bp, Glycine max; identical to SEQ ID NO: 2899
  CDS (1)..(309)

SEQ ID NO: 24201 - protein, 102 aa, Glycine max; identical to SEQ ID NO: 2900

SEQ ID NO: 24202 - DNA, 423 bp, Glycine max; identical to SEQ ID NO: 2901
  CDS (1)..(423)

SEQ ID NO: 24203 - protein, 140 aa, Glycine max; identical to SEQ ID NO: 2902

SEQ ID NO: 24204 - DNA, 318 bp, Glycine max; identical to SEQ ID NO: 2907
  CDS (1)..(318)

SEQ ID NO: 24205 - protein, 105 aa, Glycine max; identical to SEQ ID NO: 2908

SEQ ID NO: 24206 - DNA, 402 bp, Glycine max; identical to SEQ ID NO: 2909
  CDS (1)..(402)

SEQ ID NO: 24207 - protein, 133 aa, Glycine max; identical to SEQ ID NO: 2910

SEQ ID NO: 24208 - DNA, 309 bp, Glycine max; identical to SEQ ID NO: 2911
  CDS (1)..(309)

SEQ ID NO: 24209 - protein, 102 aa, Glycine max; identical to SEQ ID NO: 2912

SEQ ID NO: 24210 - DNA, 402 bp, Glycine max; identical to SEQ ID NO: 2913
  CDS (1)..(402)

SEQ ID NO: 24211 - protein, 133 aa, Glycine max; identical to SEQ ID NO: 2914

SEQ ID NO: 24212 - DNA, 480 bp, Zea mays; identical to SEQ ID NO: 2915
  CDS (1)..(480)

SEQ ID NO: 24213 - protein, 159 aa, Zea mays; identical to SEQ ID NO: 2916

SEQ ID NO: 24214 - DNA, 393 bp, Zea mays; identical to SEQ ID NO: 2917
  CDS (1)..(393)

SEQ ID NO: 24215 - protein, 130 aa, Zea mays; identical to SEQ ID NO: 2918

SEQ ID NO: 24216 - DNA, 345 bp, Zea mays; identical to SEQ ID NO: 2919
  CDS (1)..(345)

SEQ ID NO: 24217 - protein, 114 aa, Zea mays; identical to SEQ ID NO: 2920

SEQ ID NO: 24218 - DNA, 312 bp, Zea mays; identical to SEQ ID NO: 2921
  CDS (1)..(312)

SEQ ID NO: 24219 - protein, 103 aa, Zea mays; identical to SEQ ID NO: 2922

SEQ ID NO: 24220 - DNA, 342 bp, Zea mays; identical to SEQ ID NO: 2923
  CDS (1)..(342)

SEQ ID NO: 24221 - protein, 113 aa, Zea mays; identical to SEQ ID NO: 2924

SEQ ID NO: 24222 - DNA, 537 bp, Zea mays; identical to SEQ ID NO: 2925
  CDS (1)..(537)

SEQ ID NO: 24223 - protein, 178 aa, Zea mays; identical to SEQ ID NO: 2926

SEQ ID NO: 24224 - DNA, 399 bp, Zea mays; identical to SEQ ID NO: 2927
  CDS (1)..(399)

SEQ ID NO: 24225 - protein, 132 aa, Zea mays; identical to SEQ ID NO: 2928

SEQ ID NO: 24226 - DNA, 315 bp, Zea mays; identical to SEQ ID NO: 2929
  CDS (1)..(315)

SEQ ID NO: 24227 - protein, 104 aa, Zea mays; identical to SEQ ID NO: 2930

SEQ ID NO: 24228 - DNA, 21 bp, Artificial sequence
  primer
atggagaacctacagaagatg

SEQ ID NO: 24229 - DNA, 20 bp, Artificial sequence
  primer
ttaaagccataatgctccag

SEQ ID NO: 24230 - protein, 108 aa, Artificial sequence
  consensus sequence
  Variant (3)..(8): Xaa in position 3 to 8 is any amino acid
  Variant (9)..(13): Xaa in position 9 to 13 is any or no amino acid
  Variant (15)..(32): Xaa in position 15 to 32 is any amino acid
  Variant (33)..(38): Xaa in position 33 to 38 is any or no amino acid
  Variant (40)..(40): Xaa in position 40 is any amino acid
  Variant (42)..(49): Xaa in position 42 to 49 is any amino acid
  Variant (50)..(53): Xaa in position 50 to 53 is any or no amino acid
  Variant (55)..(57): Xaa in position 55 to 57 is any amino acid
  Variant (58)..(79): Xaa in position 58 to 79 is any or no amino acid
  Variant (81)..(81): Xaa in position 81 is any amino acid
  Variant (84)..(85): Xaa in position 84 to 85 is any amino acid
  Variant (87)..(89): Xaa in position 87 to 89 is any amino acid
  Variant (91)..(100): Xaa in position 91 to 100 is any amino acid
  Variant (101)..(101): Xaa in position 101 is any or no amino acid
  Variant (103)..(103): Xaa in position 103 is any amino acid
  Variant (105)..(107): Xaa in position 105 to 107 is any amino acid
VVXXXXXXXXXXXCXXXXXXXXXXXXXXXXXXXXXXXXEXDXXXXXXXXXXXXLXXXXXXXXXXXXXXXXXXXXXXXXXPXVFXXGXXXGXXXXXXXXXXXGXLXXXL

SEQ ID NO: 24231 - protein, 30 aa, Artificial sequence; identical to SEQ ID NO: 2934
  protein pattern
  Variant (2)..(2): Xaa in position 2 is any amino acid
  Variant (5)..(5): Xaa in position 5 is any amino acid
  Variant (6)..(6): Xaa in position 6 is any or no amino acid
  Variant (8)..(10): Xaa in position 8 to 10 is any amino acid
  Variant (11)..(11): Xaa in position 11 is any or no amino acid
  Variant (13)..(13): Xaa in position 13 is Ala, Gly, Ser or Thr
  Variant (14)..(25): Xaa in position 14 to 25 is any amino acid
  Variant (27)..(29): Xaa in position 27 to 29 is any amino acid
  Variant (30)..(30): Xaa in position 30 is Phe, Ile, Leu or Val

SEQ ID NO: 24232 - DNA, 1206 bp, Arabidopsis thaliana
  CDS (1)..(1206)
atggatgagaataatcatggagtttcatcaagctcacttccacctttcctcaccaaaacatatgagatggttgatgattcttcatccgattctatcgtctcttggagtcagagcaataagagtttcatcgtttggaatccgccggagttttctagagatcttcttccgagattcttcaagcacaataacttctctagctttatccgccagcttaacacatatggttttagaaaagctgatcctgagcaatgggaatttgcgaatgatgattttgtgagaggtcaacctcatcttatgaagaacattcatagacgcaaaccagttcatagccactctttaccgaatcttcaagctcagttaaacccgttgacggattcagaacgagtgagaatgaataatcagattgagagattgacaaaagagaaagaaggattgcttgaagagttacataaacaagacgaggaacgagaagtgtttgagatgcaagtgaaagaacttaaagaacgattacaacacatggagaagcgtcagaaaacaatggtttcgtttgtttctcaagtattggaaaagccagggcttgctttgaacctatcgccgtgtgttcccgaaacaaacgagaggaaaagaaggttccctaggatcgagttctttcccgatgaaccgatgttggaagagaacaaaacttgtgttgttgtgagagaggaaggttctacaagcccttcttcacacacaagagagcatcaagtggaacagttagagtcatcgatagcgatttgggagaatcttgtatcggattcttgtgagagtatgttacaatcaagaagtatgatgacacttgatgtggatgaatcatctacttttccagagagccctcctctttcttgcatacagttaagtgtcgattcacgtctcaaatctcctccttctccaaggatcatcgatatgaactgtgagcccgatggttcgaaagaacagaacactgttgctgctcctcctcctcctccagtagcaggagcgaatgatggcttctggcagcagtttttctcagagaatcctggctcaaccgagcaacgggaagttcaattagagaggaaagacgataaagataaagccggagtacgtactgagaaatgttggtggaattcgagaaatgttaatgcaattacagaacagcttggacatctgacttcttcagagagaagttga

SEQ ID NO: 24233 - protein, 401 aa, Arabidopsis thaliana
MDENNHGVSSSSLPPFLTKTYEMVDDSSSDSIVSWSQSNKSFIVWNPPEFSRDLLPRFFKHNNFSSFIRQLNTYGFRKADPEQWEFANDDFVRGQPHLMKNIHRRKPVHSHSLPNLQAQLNPLTDSERVRMNNQIERLTKEKEGLLEELHKQDEEREVFEMQVKELKERLQHMEKRQKTMVSFVSQVLEKPGLALNLSPCVPETNERKRRFPRIEFFPDEPMLEENKTCVVVREEGSTSPSSHTREHQVEQLESSIAIWENLVSDSCESMLQSRSMMTLDVDESSTFPESPPLSCIQLSVDSRLKSPPSPRIIDMNCEPDGSKEQNTVAAPPPPPVAGANDGFWQQFFSENPGSTEQREVQLERKDDKDKAGVRTEKCWWNSRNVNAITEQLGHLTSSERS

SEQ ID NO: 24234 - DNA, 1993 bp, Glycine max
  CDS (644)..(1822)
ctcgagccgctatttttttataaaaaaaactattaattaaatattcatttattatttacttgaccagcaagttctttttcatttgttaaaactttatgaaattagatatttcattttctgtgaaaaaatcaattcattaaatactgctgaaaatcatggtcagaatttgagcttttggcaactatggacagaaatatgaacttttcgtatttggaggagaagcaatcctttttcggtgtcgttaactttatttttttggaggataagcaatcccttttgtggttcgctgtttccattttcagcttttttcttgtgtttgagcatttgaatctggacaaaggtttcacctttgggtgagtgattcaacaccagctatagctgggggagtgaaggtaaggttgtgagcattaatttgctttaaggggaattattaattggtgtttactgggattaatgaaacctagctagaaaggaaaatgatgggagaacaagggagtgtattttatatatatatatgtaaaaatttgtgtattgtttgtagtggttaaatttgtgaaaaaggtaaaaggttttttctttctttctgggtatacatactaaagggtttttgagagttcagtctgctttgagatttgtgttttggatgatggaggaagctcagggcagttctagttccctgccacctttcctcaccaagatttatgagatggtggatgatccttcaactaattccattgtttcatggagtgccaccaataggagtttcattgtttggaacccaccagagttttcaagggatttgttacccaaatactttaagcacaacaacttttccagtttcatcaggcagctcaacacttacggctttagaaagattgatcctgaacaatgggaatttgcaaatgatgattttgtaagaggtcagccacatcttttgaagaacatccataggcgcaaacctgtccatagccattctttgcagaatatccagggtcaaggggtttcttcgctgactgaatcagaaaggcagagttttaaggatgagatagagaagcttaaacatgaaaaagaacaacttcttcgggagttagagatgcatgaacaggagtggaaaatgtatgaggtacaattacaacactccaatgatcgtttggaaaagttggaaaagaagcaagaaaatttggtttcttctgtctctcaagtgttgcagaaacctgggattgccttaaatctcttgctgttgacagaaaacatggatagaaaacggaggttgccaagaagtggtctctttagtgatgacgctagcattgaagatcatatggaaacttcccaagtattaccaagggaaaatgcagatggtgcttctattttctcatcgagcacagaacggttggatctccttgagtcatccatgacgttttgggagaatattacacatgatgttggtgacgtctttgttcaaagtcatttaaacttggattttgatgaatctacaagttgtgcagatagtccagctatatcttgtgtgcaactagaagttgaagatcagcctaagtcacatggaatcaacgtgaattctgagccagctgtagttgcggctcctgatcttgatgcatcaaaagaacaacctgtcgaaacagctcctctgactactggtgttaatgacatattctgggaacgattcttgacagagaatcctggttcgtcagaaatgcaggaagctcagtctgaaagagaggattctgatggcagaagtaatgccaaattttggtggaacattaggaatgtaaataaccctccagaacagatggggcattcttagcaaagcagagcaaacttagttgcaattgattattccttttagcttgtgatgcccctcaattttcatgtaataaatgtaggtatacatattctatatttttggttaaatgattgcatcctctatagaatttagtcaatttttatactgctcactctcttttagttctctata

SEQ ID NO: 24235 - protein, 392 aa, Glycine max
MMEEAQGSSSSLPPFLTKIYEMVDDPSTNSIVSWSATNRSFIVWNPPEFSRDLLPKYFKHNNFSSFIRQLNTYGFRKIDPEQWEFANDDFVRGQPHLLKNIHRRKPVHSHSLQNIQGQGVSSLTESERQSFKDEIEKLKHEKEQLLRELEMHEQEWKMYEVQLQHSNDRLEKLEKKQENLVSSVSQVLQKPGIALNLLLLTENMDRKRRLPRSGLFSDDASIEDHMETSQVLPRENADGASIFSSSTERLDLLESSMTFWENITHDVGDVFVQSHLNLDFDESTSCADSPAISCVQLEVEDQPKSHGINVNSEPAVVAAPDLDASKEQPVETAPLTTGVNDIFWERFLTENPGSSEMQEAQSEREDSDGRSNAKFWWNIRNVNNPPEQMGHS

SEQ ID NO: 24236 - DNA, 1521 bp, Oryza sativa (japonica cultivar-group)
  CDS (1)..(1521)
atggaggccgccgttgctgctgcggctgcggccgccggggcggtgacgacggcggtcgcgcctccgcccggcgcggcggtcagcaacggggtggcgaccgcgccgccgccgttcctgatgaagacgtacgagatggtggacgacccggccaccgatgccgtcgtctcatggggccccgggaacaacagcttcgttgtgtggaacacccccgagttcgcgcgcgacctcctccccaagtacttcaagcacagcaacttctcctccttcgtcaggcagctcaacacctacggatttaggaaagttgatccagataggtgggagtttgcaaacgaaggttttcttagaggacaaaagcatctactgaagaccatcaacagaaggaaaccaactcatggaaacaaccaagttcagcagcctcagttgccagctgctcctgtacctgcttgcgtagaagtggggaagtttgggatggaagaagagattgagatgctcaaaagggataaaaatgttttaatgcaggaacttgtcaggctgagacaacaacagcagacaacagatcatcagctgcagactttgggcaagcgtcttcaaggaatggagcaacggcaacaacaaatgatgtctttcctggctaaggcaatgcatagtcctggcttcctagcacaatttgtacagcaaaacgaaaacagcagaagaagaatagttgctagtaacaaaaagaggaggctaccaaagcaggatggttcgttggactctgaaagtgcttcattggatggacaaatagtaaaatatcaacctatgatcaatgaagcagccaaagcgatgctaaggaagatcctaaagctagattcttcacatagatttgaatccatgggcaattcagataatttccttcttgagaattatatgccaaatggtcaaggtcttgacagctcttcatcaactcggaattctggtgttacccttgcagaggtcccagctaactcaggtttgccatatgtagctacaagctctggactttcagctatttgttcaacttcgactcctcagattcagtgcccagttgttttggacaacggcatacccaaagaagttccaaacatgagtgcggtgccttctgttccgaaggctgtggctccaggcccaactgatatcaatattctggaattcccagatttgcaagatatagtagctgaagaaaatgttgatattcctggagggggctttgaaatgcctggtcctgagggtgtattctctttgcctgaagaaggtgatgatagtgttcccattgagactgatgagattttgtacaacgatgacacccagaaacttcctgctatcattgattctttctgggaacagttcctggtggctagccctctatctgttgataatgatgaagtcgattcaggtgtactagaccaaaaggaaacacaacaggggaatggatggaccaaagctgaaaacatggctaaccttacagaacagatgggcctcctgtcatcacaccatacaggatga

SEQ ID NO: 24237 - protein, 506 aa, Oryza sativa (japonica cultivar-group)
MEAAVAAAAAAAGAVTTAVAPPPGAAVSNGVATAPPPFLMKTYEMVDDPATDAVVSWGPGNNSFVVWNTPEFARDLLPKYFKHSNFSSFVRQLNTYGFRKVDPDRWEFANEGFLRGQKHLLKTINRRKPTHGNNQVQQPQLPAAPVPACVEVGKFGMEEEIEMLKRDKNVLMQELVRLRQQQQTTDHQLQTLGKRLQGMEQRQQQMMSFLAKAMHSPGFLAQFVQQNENSRRRIVASNKKRRLPKQDGSLDSESASLDGQIVKYQPMINEAAKAMLRKILKLDSSHRFESMGNSDNFLLENYMPNGQGLDSSSSTRNSGVTLAEVPANSGLPYVATSSGLSAICSTSTPQIQCPVVLDNGIPKEVPNMSAVPSVPKAVAPGPTDINILEFPDLQDIVAEENVDIPGGGFEMPGPEGVFSLPEEGDDSVPIETDEILYNDDTQKLPAIIDSFWEQFLVASPLSVDNDEVDSGVLDQKETQQGNGWTKAENMANLTEQMGLLSSHHTG

SEQ ID NO: 24238 - DNA, 1428 bp, Oryza sativa subsp
  CDS (1)..(1428)
atggaagttgccgccggcgcccgcggcggcggggccggcggaggagggggaggccccgcgccgttcctgctcaagacgtacgagatggtggacgacccgtcgacggacgcggtggtgtcgtggagcgacgcctccgacgcgagcttcgtcgtctggaaccacccggagttcgccgcccgcctgctgcccgcctacttcaagcacagcaacttctccagcttcatccgccagctcaacacctacggattccgtaaaatagatccagagcgatgggaatttgccaatgagtacttcatcaagggacaaaagcacctgctgaagaatatccacaggcgtaagcctatccacagccacagccatccaccaggtgctctgcccgataatgagcgtgcaatatttgaggatgagatcgaacggctttcacgagagaaatccaacctccaggctgacctctggaaatccaagcagcagcagtcaggaacgatgaaccagattgaagatcttgagcgacgagtgcttggcatggagcagcgacagaccaagatgattgccttcttgcagcaagctagtaagaaccctcagtttgtcaacaagcttgttaagatggcagaagcatcttcgattttcacggatgctttcaataagaagagaaggttacctggtttggattacagtatcgagaacacagaaaccacaagcttttatgatgaccatagcagcacttctaagcaagaaacaggcaatcttttaaatcagcacttctctgataagcttaggttgggactttgtcctgccatgacagagagcaatatcatcacgctaagcacgcaaagctcaaacgaagataacggaagccctcatggtaaacatccagagtgtgacatgatggggagggaatgtctcccgttggtgccgcagatgatggaactctccgataccggcacatctatctgcccctccaagagctcttgctttgcaccacctataagtgatgaaggcctcttaacatgccatctgagtctaactcttgcatcatgctcgatggatgttgacaaaagccaaggcctcaatgcaaatgggaccactatagacaacccaactgaggcagcaacagctaccatggaaaaggatgacaccattgacagaagcttcgatgacaaccaaaagaaatcagctgattctcgtacagcagatgccacaacaccacgagcggatgcacgagtagccagtgaggctcctgcagccccggctgcagtggtgaatgacaagttctgggagcagttcttaacagagcgacctggctgctctgaaactgaagaagcaagctctggcctaagaacagatacttccagggagcaaatggagaacaggcaggcatatgatcactcacggaatgacagagaagacgtggaacaactgaaactctga

SEQ ID NO: 24239 - protein, 475 aa, Oryza sativa subsp
MEVAAGARGGGAGGGGGGPAPFLLKTYEMVDDPSTDAVVSWSDASDASFVVWNHPEFAARLLPAYFKHSNFSSFIRQLNTYGFRKIDPERWEFANEYFIKGQKHLLKNIHRRKPIHSHSHPPGALPDNERAIFEDEIERLSREKSNLQADLWKSKQQQSGTMNQIEDLERRVLGMEQRQTKMIAFLQQASKNPQFVNKLVKMAEASSIFTDAFNKKRRLPGLDYSIENTETTSFYDDHSSTSKQETGNLLNQHFSDKLRLGLCPAMTESNIITLSTQSSNEDNGSPHGKHPECDMMGRECLPLVPQMMELSDTGTSICPSKSSCFAPPISDEGLLTCHLSLTLASCSMDVDKSQGLNANGTTIDNPTEAATATMEKDDTIDRSFDDNQKKSADSRTADATTPRADARVASEAPAAPAAVVNDKFWEQFLTERPGCSETEEASSGLRTDTSREQMENRQAYDHSRNDREDVEQLKL

SEQ ID NO: 24240 - DNA, 1374 bp, Oryza sativa subsp
  CDS (1)..(1374)
atggagagttccaacctgggcggcggcggaggcggcggcggtgggccgccgccgttcttgatcaagacgtacgagatggtggaggacgcggcgaccaaccacgtcgtgtcgtggggccccggcggcgccagcttcgtcgtgtggaacccgctcgacttctcccgtgacctgttgcccaagtacttcaagcacaacaacttctccagcttcatcaggcagctcaacacctacggtttccgaaaaatcgatcctgagagatgggagttcgcaaacgaggatttcataagagggcacacgcaccttctgaagaacatccatcgacgcaagcccgtgcacagccactccctccagaaccagataaacggaccactcgccgaatcggagaggcgcgagctcgaagaagagatcaaccggctcaagtacgagaagagcatcctcgtcgcggacctccagaggcagaaccagcagcagtacgtgatcaactggcagatgcaggcgatggaaggcaggctagtggcgatggagcaacggcagaagaacatcgtggcctccctgtgcgagatgctgcagagacgcggtggcgccgtgtcgagctcgctgctggagtccgaccatttcagcaagaagaggagggtcccgaagatggatctcttcgtcgacgattgcgcggcgggcgaagaacagaaggtgttccagttccagggaattgggacggatgcaccggccatgcctcccgtgcttcctgtgaccaatggtgaggcttttgacagggttgagctgagcctggtctccctggagaaactcttccagagagcaaatgatgcttgcacagctgctgaagaaatgtactcccatggtcatggtggtactgaacccagcactgctatatgtcctgaagagatgaacactgctccaatggagacaggcatcgatcttcagttaccagctagcctccatcccagctcacccaacacagggaatgcccatctccatttatccactgaactcacagagtctccaggttttgtgcagagtccagagctgccaatggcagagattcgtgaagatatccatgtgacaagatacccaacacaagctgatgtaaattctgagattgcctcctccactgatacttcacaagatggcacgtcagaaactgaagcttcgcatggaccgaccaacgatgtgttttgggagcggttcctcacagagactccacggtcatgtttggatgagtcagaaagacaagagtctcccaaggacgatgtaaaagcagaattaggctgcaatggcttccatcaccgggagaaggttgatcagatcaccgagcaaatggggcaccttgcttcagccgagcagactctgcatacctga

SEQ ID NO: 24241 - protein, 457 aa, Oryza sativa subsp
MESSNLGGGGGGGGGPPPFLIKTYEMVEDAATNHVVSWGPGGASFVVWNPLDFSRDLLPKYFKHNNFSSFIRQLNTYGFRKIDPERWEFANEDFIRGHTHLLKNIHRRKPVHSHSLQNQINGPLAESERRELEEEINRLKYEKSILVADLQRQNQQQYVINWQMQAMEGRLVAMEQRQKNIVASLCEMLQRRGGAVSSSLLESDHFSKKRRVPKMDLFVDDCAAGEEQKVFQFQGIGTDAPAMPPVLPVTNGEAFDRVELSLVSLEKLFQRANDACTAAEEMYSHGHGGTEPSTAICPEEMNTAPMETGIDLQLPASLHPSSPNTGNAHLHLSTELTESPGFVQSPELPMAEIREDIHVTRYPTQADVNSEIASSTDTSQDGTSETEASHGPTNDVFWERFLTETPRSCLDESERQESPKDDVKAELGCNGFHHREKVDQITEQMGHLASAEQTLHT

SEQ ID NO: 24242 - DNA, 1488 bp, Vitis vinifera
  CDS (1)..(1488)
atggagggagcaagcggcagtagcagcgccgtgaatagtggtggtggtggtggtgctccgcctcctcatccgattccgaattcgaatgcgccgccaccgttccttagcaagacctacgatatggtcgatgatcctgccactaattcgatcgtgtcctggagtccaaccaacaatagcttcgtggtttggaaccctcccgagttcgcaagagaccttttaccgaagtacttcaagcacaacaatttttcgagctttgtgaggcagttgaacacatatggattcaggaaggttgatccagaccgttgggaatttgcaaatgagggatttttgaggggtcaaaaacacctattgaggagtataaatcggcgaaaacctgcccatggacataatcttcaacagccacagcaatcacattcacagggttcatcagtaggagcttgtgtagaggtgggcaagtttgggttggaggaagaggtagaaaggcttaaaagggacaaaaatgtgcttatgcaggaacttgtcaggttgaggcaacagcaacagacaactgataaccagttgcagaccatggtgcagcgccttcagggaatggagcagcgacagcaacaaatgatgtctttcctggcaaaggctgtgcagagccctggctttttggcgcagtttgtacagcagcaaaatgagagcaacagacgcataactgaggccaacaagaaacggaggctcaagcgggaagatattgctgagggtgagcattctgctgctccttctgatggccagattgttaagtaccagccattaatgaatgaggccactaaagcaatgctcaggcagatggtgaaaatggatacttctgcctttagcaacgattctgataatttcttgattggtgatgtttcctcatcatccaatggagttgagaaagggggctcttcaacctgtgtatcgggtgtgactcttcaagaggtcccaccaacttctttgccagttgcttcgggagttccaagtcatgaccccccctcagctcctatatctgaaattcaatctcccccagatatatgcgcactggttggggcacaagaagcagtgcccatctctattgccctgccagatgtaatattgcccgagttatctcaaataccagaaatgttgccgaaaagtattgtggacattcacaaagatgattatgtgggaccccaatcagggaatgttgaattcatggatcctatttcattgggaattgatggagcaatgccgatagatatcgacaacatctctgctgatcctgacatagatgccttgctagatgcaagttctaacttttgggaggacctccttgtggacaatgatgaggttgaatcaactccacttgaggacactaccaagggaaatgaaatgcagccatcagaaaatggatgggacaaggtgcagcatatggcaaagcttacagaacagatgggccttcttacatcggatacaaaaaggatttga

SEQ ID NO: 24243 - protein, 495 aa, Vitis vinifera
MEGASGSSSAVNSGGGGGAPPPHPIPNSNAPPPFLSKTYDMVDDPATNSIVSWSPTNNSFVVWNPPEFARDLLPKYFKHNNFSSFVRQLNTYGFRKVDPDRWEFANEGFLRGQKHLLRSINRRKPAHGHNLQQPQQSHSQGSSVGACVEVGKFGLEEEVERLKRDKNVLMQELVRLRQQQQTTDNQLQTMVQRLQGMEQRQQQMMSFLAKAVQSPGFLAQFVQQQNESNRRITEANKKRRLKREDIAEGEHSAAPSDGQIVKYQPLMNEATKAMLRQMVKMDTSAFSNDSDNFLIGDVSSSSNGVEKGGSSTCVSGVTLQEVPPTSLPVASGVPSHDPPSAPISEIQSPPDICALVGAQEAVPISIALPDVILPELSQIPEMLPKSIVDIHKDDYVGPQSGNVEFMDPISLGIDGAMPIDIDNISADPDIDALLDASSNFWEDLLVDNDEVESTPLEDTTKGNEMQPSENGWDKVQHMAKLTEQMGLLTSDTKRI

SEQ ID NO: 24244 - DNA, 1230 bp, Vitis vinifera
  CDS (1)..(1230)
  misc_feature (847)..(847): m is a or c
  misc_feature (938)..(938): r is g or a
  misc_feature (1028)..(1028): r is g or a
atggaggcctctcagagcactagttccaattctcccccgccctttctcaccaaaacctatgaaatggtggatgatcccatcaccgattcgatcgtttcgtggagtcaggctggccacagctttgttgtttggaatccccctgagttcgccaaagatttgctccccaagtacttcaagcacaacaacttttccagctttgtcaggcagctgaatacttatggtttcaggaaggctgatcctgagcagtgggagtttgcaaatgaggaattcattagaggtcagaggcaccttttgaagaacatacatagacgcaagccgattcatagccattccacacaaaatcaggtgggctcagcaccattaccagaatcagaaaagcaggaatttgaggctgaaattgagaggctgaaacatgataagggtgcacttctgtcggagctacagcggtataaacaggagaatcagttctttgagtttcaaacacagtctttaggaaaacgagtgtttaatatggaactccggcaaaggaaaatgatggcctacttagcgcaagtattgcagaaacccggatttacttctagtctcatggcacagtcagaaattcataacaaaaagagaaggttattgatgcctaattacctttttaatgaagccaatgttgaagagaatatggtagtgactttccagaaagaaaagccggacacaatttctgttcaaggggagaatgttgagatgattgagagtttggaatcatctttaaatttttgggagaattttctctatgggattggtcaaggctcagcagatgtaatggatggttttggaacactttcccagccttctccamtcattattacagaaatgcattcatcatcagatccagacacaagcacccagccttgctcacctaaatcatatccgtcatcacctcattccarggatattcactcatcaccagagttggccagggctacaaatcatgcggacagccctgctatttcttctatttatctcaatatagatggttrtcctaaatctttgaggattgatgtcaattcagagcccactaatgcttctgaggttgaggcctcaaaagaatgtgaaggagggacaactgctgctggggcaaatgatgtcttcttgggcacagttcctgacagagacacctggttcatcggatgcacaggaggtccagtcagaacggagggacgcatatggcggcaagggtga

SEQ ID NO: 24245 - protein, 409 aa, Vitis vinifera
  misc_feature (283)..(283): The Xaa at location 283 stands for Ile, or Leu.
  misc_feature (313)..(313): The Xaa at location 313 stands for Arg, or Lys.
  misc_feature (343)..(343): The Xaa at location 343 stands for Cys, or Tyr.
MEASQSTSSNSPPPFLTKTYEMVDDPITDSIVSWSQAGHSFVVWNPPEFAKDLLPKYFKHNNFSSFVRQLNTYGFRKADPEQWEFANEEFIRGQRHLLKNIHRRKPIHSHSTQNQVGSAPLPESEKQEFEAEIERLKHDKGALLSELQRYKQENQFFEFQTQSLGKRVFNMELRQRKMMAYLAQVLQKPGFTSSLMAQSEIHNKKRRLLMPNYLFNEANVEENMVVTFQKEKPDTISVQGENVEMIESLESSLNFWENFLYGIGQGSADVMDGFGTLSQPSPXIITEMHSSSDPDTSTQPCSPKSYPSSPHSXDIHSSPELARATNHADSPAISSIYLNIDGXPKSLRIDVNSEPTNASEVEASKECEGGTTAAGANDVFLGTVPDRDTWFIGCTGGPVRTEGRIWRQG

SEQ ID NO: 24246 - DNA, 1509 bp, Medicago sativa
  CDS (1)..(1509)
atggatggagcaagcggcgcaagtggcggcggagagggttcaaccacccagataccggcgccgacaccgatgcaaaacgcgaacgcgccgccaccgtttttgagcaaaacgtatgacatggtggatgatccttcaacggatgcgatagtttcatggagcgcaaccaacaacagtttcgttgtttgggacccacctgaattcgctagggaccttttgccgaagttcttcaagcataacaatttctcaagctttgtgagacagttgaatacttatggtttcaggaaggttgacccagatcgttgggaatttgcaaatgagggctttttgaggggtcaaaagcaattgcttaagagtattagtcgaagaaaacctgcccatggtcatactcaacaacaggctcagcaaccgcatggacagagttcatcagtaggggcatgtgtagaagtcggcaaatttgggcttgaggaagaggttgagaggcttaaaagagataagaatgttctcatgcaagagcttgtgaggttgagacagcagcaacaaaccactgacggccagctgcaaacaatggttcagcgccttcaaggaatggagcaacgacaacagcaaatgatgtcattccttgccaaagccgtccaaagccctggtttctttgctcagtttgtgcaacaacaaaatgacagcaataggcgcattactgaagtcaacaaaaagcgtcggctcaagcaggatggtattgctgaaacaacagagcaagctacccctcctgatggacaaattgttaaatatcaacctatgatgaatgaaacagcaaaagcaatgctaaggaagatcatgaaatgggatactccgcgtgtagaatctttcaataaaaaccctgataattacttgattggtgatggtacttcaccatccagtgcaatggacagtagtagctctacaagctggaactcgggagtaactcttcaagaggttcctccatcttcagtgcagtctactcaaattccagtgtcaacagggactcaaggacacatcccctcagcagaaaaacctgaaattctatctgtacctcaagctgcagcatctgcaaatgttatgaaggatggaacacatgcagcatcgactatcccgacttctcaagcagatgttataatgcctgatataccttcagtaccagagattgtacctaaaagtattcttgatatacctgaagacaattatatggctcccgagacagatgatggatttatggatccgagttcacttggatcattacccattgatttggattgtctttcacccggtgcagacattgatgatttgttaagcaattctatttgggatgatcttctgcaaactccaattccagaggattttgaggccaacattgacgaaatatccagagggaatgaggtgcagccaacagaaaatggctgggacaataatactcagcccctggatcaactaacagagcagatgggtcttctttcttctgatgccaaaagaatttaa

SEQ ID NO: 24247 - protein, 502 aa, Medicago sativa
MDGASGASGGGEGSTTQIPAPTPMQNANAPPPFLSKTYDMVDDPSTDAIVSWSATNNSFVVWDPPEFARDLLPKFFKHNNFSSFVRQLNTYGFRKVDPDRWEFANEGFLRGQKQLLKSISRRKPAHGHTQQQAQQPHGQSSSVGACVEVGKFGLEEEVERLKRDKNVLMQELVRLRQQQQTTDGQLQTMVQRLQGMEQRQQQMMSFLAKAVQSPGFFAQFVQQQNDSNRRITEVNKKRRLKQDGIAETTEQATPPDGQIVKYQPMMNETAKAMLRKIMKWDTPRVESFNKNPDNYLIGDGTSPSSAMDSSSSTSWNSGVTLQEVPPSSVQSTQIPVSTGTQGHIPSAEKPEILSVPQAAASANVMKDGTHAASTIPTSQADVIMPDIPSVPEIVPKSILDIPEDNYMAPETDDGFMDPSSLGSLPIDLDCLSPGADIDDLLSNSIWDDLLQTPIPEDFEANIDEISRGNEVQPTENGWDNNTQPLDQLTEQMGLLSSDAKRI

SEQ ID NO: 24248 - DNA, 1509 bp, Medicago sativa
  CDS (1)..(1509)
atggatggagcaagcggcggaagtggcggcggagagggttcaaccacccaaataccggcgccgacaccgatgctaaacgcgaacgcgccgccaccgtttttgagcaaaacttatgacatggtggatgatccttcaacagatgcgatagtttcatggagcgcaaccaacaacagtttcgttgtttgggacccacccgaattcgctagggaccttttgccgaagttcttcaagcataacaatttctcaagctttgtgagacagttgaatacttatggtttcaggaaggttgacccagatcgttgggaatttgcaaatgagggctttttgaggggtcaaaagcaattgcttaagagtattagtcgaagaaaacctgcccatggtcatactcaacaacaggctcagcaaccgcatggacagagttcatcagtaggggcatgtgtagaagtcggcaaatttgggcttgaggaagaggttgagaggcttaaaagagataagaatgttctcatgcaagagcttgtgaggttgagacagcagcaacaaaccactgacggccagctgcaaacaatggttcagcgccttcaaggaatggagcaacgacaacagcaaatgatgtcattccttgccaaagccgtccaaagccctggtttctttgctcagtttgtgcaacaacaaaatgacagcaataggcgcattactgaagtcaacaaaaagcgtcggctcaagcaggatggtattgctgaaacaacagagcaagctacccctcctgatggacaaattgttaaatatcaacctatgatgaatgaaacagcaaaagcaatgctaaggaagatcatgaaatgggatactccgcgtgtagaatctttcaataaaaaccctgataattacttgattggtgatggtacttcaccatccagtgcaatggacagtagtagctctacaagctggaactcgggagtaactcttcaagaggttcctccatcttcagtgcagtctactcaaattccagtgtcaacagggactcaaggacacatcccctcagcagaaaaacctgaaattctatctgtacctcaagctgcagcatctgcaaatgttatgaaggatggaacacatgcagcatcgactatcccgacttctcaagcagatgttataatgcctgatataccttcagtaccagagattgtgcctaaaagtattcttgatatacctgaagacaattatatggctcccgagacagatgatggatttatggatccgagttcacttggatcattacccattgatttggattgtctttcacccggtgcagacattgatgatttgttaagcaattctatttgggatgatcttctgcaaactccaattccagaggattttgaggccaacattgacgaaatatccagagggaatgaggtgcagccaacagaaaatggctgggacaataatactcagcccctggatcaactaacagagcagatgggtcttctttcttctgatgccaaaagaatttaa

SEQ ID NO: 24249 - protein, 502 aa, Medicago sativa
MDGASGGSGGGEGSTTQIPAPTPMLNANAPPPFLSKTYDMVDDPSTDAIVSWSATNNSFVVWDPPEFARDLLPKFFKHNNFSSFVRQLNTYGFRKVDPDRWEFANEGFLRGQKQLLKSISRRKPAHGHTQQQAQQPHGQSSSVGACVEVGKFGLEEEVERLKRDKNVLMQELVRLRQQQQTTDGQLQTMVQRLQGMEQRQQQMMSFLAKAVQSPGFFAQFVQQQNDSNRRITEVNKKRRLKQDGIAETTEQATPPDGQIVKYQPMMNETAKAMLRKIMKWDTPRVESFNKNPDNYLIGDGTSPSSAMDSSSSTSWNSGVTLQEVPPSSVQSTQIPVSTGTQGHIPSAEKPEILSVPQAAASANVMKDGTHAASTIPTSQADVIMPDIPSVPEIVPKSILDIPEDNYMAPETDDGFMDPSSLGSLPIDLDCLSPGADIDDLLSNSIWDDLLQTPIPEDFEANIDEISRGNEVQPTENGWDNNTQPLDQLTEQMGLLSSDAKRI

SEQ ID NO: 24250 - DNA, 1686 bp, Medicago sativa
  CDS (1)..(1686)
atggatggagcaagcggcggaagtggcggcggagagggttcaaccacccaaataccggcgccgacaccgatgctaaacgcgaacgcgccgccaccgtttttgagcaaaacttatgacatggtggatgatccttcaacagatgcgatagtttcatggagcgcaaccaacaacagtttcgttgtttgggacccacccgaattcgctagggaccttttgccgaagttcttcaagcataacaatttctcaagctttgtgagacagttgaatacttatggtttcaggaaggttgacccagatcgttgggaatttgcaaatgagggctttttgaggggtcaaaagcaattgcttaagagtattagtcgaagaaaacctgcccatggtcatactcaacaacaggctcagcaaccgcatggacagagttcatcagtaggggcatgtgtagaagtcggcaaatttgggcttgaggaagaggttgagaggcttaaaagagataagaatgttctcatgcaagagcttgtgaggttgagacagcagcaacaaaccactgacggccagctgcaaacaatggttcagcgccttcaaggaatggagcaacgacaacagcaaatgatgtcattccttgccaaagccgtccaaagccctggtttctttgctcagtttgtgcaacaacaaaatgacagcaataggcgcattactgaagtcaacaaaaagcgtcggctcaagcaggatggtattgctgaaacaacagagcaagctacccctcctgatggacaaattgttaaatatcaacctatgatgaatgaaacagcaaaagcaatgctaaggaagatcatgaaatgggatactccgcgtgtagaatctttcaataaaaaccctgataattacttgattggtgatggtacttcaccatccagtgcaatggacagtagtagctctacaagctggaactcgggagtaactcttcaagaggttcctccatcttcagtgcagtctactcaaattccaatcatgaaatgggatactccgcgtgtagaatctttcaataaaaaccctgataattacttgattggtgatggtacttcaccatccagtgcaatggacagtagtagctctacaagctggaactcgggagtaactcttcaagaggttcctccatcttcagtgcagtctactcaaattccaatgtcaacagggactcaaggacacatcccctcagcagaaaaacctgaaattctatctgtacctcaagctgcagcatctgcaaatgttatgaaggatggaacacatgcagcatcgactatcccgacttctcaagcagatgttataatgcctgatataccttcagtaccagagattgtgcctaaaagtattcttgatatacctgaagacaattatatggctcccgagacagatgatggatttatggatccgagttcacttggatcattacccattgatttggattgtctttcacccggtgcagacattgatgatttgttaagcaattctatttgggatgatcttctgcaaactccaattccagaggattttgaggccaacattgacgaaatatccagagggaatgaggtgcagccaacagaaaatggctgggacaataatactcagcccctggatcaactaacagagcagatgggtcttctttcttctgatgccaaaagaatttaa

SEQ ID NO: 24251 - protein, 561 aa, Medicago sativa
MDGASGGSGGGEGSTTQIPAPTPMLNANAPPPFLSKTYDMVDDPSTDAIVSWSATNNSFVVWDPPEFARDLLPKFFKHNNFSSFVRQLNTYGFRKVDPDRWEFANEGFLRGQKQLLKSISRRKPAHGHTQQQAQQPHGQSSSVGACVEVGKFGLEEEVERLKRDKNVLMQELVRLRQQQQTTDGQLQTMVQRLQGMEQRQQQMMSFLAKAVQSPGFFAQFVQQQNDSNRRITEVNKKRRLKQDGIAETTEQATPPDGQIVKYQPMMNETAKAMLRKIMKWDTPRVESFNKNPDNYLIGDGTSPSSAMDSSSSTSWNSGVTLQEVPPSSVQSTQIPIMKWDTPRVESFNKNPDNYLIGDGTSPSSAMDSSSSTSWNSGVTLQEVPPSSVQSTQIPMSTGTQGHIPSAEKPEILSVPQAAASANVMKDGTHAASTIPTSQADVIMPDIPSVPEIVPKSILDIPEDNYMAPETDDGFMDPSSLGSLPIDLDCLSPGADIDDLLSNSIWDDLLQTPIPEDFEANIDEISRGNEVQPTENGWDNNTQPLDQLTEQMGLLSSDAKRI

SEQ ID NO: 24252 - DNA, 1509 bp, Medicago sativa
  CDS (1)..(1509)
atggatggagcaagcggcggcagtggcggcggagagggttcaaccacccaaataccggcgccgacaccgatgcaaaacgcgaacgcgccgccaccgtttttgagcaaaacgtatgatatggtggatgatccttcaacggatgcgatagtttcatggagcgcaaccaacaacagtttcgttgtttgggacccacccgaattcgctagggaccttttgccgaagttcttcaagcataacaatttctcaagctttgtgagacagttgaatacttatggtttcaggaaggttgacccagatcgttgggaatttgcaaatgagggctttttgaggggtcaaaagcaattgcttaagagtattagtcgaagaaaacctgcccatggtcatactcaacaacaggctcagcaaccgcatggacagagttcatcagtaggggcatgtgtagaagtcggcaaatttgggcttgaggaagaggttgagaggcttaaaagagataagaatgttctcatgcaagagcttgtgaggttgagacagcagcaacaaaccactgacggccagctgcaaacaatggttcagcgccttcaaggaatggagcaacgacaacagcaaatgatgtcattccttgccaaagccgtccaaagccctggtttctttgctcagtttgtgcaacaacaaaatgacagcaataggcgcattactgaagtcaacaaaaagcgtcggctcaagcaggatggtattgctgaaacaacagagcaagctacccctcctgatggacaaattgttaaatatcaacctatgatgaatgaaacagcaaaagcaatgctaaggaagatcatgaaatgggatactccgcgtgtagaatctttcaataaaaaccctgataattacttgattggtgatggtacttcaccatccagtgcaatggacagtagtagctctacaagctggaactcgggagtaactcttcaagaggttcctccatcttcagtgcagtctactcaaattccagtgtcaacagggactcaaggacacatcccctcagcagaaaaacctgaaattctatctgtacctcaagctgcagcatctgcaaatgttatgaaggatggaacacatgcagcatcgactatcccgacttctcaagcagatgttataatgcctgatataccttcagtaccagagattgtgcctaaaagtattcttgatatacctgaagacaattatatggctcccgagacagatgatggatttatggatccgagttcacttggatcattacccattgatttggattgtctttcacccggtgcagacattgatgatttgttaagcaattctatttgggatgatcttctgcaaactccaattccagaggattttgaggccaacattgacgaaatatccagagggaatgaggtgcagccaacagaaaatggctgggacaataatactcagcccctggatcaactaacagagcagatgggtcttctttcttctgatgccaaaagaatttaa

SEQ ID NO: 24253 - protein, 502 aa, Medicago sativa
MDGASGGSGGGEGSTTQIPAPTPMQNANAPPPFLSKTYDMVDDPSTDAIVSWSATNNSFVVWDPPEFARDLLPKFFKHNNFSSFVRQLNTYGFRKVDPDRWEFANEGFLRGQKQLLKSISRRKPAHGHTQQQAQQPHGQSSSVGACVEVGKFGLEEEVERLKRDKNVLMQELVRLRQQQQTTDGQLQTMVQRLQGMEQRQQQMMSFLAKAVQSPGFFAQFVQQQNDSNRRITEVNKKRRLKQDGIAETTEQATPPDGQIVKYQPMMNETAKAMLRKIMKWDTPRVESFNKNPDNYLIGDGTSPSSAMDSSSSTSWNSGVTLQEVPPSSVQSTQIPVSTGTQGHIPSAEKPEILSVPQAAASANVMKDGTHAASTIPTSQADVIMPDIPSVPEIVPKSILDIPEDNYMAPETDDGFMDPSSLGSLPIDLDCLSPGADIDDLLSNSIWDDLLQTPIPEDFEANIDEISRGNEVQPTENGWDNNTQPLDQLTEQMGLLSSDAKRI

SEQ ID NO: 24254 - DNA, 1509 bp, Medicago sativa
  CDS (1)..(1509)
atggatggagcaagcggcgcaagtggcggcggagagggttcaaccacccagataccggcgccgacaccgatgcaaaacgcgaacgcgccgccaccgtttttgagcaaaacttatgacatggtggatgatccttcaacggatgcgatagtttcatggagcgcaaccaacaacagtttcgttgtttgggacccacccgaattcgctagggaccttttgccgaagttcttcaagcataacaatttctcaagctttgtgagacagttgaatacttatggtttcaggaaggttgacccagatcgttgggaatttgcaaatgagggctttttgaggggtcaaaagcaattgcttaagagtattagtcgaagaaaacctgcccatggtcatactcaacaacaggctcagcaaccgcatggacagagttcatcagtaggggcatgtgtagaagtcggcaaatttgggcttgaggaagaggttgagaggcttaaaagagataagaatgttctcatgcaagagcttgtgaggttgagacagcagcaacaaaccactgacggccagctgcaaacaatggttcagcgccttcaaggaatggagcaacgacaacagcaaatgatgtcattccttgccaaagccgtccaaagccctggtttctttgctcagtttgtgcaacaacaaaatgacagcaataggcgcattactgaagtcaacaaaaagcgtcggctcaagcaggatggtattgctgaaacaacagagcaagctacccctcctgatggacaaattgttaaatatcaacctatgatgaatgaaacagcaaaagcaatgctaaggaagatcatgaaatgggatactccgcgtgtagaatctttcaataaaaaccctgataattacttgattggtgatggtacttcaccatccagtgcaatggacagtagtagctctacaagctggaactcgggagtaactcttcaagaggttcctccatcttcagtgcagtctactcaaattccaatgtcaacagggactcaaggacacatcccctcagcagaaaaacctgaaattctatctgtacctcaagctgcagcatctgcaaatgttatgaaggatggaacacatgcagcatcgactatcccgacttctcaagcagatgttataatgcctgatataccttcagtaccagagattgtgcctaaaagtattcttgatatacctgaagacaattatatggctcccgagacagatgatggatttatggatccgagttcacttggatcattacccattgatttggattgtctttcacccggtgcagacattgatgatttgttaagcaattctatttgggatgatcttctgcaaactccaattccagaggattttgaggccaacattgacgaaatatccagagggaatgaggtgcagccaacagaaaatggctgggacaataatactcagcccctggatcaactaacagagcagatgggtcttctttcttctgatgccaaaagaatttaa

SEQ ID NO: 24255 - protein, 502 aa, Medicago sativa
MDGASGASGGGEGSTTQIPAPTPMQNANAPPPFLSKTYDMVDDPSTDAIVSWSATNNSFVVWDPPEFARDLLPKFFKHNNFSSFVRQLNTYGFRKVDPDRWEFANEGFLRGQKQLLKSISRRKPAHGHTQQQAQQPHGQSSSVGACVEVGKFGLEEEVERLKRDKNVLMQELVRLRQQQQTTDGQLQTMVQRLQGMEQRQQQMMSFLAKAVQSPGFFAQFVQQQNDSNRRITEVNKKRRLKQDGIAETTEQATPPDGQIVKYQPMMNETAKAMLRKIMKWDTPRVESFNKNPDNYLIGDGTSPSSAMDSSSSTSWNSGVTLQEVPPSSVQSTQIPMSTGTQGHIPSAEKPEILSVPQAAASANVMKDGTHAASTIPTSQADVIMPDIPSVPEIVPKSILDIPEDNYMAPETDDGFMDPSSLGSLPIDLDCLSPGADIDDLLSNSIWDDLLQTPIPEDFEANIDEISRGNEVQPTENGWDNNTQPLDQLTEQMGLLSSDAKRI

SEQ ID NO: 24256 - DNA, 927 bp, Zea mays
  CDS (1)..(927)
atggagggcgcgtcctcgctgccgcccttcctgagcaagacgtacgagatggtggacgacccggccacggacgccgtggtggcgtggacgccgctggggaccagcttcgtcgtcgcgaaccaggccgagttctggagggatctgctccccaagtacttcaagcacaacaacttctccagcttcgtgcggcaactgaacacctacggctttaagaaaattgatcctgaacaatgggagtttgcaaatgatgatttcattaggggacaacagcaccgactgaaaaatatacacaggcgtaagcctatattcagccattcatcgcatactcagggttctggaccattaccagataccgaaaggagggattatgaggaggaaatcgaaaggcttaagtgtgacaatgcagctctgacctcagagcttgaaaagaatgcacagaagaaacttgttacagagaaacgaatgcaggatctagaagataagttgatctttttggaggatcggcagaagaatctgatggcgtatgtcagggatattgtacaggcaccaggatctttctctagctttgtgcagcaacctgatcatcacggaaagaaaaggagactaccagtacctatctctctctaccaagattctaatgctaaggggaaccaggttgtgcatgggagcttcatcaccaacccaccagcttgcagggaatcatttgacaagacggaatcttcattgaactcgttggagaatttccttcgggaagcgagtgaagcgttcaatatttcatatgatgatggcctccctggccttcatctgctgtcgttatcacagagctccattcgtccggagaaagtgatccccatgtgccatcacctgtctcaagaatgcatacatcttcggctggtgcgggagattcgctctcttcccgcgatttaa

SEQ ID NO: 24257 - protein, 308 aa, Zea mays
MEGASSLPPFLSKTYEMVDDPATDAVVAWTPLGTSFVVANQAEFWRDLLPKYFKHNNFSSFVRQLNTYGFKKIDPEQWEFANDDFIRGQQHRLKNIHRRKPIFSHSSHTQGSGPLPDTERRDYEEEIERLKCDNAALTSELEKNAQKKLVTEKRMQDLEDKLIFLEDRQKNLMAYVRDIVQAPGSFSSFVQQPDHHGKKRRLPVPISLYQDSNAKGNQVVHGSFITNPPACRESFDKTESSLNSLENFLREASEAFNISYDDGLPGLHLLSLSQSSIRPEKVIPMCHHLSQECIHLRLVREIRSLPAI

SEQ ID NO: 24258 - DNA, 1509 bp, Medicago sativa
  CDS (1)..(1509)
atggatggagcaagcggcggaagtggcggcggagagggttcaaccacccaaataccggcgccgacaccgatgctaaacgcgaacgcgccgccaccgtttttgagcaaaacttatgacatggtggatgatccttcaacagatgcgatagtttcatggagcgcaaccaacaacagtttcgttgtttgggacccacccgaattcgctagggaccttttgccgaagttcttcaagcataacaatttctcaagctttgtgagacagttgaatacttatggtttcaggaaggttgacccagatcgttgggaatttgcaaatgagggctttttgaggggtcaaaagcaattgcttaagagtattagtcgaagaaaacctgcccatggtcatactcaacaacaggctcagcaaccgcatggacagagttcatcagtaggggcatgtgtagaagtcggcaaatttgggcttgaggaagaggttgagaggcttaaaagagataagaatgttctcatgcaagagcttgtgaggttgagacagcagcaacaaaccactgacggccagctgcaaacaatggttcagcgccttcaaggaatggagcaacgacaacagcaaatgatgtcattccttgccaaagccgtccaaagccctggtttctttgctcagtttgtgcaacaacaaaatgacagcaataggcgcattactgaagtcaacaaaaagcgtcggctcaagcaggatggtattgctgaaacaacagagcaagctacccctcctgatggacaaattgttaaatatcaacctatgatgaatgaaacagcaaaagcaatgctaaggaagatcatgaaatgggatactccgcgtgtagaatctttcaataaaaaccctgataattacttgattggtgatggtacttcaccatccagtgcaatggacagtagtagctctacaagctggaactcgggagtaactcttcaagaggttcctccatcttcagtgcagtctactcaaattccaatgtcaacagggactcaaggacacatcccctcagcagaaaaacctgaaattctatctgtacctcaagctgcagcatctgcaaatgttatgaaggatggaacacatgcagcatcgactatcccgacttctcaagcagatgttataatgcctgatataccttcagtaccagagattgtgcctaaaagtattcttgatatacctgaagacaattatatggctcccgagacagatgatggatttatggatccgagttcacttggatcattacccattgatttggattgtctttcacccggtgcagacattgatgatttgttaagcaattctatttgggatgatcttctgcaaactccaattccagaggattttgaggccaacattgacgaaatatccagagggaatgaggtgcagccaacagaaaatggctgggacaataatactcagcccctggatcaactaacagagcagatgggtcttctttcttctgatgccaaaagaatttaa

SEQ ID NO: 24259 - protein, 502 aa, Medicago sativa
MDGASGGSGGGEGSTTQIPAPTPMLNANAPPPFLSKTYDMVDDPSTDAIVSWSATNNSFVVWDPPEFARDLLPKFFKHNNFSSFVRQLNTYGFRKVDPDRWEFANEGFLRGQKQLLKSISRRKPAHGHTQQQAQQPHGQSSSVGACVEVGKFGLEEEVERLKRDKNVLMQELVRLRQQQQTTDGQLQTMVQRLQGMEQRQQQMMSFLAKAVQSPGFFAQFVQQQNDSNRRITEVNKKRRLKQDGIAETTEQATPPDGQIVKYQPMMNETAKAMLRKIMKWDTPRVESFNKNPDNYLIGDGTSPSSAMDSSSSTSWNSGVTLQEVPPSSVQSTQIPMSTGTQGHIPSAEKPEILSVPQAAASANVMKDGTHAASTIPTSQADVIMPDIPSVPEIVPKSILDIPEDNYMAPETDDGFMDPSSLGSLPIDLDCLSPGADIDDLLSNSIWDDLLQTPIPEDFEANIDEISRGNEVQPTENGWDNNTQPLDQLTEQMGLLSSDAKRI

SEQ ID NO: 24260 - DNA, 1533 bp, Glycine max
  CDS (1)..(1533)
atggacggaagagcgagcagcagcgtgggcggagaagcatcgccagctccagcaccggtgccgataacgaatgcgaacgcgccgccgcctttcttgagcaagacatacgagatggtagaggacccttcgacggactcgatagtgtcgtggagtccaacgaacaacagtttcgtggtttggaaccctcccgagttcgccagagatctcttgcccaaacacttcaagcacaacaacttctccagcttcgttcgccaattaaacacctacggatttaggaaggtagatccagatcgctgggaatttgcaaatgagggatttttgaggggtcaaaagcacttgcttaagactataactcggcggaaacctgcccatggtcataatcaacaggcacagcaagcacatggacagagttcatctgttggggcttgtgttgaagttgggaagtttggacttgaggaagaggttgagattctcaagagagataagaatgtgctcatgcaagagcttgtgagattgaggcagcagcaacaggctactgataaccagctgcagagtatggttcagcgccttcaaggaatggagcaacgacagcaacaaatgatgtcattccttgcaaaggctgttcagagtcctggttttttagctcaatttgtacaacagcaaaatgagagtagtagacgcataacggaggcaaataaaaaacgccggcttaagcaggagggtattggtgaaatggaacatactgctgcttctgatggccaaattgttaaatatcaacctctgataaatgaagcagcaaaagcaatgctgaggcaaatgatgaaattggatacttctcgactagaatcttttagtaataacgctgataattacttgattggtgatcattcatcatcatccggtgcaacggacaggggaaactctttgagccggacttctggagtaacacttcaagtggtccctctgactacaatccagtcttctcacattccatctgcaacggggataggggatgacccttcaacaggaaaatctgagattctatctactcctcaagttgtagcctgtgatgaagttacgaaagctcagtactctaatgtaaatgtttcggttggagaatctaatgcacctgctatccctgctactcaaacagatgaaatcatgcgggacctctctacaataccagacatagtggcaggaaatattcttgatattcctcaagaaaattatatggcacctgagacaggcggtgaaggatatatggatcctacttcatttggagtgaatgtgtcattgcccattgattttgatagtatttcacctgaagcagacattgatgatttgttgaacaatcctcacttttgggatgatattttgcgaactccagtgtcagaggagattgatacgaatgatgctgaagtattcaaggagaatgaggtgcagccaatggaaaatggattggacgaatcacaaaatatggaccaacttactgagcagatgggcctactttcttctgatgccaaaagaatttga

SEQ ID NO: 24261 - protein, 510 aa, Glycine max
MDGRASSSVGGEASPAPAPVPITNANAPPPFLSKTYEMVEDPSTDSIVSWSPTNNSFVVWNPPEFARDLLPKHFKHNNFSSFVRQLNTYGFRKVDPDRWEFANEGFLRGQKHLLKTITRRKPAHGHNQQAQQAHGQSSSVGACVEVGKFGLEEEVEILKRDKNVLMQELVRLRQQQQATDNQLQSMVQRLQGMEQRQQQMMSFLAKAVQSPGFLAQFVQQQNESSRRITEANKKRRLKQEGIGEMEHTAASDGQIVKYQPLINEAAKAMLRQMMKLDTSRLESFSNNADNYLIGDHSSSSGATDRGNSLSRTSGVTLQVVPLTTIQSSHIPSATGIGDDPSTGKSEILSTPQVVACDEVTKAQYSNVNVSVGESNAPAIPATQTDEIMRDLSTIPDIVAGNILDIPQENYMAPETGGEGYMDPTSFGVNVSLPIDFDSISPEADIDDLLNNPHFWDDILRTPVSEEIDTNDAEVFKENEVQPMENGLDESQNMDQLTEQMGLLSSDAKRI

SEQ ID NO: 24262 - DNA, 1380 bp, Oryza sativa
  CDS (1)..(1380)
atggagagttccaacctgggcggcggcggcggcggaggcggcggcggtgggccgccgccgttcttgatcaagacgtacgagatggtggaggacgcggcgaccaaccacgtcgtgtcgtgtggccccggcggcgccagcttcgtcgtgtggaacccgctcgacttctcccgtgacctgttgcccaagtacttcaagcacaacaacttctccagcttcatcaggcagctcaacacctacggtttccgaaaaatcgatcctgagagatgggagttcgcaaacgaggatttcataagagggcacacgcaccttctgaagaacatccatcgacgcaagcccgtgcacagccactccctccagaaccagataaacggaccactcgccgaatcggagaggcgcgagctcgaagaagagatcaaccggctcaagtacgagaagagcatcctcgtcgcggacctccagaggcagaaccagcagcagtacgtgatcaactggcagatgcaggcgatggaaggcaggctagtggcgatggagcaacggcagaagaacatcgtggcctccctgtgcgagatgctgcagagacgcggtggcgccgtgtcgagctcgctgctggagtccgaccatttcagcaagaagaggagggtcccgaagatggatctcttcgtcgacgattgcgcggcgggcgaagaacagaaggtgttccagttccagggaattgggacggatgcaccggccatgcctcccgtgcttcctgtgaccaatggtgaggcttttgacagggttgagctgagcctggtctccctggagaaactcttccagagagcaaatgatgcttgcacagctgctgaagaaatgtactcccatggtcatggtggtactgaacccagcactgctatatgtcctgaagagatgaacactgctccaatggagacaggcatcgatcttcagttaccagctagcctccatcccagctcacccaacacagggaatgcccatctccatttatccactgaactcacagagtctccaggttttgtgcagagtccagagctgccaatggcagagattcgtgaagatatccatgtgacaagatacccaacacaagctgatgtaaattctgagattgcctcctccactgatacttcacaagatggcacgtcagaaactgaagcttcgcatggaccgaccaacgatgtgttttgggagcggttcctcacagagactccacggtcatgtttggatgagtcagaaagacaagagtctcccaaggacgatgtaaaagcagaattaggctgcaatggcttccatcaccgggagaaggttgatcagatcaccgagcaaatggggcaccttgcttcagccgagcagactctgcatacctga

SEQ ID NO: 24263 - protein, 459 aa, Oryza sativa
MESSNLGGGGGGGGGGGPPPFLIKTYEMVEDAATNHVVSCGPGGASFVVWNPLDFSRDLLPKYFKHNNFSSFIRQLNTYGFRKIDPERWEFANEDFIRGHTHLLKNIHRRKPVHSHSLQNQINGPLAESERRELEEEINRLKYEKSILVADLQRQNQQQYVINWQMQAMEGRLVAMEQRQKNIVASLCEMLQRRGGAVSSSLLESDHFSKKRRVPKMDLFVDDCAAGEEQKVFQFQGIGTDAPAMPPVLPVTNGEAFDRVELSLVSLEKLFQRANDACTAAEEMYSHGHGGTEPSTAICPEEMNTAPMETGIDLQLPASLHPSSPNTGNAHLHLSTELTESPGFVQSPELPMAEIREDIHVTRYPTQADVNSEIASSTDTSQDGTSETEASHGPTNDVFWERFLTETPRSCLDESERQESPKDDVKAELGCNGFHHREKVDQITEQMGHLASAEQTLHT

SEQ ID NO: 24264 - DNA, 1209 bp, Phaseolus acutifolius
  CDS (1)..(1209)
atggatgaggcactgggtagttcatgttccctgccccctttcctggcaaagacttatgagatggtggatgatctgtccacgaattcaattgtttcgtggagtgtctctagcaaaagtttcattgtgtggaatcctccagaatttgcaagggatttgcttcctagattctttaagcacaacaacttctcaagtttcatcaggcagctcaacacatatggatttaagaaaattgacccggaacaatgggaatttgccaatgatgattttgtaagagggcaacctcatcttatgaagaacattcatagacggaagccggttcatagccattctttgcagaatctccaagcacagggcccattaggggactcggaaaggcagggttttactgatggaatagagaagcttaaacgtgataaagagcgacttctagtcgagttgcagaaatttcagcatgagtggcagacatatgagatacaaattcattgctcgaacgataggttggaaaagttggaacaaaaacaacacaagatggtttcttcgatttctcatgtattgcagaaacctgtgcttgctgtaaatatcttgcctctgacagaaactatggatagaaaacgaaggttaccgagaagtggccactactacgatgaatctagtattgaagatgctattgaaacttctcaaatgttacctagagaaaatgcagagaataccactgtcttgacattgaatgtggagcgattggatcagcttgaatcatccgtggcattttgggaggctattgcacatgatattggcgataacttcgctcaaattcagtccaacatggattttgatgaatctacaagttgtgctgatagtccatccatatcttgtgcgcaattagatgttgatgttcggcctaaatcatctggaatagacatgaactctgagccaactgcagctgctgttcctgatccacttgcatcaaaagatcaacctgcaggaatcactgtcgcagcgactggagttaatgatgtattctgggaacagttcttgacagaggatcctggtgcatcagaaacacaggaagtgcagtcagaaagaaaggattgtgatggcagaaaaaatgaaggaaaacctaatgatcatagcaaattttggtggaatatccggaatgcaaataatctttcagaaccgatggggcatgttggtcaagcagagaaaacttag

SEQ ID NO: 24265 - protein, 402 aa, Phaseolus acutifolius
MDEALGSSCSLPPFLAKTYEMVDDLSTNSIVSWSVSSKSFIVWNPPEFARDLLPRFFKHNNFSSFIRQLNTYGFKKIDPEQWEFANDDFVRGQPHLMKNIHRRKPVHSHSLQNLQAQGPLGDSERQGFTDGIEKLKRDKERLLVELQKFQHEWQTYEIQIHCSNDRLEKLEQKQHKMVSSISHVLQKPVLAVNILPLTETMDRKRRLPRSGHYYDESSIEDAIETSQMLPRENAENTTVLTLNVERLDQLESSVAFWEAIAHDIGDNFAQIQSNMDFDESTSCADSPSISCAQLDVDVRPKSSGIDMNSEPTAAAVPDPLASKDQPAGITVAATGVNDVFWEQFLTEDPGASETQEVQSERKDCDGRKNEGKPNDHSKFWWNIRNANNLSEPMGHVGQAEKT

SEQ ID NO: 24266 - DNA, 1209 bp, Medicago sativa
  CDS (1)..(1209)
atggatgaagctggaagttcaagttctctgcctccttttctggcaaagacttatgaaatggtggatgatcgatcctcggatcctattgtttcgtggagtgcatcgaacaaaagtttcgttgtgtggaatcctccggaattcgcaagggttttgctttccgagattcttaagcacaataacttctccagttttatcaggcagctgaatacatatggatttaggaaagttgatccggagcagtgggaatttgccaatgatgattttataagggggcaaccgcatctgatgaagaatattcatagacggaagccggttcatagtcattctctgcataatcttcaagcacaagcctctctaacggagtctgaaaggcagagtatgattgatgaaatagagaagctgaaacaggatagagaacaactcctcgtggagacgaagagataccagcatgattgggaaaggcatgagattcaaatgcattgttcgaaagatcagttggaaaaattggaacataaacaacaaaagatgttgtcctctgtttctgaagcattgcagaaacctatgattgctgtaaatctcttgccactggcagaagccatggagagaaaacgaaggttgccggcgagaagtgtttgctttaataatgaagctagtgttgaagatgctatggagacttctgtagctttgcccagggaaaattcagaggataacttctactttgacgttaaacaccgagagattggatcaacttcgaggcatccgtggcattttgggaagactcttgcacatgaagttggcgacaatttcgttcacactcattcaaacatggatttagatgaatctacatgctgtgctgataggttgtcgatatcttgtcagcaactagacggtgaagttcgacctaagtcacctgaaattgacatgaacgttgaaccagctgctgctgctcttgaggctgttgcagtaaaagaacaacctgcgagaatcaccactgcagcaactggggttaatgatgtattctgggaacagttcttgacagaggatcctggtgcatcggaagcacaggaagtgcaatcagaaagaaaagataatagtagcagaaaaaatgaaggaaaacctagtgatcatggtagattttggtggaacatgcggaaatcaaacaatcatccagaacagatggggcatgttagtcaagtagagaaaatttag

SEQ ID NO: 24267 - protein, 402 aa, Medicago sativa
MDEAGSSSSLPPFLAKTYEMVDDRSSDPIVSWSASNKSFVVWNPPEFARVLLSEILKHNNFSSFIRQLNTYGFRKVDPEQWEFANDDFIRGQPHLMKNIHRRKPVHSHSLHNLQAQASLTESERQSMIDEIEKLKQDREQLLVETKRYQHDWERHEIQMHCSKDQLEKLEHKQQKMLSSVSEALQKPMIAVNLLPLAEAMERKRRLPARSVCFNNEASVEDAMETSVALPRENSEDNFYFDVKHREIGSTSRHPWHFGKTLAHEVGDNFVHTHSNMDLDESTCCADRLSISCQQLDGEVRPKSPEIDMNVEPAAAALEAVAVKEQPARITTAATGVNDVFWEQFLTEDPGASEAQEVQSERKDNSSRKNEGKPSDHGRFWWNMRKSNNHPEQMGHVSQVEKI

SEQ ID NO: 24268 - DNA, 1227 bp, Nicotiana tabacum
  CDS (1)..(1227)
atggatgaagctacgtgcagcacgaatgcgctgcctccttttcttacaaagacatatgaaatggtggatgatccatcctctgatgccatcgtttcctggagttcgagtaataaaagcttcgttgtgtggaatcctccagattttgcaagggatttgttgcctagatacttcaagcacaataacttttccagcttcatcagacagctaaacacttatggattcaggaaagttgaccctgaaaaatgggaattcgctaatgaagataatttttttagaggtcagccacaccttttgaagaatatccatagacgtaaaccggttcatagtcattctgcacagaatcttcatggcctgtcatctccattaactgaatccgaaagacaagggtataaggaagatattcaaaagctgaagcatgagaatgagtcacttcacttggacctacaaagacatcagcaggatcgccaaggacttgaattgcaaatgcaggttttcactgaacgtgttcaacacgtggaacatcgtcaaaagaccatgctctctgctttagctcgaatgttagataaaccagtaacagatttgagtcgcatgccacaacttcaagtgaatgacagaaaaagaaggttgccaggaaacagctgcctttataacgaaactgacctggaagatactcgagcgatttcatcaagggctttgacttgggaaaacatgaatccatcctctcttcttacaatcaacgcagaactgttaaatcagttggactcttctttgaccttttgggagaatgtgctacaagatgttgatcaagcttggatacagcagaattgttcattagagttggatgaatctacaagttgtgcagatagccctgctatatcttacacacaactaaatgttgatgttgggcctaaggcttctgatattgacatgaattctgagcctaatgcaaacactaaccctgaggttgcggcaccagaagaccaagcagcagtggcaggtacaactaccaatgtcccaacaggggtaaatgatatattttgggaacaattcctaactgagaatcctggttcagttgatgcatctgaagtacagtctgaaaggaaagatattggcaacaaaaagaatgaaagcaaaccagtagacagtggaaaattttggtggaacatgaagagtgtaaatagcctggcagaacagttgggacatcttactccagcagagaaaacataa

SEQ ID NO: 24269 - protein, 408 aa, Nicotiana tabacum
MDEATCSTNALPPFLTKTYEMVDDPSSDAIVSWSSSNKSFVVWNPPDFARDLLPRYFKHNNFSSFIRQLNTYGFRKVDPEKWEFANEDNFFRGQPHLLKNIHRRKPVHSHSAQNLHGLSSPLTESERQGYKEDIQKLKHENESLHLDLQRHQQDRQGLELQMQVFTERVQHVEHRQKTMLSALARMLDKPVTDLSRMPQLQVNDRKRRLPGNSCLYNETDLEDTRAISSRALTWENMNPSSLLTINAELLNQLDSSLTFWENVLQDVDQAWIQQNCSLELDESTSCADSPAISYTQLNVDVGPKASDIDMNSEPNANTNPEVAAPEDQAAVAGTTTNVPTGVNDIFWEQFLTENPGSVDASEVQSERKDIGNKKNESKPVDSGKFWWNMKSVNSLAEQLGHLTPAEKT

SEQ ID NO: 24270 - DNA, 1488 bp, Arabidopsis thaliana
  CDS (1)..(1488)
atgtttgtaaatttcaaatacttctctttctttatccgtacgaaaatggacggtgttaccggcggaggaacgaatatcggcgaggctgtgacggcgccaccaccgcggaatccgcatccagcgactttacttaatgcgaactctttaccgccccctttccttagcaagacgtatgacatggtggaagatccggcgacggacgcgattgtctcatggagtccgacgaacaatagcttcattgtttgggatccaccggagttttctcgtgatcttctacctaaatacttcaaacacaacaatttctccagctttgttcgccagttaaacacctatggttttaggaaagtggatccagatcgatgggaatttgctaatgaaggtttcttaagaggtcaaaaacatctattgaagaagataagccggagaaaatctgttcagggacatggtagtagtagtagtaatccacaatctcagcaattatctcagggtcaaggttcaatggctgcattatcttcatgtgttgaggttgggaaatttgggttagaggaagaagttgaacagcttaaaagagacaaaaacgtgttgatgcaggaactcgttaagttacgccagcagcaacaaacaacagataataaacttcaggttttggttaaacatcttcaggttatggagcagaggcaacaacagattatgtctttccttgctaaagctgtacagaatcctactttcctctctcagtttatacagaagcagactgatagtaatatgcatgtaaccgaggccaataagaagcggagactcagagaggatagtactgctgctactgagagtaatagtcatagccatagcttggaagcatcagatggacagatagttaagtatcagccacttagaaacgattcaatgatgtggaacatgatgaaaacagatgataagtatccgtttcttgacgggttctcatctccaaaccaggtatcaggagtcactcttcaagaggtactacccataacttcaggacagtcacaggcatatgcatctgtaccatcaggacagcctttatcatacttaccctctacttcaacttctctcccggataccataatgccagagacttcccagataccacaattgacacgagagagtatcaacgacttccctacagaaaacttcatggatacagagaagaatgttccagaggcattcatctctccaagcccattccttgatggtggttcagtcccgattcagcttgagggaatacccgaagaccccgagattgatgaactaatgagtaactttgaattccttgaagaatatatgccagaaagcccagtttttggagatgcaactacactagagaacaacaacaacaacaacaacaacaacaacaacaacaacaacaacaacaacaacaacaacacaaatggtagacatatggataagcttatagaagaattgggtcttctcacatcagaaacagaacactag

SEQ ID NO: 24271 - protein, 495 aa, Arabidopsis thaliana
MFVNFKYFSFFIRTKMDGVTGGGTNIGEAVTAPPPRNPHPATLLNANSLPPPFLSKTYDMVEDPATDAIVSWSPTNNSFIVWDPPEFSRDLLPKYFKHNNFSSFVRQLNTYGFRKVDPDRWEFANEGFLRGQKHLLKKISRRKSVQGHGSSSSNPQSQQLSQGQGSMAALSSCVEVGKFGLEEEVEQLKRDKNVLMQELVKLRQQQQTTDNKLQVLVKHLQVMEQRQQQIMSFLAKAVQNPTFLSQFIQKQTDSNMHVTEANKKRRLREDSTAATESNSHSHSLEASDGQIVKYQPLRNDSMMWNMMKTDDKYPFLDGFSSPNQVSGVTLQEVLPITSGQSQAYASVPSGQPLSYLPSTSTSLPDTIMPETSQIPQLTRESINDFPTENFMDTEKNVPEAFISPSPFLDGGSVPIQLEGIPEDPEIDELMSNFEFLEEYMPESPVFGDATTLENNNNNNNNNNNNNNNNNNNNTNGRHMDKLIEELGLLTSETEH

SEQ ID NO: 24272 - DNA, 1563 bp, Arabidopsis thaliana
  CDS (118)..(1563)
cgagagagtctctgtctctgtaaaagatatttgagcttgagaagaacagaagaaacttccaggatcaatcaatcgatcaactttagtgaactaactcttgatttttcattcgaagttatggaatcggttcccgaatccgtaccatcgccgaactcgaatacaccgtcaataccaccgccggtgaactccgtaccgcctttcttgagtaaaacctacgacatggttgatgatccgttgaccaatgaggtcgtttcgtggagcagcgggaacaacagcttcgtcgtctggagtgccccggagttctcgaaggtactcttgcccaagtatttcaagcacaacaacttctccagcttcgtcagacagttaaatacttatggtttcagaaaagttgatcctgaccgatgggaatttgcaaatgaaggatttcttagaggccgaaaacaactactgaagagtattgtcaggagaaaaccttcgcatgtgcagcagaatcagcaacaaactcaagttcagagctcatctgttggtgcttgtgtcgaggtggggaagtttggaatagaagaagaagtggaaagacttaagcgggataagaatgttcttatgcaagaactcgtcaggttaaggcagcaacagcaagctactgaaaaccaactgcagaatgtgggacagaaagttcaggtgatggagcaaaggcaacaacaaatgatgtcgtttttagcaaaggctgttcaaagtccaggtttcttaaaccagttagtacaacagaataataatgatggcaacagacaaattccaggaagcaacaaaaagaggagacttcctgtagatgagcaggagaatcgtggtgacaatgtggctaatggtcttaaccgccagattgttagatatcagccgtcgataaacgaagcagcacaaaatatgcttcgacagttcttaaatactagtacctcacctcggtatgaatcagtttcaaacaatcctgacagtttcctattgggtgatgttcccagttctacctctgtagacaatgggaacccttcaagtagagtttctggagtaacattggccgagttttcacccaacacagttcagtcagcaacgaatcaagtacccgaagcaagtttggctcatcatcctcaagctggtctggttcagccaaatataggtcaaagtccggctcaaggagcagcacctgcagactcttggagccctgaatttgatttagttggatgcgagacagatagtggagagtgttttgatccaataatggctgttttagatgagtcagaaggcgatgcaatttctcctgaaggtgagggcaagatgaatgagttactggagggagtccctaagctgcccggaatccaagatccattctgggaacagttcttttctgttgaactcccagcgattgcagatacagacgatattctatcaggatcagtggagaataatgacttggtattggaacaagaaccaaacgagtggacccgtaatgaacaacaaatgaagtatcttactgaacaaatgggactgctttcctcagaagcacagaggaaataa

SEQ ID NO: 24273 - protein, 481 aa, Arabidopsis thaliana
MESVPESVPSPNSNTPSIPPPVNSVPPFLSKTYDMVDDPLTNEVVSWSSGNNSFVVWSAPEFSKVLLPKYFKHNNFSSFVRQLNTYGFRKVDPDRWEFANEGFLRGRKQLLKSIVRRKPSHVQQNQQQTQVQSSSVGACVEVGKFGIEEEVERLKRDKNVLMQELVRLRQQQQATENQLQNVGQKVQVMEQRQQQMMSFLAKAVQSPGFLNQLVQQNNNDGNRQIPGSNKKRRLPVDEQENRGDNVANGLNRQIVRYQPSINEAAQNMLRQFLNTSTSPRYESVSNNPDSFLLGDVPSSTSVDNGNPSSRVSGVTLAEFSPNTVQSATNQVPEASLAHHPQAGLVQPNIGQSPAQGAAPADSWSPEFDLVGCETDSGECFDPIMAVLDESEGDAISPEGEGKMNELLEGVPKLPGIQDPFWEQFFSVELPAIADTDDILSGSVENNDLVLEQEPNEWTRNEQQMKYLTEQMGLLSSEAQRK

SEQ ID NO: 24274 - DNA, 1879 bp, Arabidopsis thaliana
  CDS (143)..(1600)
cgtgaatgttctctgagaattctctagatcttcaatcaaaagttatctctctctctcacctattgtaaaaatcaccagtttcgtatataaaaccctaattttctcaaaattcccaaatattgacttggaatcaaaaatccgaatggatgtgagcaaagtaaccacaagcgacggcggaggagattcaatggagactaagccatctcctcaacctcagcctgcggcgattctaagttcaaacgcgcctcctccgtttctgagcaagacctatgatatggttgatgatcacaatacagattcgattgtctcttggagtgctaataacaacagttttatcgtttggaaaccaccggagttcgctcgcgatcttcttcctaagaactttaagcataataatttctccagcttcgttagacagcttaatacctatggtttcaggaaggttgacccagatagatgggaatttgcgaatgaaggttttttaagaggtcagaagcacttgctacaatcaataactaggcgaaaacctgcccatggacagggacagggacatcagcgatctcagcactcgaatggacagaactcatctgttagcgcatgtgttgaagttggcaaatttggtctcgaagaagaagttgaaaggcttaaaagagataagaacgtccttatgcaagaactcgtcagattaagacagcagcaacagtccactgataaccaacttcaaacgatggttcagcgtctccagggcatggagaatcggcaacaacaattaatgtcattccttgcaaaggcagtacaaagccctcattttctatctcaattcttacagcagcagaatcagcaaaacgagagtaataggcgcatcagtgataccagtaagaagcggagattcaagcgagacggcattgtccgtaataatgattctgctactcctgatggacagatagtgaagtatcaacctccaatgcacgagcaagccaaagcaatgtttaaacagcttatgaagatggaaccttacaaaaccggcgatgatggtttccttctaggtaatggtacgtctactaccgagggaacagagatggagacttcatcaaaccaagtatcgggtataactcttaaggaaatgcctacagcttctgagatacagtcatcatcaccaattgaaacaactcctgaaaatgtttcggcagcatcagaagcaaccgagaactgtattccttcacctgatgatctaactcttcccgacttcactcatatgctaccggaaaataattcagagaagcctccagagagtttcatggaaccaaacctgggaggttctagtccattactagatccagatctgttgatcgatgattctttgtccttcgacattgacgactttccaatggattctgatatagaccctgttgattacggtttactcgaacgcttactcatgtcaagcccggttccagataatatggattcaacaccagtggacaatgaaacagagcaggaacaaaatggatgggacaaaactaagcatatggataatctgactcaacagatgggtctcctctctcctgaaaccttagatctctcaaggcaaaatccttgattttgggagtttttaaagtcttttgaggtaacacagtccctgagagcagcatattcatttttcatacgctgatcttttatttcttctttcttgtatcaaagtggtttaacattactgcttcatacaactctcaattttacacaaattctctatcaatatgagaatctgtgtcatgtttcagtctcttgtttgaacttttcgcttattttgcttgaagaagagcaatgcgaacttattaagtcaacataactattcatctgttctctttttttgacatta

SEQ ID NO: 24275 - protein, 485 aa, Arabidopsis thaliana
MDVSKVTTSDGGGDSMETKPSPQPQPAAILSSNAPPPFLSKTYDMVDDHNTDSIVSWSANNNSFIVWKPPEFARDLLPKNFKHNNFSSFVRQLNTYGFRKVDPDRWEFANEGFLRGQKHLLQSITRRKPAHGQGQGHQRSQHSNGQNSSVSACVEVGKFGLEEEVERLKRDKNVLMQELVRLRQQQQSTDNQLQTMVQRLQGMENRQQQLMSFLAKAVQSPHFLSQFLQQQNQQNESNRRISDTSKKRRFKRDGIVRNNDSATPDGQIVKYQPPMHEQAKAMFKQLMKMEPYKTGDDGFLLGNGTSTTEGTEMETSSNQVSGITLKEMPTASEIQSSSPIETTPENVSAASEATENCIPSPDDLTLPDFTHMLPENNSEKPPESFMEPNLGGSSPLLDPDLLIDDSLSFDIDDFPMDSDIDPVDYGLLERLLMSSPVPDNMDSTPVDNETEQEQNGWDKTKHMDNLTQQMGLLSPETLDLSRQNP

SEQ ID NO: 24276 - DNA, 1407 bp, Arabidopsis thaliana
  CDS (1)..(1407)
atgggaacggtttgcgaatctgtagcgacggcgaaatcttcgacggcggtgatgagctccattccgccttttctgagcaaaacgtacgatatggttgacgatccattgacggacgacgtggtgtcttggagcagcggaaacaacagcttcgtggtttggaacgtgcctgagttcgccaaacagtttctaccaaagtatttcaagcacaacaatttctccagcttcgtcagacagctcaatacttatggttttagaaaagttgatccagaccgctgggagtttgcaaacgagggctttttaagaggccaaaagcaaatactaaagagtattgtccggcgaaaacctgcacaagtgcagcctccacaacaacctcaagttcagcactcatctgtgggtgcgtgcgttgaagtgggcaaatttggactcgaagaggaagtggaaagacttcagcgcgataagaacgtccttatgcaggaacttgtaaggttgaggcagcaacaacaagttaccgaacatcatctgcagaatgtggggcagaaagttcatgtgatggagcagaggcagcaacagatgatgtcctttctagcaaaggctgtccaaagtccaggtttcttaaaccaattttctcagcagagtaatgaagcaaaccaacacatttctgaaagcaacaaaaagaggaggctacctgttgaggaccagatgaattctggcagtcatggggttaatggtcttagccgccagattgtgagatatcagtcatcgatgaacgatgcaacaaacactatgcttcaacagatacagcagatgagtaatgcacctagccatgaatctctctcaagcaataatggtagctttcttttgggcgatgttccaaattctaacatttcagacaatgggagctcctcaaatggatcacctgaagttacattggcagatgtttcatccattcctgcaggcttctatcctgcaatgaagtaccacgagccttgtgaaacaaatcaagtcatggagaccaatttgcctttttctcaaggtgatctcttacctccaacgcaaggagcagcagcttctgggagctcaagttcggatcttgttggatgcgagacagataatggagagtgtttggatccaataatggctgttttggatggcgcactcgaactagaagctgataccttaaatgagttgcttcctgaagtccaagattctttttgggaacagttcattggtgagagcccagtgattggtgagacagatgagttaatctcaggatcagtggaaaatgaactgatattggagcaactagagttacaatcaaccctgagtaatgtgtggagcaagaatcaacaaatgaaccatcttactgaacagatgggacttctcacatcagatgctctcagaaaatga

SEQ ID NO: 24277 - protein, 468 aa, Arabidopsis thaliana
MGTVCESVATAKSSTAVMSSIPPFLSKTYDMVDDPLTDDVVSWSSGNNSFVVWNVPEFAKQFLPKYFKHNNFSSFVRQLNTYGFRKVDPDRWEFANEGFLRGQKQILKSIVRRKPAQVQPPQQPQVQHSSVGACVEVGKFGLEEEVERLQRDKNVLMQELVRLRQQQQVTEHHLQNVGQKVHVMEQRQQQMMSFLAKAVQSPGFLNQFSQQSNEANQHISESNKKRRLPVEDQMNSGSHGVNGLSRQIVRYQSSMNDATNTMLQQIQQMSNAPSHESLSSNNGSFLLGDVPNSNISDNGSSSNGSPEVTLADVSSIPAGFYPAMKYHEPCETNQVMETNLPFSQGDLLPPTQGAAASGSSSSDLVGCETDNGECLDPIMAVLDGALELEADTLNELLPEVQDSFWEQFIGESPVIGETDELISGSVENELILEQLELQSTLSNVWSKNQQMNHLTEQMGLLTSDALRK

SEQ ID NO: 24278 - DNA, 1038 bp, Arabidopsis thaliana
  CDS (1)..(1038)
atggatgaaaataatggaggttcaagctcacttccacctttccttactaaaacatatgaaatggttgatgattcttcttctgactcggtcgttgcttggagcgaaaacaacaaaagcttcatcgtcaagaatccagcagagttttcaagagaccttcttccgagattcttcaagcataagaatttctcaagtttcatccgtcagcttaatacatatggttttcgaaaagtagatcctgagaaatgggaattcttgaatgatgattttgttagaggtcgaccttaccttatgaagaacattcatagacgaaaaccggttcatagccactcgttagtgaatctacaagcgcaaaatcctttgacggaatcagaaagacggagcatggaggatcagatagaaagactgaaaaatgagaaagaaggccttcttgcggagttacagaaccaagagcaagaacggaaagagtttgagctgcaagtaacgacattgaaagatcggttacaacatatggaacaacatcagaaatcaatagtggcatatgtttcacaggttttgggaaaaccaggactttcactaaacctcgaaaaccatgagagaagaaaaagaagatttcaagagaacagtcttcctccaagcagttcacacatagaacaagtcgaaaagttagaatcttcgctaacgttttgggagaatcttgtatcggaatcatgcgagaagagcggtttgcagtcatcaagcatggatcatgatgcagctgagtcaagtctaagtattggcgatacacgacccaaatcatcgaagattgatatgaactcagagccacccgttaccgttactgcacctgctccaaaaacaggcgttaacgatgacttttgggaacaatgtttgacagagaaccctggatcaaccgagcaacaagaagttcagtcagagagaagagatgtcggtaatgataataatggtaataagattggaaatcaaaggacgtattggtggaattcagggaatgtaaataacattacagagaaagcttcttga

SEQ ID NO: 24279 - protein, 345 aa, Arabidopsis thaliana
MDENNGGSSSLPPFLTKTYEMVDDSSSDSVVAWSENNKSFIVKNPAEFSRDLLPRFFKHKNFSSFIRQLNTYGFRKVDPEKWEFLNDDFVRGRPYLMKNIHRRKPVHSHSLVNLQAQNPLTESERRSMEDQIERLKNEKEGLLAELQNQEQERKEFELQVTTLKDRLQHMEQHQKSIVAYVSQVLGKPGLSLNLENHERRKRRFQENSLPPSSSHIEQVEKLESSLTFWENLVSESCEKSGLQSSSMDHDAAESSLSIGDTRPKSSKIDMNSEPPVTVTAPAPKTGVNDDFWEQCLTENPGSTEQQEVQSERRDVGNDNNGNKIGNQRTYWWNSGNVNNITEKAS

SEQ ID NO: 24280 - DNA, 1584 bp, Solanum lycopersicum
  CDS (1)..(1584)
atggagccgaattcttatggcagcgggaaggctgctgtcggtgacggagtaggagcgccaatgttgcagacggcgccggcgccggcgccgatacccagtgcgaatgcgccgccgccgtttctggtgaagacgtatgatatggtggatgatccgagtacggataagatcgtgtcgtggagtcctacgaataatagttttgtggtttgggatcctccggagtttgctaaagacctacttccgaagtactttaagcataataacttctccagctttgttcggcagctgaatacttatggttttagaaaggttgatccagaccgctgggaatttgctaatgagggattcttaagaggtcagaagcacctgcttaaaagtataagtcgacgtaaacctgctcatggacatgctcaacaacagcagcagccacatggaaatgctcaacaacagatgcagccacctggacacagtgcatccgttggggcttgtgtcgaggttgggaaatttgggcttgaagaagaggttgagaggctgaaaagggacaagaacgtgcttatgcaagagctggttaggctcagacaacagcagcaagccactgacaatcagttgcaagggatggtgcagcgccttcaaggtatggagctgcgacaacaacaaatgatgtcgttcctggcaaaagctgtcaacaggcctggattcttggcacagtttgttcagcagcaaaatgagagtaataagcgaatagctgaaggcagcaagaaacgaaggattaagcaggatattgaatcacaggatccatccgttactcctgcggatggacagattgttaagtaccaacctgggataaatgaggcagcaaaggcaatgttgagggagctttcaaaactagattcatctcctagattagataacttcagcaacagtcctgaaagtttcctgattggtgatggttcaccacagtctaatgcatcttcaggtcgtgtttcgggagtcactcttcaggaggtcccaccaacttctgggaagcccttgctgaatacagcttcagcaattgcaggtcaaagtttgttgccagccacttctgagatgcagtcatctcatcttggcacatgttccgaaatcatcaacaatcaattgtcaaacataatcccgttggtaggaggtgaagatttgcatcctggttcactttctgcatccgatatgattatgcctgagttatcacagttgcaaggaattttgcctgaaaacaatacagatgtgattggatgtgattctttcatggatactagtgcagttgagggaaaagtgggactagatattattggtagttgtttgtctcctggtgctgatattgactggcagagtggtttgctggatgaaatagaagagtttcctagtgtgggtgaccctttctgggaaaagtttctccaaagcccttgttcccctgatgctgcaatggatgatgatatttcaaacacaagtgaaaccaaaccacaaataaatggatgggataaaactcagaacatggaacatcttactgaacaaatgggggctactaatatcaaacaacaaaaacatatgatctaa

SEQ ID NO: 24281 - protein, 527 aa, Solanum lycopersicum
MEPNSYGSGKAAVGDGVGAPMLQTAPAPAPIPSANAPPPFLVKTYDMVDDPSTDKIVSWSPTNNSFVVWDPPEFAKDLLPKYFKHNNFSSFVRQLNTYGFRKVDPDRWEFANEGFLRGQKHLLKSISRRKPAHGHAQQQQQPHGNAQQQMQPPGHSASVGACVEVGKFGLEEEVERLKRDKNVLMQELVRLRQQQQATDNQLQGMVQRLQGMELRQQQMMSFLAKAVNRPGFLAQFVQQQNESNKRIAEGSKKRRIKQDIESQDPSVTPADGQIVKYQPGINEAAKAMLRELSKLDSSPRLDNFSNSPESFLIGDGSPQSNASSGRVSGVTLQEVPPTSGKPLLNTASAIAGQSLLPATSEMQSSHLGTCSEIINNQLSNIIPLVGGEDLHPGSLSASDMIMPELSQLQGILPENNTDVIGCDSFMDTSAVEGKVGLDIIGSCLSPGADIDWQSGLLDEIEEFPSVGDPFWEKFLQSPCSPDAAMDDDISNTSETKPQINGWDKTQNMEHLTEQMGATNIKQQKHMI

SEQ ID NO: 24282 - DNA, 1584 bp, Solanum peruvianum
  CDS (1)..(1584)
atggagccaaattcttctggcagcgggaaggctgctgtcggtgacggaggaggaggaggagctccgatgttacagccggcgccggcgccggcgccgatgcccagtgcgaatgcgccgccgccgtttctggtgaagacttatgatatggtggatgatccgagtacggataagatcgtgtcgtggagtcctacgaataatagttttgtggtttgggatcctccggagtttgctaaggacctacttcccaagtactttaagcataataacttttccagctttgttcggcagctgaatacttatggttttagaaaggttgatccagaccgctgggaatttgctaatgagggattcttaagaggtcagaagcacctgcttaaaagtataagtcggcgtaaacctgctcatggacatgctcaacaacagcagcagccacatggacatgctcaacaacagatgcagccacctggacacagtgcatccgttggggcttgtgtcgaggttgggaaatttgggcttgaagaagaggttgagaggctgaaaagggacaagaacgtgcttatgcaagagctggttaggctcagacaacagcagcaatccactgacaatcagttgcaagggatggtgcagcgccttcaaggtatggagctgcgacaacaacaaatgatgtcgttcctggcaaaagctgtcaacagccctggattcttggcacagtttgttcagcagcaaaatgagagtaataagcgaatagctgaaggcagcaagaaacgaaggattaagcaggacattgaatcacaggatccatccgttactcctgcggatggacagattgtaaagtaccaacctgggataaatgaggcagcaaaggcaatgttgagggagctttcaaaactagattcatctcctagattagagaacttcagcaacagtcctgaaagtttcctgattggtgatggttcaccacagtctaatgcatcttcaggtcgtgtttcaggagtcactcttcaggaggtcccaccaacttctgggaagcccttgctgaatacagcttcagcaattgcaggtcaaagtttgttgccagccacttctgagatgcagtcatctcatcttggcacatgttccgaaatcatcaataatcagttgtcaaacataatcccgttggtaggaggtgaagatttgcatcctggttcactttctgcatccgatatgattatgcctgagttatcacagttgcaaggaattttgcctgaaaacaatacagatgtgattggatgtgattctttcatggatactattgcagttgaggggaaaatgggactagatattggtagtttgtctccaggtgctgatattgactggcagagtggtttgctggatgaaatacaagagtttcctagtgtgggtgaccctttttgggagaagtttctccaaagcccttcttcccctgatgctgcaatggatgatgatatttcaaacacaagtgaaaccaaaccacaaataaatggatgggataaaactcagaacatggaacatcttactgaacaaatgggggctactaatatcaaacaacaaaaacatatgatctaa

SEQ ID NO: 24283 - protein, 527 aa, Solanum peruvianum
MEPNSSGSGKAAVGDGGGGGAPMLQPAPAPAPMPSANAPPPFLVKTYDMVDDPSTDKIVSWSPTNNSFVVWDPPEFAKDLLPKYFKHNNFSSFVRQLNTYGFRKVDPDRWEFANEGFLRGQKHLLKSISRRKPAHGHAQQQQQPHGHAQQQMQPPGHSASVGACVEVGKFGLEEEVERLKRDKNVLMQELVRLRQQQQSTDNQLQGMVQRLQGMELRQQQMMSFLAKAVNSPGFLAQFVQQQNESNKRIAEGSKKRRIKQDIESQDPSVTPADGQIVKYQPGINEAAKAMLRELSKLDSSPRLENFSNSPESFLIGDGSPQSNASSGRVSGVTLQEVPPTSGKPLLNTASAIAGQSLLPATSEMQSSHLGTCSEIINNQLSNIIPLVGGEDLHPGSLSASDMIMPELSQLQGILPENNTDVIGCDSFMDTIAVEGKMGLDIGSLSPGADIDWQSGLLDEIQEFPSVGDPFWEKFLQSPSSPDAAMDDDISNTSETKPQINGWDKTQNMEHLTEQMGATNIKQQKHMI

SEQ ID NO: 24284 - DNA, 1401 bp, Arabidopsis thaliana
  CDS (1)..(1401)
atgaacggcgcattaggtaactcctccgcctccgttagcggcggagaaggagccggaggaccagcgcctttcttggtgaaaacctacgagatggtcgacgattcatcaacggaccagatcgtatcgtggagcgctaacaacaacagcttcatcgtttggaatcatgccgaattttcacgcctccttcttccaacctacttcaaacacaataacttctcttccttcattcgtcagctcaatacctatgggtttaggaagattgatccagagaggtgggagtttttgaatgatgattttattaaggatcagaagcatcttctcaagaatatacatagaaggaaacctatacacagccacagtcatccacctgcttcgtcgactgatcaagaaagagcagtgttgcaagagcaaatggacaagctttcacgtgagaaagctgcaattgaagctaagcttttaaagttcaaacaacagaaggttgtagcaaagcatcagtttgaagaaatgactgagcatgttgatgatatggagaataggcagaagaagctgctgaattttttggaaactgcgattcggaatcctacttttgttaagaattttggtaagaaagtcgagcagttggatatttcagcttacaacaaaaagcgaaggctccctgaagttgagcaatcaaagccaccttcagaagattctcatctggataatagtagtggtagctcgagacgcgagtctggaaacatttttcatcaaaatttctctaataaattgcgactagagctttctccagctgattcagatatgaacatggtttcacacagtatacaaagttccaatgaagaaggtgcgagtcccaaagggatactgtcaggaggtgatccaaatactacactaacaaaaagagaaggcctaccatttgcacctgaagctctagagcttgcggataccgggacatgcccgaggagattactgttaaatgataatacaagggtggagaccttgcagcagaggctaacttcttcagaggagactgatggtagcttttcatgtcatttaaatctaaccctggcttctgctccgttaccggacaaaacagcttcacagatagctaagacgactcttaaaagtcaggagttaaactttaactcaatagaaacaagtgcaagtgagaaaaatcggggtagacaagagattgcagttggaggtagccaagcaaatgcagctcctccagcaagagtgaatgatgtattctgggaacagttcctaacagaaaggccagggtcttcagataatgaggaggcaagttcgacttatagaggtaacccatacgaagagcaagaggagaaaagaaacgggagtatgatgttacgtaatacaaagaatatcgagcagctgaccttataa

SEQ ID NO: 24285 - protein, 466 aa, Arabidopsis thaliana
MNGALGNSSASVSGGEGAGGPAPFLVKTYEMVDDSSTDQIVSWSANNNSFIVWNHAEFSRLLLPTYFKHNNFSSFIRQLNTYGFRKIDPERWEFLNDDFIKDQKHLLKNIHRRKPIHSHSHPPASSTDQERAVLQEQMDKLSREKAAIEAKLLKFKQQKVVAKHQFEEMTEHVDDMENRQKKLLNFLETAIRNPTFVKNFGKKVEQLDISAYNKKRRLPEVEQSKPPSEDSHLDNSSGSSRRESGNIFHQNFSNKLRLELSPADSDMNMVSHSIQSSNEEGASPKGILSGGDPNTTLTKREGLPFAPEALELADTGTCPRRLLLNDNTRVETLQQRLTSSEETDGSFSCHLNLTLASAPLPDKTASQIAKTTLKSQELNFNSIETSASEKNRGRQEIAVGGSQANAAPPARVNDVFWEQFLTERPGSSDNEEASSTYRGNPYEEQEEKRNGSMMLRNTKNIEQLTL

SEQ ID NO: 24286 - DNA, 993 bp, Arabidopsis thaliana
  CDS (1)..(993)
atggaggacgacaatagtaacaacaacaacaacaacaacgtgatcgcacctttcatcgtgaaaacatatcagatggtcaatgatccttccaccgattggctcatcacttggggacctgctcacaacagtttcatagtcgttgatccactcgacttctcgcaacgaatcttacctgcttatttcaaacacaacaatttcagcagttttgttcgtcaactcaacacctatgggtttaggaaagtggatccggaccggtgggagtttgcgaacgagcattttctaaggggacagaagcatttgttgaataacatagcgcgtaggaaacacgcgcgggggatgtacggtcaagatttggaggacggtgagattgtgagggagatcgaacggttaaaagaagagcagagggagctagaggcagagattcagaggatgaaccggaggatcgaagcgacggagaagagaccggagcagatgatggcgtttctttacaaagtcgttgaagatcctgatcttcttccaagaatgatgctcgagaaagaacggacaaagcaacaacaacaagtttccgacaagaagaagcgtcgtgtcacgatgtcgacggtgaagtcagaggaagaagaagtggaagaagatgaagggagggtctttagggttatgtcatcatcaacaccgtcgccgtcatcaacggagaatctttaccggaatcattcaccggatgggtggattgttcctatgacgcaaggacagtttggtagttacgagacgggtttggtggcgaagtcgatgctctcgaattcaacgtcgtcgacgtcatcatctttgacgtcgacgttttctttgccggagagtgttaacggaggaggaggaggaggatgtgggagtattcagggagaaagaaggtataaagaaacggcgacgtttggaggagtggtagagtcaaatccaccaacaacaccgccttatccattttctctgtttcgaggtggcttttag

SEQ ID NO: 24287 - protein, 330 aa, Arabidopsis thaliana
MEDDNSNNNNNNNVIAPFIVKTYQMVNDPSTDWLITWGPAHNSFIVVDPLDFSQRILPAYFKHNNFSSFVRQLNTYGFRKVDPDRWEFANEHFLRGQKHLLNNIARRKHARGMYGQDLEDGEIVREIERLKEEQRELEAEIQRMNRRIEATEKRPEQMMAFLYKVVEDPDLLPRMMLEKERTKQQQQVSDKKKRRVTMSTVKSEEEEVEEDEGRVFRVMSSSTPSPSSTENLYRNHSPDGWIVPMTQGQFGSYETGLVAKSMLSNSTSSTSSSLTSTFSLPESVNGGGGGGCGSIQGERRYKETATFGGVVESNPPTTPPYPFSLFRGGF

SEQ ID NO: 24288 - DNA, 1323 bp, Oryza sativa
  CDS (1)..(1323)
atggaggggggcggcgggggcgggtcgctgccgccgttcctgagcaagacgtacgagatggtggacgacccgtcgacggacgcggtggtggggtggacgcccgccggcaccagcttcgtcgtcgccaaccagcccgagttctgccgggatctgctccccaagtacttcaagcacaacaacttctccagcttcgtgcgacagctcaacacctatggctttaggaaagtagatccagaacaatgggaatttgcaaatgaggatttcataaaaggacagcggcaccggttgaaaaatatacatagacgcaaacctatattcagccattcatcacacagtcagggtgctggaccattaacagataatgaaaggaaagactatgaggaagaaatcgagaggctcaaatccgataatgcagcactgtcctcagagcttcaaaataatacgttgaagaaacttaatatggagaaacgaatgcaggctttggaagagaagctatttgttgtggaagatcagcagaggagtctgatatcatacgtcagagagattgtaaaggcaccaggatttctttctagctttgtacagcaacaagatcatcacaggaagaagaggagactgccaataccaatctccttccatgaggatgcaaatactcaggagaaccagatcatgccttgtgacttgaccaactcaccagctcagacattttacagagaatcatttgacaagatggaatcatccttgaactcattagaaaatttccttcgagaagcaagtgaagaatttggtaatgatatttcatatgatgatggtgtcccaggcccttcttcaactgttgttctcacagagctccattcacctggtgaaagtgatccccgtgtttcatcacctccaacaaggatgcgtacttcgtcagctggtgcaggagattcgcactcctctcgtgatgtagcagagtctaccagctgtgcagaaagtcctcctattcctcaaatgcattctcgtgtagatacacgagcgaaggtttctgaaatagatgttaattcagaacctgctgttacagaaactggtccatcaagagatcaacctgctgaagagcctcctgctgtcacacctggtgcaaacgatggcttctggcagcagtttcttaccgagcagcctggatcatcagatgcacatcaggaggctcaatcagaacggcgagatggaggaaacaaggtggatgagatgaaatcaggagatcgacaacatctttggtggggcaaaaggaacgttgagcagataacagaaaaacttggacttctcacctcaacggagaaaacctga

SEQ ID NO: 24289 - protein, 440 aa, Oryza sativa
MEGGGGGGSLPPFLSKTYEMVDDPSTDAVVGWTPAGTSFVVANQPEFCRDLLPKYFKHNNFSSFVRQLNTYGFRKVDPEQWEFANEDFIKGQRHRLKNIHRRKPIFSHSSHSQGAGPLTDNERKDYEEEIERLKSDNAALSSELQNNTLKKLNMEKRMQALEEKLFVVEDQQRSLISYVREIVKAPGFLSSFVQQQDHHRKKRRLPIPISFHEDANTQENQIMPCDLTNSPAQTFYRESFDKMESSLNSLENFLREASEEFGNDISYDDGVPGPSSTVVLTELHSPGESDPRVSSPPTRMRTSSAGAGDSHSSRDVAESTSCAESPPIPQMHSRVDTRAKVSEIDVNSEPAVTETGPSRDQPAEEPPAVTPGANDGFWQQFLTEQPGSSDAHQEAQSERRDGGNKVDEMKSGDRQHLWWGKRNVEQITEKLGLLTSTEKT

SEQ ID NO: 24290 - DNA, 1428 bp, Oryza sativa
  CDS (1)..(1428)
atggaagttgccgccggcgcccgcggcggcggggccggcggaggagggggaggccccgcgccgttcctgctcaagacgtacgagatggtggacgacccgtcgacggacgcggtggtgtcgtggagcgacgcctccgacgcgagcttcgtcgtctggaaccacccggagttcgccgcccgcctgctgcccgcctacttcaagcacagcaacttctccagtttcatccgccagctcaacacctacggattccgtaaaatagatccagagcgatgggaatttgccaatgagtacttcatcaagggacaaaagcacctgctgaagaatatccacaggcgtaagcctatccacagccacagccatccaccaggtgctctgcccgataatgagcgtgcaatatttgaggatgagatcgaacggctttcacgagagaaatccaacctccaggctgacctctggaaatccaagcagcagcagtcgggaacgatgaaccagattgaagatcttgagcgacgagtgcttggcatggagcagcgacagaccaagatgattgccttcttgcagcaagctagtaagaaccctcagtttgtcaacaagcttgttaagatggcagaagcatcttcgattttcacggatgctttcaataagaagagaaggttacctggtttggattacagtatcgagaacacagaaaccacaagcttttatgatgaccatagcagcacttctaagcaagaaacaggcaatcttttaaatcagcacttctctgataagcttaggttgggactttgtcctgccatgacagagagcaatatcatcacgctaagcacgcaaagctcaaacgaagataacagaagccctcatggtaaacatccagagtgtgacatgatggggagggaatgtctcccgttggtgccgcagatgatggaactctccgataccggcacatctatctgcccctccaagagctcttgctttgcaccacctataagtgatgaaggcctcttaacatgccatctgagtctaactcttgcatcatgctcgatggatgttgacaaaagccaaggcctcaatgcaaatgggaccactatagacaacccaactgaggcagcaacagctaccatggaaaaggatgacaccattgacagaagcttcgatgacaaccaaaagaaatcagctgattctcgtacagcagatgccacaacaccacgagcggatgcacgagtagccagtgaggctcctgcagccccggctgcagtggtgaatgacaagttctgggagcagttcctaacagagcgacctggctgctctgaaactgaagaagcaagctctggcctaagaacagatacttccagggagcaaatggagaacaggcaggcatatgatcactcacggaatgacagagaagacgtggaacaactgaaactctga

SEQ ID NO: 24291 - protein, 475 aa, Oryza sativa
MEVAAGARGGGAGGGGGGPAPFLLKTYEMVDDPSTDAVVSWSDASDASFVVWNHPEFAARLLPAYFKHSNFSSFIRQLNTYGFRKIDPERWEFANEYFIKGQKHLLKNIHRRKPIHSHSHPPGALPDNERAIFEDEIERLSREKSNLQADLWKSKQQQSGTMNQIEDLERRVLGMEQRQTKMIAFLQQASKNPQFVNKLVKMAEASSIFTDAFNKKRRLPGLDYSIENTETTSFYDDHSSTSKQETGNLLNQHFSDKLRLGLCPAMTESNIITLSTQSSNEDNRSPHGKHPECDMMGRECLPLVPQMMELSDTGTSICPSKSSCFAPPISDEGLLTCHLSLTLASCSMDVDKSQGLNANGTTIDNPTEAATATMEKDDTIDRSFDDNQKKSADSRTADATTPRADARVASEAPAAPAAVVNDKFWEQFLTERPGCSETEEASSGLRTDTSREQMENRQAYDHSRNDREDVEQLKL

SEQ ID NO: 24292 - DNA, 1380 bp, Oryza sativa
  CDS (1)..(1380)
atggagagttccaacctgggcggcggcggcggcggaggcggcggcggtgggccgccgccgttcttgatcaagacgtacgagatggtggaggacgcggcgaccaaccacgtcgtgtcgtggggccccggcggcgccagcttcgtcgtgtggaacccgctcgacttctcccgtgacctgttgcccaagtacttcaagcacaacaacttctccagcttcatcaggcagctcaacacctacggtttccgaaaaatcgatcctgagagatgggagttcgcaaacgaggatttcataagagggcacacgcaccttctgaagaacatccatcgacgcaagcccgtgcacagccactccctccagaaccagataaacggaccactcgccgaatcggagaggcgcgagctcgaagaagagatcaaccggctcaagtacgagaagagcatcctcgtcgcggacctccagaggcagaaccagcagcagtacgtgatcaactggcagatgcaggcgatggaaggcaggctagtggcgatggagcaacggcagaagaacatcgtggcctccctgtgcgagatgctgcagagacgcggtggcgccgtgtcgagctcgctgctggagtccgaccatttcagcaagaagaggagggtcccgaagatggatctcttcgtcgacgattgcgcggcgggcgaagaacagaaggtgttccagttccagggaattgggacggatgcaccggccatgcctcccgtgcttcctgtgaccaatggtgaggcttttgacagggttgagctgagcctggtctccctggagaaactcttccagagagcaaatgatgcttgcacagctgctgaagaaatgtactcccatggtcatggtggtactgaacccagcactgctatatgtcctgaagagatgaacactgctccaatggagacaggcatcgatcttcagttaccagctagcctccatcccagctcacccaacacagggaatgcccatctccatttatccactgaactcacagagtctccaggttttgtgcagagtccagagctgccaatggcagagattcgtgaagatatccatgtgacaagatacccaacacaagctgatgtaaattctgagattgcctcctccactgatacttcacaagatggcacgtcagaaactgaagcttcgcatggaccgaccaacgatgtgttttgggagcggttcctcacagagactccacggtcatgtttggatgagtcagaaagacaagagtctcccaaggacgatgtaaaagcagaattaggctgcaatggcttccatcaccgggagaaggttgatcagatcaccgagcaaatggggcaccttgcttcagccgagcagactctgcatacctga

SEQ ID NO: 24293 - protein, 459 aa, Oryza sativa
MESSNLGGGGGGGGGGGPPPFLIKTYEMVEDAATNHVVSWGPGGASFVVWNPLDFSRDLLPKYFKHNNFSSFIRQLNTYGFRKIDPERWEFANEDFIRGHTHLLKNIHRRKPVHSHSLQNQINGPLAESERRELEEEINRLKYEKSILVADLQRQNQQQYVINWQMQAMEGRLVAMEQRQKNIVASLCEMLQRRGGAVSSSLLESDHFSKKRRVPKMDLFVDDCAAGEEQKVFQFQGIGTDAPAMPPVLPVTNGEAFDRVELSLVSLEKLFQRANDACTAAEEMYSHGHGGTEPSTAICPEEMNTAPMETGIDLQLPASLHPSSPNTGNAHLHLSTELTESPGFVQSPELPMAEIREDIHVTRYPTQADVNSEIASSTDTSQDGTSETEASHGPTNDVFWERFLTETPRSCLDESERQESPKDDVKAELGCNGFHHREKVDQITEQMGHLASAEQTLHT

SEQ ID NO: 24294 - DNA, 1302 bp, Zea mays
  CDS (1)..(1302)
atggagggcgcgtcctcgctgccgcccttcctgagcaagacgtacgagatggtggacgacccggccacggacgccgtggtggcgtggacgccgctggggaccagcttcgtcgtcgccaaccaggccgagttctgcagggatctgctccccaagtacttcaagcacaacaacttctccagcttcgtgcggcaactgaacacctacggctttaagaaaattgatcctgaacaatgggagtttgcaaatgatgatttcattaggggacaacagcaccgactgaaaaatatacacaggcgtaagcctatattcagccattcatcgcatactcagggttctggaccattaccagataccgaaaggagggattatgaggaagaaatcgaaaggcttaagtgtgacaatgcagctctgacctcagagcttgaaaagaatgcacagaagaaacttgttacagagaaacgaatgcaggagctagaagataagttgatctttttggaggatcggcagaaaaatctgatggcgtatgtcagggatattgtacaggcaccaggatctttctctagctttgtgcagcaacctgatcatcacggaaagaaaaggagactaccagtacctatctctctctaccaagattctaatgctgaggggaaccaggttgtgcatgggggcttcatcaccaacccaccagcttgcagggaatcattcgacaagacggaatcttcgttgaactcattggagaatttccttcgggaagcgagtgaagcgttcaatatttcatatggtgatggcccccctggcccttcatctgctgtcgttatcacagagctccattcatccggagaaagtgatccccatgtgccatcacctgtctcaagaatgcatacatcttcggctggtgcgggagattcgctctcttcccgcgatttaacagagtcaactagctgcgctgagagccctcgcctcgctcagatccaaccctgtacagattcacggactaaggtgtctgagatcgatgtcaatcgggagcctgctgtcacagaaactggtccgacaagggaccaacctgccgaggagcctccccacgtagcagctggggtgaacgatggcttttggcagcagttcctcacagagcagcccggtcctgatgtacaccaggaggcccaatcagaaaggagagatggcgatgatgataagggcgatcagacgaggataggggaccgagaaaatttttggtgggggaagaagaatgttgagcagatgagagagaagctggggcgtctcacctcggtggagaaaacctga

SEQ ID NO: 24295 - protein, 433 aa, Zea mays
MEGASSLPPFLSKTYEMVDDPATDAVVAWTPLGTSFVVANQAEFCRDLLPKYFKHNNFSSFVRQLNTYGFKKIDPEQWEFANDDFIRGQQHRLKNIHRRKPIFSHSSHTQGSGPLPDTERRDYEEEIERLKCDNAALTSELEKNAQKKLVTEKRMQELEDKLIFLEDRQKNLMAYVRDIVQAPGSFSSFVQQPDHHGKKRRLPVPISLYQDSNAEGNQVVHGGFITNPPACRESFDKTESSLNSLENFLREASEAFNISYGDGPPGPSSAVVITELHSSGESDPHVPSPVSRMHTSSAGAGDSLSSRDLTESTSCAESPRLAQIQPCTDSRTKVSEIDVNREPAVTETGPTRDQPAEEPPHVAAGVNDGFWQQFLTEQPGPDVHQEAQSERRDGDDDKGDQTRIGDRENFWWGKKNVEQMREKLGRLTSVEKT

SEQ ID NO: 24296 - DNA, 960 bp, Glycine max
  CDS (1)..(960)
atgatggaacacaacatcatcgtcaacaacaacgtgatcgcaccgtttgtcataaaaacctacaatatggtgaacgatcccaccaccgataaactcatcacgtggggcccagccaacaacagcttcatcgtcctcgatcccctcgacttctcccactccctcctccctactttcttcaagcacaacaacttctccagcttcgttcgccaactcaacacctatggtttcagaaaggtggatccggatcggtgggagttcgcgaacgagtggttcctgcgaggacaaaagcacttattgaggaacatcgtgcggaagaagcacggtggagctgggaggaccaattccaattcgcattattcgcatcccttgaagctggaggagttggacgacgaggctatggtgatggagatagcgaggttgaaggaggagcaaaaagcgttggaggaagagcttcatgaaatgaacaagaggttagagacaacagaaaaacgaccacaacaaatgatggcttttctgtgtaaggttgtcgaggacccgcagattctttctcggattctccgagaaagagaaaagaaacacctgggagagaaaaagcgacgcctcattccgcctccgccgccgacggcagcgacgtcgtcgtcgtcgtcctccggcatcaagacagagttcgaagaagacgaaggtaattataatatcaagtcttcgtcgccggagacagggttggaaatcgacaacaatagtaacaatatttgttcgccgccgccgctggggtgttggggtgaacagggttgttatgggtacaattgcgcctccgtgccggcacctttgacggtggtagcgccggcgtttccgacgatgggaggagggtatttgaggcgtggggggttttggggggaaatgacggcggaggggaatgcggtgccgccttatccgttttcgttgttggaagggggcttttag

SEQ ID NO: 24297 - protein, 319 aa, Glycine max
MMEHNIIVNNNVIAPFVIKTYNMVNDPTTDKLITWGPANNSFIVLDPLDFSHSLLPTFFKHNNFSSFVRQLNTYGFRKVDPDRWEFANEWFLRGQKHLLRNIVRKKHGGAGRTNSNSHYSHPLKLEELDDEAMVMEIARLKEEQKALEEELHEMNKRLETTEKRPQQMMAFLCKVVEDPQILSRILREREKKHLGEKKRRLIPPPPPTAATSSSSSSGIKTEFEEDEGNYNIKSSSPETGLEIDNNSNNICSPPPLGCWGEQGCYGYNCASVPAPLTVVAPAFPTMGGGYLRRGGFWGEMTAEGNAVPPYPFSLLEGGF

SEQ ID NO: 24298 - DNA, 1179 bp, Glycine max
  CDS (1)..(1179)
atgatggaggaagctcagggcagttctagttccctgccacctttcctcaccaagatttatgagatggtggatgatccttcaactaattccattgtttcatggagtgccaccaataggagtttcattgtttggaacccaccagagttttcaagggatttgttacccaaatactttaagcacaacaacttttccagtttcatcaggcagctcaacacttatggctttagaaagattgatcctgaacaatgggaatttgcaaatgatgattttgtaagaggccagccacatcttttgaagaatatccataggcgcaaacctgttcatagccattctttgcagaatatccagggtcaagggtcttctttgctgactgaatccgaaaggcggagttttaaagatgagatagagaagcttaaacatgaaaaagaaagacttcttcgggagttagagaggcatgaacaggagtggaaaatgtacgaggtacaattacaacactccaatgattgtttggaaaagttggaaaagaagcaagaaagtttggtttcttctgtctctcaagtgttgcagaaacctgggattgccttaaatctcttgctgttgacagaaaacatggatagaaaacggaggttgccaagaagtggtctctttagtgatgacgctagcattgaagatcatatggaaacttcccaagtattaccaagggaaaatgcagatggtgcttctattttctcatcgagcacagaacggttggatctccttgagtcatccatgacgttttgggagaatattacacatgatgttggtgacgtctttgttcaaagtcatttaaacttggattttgatgaatctacaagttgtgcagatagtccagctatatcttgtgtgcaactagaagttgaagatcagcctaagtcacatggaatcaacgtgagttctgagccagctgtagttgcggctcctgatcttgatgcatcaaaagaacaacctgtcgaaacagctcctctgactactggtgttaatgacatattctgggaacgattcttgacagagaatcctggttcgtcagaaatgcaggaagctcagtctgaaagagaggattctgatggcagaagtaatgccaaattttggtggaacattaggaatgtaaataaccctccagaacagatggggcattcttag

SEQ ID NO: 24299 - protein, 392 aa, Glycine max
MMEEAQGSSSSLPPFLTKIYEMVDDPSTNSIVSWSATNRSFIVWNPPEFSRDLLPKYFKHNNFSSFIRQLNTYGFRKIDPEQWEFANDDFVRGQPHLLKNIHRRKPVHSHSLQNIQGQGSSLLTESERRSFKDEIEKLKHEKERLLRELERHEQEWKMYEVQLQHSNDCLEKLEKKQESLVSSVSQVLQKPGIALNLLLLTENMDRKRRLPRSGLFSDDASIEDHMETSQVLPRENADGASIFSSSTERLDLLESSMTFWENITHDVGDVFVQSHLNLDFDESTSCADSPAISCVQLEVEDQPKSHGINVSSEPAVVAAPDLDASKEQPVETAPLTTGVNDIFWERFLTENPGSSEMQEAQSEREDSDGRSNAKFWWNIRNVNNPPEQMGHS

SEQ ID NO: 24300 - DNA, 960 bp, Glycine max
  CDS (1)..(960)
atgatggaacacaacatcatcgtcaacaacaacgtgatcgcaccgtttgtcataaaaacctacaatatggtgaacgatcccaccaccgataaactcatcacgtggggcccagccaacaacagcttcatcgtcctcgatcccctcgacttctcccactccctcctccctactttcttcaagcacaacaacttctccagcttcgttcgccaactcaacacctatggtttcagaaaggtggatccggatcggtgggagttcgcgaacgagtggttcctgcgaggacaaaagcacttattgaggaacatcgtgcggaagaagcacggtggagctgggaggaccaattccaattcgcattattcgcatcccttgaagctggaggagttggacgacgaggctatggtgatggagatagcgaggttgaaggaggagcaaaaagcgttggaggaagagcttcatgaaatgaacaagaggttagagacaacagaaaaacgaccacaacaaatgatggcttttctgtgtaaggttgtcgaggacccgcagattctttctcggattctccgagaaagagaaaagaaacacctgggagagaaaaagcgacgcctcattccgcctccgccgccgacggcagcgacgtcgtcgtcgtcgtcctccggcatcaagacagagttcgaagaagacgaaggtaattataatatcaagtcttcgtcgccggagacagggttggaaatcgacaacaatagtaacaatatttgttcgccgccgccgctggggtgttggggtgaacagggttgttatgggtacaattgcgcctccgtgccggcacctttgacggtggtagcgccggcgtttccgacgatgggaggagggtatttgaggcgtggggggttttggggggaaatggcggcggaggggaatgcggtgccgccttatccgttttcgttgttggaagggggcttttag

SEQ ID NO: 24301 - protein, 319 aa, Glycine max
MMEHNIIVNNNVIAPFVIKTYNMVNDPTTDKLITWGPANNSFIVLDPLDFSHSLLPTFFKHNNFSSFVRQLNTYGFRKVDPDRWEFANEWFLRGQKHLLRNIVRKKHGGAGRTNSNSHYSHPLKLEELDDEAMVMEIARLKEEQKALEEELHEMNKRLETTEKRPQQMMAFLCKVVEDPQILSRILREREKKHLGEKKRRLIPPPPPTAATSSSSSSGIKTEFEEDEGNYNIKSSSPETGLEIDNNSNNICSPPPLGCWGEQGCYGYNCASVPAPLTVVAPAFPTMGGGYLRRGGFWGEMAAEGNAVPPYPFSLLEGGF

SEQ ID NO: 24302 - DNA, 1302 bp, Zea mays
  CDS (1)..(1302)
atggagggcgcgtcctcgctgccgcccttcctgagcaagacgtacgagatggtggacgacccggccacggacgccgtggtggcgtggacgccgctggggaccagcttcgtcgtcgccaaccaggccgagttctgcagggatctgctccccaagtacttcaagcacaacaacttctccagcttcgtgcggcaactgaacacctacggctttaagaaaattgatcctgaacaatgggagtttgcaaatgatgatttcattaggggacaacagcaccgactgaaaaatatacacaggcgtaagcctatattcagccattcatcgcatactcagggttctggaccattaccagataccgaaaggagggattatgaggaggaaatcgaaaggcttaagtgtgacaatgcagctctgacctcagagcttgaaaagaatgcacagaagaaacttgttacagagaaacgaatgcaggagctagaagataagttgatctttttggaggatcggcagaaaaatctgatggcgtatgtcagggatattgtacaggcaccaggatctttctctagctttgtgcagcaacctgatcatcacggaaagaaaaggagactaccagtacctatctctctctaccaagattctaatgctgaggggaaccaggttgtgcatgggggcttcatcaccaacccaccagcttgcagggaatcattcgacaagacggaatcttcgttgaactcattggagaatttccttcgggaagcgagtgaagcgttcaatatttcatatggtgatggcctccctggcccttcatctgctgtcgttatcacagagctccattcatccggagaaagtgatccccatgtgccatcacctgtctcaagaatgcatacatcttcggctggtgcgggagattcgctctcttcccgcgatttaacagagtcaactagctgcgctgagagccctcgcctcgctcagatccaaccctgtacagattcacggactaaggtgtctgagatcgatgtcaatcgggagcctgctgtcacagaaactggtccgacaagggaccaacctgccgaggagcctccccacgtagcagctggggtgaacgatggcttttggcagcagttcctcacagagcagcccggtcctgatgtacaccaggaggcccaatcagaaaggagagatggcgatgatgataagggcgatcagacgaggataggggaccgagaaaatttttggtgggggaagaagaatgttgagcagatgagagagaagctggggcgtctcacctcggtggagaaaacctga

SEQ ID NO: 24303 - protein, 433 aa, Zea mays
MEGASSLPPFLSKTYEMVDDPATDAVVAWTPLGTSFVVANQAEFCRDLLPKYFKHNNFSSFVRQLNTYGFKKIDPEQWEFANDDFIRGQQHRLKNIHRRKPIFSHSSHTQGSGPLPDTERRDYEEEIERLKCDNAALTSELEKNAQKKLVTEKRMQELEDKLIFLEDRQKNLMAYVRDIVQAPGSFSSFVQQPDHHGKKRRLPVPISLYQDSNAEGNQVVHGGFITNPPACRESFDKTESSLNSLENFLREASEAFNISYGDGLPGPSSAVVITELHSSGESDPHVPSPVSRMHTSSAGAGDSLSSRDLTESTSCAESPRLAQIQPCTDSRTKVSEIDVNREPAVTETGPTRDQPAEEPPHVAAGVNDGFWQQFLTEQPGPDVHQEAQSERRDGDDDKGDQTRIGDRENFWWGKKNVEQMREKLGRLTSVEKT

SEQ ID NO: 24304 - DNA, 1128 bp, Zea mays
  CDS (1)..(1128)
atggactcaacgctgaaccaggtgaaggaggagagccatggggagggaggagatttgatggcaggcacggtggaggccgcggatgggccgtccgcggccgtcgccgcggcaccaaagccgatggagggtctgcatgaccctgggccgccgccgttcctcaccaagacatatgacatggtcgacgactcggacaccgacctgattgtgtcttggagcgccaccaacaacagcttcgtggtgtgggatccgcacgccttcgccacggtgctgctgcccaggcacttcaagcacaacaacttctccagcttcgtccggcagctcaacacctatggtttcaggaaggtggatcctgatcggtgggaattcgcgaatgagggctttttacggggacagagacacctcctgaagaacatcaggcgtcgaaaacctcctgctcagaatgccacaaaccagcagtccattgggccttaccttgaggtgggacattttggatatgatgcagagattgacatgttgaagagagacaagcagttactgatggcagaagtggtgaagctaaggcaggagcagcagaacacaaaggcaaatctcaaagcgatggaggataggctacaagggactgaacagaagcagcagcagatgatggcgttcttggcacgtgtcatgcggaatcctgaattcttgaagcacctggtttcccagaatgagatgaggaaggagcttcaagatgctatttcaaaaaaaagaagacggcgcatcgaccaagggcctgaagctgatgacttgggggctagtagcagcttggagcaaggttcaccggtcctgtttaatgcccaggacccagttgaattccttgtcgacggaatcccagctgacctcgagagcccagctttcgatggccacggcctgattgggccacatgatattgatattgatattgatattggcagtacctctgagcagcagcaagacatgccccagggggatctgaatgacaacttctgggagcagttgctgaacgaaggacttggcgaggagaacgatagccctgtaatcgaggatgatatgaatgtgctgtctgagaagatgggttatctcaactcagatggcccaacatctagcaattag

SEQ ID NO: 24305 - protein, 375 aa, Zea mays
MDSTLNQVKEESHGEGGDLMAGTVEAADGPSAAVAAAPKPMEGLHDPGPPPFLTKTYDMVDDSDTDLIVSWSATNNSFVVWDPHAFATVLLPRHFKHNNFSSFVRQLNTYGFRKVDPDRWEFANEGFLRGQRHLLKNIRRRKPPAQNATNQQSIGPYLEVGHFGYDAEIDMLKRDKQLLMAEVVKLRQEQQNTKANLKAMEDRLQGTEQKQQQMMAFLARVMRNPEFLKHLVSQNEMRKELQDAISKKRRRRIDQGPEADDLGASSSLEQGSPVLFNAQDPVEFLVDGIPADLESPAFDGHGLIGPHDIDIDIDIGSTSEQQQDMPQGDLNDNFWEQLLNEGLGEENDSPVIEDDMNVLSEKMGYLNSDGPTSSN

SEQ ID NO: 24306 - DNA, 20 bp, Artificial sequence
  primer
atggatgagaataatcatgg

SEQ ID NO: 24307 - DNA, 24 bp, Artificial sequence
  primer
tcaacttctctctgaagaagtcag

SEQ ID NO: 24308 - protein, 581 aa, Artificial sequence
  consensus sequence
  Variant (2)..(7): Xaa in position 2 to 7 is any amino acid
  Variant (8)..(41): Xaa in position 8 to 41 is any or no amino acid
  Variant (46)..(46): Xaa in position 46 is any amino acid
  Variant (50)..(50): Xaa in position 50 is any amino acid
  Variant (53)..(53): Xaa in position 53 is any amino acid
  Variant (55)..(56): Xaa in position 55 to 56 is any amino acid
  Variant (58)..(60): Xaa in position 58 to 60 is any amino acid
  Variant (62)..(62): Xaa in position 62 is any amino acid
  Variant (64)..(68): Xaa in position 64 to 68 is any amino acid
  Variant (69)..(69): Xaa in position 69 is any or no amino acid
  Variant (72)..(72): Xaa in position 72 is any amino acid
  Variant (74)..(78): Xaa in position 74 to 78 is any amino acid
  Variant (80)..(82): Xaa in position 80 to 82 is any amino acid
  Variant (86)..(87): Xaa in position 86 to 87 is any amino acid
  Variant (97)..(97): Xaa in position 97 is any amino acid
  Variant (108)..(108): Xaa in position 108 is any amino acid
  Variant (111)..(112): Xaa in position 111 to 112 is any amino acid
  Variant (118)..(119): Xaa in position 118 to 119 is any amino acid
  Variant (120)..(120): Xaa in position 120 is any or no amino acid
  Variant (122)..(122): Xaa in position 122 is any amino acid
  Variant (126)..(127): Xaa in position 126 to 127 is any amino acid
  Variant (131)..(131): Xaa in position 131 is any amino acid
  Variant (133)..(133): Xaa in position 133 is any amino acid
  Variant (138)..(143): Xaa in position 138 to 143 is any amino acid
  Variant (144)..(182): Xaa in position 144 to 182 is any or no amino acid
  Variant (184)..(189): Xaa in position 184 to 189 is any amino acid
  Variant (191)..(192): Xaa in position 191 to 192 is any amino acid
  Variant (195)..(198): Xaa in position 195 to 198 is any amino acid
  Variant (200)..(218): Xaa in position 200 to 218 is any amino acid
  Variant (220)..(220): Xaa in position 220 is any amino acid
  Variant (223)..(235): Xaa in position 223 to 235 is any amino acid
  Variant (237)..(248): Xaa in position 237 to 248 is any amino acid
  Variant (249)..(261): Xaa in position 249 to 261 is any or no amino acid
  Variant (265)..(348): Xaa in position 265 to 348 is any amino acid
  Variant (349)..(529): Xaa in position 349 to 529 is any or no amino acid
  Variant (531)..(550): Xaa in position 531 to 550 is any amino acid
  Variant (551)..(580): Xaa in position 551 to 580 is any or no amino acid
MXXXXXXXXXXXXXXXXXXXXXXXXXXXXXXXXXXXXXXXXPPFLXKTYXMVXDXXTXXXVXWXXXXXXSFXVXXXXXFXXXLLPXXFKHNNFSSFXRQLNTYGFRKXDPXXWEFANXXXFXRGQXXLLKXIXRRKPXXXXXXXXXXXXXXXXXXXXXXXXXXXXXXXXXXXXXXXXXXXXXLXXXXXXLXXELXXXXQXXXXXXXXXXXXXXXXXXXEXRQXXXXXXXXXXXXXPXXXXXXXXXXXXXXXXXXXXXXXXXKRRXXXXXXXXXXXXXXXXXXXXXXXXXXXXXXXXXXXXXXXXXXXXXXXXXXXXXXXXXXXXXXXXXXXXXXXXXXXXXXXXXXXXXXXXXXXXXXXXXXXXXXXXXXXXXXXXXXXXXXXXXXXXXXXXXXXXXXXXXXXXXXXXXXXXXXXXXXXXXXXXXXXXXXXXXXXXXXXXXXXXXXXXXXXXXXXXXXXXXXXXXXXXXXXXXXXXXXXXXXXXXXXXXXXXXXXXXXXXXXXXXXXXXXXXXXXXXXXXXXXXXXXXXWXXXXXXXXXXXXXXXXXXXXXXXXXXXXXXXXXXXXXXXXXXXXXXXXXXE

SEQ ID NO: 24309 - protein, 49 aa, Artificial sequence
  protein pattern
  Variant (2)..(2): Xaa in position 2 is any or no amino acid
  Variant (4)..(5): Xaa in position 4 to 5 is any amino acid
  Variant (6)..(6): Xaa in position 6 is any or no amino acid
  Variant (8)..(8): Xaa in position 8 is any amino acid
  Variant (9)..(9): Xaa in position 9 is any or no amino acid
  Variant (11)..(11): Xaa in position 11 is Ala, Cys or Ser
  Variant (12)..(13): Xaa in position 12 to 13 is any amino acid
  Variant (17)..(18): Xaa in position 17 to 18 is any amino acid
  Variant (22)..(22): Xaa in position 22 is any amino acid
  Variant (28)..(28): Xaa in position 28 is Ile or Val
  Variant (37)..(37): Xaa in position 37 is Lys or Arg
  Variant (39)..(39): Xaa in position 39 is Ala, Ile or Val
  Variant (42)..(42): Xaa in position 42 is Asp or Glu
  Variant (43)..(43): Xaa in position 43 is any amino acid
  Variant (47)..(47): Xaa in position 47 is Ala or Leu
  Variant (49)..(49): Xaa in position 49 is Asp or Glu
FXVXXXPXXFXXXLLPXXFKHXNFSSFXRQLNTYGFXKXDPXXWEFXNX

SEQ ID NO: 24310 - protein, 17 aa, Artificial sequence
  protein pattern
  Variant (2)..(2): Xaa in position 2 is Ile, Leu or Val
  Variant (3)..(3): Xaa in position 3 is Lys or Arg
  Variant (4)..(4): Xaa in position 4 is Asp or Gly
  Variant (5)..(8): Xaa in position 5 to 8 is any amino acid
  Variant (9)..(9): Xaa in position 9 is Leu or Met
  Variant (11)..(11): Xaa in position 11 is Asn, Ser or Thr
  Variant (13)..(13): Xaa in position 13 is any amino acid
FXXXXXXXXKXIXRRKP

SEQ ID NO: 24311 - DNA, 1131 bp, Arabidopsis thaliana
  CDS (1)..(1131)
atggcgattcggaaggaggaagaaagtagagaagaacagagcaattcgtttcttcttgatgctctctactgcgaagaagagaaatgggacgatgaaggagaagaagttgaagaaaactcttccttgtcttcttcttcttctccattcgttgttttgcaacaagatttgttctgggaagatgaagatctggttacactcttctccaaagaagaagaacaaggactcagctgtctcgatgatgtttatctttccacggatcgaaaagaagctgttggttggattctgagagtcaacgctcattatggcttctctactttagcagctgttttagccataacttatctcgataagttcatctgtagctacagcttacagagagacaaaccatggatgcttcagctcgtttctgtcgcgtgtctctcattagctgctaaagtcgaagaaacccaagtccctcttcttctagactttcaagtggaggagacaaagtatgtgtttgaagcaaaaaccatacagagaatggagctactgattctgtctactctcgagtggaagatgcatctcattactccaatttcgttcgtagaccacattatcaggagattgggacttaagaacaatgctcactgggatttcctcaacaaatgccaccgtctcctcctctctgtaatctccgattcaagatttgtcgggtacctcccatcagtagttgccgcagctaccatgatgcgaattatagagcaagttgatccctttgaccctctttcataccaaactaatctcctcggtgtccttaacttaaccaaggaaaaggtgaaaacttgctacgatctaatcctccaactaccagtggaccgcatcggtttacagatccaaatccaatcttccaagaaacgcaagagtcacgattcatcatcatcgttgaacagtccaagctgcgtgattgatgcaaaccctttcaatagcgacgaaagctcaaacgattcgtggtcagcgagttcgtgcaacccaccaacgtcgtcgtcgtccccgcagcaacaacctccattgaagaagatgagaggagctgaagagaatgagaagaagaagccgattttgcatctgccatgggcaatcgtagccactccataa

SEQ ID NO: 24312 - protein, 376 aa, Arabidopsis thaliana
MAIRKEEESREEQSNSFLLDALYCEEEKWDDEGEEVEENSSLSSSSSPFVVLQQDLFWEDEDLVTLFSKEEEQGLSCLDDVYLSTDRKEAVGWILRVNAHYGFSTLAAVLAITYLDKFICSYSLQRDKPWMLQLVSVACLSLAAKVEETQVPLLLDFQVEETKYVFEAKTIQRMELLILSTLEWKMHLITPISFVDHIIRRLGLKNNAHWDFLNKCHRLLLSVISDSRFVGYLPSVVAAATMMRIIEQVDPFDPLSYQTNLLGVLNLTKEKVKTCYDLILQLPVDRIGLQIQIQSSKKRKSHDSSSSLNSPSCVIDANPFNSDESSNDSWSASSCNPPTSSSSPQQQPPLKKMRGAEENEKKKPILHLPWAIVATP

SEQ ID NO: 24313 - DNA, 1128 bp, Citrus sinensis
  CDS (1)..(1128)
atggcatttggagatgaacaatacccttcttcattcttgcttgatgcactctattgtgaagaagaagagttagaagatgaggttattgaccaagaagatgatgaatgtagccaaaacaaaaacccagcttgtttgttttcacttcttttgttagaacaagacttgttctgggaagatgaagagctcttgtctctcttctccaaagaagagcaacagcttttaaagcaagaaacacaaacccattataaagattccgatgttcttgttgttgctaggagtgaggctgttgagtgggtgctcaaagttaatgctcattatgggttctctactctcactgcaatactggctattaactatctggataggttcctccgtagcttccattttcaaatagataagccttggatgattcagcttttggctgtcacttgtctctccctggctgctaaagttgaagaaacccaagtgccccttctcttagaccttcaagttgagggggcaaaatatgtttttgagaccaaagccatacaaagaatggagcttttggtgctctcaacacttgaatggaagatgcatccagtgactccaatttcatttcttgaccacatcataagaaggcttggattgaagacatctcttcactgggagtttctcaagagatgtgagcgtctgcttctcactttggtctctgattcaagatctgtaagttaccttccttcagtgttggccactgccacaatgatgcacataatagaccaagttgagcctgtgaatcccgttgattatcaaaaccagcttctaggtgtgcttaaaataagcaaggaaaaagtaagtgactgttacaagttgattcttgagctggctaatgcaaaaaccaatgctaatagtaatcctcacaagcgcaagtttgaagcaatccctggaagccctggtggcgtgattgatgctactgtgtttagctgtgatgaaagctcaaacgattcatggtcagtggcatcatcatcagtcctatcatcaccatcgtcaccagagcctctcttcaaaaagagcagagtccaagacccacaaatgactttgccaatgccatctctcaatctcaatagggtcattgtgggcagtccaagttga

SEQ ID NO: 24314 - protein, 375 aa, Citrus sinensis
MAFGDEQYPSSFLLDALYCEEEELEDEVIDQEDDECSQNKNPACLFSLLLLEQDLFWEDEELLSLFSKEEQQLLKQETQTHYKDSDVLVVARSEAVEWVLKVNAHYGFSTLTAILAINYLDRFLRSFHFQIDKPWMIQLLAVTCLSLAAKVEETQVPLLLDLQVEGAKYVFETKAIQRMELLVLSTLEWKMHPVTPISFLDHIIRRLGLKTSLHWEFLKRCERLLLTLVSDSRSVSYLPSVLATATMMHIIDQVEPVNPVDYQNQLLGVLKISKEKVSDCYKLILELANAKTNANSNPHKRKFEAIPGSPGGVIDATVFSCDESSNDSWSVASSSVLSSPSSPEPLFKKSRVQDPQMTLPMPSLNLNRVIVGSPS

SEQ ID NO: 24315 - DNA, 1125 bp, Gossypium hirsutum
  CDS (1)..(1125)
atggcaatacagcaatatgaacagcagcaacaacaaccagagaatcacccttccttcttgctagatgctctctactgtgaggaagaagcggatgcaggggaagttttagaggaagagagttcttgtgtgggctgtaacaatggcggaaacccttcatttttcccactgttgttgttagagcaggatttgttttgggaagacggggagcttctttcactttttgctaaagaaacagagcagcagccgtcttgtttcaatgtgggaaccgatgagtccctagcaatggctcgccgagaggctgccgagtggatgcttaaagtcaatgctcgatttggattctccactctcacggctgtactttccattaactatttggacaggttcttaagtacctttcagtttcaaagagataatccttggatgatccaacttctgggtgtcacttgtctctctttggctgcaaaagttgaagagacacaagtgcctctgctcctagacctacaagtggaggagacaaagtatgttttcgaggccaaaactatccaaagaatggagcttttggtgctctccacactgaaatggaagatgcatccaattacacccctttcatttctagatcacatcataagaagactggggttgaaaacccacctccattgggagtttcttaagcgatgtgagcgtctcctcctctgtgtaatctctgatgcaagatccatccattatcttccctctgtattggctactgcaaccatgatgcacgtcatagaccaagttgagcttttcaatcccattgactaccaaaatcagctgctgagtgttcttaaaattagcaaggaaaaagtaaacgattgttacaagctcatccttgatgtatcaacaagaccccaggcccaaggcaatggtggtgcatgtaagaggaaggtggaggagagggttcctagcagccctagtggagtgattgatgctgcatttggcagtgatagctcgagcgattcttggggcacggtgtccttatcgcctgagcagcagccaccttttaagaagagcagagcccaagagcaagtaatgcgtttgccatcactcaaccgagtctttgtagacattgttggcagcccttcttaa

SEQ ID NO: 24316 - protein, 374 aa, Gossypium hirsutum
MAIQQYEQQQQQPENHPSFLLDALYCEEEADAGEVLEEESSCVGCNNGGNPSFFPLLLLEQDLFWEDGELLSLFAKETEQQPSCFNVGTDESLAMARREAAEWMLKVNARFGFSTLTAVLSINYLDRFLSTFQFQRDNPWMIQLLGVTCLSLAAKVEETQVPLLLDLQVEETKYVFEAKTIQRMELLVLSTLKWKMHPITPLSFLDHIIRRLGLKTHLHWEFLKRCERLLLCVISDARSIHYLPSVLATATMMHVIDQVELFNPIDYQNQLLSVLKISKEKVNDCYKLILDVSTRPQAQGNGGACKRKVEERVPSSPSGVIDAAFGSDSSSDSWGTVSLSPEQQPPFKKSRAQEQVMRLPSLNRVFVDIVGSPS

SEQ ID NO: 24317 - DNA, 966 bp, Arabidopsis thaliana
  CDS (1)..(966)
atgggtgagcctaaagacagtctcgctctcttcctctgccacgaatcggagtcttctctaaacgaagacgacgacgagacgattgagagatctgataagcaagaacctcactttactactacgatcgatgatgaagattatgtggcagaccttgttcttaaagagaatctccgattcgaaaccctaccctctaaaacgacgtcgtcttccgatagattgattgccatcgattggattctcactacaagaacaagatttgggttccaacatcaaacagcttacattgcaatctcatacttcgatctgtttctccacaaaagattcatcggtaaagatgaaacatgggcgatgcgattgttatcagtagcttgtttatcattagctgctaaaatggaggaacgtattgttcctggtttatcacaataccctcaagatcatgacttcgttttcaaacccgatgtcattcgtaaaactgaactgttgattctatccacattggactggaagatgaacttgatcactccttttcattacttcaactacttccttgctaaaatctctcaggacaaccattctgtttctaaagacttggtgttgttaagatcctctgattctcttcttgctttaactaaagagataagttttacggagtatcgacagtttgttgttgctgctgttactacattgctagcttcttcttctacctcatcggatattagattgactagagaagagatagctaacaagtttggttcgatctcttggtggacttctaatgagaatgaaaatgtatatttgtgttatcagagaacgctagagattgaggagaggaaacatatgacacctccaccggaaatagcggtttctcgcgaaccgccggcttcaggaagtggcgctaaacgccgattgtcttttgatgattctgatcaaagttctccaccagccaagagaatgcgtaggctatga

SEQ ID NO: 24318 - protein, 321 aa, Arabidopsis thaliana
MGEPKDSLALFLCHESESSLNEDDDETIERSDKQEPHFTTTIDDEDYVADLVLKENLRFETLPSKTTSSSDRLIAIDWILTTRTRFGFQHQTAYIAISYFDLFLHKRFIGKDETWAMRLLSVACLSLAAKMEERIVPGLSQYPQDHDFVFKPDVIRKTELLILSTLDWKMNLITPFHYFNYFLAKISQDNHSVSKDLVLLRSSDSLLALTKEISFTEYRQFVVAAVTTLLASSSTSSDIRLTREEIANKFGSISWWTSNENENVYLCYQRTLEIEERKHMTPPPEIAVSREPPASGSGAKRRLSFDDSDQSSPPAKRMRRL

SEQ ID NO: 24319 - DNA, 1071 bp, Oryza sativa subsp
  CDS (1)..(1071)
atgggtgttctttgcttcggcgcttccaacatcctcctctgcgcggaggacagcagcagcgtgcttggcctgggcggctttggcggcggcggcggcgaggtggcggcggagctggggtgcggcggcggtggcggctttgatttctttggcttcggtggtggtgctgtgttccccatcgactccgatgagttcgtggcgttgttggtggagaaggagatggatcatcagcctcagcgggggtatctggagaagctggagctcggtggattggagtgttcttggaggaaagatgccattgattggatttgcaaggtccattcctactacaactttggaccactcagcctttacctcgcagtgaactacctggataggttcctctcctcgtttaatctccctcatgacgaatcttggatgcaacagttgctgtcagttagttgtctatctcttgctacgaagatggaggagaccgtggtccctcttcccatggaccttcaggtttttgatgcggaatatgtgtttgaagcaaggcatattaagaggatggagcttattgtgatgaaaaccctgaaatggaggctgcaagctgtgaccccattctctttcatcggctacttcctggacaagttcaatgaagggaagccgccgagctacacgctggcatcatggtgctctgatctcacagtgggcactctgaaagactctaggttcttgtcattcagaccttctgagattgcggccgcagtggtgttagctgtgcttgctgagaatcagtttcttgtcttcaacagtgcccttggaggatctgaaatccctgtaaataaggagatggttatgagatgctatgagctgatggtagagaaggcattggtgaagaagataaggaacagcaatgcaagctcttcagttccacacagcccgatcaccgtgttggacgcggcgtgcttcagttttaggagtgatgacacaacactaggatcatcacagtcaaacagcaacaacaaagattacaacagccaggactctgctcctgcttccaagaggaggagattaaacacaacaccaatctga

SEQ ID NO: 24320 - protein, 356 aa, Oryza sativa subsp
MGVLCFGASNILLCAEDSSSVLGLGGFGGGGGEVAAELGCGGGGGFDFFGFGGGAVFPIDSDEFVALLVEKEMDHQPQRGYLEKLELGGLECSWRKDAIDWICKVHSYYNFGPLSLYLAVNYLDRFLSSFNLPHDESWMQQLLSVSCLSLATKMEETVVPLPMDLQVFDAEYVFEARHIKRMELIVMKTLKWRLQAVTPFSFIGYFLDKFNEGKPPSYTLASWCSDLTVGTLKDSRFLSFRPSEIAAAVVLAVLAENQFLVFNSALGGSEIPVNKEMVMRCYELMVEKALVKKIRNSNASSSVPHSPITVLDAACFSFRSDDTTLGSSQSNSNNKDYNSQDSAPASKRRRLNTTPI

SEQ ID NO: 24321 - DNA, 1095 bp, Oryza sativa subsp
  CDS (1)..(1095)
atggctttcgccacgctctttgactccctctactgccccgaggagcacctcgacctcttccatgacaccgccgccgacgacgacctccacctcgaccttcacctgcaccaacccccaccgccgccgccgctcctcgacgacgaccttcctgcgctgttccacgcgctcagggtgaaggaggacccgctgcgccccgccgccgacgacgacggctacggcggggtgtctgcccgggaggcggcggtcgggtgggcgctgcgcgccgtcgcgaggctcggcttctccgcgctcacggccgcgctcgccgtcgcctacctcgaccgctgcttcctcggcggcgcgctccgcctcggcgaccgcccctggatggcgcgcctcgccgccgtcgcctgcgtcgcgctcgccgccaaggtggaggagacgcgcgtgcccgtgctcctcgacctccagctctgcgccgccgaacgcgccgaccccaacgaggcctacgtgttcgaggacaagacggtgcgccgcatggagctgctggtgctctcggcgctcggatggcggatgcaccccgtgacgcccctctcctacctccaacccctcctcggcaccgcccacgccgcgcgccttcaccactgcgacaccgcattgctcgcgctgatgcccgattggaggtggcctcgccaccgcccttcggcgtgggccgccgcggcgttgctcgcgacggccggatggtgcggcggcggcggcggcgacgacgccgagctcctagccctcatcgatgcccccaaggatgagatggcagagtgcgccaagatcatctccgaggaggcggcggcggcggcggcggggggcattgtgatcggcggcgaaaataagcgcaagcgcgcggcggggctgtactcggcgccggcgagcccgagcggcgtgatcggcgcgtcggcctgcttcagctgcgacagctcgtccagcagcgtcgactcgctgttcgccgccttggagccacccggccggccgatcaagcgcggcgccgccgccgccaccaccgcggatccgcttcccgccgatgaggagagccgcgacgcctggccgccgtacgccgcatga

SEQ ID NO: 24322 - protein, 364 aa, Oryza sativa subsp
MAFATLFDSLYCPEEHLDLFHDTAADDDLHLDLHLHQPPPPPPLLDDDLPALFHALRVKEDPLRPAADDDGYGGVSAREAAVGWALRAVARLGFSALTAALAVAYLDRCFLGGALRLGDRPWMARLAAVACVALAAKVEETRVPVLLDLQLCAAERADPNEAYVFEDKTVRRMELLVLSALGWRMHPVTPLSYLQPLLGTAHAARLHHCDTALLALMPDWRWPRHRPSAWAAAALLATAGWCGGGGGDDAELLALIDAPKDEMAECAKIISEEAAAAAAGGIVIGGENKRKRAAGLYSAPASPSGVIGASACFSCDSSSSSVDSLFAALEPPGRPIKRGAAAATTADPLPADEESRDAWPPYAA

SEQ ID NO: 24323 - DNA, 1628 bp, Pisum sativum
  CDS (139)..(1293)
gtggcggccgctctagaactagtggatcagaacacaaaaacaaagagaaaaaaaaagatgaatatgaaactcttgattactctccccttctttctataatgaacaaaggaccacacaacctcttcttcattgaagaagatggcaatccatcatcaccaccaccatcatcaacaactacaccacaactctcttcttgatgctctttactgcgatgaagaaaaactcgaagaagaacaagaagacgtttcatctcaacaaagtgatgtcacaacaaacaatgacaacaacatcctagactccacttccctgttccctcttcttctcctggaacaaaacctcttctctcaagatgaagaactcaccacacttttctccaaagaaaaaacccaacaagaaacgtactacgaggatctgaaaaatgtcgtggattttgtttctctctctcaacctcgtcgtgaagctgttcaatggatgcttaaagtcaatgctcattacgccttttcacctctcactgcaacactcgctgttacttactttgataggttccttctaaccttccatttccaaaaagataagccatggatgattcagcttgttgctgttacttgcatctctttagctgctaaagttgaagaaactcaagttcctctcctcttagacctacaagtgcaagatactaaatatgtgtttgaagcaaaaactattcagagaatggagcttttgattctgtcaacactgaaatggaagatgcatcctgtgacaccacactcttttctagatcatataataacaaggcttggtttgaaaactaatcttcattgggagtttttaagacgctgtgagaatcttcttctatctgtacttttagattcaagatttgttggttgtgttccctctgtgttggctactgctacaatgctgcatgtgatagaccagattgaagagagtgatgataatggtgtggactacaaaaatcagcttcttagtattctcaaaatcaacaaggagaaagtggatgaatgttataatgctattgttgaggttactaatgaaaataattatggtcataaacgaaaatatgaacaaatccctggaagtccaagtggcgtaattgatgctgtttttagttctgatggttccaatgattcatggaaagtgggttcatcctcgtattcaacctcagagcctgtttttaagaaaacaaaaactcaagggcaaaataggaatttgtcacctcttaatagggtcattgttggaattcttgccactgctagtgctactacctctccttaatatcctctctctgtcctttataaaaaaaacaaataataaccatatgcaaaaaatctatatttatttagtatatatggttatgttgatgtttctaagatctcttcatttccaacaatgtccctaatgaatctcttgaagaggcagagacagagaaagaggcaagatgaaagaggagtgaaagaggagaggacaaagttggcaatgaagattatgtttttttttttaatttgaaggcactttttatttactattgaatggttgttctcttctagaccataccaaatttgaacatatttatatgatatttctataataaattgggataatttttgttc

SEQ ID NO: 24324 - protein, 384 aa, Pisum sativum
MAIHHHHHHHQQLHHNSLLDALYCDEEKLEEEQEDVSSQQSDVTTNNDNNILDSTSLFPLLLLEQNLFSQDEELTTLFSKEKTQQETYYEDLKNVVDFVSLSQPRREAVQWMLKVNAHYAFSPLTATLAVTYFDRFLLTFHFQKDKPWMIQLVAVTCISLAAKVEETQVPLLLDLQVQDTKYVFEAKTIQRMELLILSTLKWKMHPVTPHSFLDHIITRLGLKTNLHWEFLRRCENLLLSVLLDSRFVGCVPSVLATATMLHVIDQIEESDDNGVDYKNQLLSILKINKEKVDECYNAIVEVTNENNYGHKRKYEQIPGSPSGVIDAVFSSDGSNDSWKVGSSSYSTSEPVFKKTKTQGQNRNLSPLNRVIVGILATASATTSP

SEQ ID NO: 24325 - DNA, 1699 bp, Chenopodium rubrum
  CDS (385)..(1503)
  misc_feature (74)..(74): n is a, g, c or t
  misc_feature (1650)..(1650): n is a, g, c or t
ctacagtacacagtaccctagagcaatttcccctcctacaaaacccccccactctcttcaccacagcagtctcntcaacccaaaacccattcccaaacatcctgcttttttccctgtaatataaactttgcttatttatttttttaatttttcctaaatctacccattttttaatttttttttccattcatttcttttttgctcaatcaaaaatctgttctttttcaatctatcaaaatacccagaaaaaaaagttgaaaaatttaatcttcagattttcagtagatgcaggagaaatccattctttgaagttttttagagagagaaagagtgaattttttagagagagaaagttgaagaaagcagagctagaagcagcagaaaatggcaccaagttttgatcttttatgcgcagaggataactcaagcatttttgatgaagttgatgataattattatggggttgttgacgatgatgtccttcagatttgtaacttgcaacaacaacatgggaatctacgaaactttgatgattttacattaatattactaataataatcaaggaacacaactttgaggctttaatttctgggttttttgtggcaaatcatgagtgtttggcttccttgtttgacaatgaaagacaacattttctgggtcttgattatttgaagagattccgaaatggggatttggatttgggtgctagaaatctggttattgattggattcataaggttcaatcccactacaattttgggccactttgtgtttatctatctgtaaactacttggatcgcttcctttcggcttatgaattacctggcaaagcttggatgatgcaattgcttggggttgcttgtttatctctagctgccaaggtggatgaaactgatgttcccctcatcttagatttacaagtgagtgaaagtaagtttgtatttgaagcaaaaacaatccaaagaatggaacttttagtgttgagcactttgaagtggagaatgcaatcagtgacaccattttctttcatagactatttcctttataaactgagtggagataaaatgccatcaaaaagcctaatttttcaagccatccaactcatcctaagcacaatcaaaggaattgacttgatggaattcagaccttcagaaatagcagcagcagtggcaatttctgtaacacagcaaacccaaatagtagaattcactgataaagcattctcttttcttactgatcatgtggaaaaggagagattgatgaaatgtgttgagataatgcatgatttgagaatgagcagtagatcaaatggtgcattagcttcaacatctgtgccacagagtccaattggggtgcttgatgcttcagcatgcttaagctataaaagtgatgatacatcaacaactccatctggatcttgtggaaattctgctcatagtagccctgcttctgctccaccacccaagagaaggaagctagacaggacttctcagatcagttaggattttagaagagagaatatgaaaaaaaaaaaaagtttttttttttattaatctttttttttcttttttgggtgtgtttatgataatacattagtacaaagaaaatagacaaaaaaaaaacgagggaggaaattgtttgggaaattntcagtataagtgagctttaataaaaatttgaacaaaaaaaaaaaaaaaa

SEQ ID NO: 24326 - protein, 372 aa, Chenopodium rubrum
MAPSFDLLCAEDNSSIFDEVDDNYYGVVDDDVLQICNLQQQHGNLRNFDDFTLILLIIIKEHNFEALISGFFVANHECLASLFDNERQHFLGLDYLKRFRNGDLDLGARNLVIDWIHKVQSHYNFGPLCVYLSVNYLDRFLSAYELPGKAWMMQLLGVACLSLAAKVDETDVPLILDLQVSESKFVFEAKTIQRMELLVLSTLKWRMQSVTPFSFIDYFLYKLSGDKMPSKSLIFQAIQLILSTIKGIDLMEFRPSEIAAAVAISVTQQTQIVEFTDKAFSFLTDHVEKERLMKCVEIMHDLRMSSRSNGALASTSVPQSPIGVLDASACLSYKSDDTSTTPSGSCGNSAHSSPASAPPPKRRKLDRTSQIS

SEQ ID NO: 24327 - DNA, 1698 bp, Nicotiana tabacum
  CDS (191)..(1312)
tgtttttgagaaacgagtctctgtgtactcctcctcctatagcttttctctcttcttctcttcacacctcccacaacacacaatcagacaaaatagagaggaaaatgagtatggtgaaaaagctttgttttgtataatgagaaaaagagatttatatacatctcttcttctacttccttcttactagaagatggcaatagaacacaatgagcaacaagaactatctcaatcttttcttttagatgctctttactgtgaagaagaagaagaaaaatggggagatttagtagatgatgagactattattacaccactctcttcagaagtaacaacaacaacaacaacaacaacaaagcctaattctttattacctttgcttttgttggaacaagatttattttgggaagatgaagagcttctttcacttttctctaaagaaaaagaaacccattgttggtttaacagttttcaagatgactctttacactgttctgcccgtgttgattctgtggaatggattttaaaagtgaatggttattatggtttctctgctttgactgccgttttagccataaattactttgacaggtttctgactagtcttcattatcagaaagataaaccttggatgattcaacttgctgctgttacttgtctttctttagctgctaaagttgaagaaactcaagttcctcttcttttagattttcaagtggaggatgctaaatatgtgtttgaggcaaaaactattcaaagaatggagcttttagtgttgtcttcactaaaatggaggatgaatccagtgaccccactttcatttcttgatcatattataaggaggcttgggctaagaaataatattcactgggaatttcttagaagatgtgaaaatctcctcctctctattatggctgattgtagattcgtacgttatatgccgtctgtattggccactgcaattatgcttcacgttattcatcaagttgagccttgtaattctgttgactaccaaaatcaacttcttggggttctcaaaattaacaaggagaaagtgaataattgctttgaactcatatcagaagtgtgttctaagcccatttcacacaaacgcaaatatgagaatcctagtcatagcccaagtggtgtaattgatccaatttacagttcagaaagttcaaatgattcatgggatttggagtcaacatcttcatattttcctgttttcaagaaaagcagagtacaagaacagcaaatgaaattggcatcttcaattagcagagtttttgtggaagctgttggtagtcctcattaaaatcaatcacctgatttatctcttttctttcttattaccaactatggtggtaataatatttattgatattcagaagtatttacctttaatgtcattttcaaaaattacatgaaaatggaaaaaaagaaaagaagagcttagctggtggttgcagttggcagagaagaggactggctttttttttgcaggagtgtagtctactactactgggaaagcagagatagagagaggagaaaagacagaaaatctgcactatttgttttttctctattcatatcaattctctcttaggtccttttcatgcatgcatacttttgatggacatattttatatatttactataatcataaattcttgaatattttgttaaaaaaaaaaaaaaaaa

SEQ ID NO: 24328 - protein, 373 aa, Nicotiana tabacum
MAIEHNEQQELSQSFLLDALYCEEEEEKWGDLVDDETIITPLSSEVTTTTTTTTKPNSLLPLLLLEQDLFWEDEELLSLFSKEKETHCWFNSFQDDSLHCSARVDSVEWILKVNGYYGFSALTAVLAINYFDRFLTSLHYQKDKPWMIQLAAVTCLSLAAKVEETQVPLLLDFQVEDAKYVFEAKTIQRMELLVLSSLKWRMNPVTPLSFLDHIIRRLGLRNNIHWEFLRRCENLLLSIMADCRFVRYMPSVLATAIMLHVIHQVEPCNSVDYQNQLLGVLKINKEKVNNCFELISEVCSKPISHKRKYENPSHSPSGVIDPIYSSESSNDSWDLESTSSYFPVFKKSRVQEQQMKLASSISRVFVEAVGSPH

SEQ ID NO: 24329 - DNA, 1699 bp, Nicotiana tabacum
  CDS (223)..(1332)
tgtttttgagaaacgagtctctgagtagtactcctcctatagcttttctctcttcttcactcttcttcccttcacacctcccacaacacacaatcagacaaaaaagagaaaaaaatagagatacaagaacatgaaaatgagtatggtgaaaaagttctgttttgtataatgagaaaaagagatttatatacatctcttcttctactcccttcttactagaagatggcaatagaaaacaatgagcaacaagaactatctcaatctttccttttagatgctctatactgtgaagaagaagaagaaaaatggggagatttattagatgatgagactattattacaccactctcttcagaactaacaacaacaacaaagcctaattctttattgcctttgcttttgttggaacaagatttgttttgggaagatgaagagcttctttcacttttctctaaagaaaaagaaacccattgttggtttaacagttttcaagatgaccctttactctgttcagctcgtgtagatgctgtggaatggattttaaaagtgaatggttattatggtttctctgctttgactgccattttagcaatcaattactttgacaggtttttgactagtcttcattatcagaaagataagccttggatgattcaacttgctgctgttacttgtctttctttagctgctaaagttgaagaaactcaagttcctcttcttttagactttcaagtggaggatgctaaatatgtgtttgaggcaaaaactattcaaagaatggagcttttggtgttgtcttcactaaaatggaggatgaatccagtgaccccactttcatttcttgatcatattataaggaggcttgggctaaagaataatgttcactgggaatttcttagaagatgtgaaagtctccttctctctattatggctgattgtagattcgtacgttatatgccgtctgtattagccactgcaattatgctccacgttattcatcaagttgagccttgtaattctgttgaataccaaaatcaacttcttggggttctcaaaattagcaaggagaaagtgaataattgctttgaactcatctcagaagtttgttctaagcccatttcacacaaacgcaaatatgagaatccaagtagtagcccaagtggtgtaattgatccaatttacagctcagaaagttcaaatgattcgtgggatttggagtcaacatcttcatattttcctgttttcaagaaaagcagagtacaagaacagcaaatgaaattggcatcttcaattagcagagtttttgtggaagctgttggcagtcctcattaaaatcaatcacctaatttatcttctctttcttattaccaactatggtggtaataatatttattctattcagaagtatttacctttaatgtccttttccaaaaattacatgataatggaaaaaaaagagaaaaagagcttagctggtggttgcagttggcagagaagaggactggcttttttgcagcagtgtagtctactactggaaagcaaagagagaggagaaaagacagaaaatctgcactatttgttttttctctattcatatcaatcctctcttaggtccttttcatgcatgcatacttttgatggacatattttatatatttactataatcataaattcttgaataaaaaaaaaaaaaaaaaa

SEQ ID NO: 24330 - protein, 369 aa, Nicotiana tabacum
MAIENNEQQELSQSFLLDALYCEEEEEKWGDLLDDETIITPLSSELTTTTKPNSLLPLLLLEQDLFWEDEELLSLFSKEKETHCWFNSFQDDPLLCSARVDAVEWILKVNGYYGFSALTAILAINYFDRFLTSLHYQKDKPWMIQLAAVTCLSLAAKVEETQVPLLLDFQVEDAKYVFEAKTIQRMELLVLSSLKWRMNPVTPLSFLDHIIRRLGLKNNVHWEFLRRCESLLLSIMADCRFVRYMPSVLATAIMLHVIHQVEPCNSVEYQNQLLGVLKISKEKVNNCFELISEVCSKPISHKRKYENPSSSPSGVIDPIYSSESSNDSWDLESTSSYFPVFKKSRVQEQQMKLASSISRVFVEAVGSPH

SEQ ID NO: 24331 - DNA, 1119 bp, Camellia sinensis
  CDS (1)..(1119)
atgaagaggatgtctccttacccagagcaagactcacatctacagaacccaatgtttgtctttgacggtctctactgtgaagaagagcattttgaggatgatttgggagagtatggtttggaacaagggagtgacaactgcgatgagaatgtgaaaggacctttagttttcttggaacatgactgggattgggatgatgatgagcttgtttctttaatttccaaagagaaagagacccatttgggtctgagtgttttgaactcagacgagtccttaatggtggcaaggagagaatctgttgattggattttaagggtcattgctcactatggtttcactgttttgaccactgttttagcagttaactactttgatagattcatttcaagcctttcatttcagagagagaagccatggatgagtcaacttgttgctgttgcttgtctctctttagctgccaaagttgaggagacccaagtgccccttctcttagacttccaagtggaggaatcaaagtttgtgtttgaagccaagacaatccagagaatggagcttctggtgctatctactcttcaatggaagatgaatcctgtgaccccactttcatttgttgatcacattgtgaggaggtttggatttaagacaaatttgcatttggagtttctgtggaggtgtgagcgccttcttctctctgccatcactgattcaaggtttgggtgttatcttccttctgtattggctgctgcaacaatgttacatgttatcaaagaggttgagccttctaatgtattggactgtcaaaatgagcttatggatgttctcaaaatgagcaaggacaaagtagatgattgctacaaactcatcctcgaactgcctggcaacaacagtcaaatgcaatgccaaacccacaagcgcaagtatcagtccatacccaacagcccaaatggtgtcatcgatgtgaatttcagctgcgatagctcgaacgattcttgggcagtgacatcctcagtttcatcatcaccagaacccctgttcaagaagagcagagttcatggtcagcagatgagattggctccattaaggcatatgtctgtgggtgtagttggcagccctcgttaa

SEQ ID NO: 24332 - protein, 372 aa, Camellia sinensis
MKRMSPYPEQDSHLQNPMFVFDGLYCEEEHFEDDLGEYGLEQGSDNCDENVKGPLVFLEHDWDWDDDELVSLISKEKETHLGLSVLNSDESLMVARRESVDWILRVIAHYGFTVLTTVLAVNYFDRFISSLSFQREKPWMSQLVAVACLSLAAKVEETQVPLLLDFQVEESKFVFEAKTIQRMELLVLSTLQWKMNPVTPLSFVDHIVRRFGFKTNLHLEFLWRCERLLLSAITDSRFGCYLPSVLAAATMLHVIKEVEPSNVLDCQNELMDVLKMSKDKVDDCYKLILELPGNNSQMQCQTHKRKYQSIPNSPNGVIDVNFSCDSSNDSWAVTSSVSSSPEPLFKKSRVHGQQMRLAPLRHMSVGVVGSPR

SEQ ID NO: 24333 - DNA, 1116 bp, Camellia sinensis
  CDS (1)..(1116)
atggctcaaccccaaccccaaccccaaccccaaccccaacaacagcaacaaaatcttccatttgttttagatgctctgtattgccaagaacaacatttggagggaggagagacagaggactacttcgattcagaagaggaagattgtcattacagtgataatattgttagccctaagcctccacagctactggaacaagacctgttctgggaagacgaagagttgacctctttgctgtcaaaagaacaagaaaaccccttattccatagtctcgaaacagacccatctttgggtggggctcggagagccgccgtggagtggttgctgaaggtcaacgcccactactcattctctgctctcacggcggtcctcgccgtgaactacctcgataggttcctcttcagcttccatttccagagagagaaaccatggatgacccaacttgctgctgtggcttgtctctctcttgctgccaaagttgaggagactgaagtcccactcctattagacctccaggtggaagatagtaggtatgtttttgaggctaaaacaattcagagaatggagatgctgatactatcaactcttcaatggaagatgaatcctgtgactccactctcatttcttgatcacattacaaggaggttaggtttgaagaacagactttgttgtgaatttctcaagagatgcgagtcaatcctcctctgtatcatttctgattctaggttcatgctttatcttccctccgtattatccactgccacaatgctgctcgtttttagtagtctagagccctgtctcgcagtagaataccaaaaccaactcttgggtattcttcaaatcgacaaggacaaagtggaggattgctataagttaatgctagaatcaacatcaggaattcaccaatccaacaaacgaaagttccgatcaatgccgggcagcccaaattgtgtcacagatgtttgtttcagctccgacagctcgaacgactcgtgggccgtgacatcctcggcatctgcttcggcgtcggtctgttcctcgccggagccattgtcaaagaagagcagagctcaggaccataatgcaactgcagatattctgagcttccattgctag

SEQ ID NO: 24334 - protein, 371 aa, Camellia sinensis
MAQPQPQPQPQPQQQQQNLPFVLDALYCQEQHLEGGETEDYFDSEEEDCHYSDNIVSPKPPQLLEQDLFWEDEELTSLLSKEQENPLFHSLETDPSLGGARRAAVEWLLKVNAHYSFSALTAVLAVNYLDRFLFSFHFQREKPWMTQLAAVACLSLAAKVEETEVPLLLDLQVEDSRYVFEAKTIQRMEMLILSTLQWKMNPVTPLSFLDHITRRLGLKNRLCCEFLKRCESILLCIISDSRFMLYLPSVLSTATMLLVFSSLEPCLAVEYQNQLLGILQIDKDKVEDCYKLMLESTSGIHQSNKRKFRSMPGSPNCVTDVCFSSDSSNDSWAVTSSASASASVCSSPEPLSKKSRAQDHNATADILSFHC

SEQ ID NO: 24335 - DNA, 1068 bp, Zea mays
  CDS (1)..(1068)
atggtgcctggctatgactgcgccgcctccgtgctgctgtgcgcggaggacaacgctgctgttctcggcctggacgacgagtcctcttgggcggccgcagctacgccgccacgcgacaccgtcgtcgccgccgccgccgccggggttgccgtcgacgggttcttgacggagttccccttgctctcggatgactgcgttgcggcgctcgtggagaaggaggtggagcacatgcccgcggaggggtacctccagaagctgcagcgacggcatggggacctggatttggccgccgtcaggaaggatgccgtcgactggatttggaaggtcattgaacattacagtttcgcaccgttgactgcagttctgtctgtgaactacctcgatagattcctctccacctatgactttcctgaaggcagagcttggatgactcagctcttagcagtggcatgcttgtctttggcttcgaaaatagaagagacttttgtgccactccccttggatttgcaggtagccgaggcaaagtttgtttttgagggaaggaccattaaaaggatggagcttctggtgctacgcaccttaaagtggaggatgcatgctgttactgcttgttcatttgttgaatactttcttcataaattgagtgaccatggtgcaccctccttgcttgcgcgctctcgctcttccgaccttgtcttgagcactgctaaaggtgctgaattcgtggtattcagaccctcagagattgctgccagtgttgctcttgcggcgatcggggaatgcagcagttctgtaattgagagagctgctactagctgcaactatttggacaaggagagggttttaagatgtcatgaaatgattcaagagaagattgctgtgggaagcattgtcctaaagtctgctggatcatcaatttcctctgtgccacgaagccccataggcgtcctggatgccgctgcctgtctgagtcaacaaagcgatgatgctactgttggatctcctgcagtatgctaccatagttcttccacgagcaagagaagaaggatcactagacgtctactctag

SEQ ID NO: 24336 - protein, 355 aa, Zea mays
MVPGYDCAASVLLCAEDNAAVLGLDDESSWAAAATPPRDTVVAAAAAGVAVDGFLTEFPLLSDDCVAALVEKEVEHMPAEGYLQKLQRRHGDLDLAAVRKDAVDWIWKVIEHYSFAPLTAVLSVNYLDRFLSTYDFPEGRAWMTQLLAVACLSLASKIEETFVPLPLDLQVAEAKFVFEGRTIKRMELLVLRTLKWRMHAVTACSFVEYFLHKLSDHGAPSLLARSRSSDLVLSTAKGAEFVVFRPSEIAASVALAAIGECSSSVIERAATSCNYLDKERVLRCHEMIQEKIAVGSIVLKSAGSSISSVPRSPIGVLDAAACLSQQSDDATVGSPAVCYHSSSTSKRRRITRRLL

SEQ ID NO: 24337 - DNA, 1861 bp, Medicago sativa
  CDS (243)..(1403)
gaattcggcacgagctcttctgctacgactacctctccctatactctctactctttctagttctactacttttctttctttctctgttctctctctcttcttcatttcttcacattttcacacacacagagaagacagaacaaagaggaaaagagagagcgatggatgtgagactcttcagtactgtttccttctttttataatgaacaaaggaccacacaccctcttcttcactgaagaagatggctatccatcatcatcatcacaatcaccaacaacttcaacaacacacttcttctctttttgatgcactttactgtgatgaagaagaaaaatgggaagatgatgatgaaggagaagttgtagatgaaggagcacaaagtgatgtcacaacaacaaactatgatatattggactctacttcccttttacctctgcttttgttagaacagaacttgttcaatgaagatgaagaactcaacactcttttctccaaagagataactcaacaagaaacatattacgaggatctgaaaaatgtgatcaactttgactcactctctcaaccacgtcgtgaagctgttgaatggatgcttaaagtcaatgctcattatggtttctctgctctcactgcaacacttgctgttaactatcttgataggtttcttttaagcttccatttccaaaaagagaaaccatggatgattcagcttgttgctgttacttgcatctctttagctgctaaagttgaagaaactcaagttcctcttctcttagaccttcaagtgcaagatactaaatatgtgtttgaggcaaagactattcagagaatggagctattgattctgtcaacactgaaatggaagatgcatccagtgacaacacactcttttctagatcacattataagaaggcttggattgaaaactaatcttcattgggagtttcttaggcgctgtgagaatcttcttctatctgtacttttagattcaagatttgttggttgtgttccttctgtgttggccactgctacaatgttgcatgttatagaccagattgaacagagtgatgataatggtgtggattacaaaaatcagcttcttaatgttctcaaaatcagcaaggagaaagttgatgaatgttataatgcgattcttcatcttacaaatgcaaataattatggtcataaacgaaaatatgaagaaatccctggtagtccaagtggcgtaattgatgctgtttttagttctgatggttctaacgattcgtggacagtgggagcatcatcatattcaacctcagagcctgtgtttaagaagaccaagaatcaaggacaaaatatgaatttgtcaccgattaacagggtcattgtcggaattcttgccactgcaacctctccttaaaaccctctatccgttttctgtcctttttatttaaaaaaaaataaccatataaaaaattacccccaaaaaaaagatctatatttatttactatggttatgttcatgttgctactaaactctagttagtttagtagtctttctttctatctcttcatttccaacaatgtcccaaattcatttacatgaatctcttgaagaggcagtggcaagatgatgatagaggattaaaggaatggttaatttctgatgagttaaaaaggaaaggacaaagttggcaatgaagatttttattactatgagcagaaaagaaccctatgatatctgtttcatttcaaggcactgtttttttattttattcaatggttctcttctagaccatacccaatttggacatatttatatcatatttctataataaattgggaataatttttggtccaaaaaaaaaaaaaaaaaaa
